(19) United States
(12) Patent Application Publication
(10) Pub. No.: US 2007/0061916 A1
(43) Pub. Date: Mar. 15, 2007

(54) Nucleic acid molecules and other molecules associated with plants and uses thereof for plant improvement

(76) Inventors: David K. Kovalic, University City, MO (US); Yihua Zhou, Ballwin, MO (US); Yongwei Cao, Chesterfield, MO (US)

Correspondence Address: ARNOLD & PORTER LLP;ATTN: IP DOCKETING DEPT., 555 TWELFTH STREET, N.W., WASHINGTON, DC, 20004-1206, US

(21) Appl. No.: 11/486,448

(22) Filed: Jul. 14, 2006

Related U.S. Application Data
(63) Continuation of application No. 10/767,795, filed on Jan. 29, 2004, now abandoned.
Application No. 10/767,795 is a continuation-in-part of application No. 10/021,323, filed on Dec. 12, 2001, now abandoned.
Application No. 10/767,795 is a continuation-in-part of application No. 09/849,529, filed on May 7, 2001, now abandoned.

(51) Int. Cl. A01H 1/00; C07H 21/04; C12N 15/82

(52) U.S. Cl. 800/278; 536/23.6

(57) ABSTRACT

Recombinant polynucleotides and recombinant polypeptides useful for improvement of plants are provided. The disclosed recombinant polynucleotides and recombinant polypeptides find use in production of transgenic plants to produce plants having improved properties.

[0001] This application is a continuation application under 35 U.S.C. § 121 of U.S. application Ser. No. 10/767,795, filed Jan. 29, 2004, which claims the benefit of and is a continuation in part of prior U.S. application Ser. No. 10/021,323 filed Dec. 12, 2001, and prior U.S. application Ser. No. 09/849,529 filed May 7, 2001, both of which are hereby incorporated by reference in their entirety.

### INCORPORATION OF SEQUENCE LISTING

[0002] Two copies of the sequence listing (Seq. Listing Copy 1 and Seq. Listing Copy 2) and a computer-readable form of the sequence listing, all on CD-ROMs, each containing the file named pa_{—}00622.rpt, which is 112,105,472 bytes (measured in MS-DOS) and was created on Jul. 14, 2006, are herein incorporated by reference.

### INCORPORATION OF COMPUTER PROGRAM LISTING

[0003] Computer Program Listing file named pa_{—}00622.txt, which is 16,633,856 bytes (measured in MS-DOS) which contains Table 1, was created on Jul. 14, 2006 is contained on CD-ROM, and is herein incorporated by reference.

### FIELD OF THE INVENTION

[0004] Disclosed herein are inventions in the field of plant biochemistry and genetics. More specifically recombinant polynucleotides and recombinant polypeptides from Gossypium hirsutum (cotton) for use in plant improvement are provided. Methods of using the recombinant polynucleotides and recombinant polypeptides for production of transgenic plants with improved biological characteristics are disclosed.

### BACKGROUND OF THE INVENTION

[0005] The ability to develop transgenic plants with improved traits depends in part on the identification of polynucleotides that are useful for the production of transformed plants having desirable qualities. In this regard, the discovery of polynucleotide sequences of genes, and the polypeptides encoded by such genes, is needed. Molecules comprising such polynucleotides may be used, for example, in recombinant DNA constructs useful for imparting unique genetic properties into transgenic plants.

### SUMMARY OF THE INVENTION

[0006] The present invention provides a recombinant polynucleotide selected from the group consisting of SEQ ID NO: 1 through SEQ ID NO: 58,798. The present invention also provides a recombinant polypeptide selected from the group consisting of SEQ ID NO: 58,799 through SEQ ID NO: 117,596.

[0007] The present invention also provides a method of producing a plant having an improved property, wherein said method comprises transforming a plant with a recombinant construct comprising a promoter region functional in a plant cell operably joined to a polynucleotide comprising a coding sequence for a polypeptide associated with said property, and growing said transformed plant.

### DETAILED DESCRIPTION OF THE INVENTION

[0008] The present invention provides recombinant polynucleotides and recombinant polypeptides from Gossypium hirsutum. The recombinant polynucleotides and recombinant polypeptides of the present invention find a number of uses, for example in recombinant DNA constructs, in physical arrays of molecules, for use as plant breeding markers, and for use in computer based storage and analysis systems.

[0009] The recombinant polynucleotides of the present invention also find use in generation of transgenic plants to provide for increased or decreased expression of the polypeptides encoded by the recombinant polynucleotides provided herein. As used herein a “transgenic” organism is one whose genome has been altered by the incorporation of foreign genetic material or additional copies of native genetic material, e.g. by transformation or recombination. As a result of such biotechnological applications, plants, particularly crop plants, having improved properties are obtained. Crop plants of interest in the present invention include, but are not limited to soy, cotton, canola, maize, wheat, sunflower, sorghum, alfalfa, barley, millet, rice, tobacco, fruit and vegetable crops, and turf grass. In one embodiment the disclosed recombinant polynucleotides provide plants having improved yield resulting from improved utilization of key biochemical compounds, such as nitrogen, phosphorous and carbohydrate, or resulting from improved responses to environmental stresses, such as cold, heat, drought, salt, and attack by pests or pathogens. Recombinant polynucleotides of the present invention may be used to provide plants having improved growth and development, and ultimately increased yield, as the result of modified expression of plant growth regulators or modification of cell cycle or photosynthesis pathways. Other traits of interest that may be modified in plants using polynucleotides of the present invention include flavonoid content, seed oil and protein quantity and quality, herbicide tolerance, and rate of homologous recombination.

Polynucleotides

[0010] Depending on the intended use, the recombinant polynucleotides of the present invention may be present in the form of DNA, such as cDNA or genomic DNA, or as RNA, for example mRNA. The polynucleotides of the present invention may be single or double stranded and may represent the coding, or sense strand of a gene, or the non-coding, antisense, strand. In one embodiment, the recombinant polynucleotides of this invention represent cDNA sequences from Gossypium hirsutum. DNA sequences representing the recombinant polynucleotides are provided herein as SEQ ID NO: 1 through SEQ ID NO: 58798.

[0011] The term “recombinant polynucleotide” as used herein refers to a polynucleotide produced by recombinant DNA technology. In one embodiment a recombinant polynucleotide may be produced by separation from substantially all other molecules normally associated with it in its native state. A recombinant polynucleotide may be greater than 60% free, greater than 75% free, greater than 90% free, or greater than 95% free from the other molecules (exclusive of solvent) present in the natural mixture. In another embodiment, a recombinant polynucleotide may be separated from nucleic acids which normally flank the polynucleotide in nature. Thus, polynucleotides fused to regulatory or coding sequences with which they are not normally associated, for example as the result of recombinant techniques, are considered recombinant polynucleotides herein. Such molecules are considered recombinant polynucleotides even when present, for example in the chromosome of a host cell, or in a nucleic acid solution. The term recombinant polynucleotide as used herein is not intended to encompass molecules present in their native state.

[0012] It is understood that the molecules of the invention may be labeled with reagents that facilitate detection of the molecule. As used herein, a label can be any reagent that facilitates detection, including fluorescent labels, chemical labels, or modified bases, including nucleotides with radioactive elements, e.g. ³²P, ³³P, ³⁵S or ¹²⁵I such as ³²P deoxycytidine-5′-triphosphate (³²PdCTP).

[0013] Recombinant polynucleotides of the present invention are capable of specifically hybridizing to other polynucleotides under certain circumstances. As used herein, two polynucleotides are said to be capable of specifically hybridizing to one another if the two molecules are capable of forming an anti-parallel, double-stranded nucleic acid structure. A polynucleotide is said to be the “complement” of another polynucleotide if the molecules exhibit complete complementarity. As used herein, molecules are said to exhibit “complete complementarity” when every nucleotide in each of the polynucleotides is complementary to the corresponding nucleotide of the other. Two polynucleotides are said to be “minimally complementary” if they can hybridize to one another with sufficient stability to permit them to remain annealed to one another under at least conventional “low-stringency” conditions. Similarly, the polynucleotides are said to be “complementary” if they can hybridize to one another with sufficient stability to permit them to remain annealed to one another under conventional “high-stringency” conditions. Conventional stringency conditions are known to those skilled in the art and can be found, for example in Molecular Cloning: A Laboratory Manual, 3^{rd} edition Volumes 1, 2, and 3. J. F. Sambrook, D. W. Russell, and N. Irwin, Cold Spring Harbor Laboratory Press, 2000.

[0014] Departures from complete complementarity are therefore permissible, as long as such departures do not completely preclude the capacity of the polynucleotides to form a double-stranded structure. Thus, in order for a polynucleotide to serve as a primer or probe it need only be sufficiently complementary in sequence to be able to form a stable double-stranded structure under the particular solvent and salt concentrations employed. Appropriate stringency conditions which promote DNA hybridization are, for example, 6.0× sodium chloride/sodium citrate (SSC) at about 45° C., followed by a wash of 2.0×SSC at 50° C. Such conditions are known to those skilled in the art and can be found, for example in Current Protocols in Molecular Biology, John Wiley & Sons, N.Y. (1989). Salt concentration and temperature in the wash step can be adjusted to alter hybridization stringency. For example, conditions may vary from low stringency of about 2.0×SSC at 40° C. to moderately stringent conditions of about 2.0×SSC at 50° C. to high stringency conditions of about 0.2×SSC at 50° C.

[0015] As used herein “sequence identity” refers to the extent to which two optimally aligned polynucleotides or polypeptide sequences are invariant throughout a window of alignment of components, e.g. nucleotides or amino acids. An “identity fraction” for aligned segments of a test sequence and a reference sequence is the number of identical components which are shared by the two aligned sequences divided by the total number of components in the reference sequence segment, i.e. the entire reference sequence or a smaller defined part of the reference sequence. “Percent identity” is the identity fraction times 100. Comparison of sequences to determine percent identity can be accomplished by a number of well-known methods, including for example by using mathematical algorithms, such as those in the BLAST suite of sequence analysis programs.

[0016] In one embodiment this invention provides recombinant polynucleotides comprising regions that encode polypeptides. The encoded polypeptides may be the complete protein encoded by the gene represented by the polynucleotide, or may be fragments of the encoded protein. In one embodiment, polynucleotides provided herein encode polypeptides constituting a substantial portion of the complete protein. In another embodiment polynucleotides provided herein encode polypeptides constituting a sufficient portion of the complete protein to provide the relevant biological activity.

[0017] In one embodiment recombinant polynucleotides of the present invention encode polypeptides involved in one or more important biological function in plants. Such recombinant polynucleotides may be expressed in transgenic plants to produce plants having improved phenotypic properties and/or improved response to stressful environmental conditions. See, for example, Table 1 for a list of SEQ ID numbers representing the recombinant polynucleotides that may be expressed in transgenic plants to impart an improved plant property where improved plant properties are provided for each sequence in the PRODUCT_CAT_DESC column.

[0018] Recombinant polynucleotides of the present invention are generally used to impart such improved properties by providing for enhanced protein activity in a transgenic organism, such as a transgenic plant, although in some cases, improved properties are obtained by providing for reduced protein activity in a transgenic plant. Reduced protein activity and enhanced protein activity are measured by reference to a wild type cell or organism and can be determined by direct or indirect measurement. Direct measurement of protein activity might include an analytical assay for the protein, per se, or enzymatic product of protein activity. Indirect assay might include measurement of a property affected by the protein. Enhanced protein activity can be achieved in a number of ways, for example by overproduction of mRNA encoding the protein or by gene shuffling. One skilled in the art will know methods to achieve overproduction of mRNA, for example by providing increased recombinant copies of a gene or by introducing a recombinant construct having a heterologous promoter operably linked to a recombinant polynucleotide encoding a polypeptide into a target cell or organism. Reduced protein activity can be achieved by a variety of mechanisms including antisense, mutation, or knockout. Antisense RNA will reduce the level of expressed protein resulting in reduced protein activity as compared to wild type activity levels. A mutation in the gene encoding a protein may reduce the level of expressed protein and/or interfere with the function of expressed protein to cause reduced protein activity.

[0019] In one embodiment, the invention is a fragment of a disclosed recombinant polynucleotide consisting of oligonucleotides of at least 15, at least 16 or 17, at least 18 or 19, or at least 20 or more consecutive nucleotides. Such oligonucleotides are fragments of the larger recombinant polynucleotides having a sequence selected from the group consisting of SEQ ID NO: 1 through SEQ ID NO: 58,798, and find use, for example as probes and primers for detection of the polynucleotides of the present invention.

[0020] In one embodiment the present invention is a functional variant of a recombinant polynucleotide provided herein. As used herein, a “functional variant” refers to any second polynucleotide varying from a first polynucleotide sequence in such a way so as not to significantly affect the function when compared to the function of the first polynucleotide. Such functional variants may be naturally occurring, including homologous polynucleotides from the same or a different species, or may be non-natural functional variants, for example polynucleotides synthesized using chemical synthesis methods, or generated using recombinant DNA techniques. With respect to nucleotide sequences, degeneracy of the genetic code provides the possibility to substitute at least one base of the protein encoding sequence of a gene with a different base without causing the amino acid sequence of the polypeptide produced from the gene to be changed. Hence, in one embodiment, a recombinant polynucleotide of the present invention may have any base sequence that has been changed from SEQ ID NO: 1 through SEQ ID NO: 58,798 by substitution in accordance with degeneracy of the genetic code. See for example, U.S. Pat. No. 5,500,365, which is hereby incorporated by reference.

[0021] Polynucleotides of the present invention that are functional variants of the polynucleotides provided herein will generally demonstrate significant identity with the polynucleotides provided herein. Of particular interest are polynucleotide homologs having at least about 60% sequence identity, at least about 70% sequence identity, at least about 80% sequence identity, at least about 85% sequence identity, and at least about 90%, 95% or even greater, such as 98% or 99% sequence identity with polynucleotide sequences described herein.

Polypeptides

[0022] In one embodiment this invention also provides recombinant polypeptides. Amino acid sequences of the recombinant polypeptides of the present invention are provided herein as SEQ ID NO: 58,799 through SEQ ID NO: 117,596.

[0023] As used herein, the term “polypeptide” refers to an unbranched chain of amino acid residues that are covalently linked by an amide linkage between the carboxyl group of one amino acid and the amino group of another. The term polypeptide can encompass whole proteins (i.e. a functional protein encoded by a particular gene), as well as fragments of proteins. In one embodiment the invention is a recombinant polypeptide which represents a whole protein. In another embodiment the invention is a recombinant polypeptide which represents a sufficient portion of an entire protein to impart the relevant biological activity of the protein. The term “protein” also includes molecules consisting of one or more polypeptide chains. Thus, a recombinant polypeptide of the present invention may also constitute an entire gene product, but only a portion of a functional oligomeric protein having multiple polypeptide chains.

[0024] As used herein, the term “recombinant polypeptide” refers to a polypeptide produced as a result of recombinant DNA technology. The term recombinant polypeptide as used herein is not intended to encompass molecules present in their native state.

[0025] In one embodiment the invention is a recombinant polypeptide involved in one or more important biological properties in a plant. Such recombinant polypeptide may be produced in transgenic plants to provide plants having improved phenotypic properties and/or improved response to stressful environmental conditions. In some cases, decreased expression of such polypeptide may be desired, such decreased expression being obtained by use of the polynucleotide sequences provided herein, for example in antisense or cosuppression methods. See, Table 1 for a list of improved plant properties and PROTEIN_NUM for the recombinant polypeptide whose expression may be altered in transgenic plants to impart such improvements. A summary of such improved properties and polypeptides of interest for increased or decreased expression is provided below.

[0026] Yield/Nitrogen: Yield improvement by improved nitrogen flow, sensing, uptake, storage and/or transport. Polypeptides useful for imparting such properties include those involved in aspartate and glutamate biosynthesis, polypeptides involved in aspartate and glutamate transport, polypeptides associated with the TOR (Target of Rapamycin) pathway, nitrate transporters, ammonium transporters, chlorate transporters and polypeptides involved in tetrapyrrole biosynthesis.

[0027] Yield/Carbohydrate: Yield improvement by effects on carbohydrate metabolism, for example by increased sucrose production and/or transport. Polypeptides useful for improved yield by effects on carbohydrate metabolism include polypeptides involved in sucrose or starch metabolism, carbon assimilation or carbohydrate transport, including, for example sucrose transporters or glucose/hexose transporters, enzymes involved in glycolysis/gluconeogenesis, the pentose phosphate cycle, or raffinose biosynthesis, and polypeptides involved in glucose signaling, such as SNF1 complex proteins.

[0028] Yield/Photosynthesis: Yield improvement resulting from increased photosynthesis. Polypeptides useful for increasing the rate of photosynthesis include phytochrome, photosystem I and II proteins, electron carriers, ATP synthase, NADH dehydrogenase and cytochrome oxidase.

[0029] Yield/Phosphorus: Yield improvement resulting from increased phosphorus uptake, transport or utilization. Polypeptides useful for improving yield in this manner include phosphatases and phosphate transporters.

[0030] Yield/Stress tolerance: Yield improvement resulting from improved plant growth and development by helping plants to tolerate stressful growth conditions. Polypeptides useful for improved stress tolerance under a variety of stress conditions include polypeptides involved in gene regulation, such as serine/threonine-protein kinases, MAP kinases, MAP kinase kinases, and MAP kinase kinase kinases; polypeptides that act as receptors for signal transduction and regulation, such as receptor protein kinases; intracellular signaling proteins, such as protein phosphatases, GTP binding proteins, and phospholipid signaling proteins; polypeptides involved in arginine biosynthesis; polypeptides involved in ATP metabolism, including for example ATPase, adenylate transporters, and polypeptides involved in ATP synthesis and transport; polypeptides involved in glycine betaine, jasmonic acid, flavonoid or steroid biosynthesis; and hemoglobin. Enhanced or reduced activity of such polypeptides in transgenic plants will provide changes in the ability of a plant to respond to a variety of environmental stresses, such as chemical stress, drought stress and pest stress.

[0031] Cold tolerance: Polypeptides of interest for improving plant tolerance to cold or freezing temperatures include polypeptides involved in biosynthesis of trehalose or raffinose, polypeptides encoded by cold induced genes, fatty acyl desaturases and other polypeptides involved in glycerolipid or membrane lipid biosynthesis, which find use in modification of membrane fatty acid composition, alternative oxidase, calcium-dependent protein kinases, LEA proteins and uncoupling protein.

[0032] Heat tolerance: Polypeptides of interest for improving plant tolerance to heat include polypeptides involved in biosynthesis of trehalose, polypeptides involved in glycerolipid biosynthesis or membrane lipid metabolism (for altering membrane fatty acid composition), heat shock proteins and mitochondrial NDK.

[0033] Osmotic tolerance: Polypeptides of interest for improving plant tolerance to extreme osmotic conditions include polypeptides involved in proline biosynthesis.

[0034] Drought tolerance: Polypeptides of interest for improving plant tolerance to drought conditions include aquaporins, polypeptides involved in biosynthesis of trehalose or wax, LEA proteins and invertase.

[0035] Pathogen or pest tolerance: Polypeptides of interest for improving plant tolerance to effects of plant pests or pathogens include proteases, polypeptides involved in anthocyanin biosynthesis, polypeptides involved in cell wall metabolism, including cellulases, glucosidases, pectin methylesterase, pectinase, polygalacturonase, chitinase, chitosanase, and cellulose synthase, and polypeptides involved in biosynthesis of terpenoids or indole for production of bioactive metabolites to provide defense against herbivorous insects.

[0036] Cell cycle modification: Polypeptides encoding cell cycle enzymes and regulators of the cell cycle pathway are useful for manipulating growth rate in plants to provide early vigor and accelerated maturation leading to improved yield. Improvements in quality traits, such as seed oil content, may also be obtained by expression of cell cycle enzymes and cell cycle regulators. Polypeptides of interest for modification of cell cycle pathway include cyclins and EIF5alpha pathway proteins, polypeptides involved in polyamine metabolism, polypeptides which act as regulators of the cell cycle pathway, including cyclin-dependent kinases (CDKs), CDK-activating kinases, CDK-inhibitors, Rb and Rb-binding proteins, and transcription factors that activate genes involved in cell proliferation and division, such as the E2F family of transcription factors, proteins involved in degradation of cyclins, such as cullins, and plant homologs of tumor suppressor polypeptides.

[0037] Seed protein yield/content: Polypeptides useful for providing increased seed protein quantity and/or quality include polypeptides involved in the metabolism of amino acids in plants, particularly polypeptides involved in biosynthesis of methionine/cysteine and lysine, amino acid transporters, amino acid efflux carriers, seed storage proteins, proteases, and polypeptides involved in phytic acid metabolism.

[0038] Seed oil yield/content: Polypeptides useful for providing increased seed oil quantity and/or quality include polypeptides involved in fatty acid and glycerolipid biosynthesis, beta-oxidation enzymes, enzymes involved in biosynthesis of nutritional compounds, such as carotenoids and tocopherols, and polypeptides that increase embryo size or number or thickness of aleurone.

[0039] Disease response in plants: Polypeptides useful for imparting improved disease responses to plants include polypeptides encoded by cercosporin induced genes, antifungal proteins and proteins encoded by R-genes or SAR genes. Expression of such polypeptides in transgenic plants will provide an increase in disease resistance ability of plants.

[0040] Galactomannanan biosynthesis: Polypeptides involved in production of galactomannans are of interest for providing plants having increased and/or modified reserve polysaccharides for use in food, pharmaceutical, cosmetic, paper and paint industries.

[0041] Flavonoid/isoflavonoid metabolism in plants: Polypeptides of interest for modification of flavonoid/isoflavonoid metabolism in plants include cinnamate-4-hydroxylase, chalcone synthase and flavonol synthase. Enhanced or reduced activity of such polypeptides in transgenic plants will provide changes in the quantity and/or speed of flavonoid metabolism in plants and may improve disease resistance by enhancing synthesis of protective secondary metabolites or improving signaling pathways governing disease resistance.

[0042] Plant growth regulators: Polypeptides involved in production of substances that regulate the growth of various plant tissues are of interest in the present invention and may be used to provide transgenic plants having altered morphologies and improved plant growth and to development profiles leading to improvements in yield and stress response. Of particular interest are polypeptides involved in the biosynthesis of plant growth hormones, such as gibberellins, cytokinins, auxins, ethylene and abscisic acid, and other proteins involved in the activity and/or transport of such polypeptides, including for example, cytokinin oxidase, cytokinin/purine permeases, F-box proteins, G-proteins and phytosulfokines.

[0043] Herbicide tolerance: Polypeptides of interest for producing plants having tolerance to plant herbicides include polypeptides involved in the shikimate pathway, which are of interest for providing glyphosate tolerant plants. Such polypeptides include polypeptides involved in biosynthesis of chorismate, phenylalanine, tyrosine and tryptophan.

[0044] Transcription factors in plants: Transcription factors play a key role in plant growth and development by controlling the expression of one or more genes in temporal, spatial and physiological specific patterns. Enhanced or reduced activity of such polypeptides in transgenic plants will provide significant changes in gene transcription patterns and provide a variety of beneficial effects in plant growth, development and response to environmental conditions. Transcription factors of interest include, but are not limited to myb transcription factors, including helix-turn-helix proteins, homeodomain transcription factors, leucine zipper transcription factors, MADS transcription factors, transcription factors having AP2 domains, zinc finger transcription factors, CCAAT binding transcription factors, ethylene responsive transcription factors, transcription initiation factors and UV damaged DNA binding proteins.

[0045] Homologous recombination: Increasing the rate of homologous recombination in plants is useful for accelerating the introgression of transgenes into breeding varieties by backcrossing, and to enhance the conventional breeding process by allowing rare recombinants between closely linked genes in phase repulsion to be identified more easily. Polypeptides useful for expression in plants to provide increased homologous recombination include polypeptides involved in mitosis and/or meiosis, including for example, resolvases and polypeptide members of the RAD52 epistasis group.

[0046] Lignin biosynthesis: Polypeptides involved in lignin biosynthesis are of interest for increasing plants' resistance to lodging and for increasing the usefulness of plant materials as biofuels.

[0047] In one embodiment of the invention, the function of a recombinant polypeptide is determined by comparison of the amino acid sequence of the recombinant polypeptide to amino acid sequences of known polypeptides. A variety of homology based search algorithms are available to compare a query sequence to a protein database, including for example, BLAST, FASTA, and Smith-Waterman. In the present application, BLASTX and BLASTP algorithms are used to provide protein function information. A number of values are examined in order to assess the confidence of the function assignment. Useful measurements include “E-value” (also shown as “hit_p”), “percent identity”, “percent query coverage”, and “percent hit coverage”.

[0048] In BLAST, E-value, or expectation value, represents the number of different alignments with scores equivalent to or better than the raw alignment score, S, that are expected to occur in a database search by chance. The lower the E value, the more significant the match. Because database size is an element in E-value calculations, E-values obtained by BLASTing against public databases, such as GenBank, have generally increased over time for any given query/entry match. In setting criteria for confidence of polypeptide function prediction, a “high” BLAST match is considered herein as having an E-value for the top BLAST hit provided in Table 1 of less than 1E-30; a medium BLASTX E-value is 1E-30 to 1E-8; and a low BLASTX E-value is greater than 1 E-8. The top BLAST hit and corresponding E values are provided in Table 1.

[0049] Percent identity refers to the percentage of identically matched amino acid residues that exist along the length of that portion of the sequences which is aligned by the BLAST algorithm. In setting criteria for confidence of polypeptide function prediction, a “high” BLAST match is considered herein as having percent identity for the top BLAST hit provided in Table 1 of at least 70%; a medium percent identity value is 35% to 70%; and a low percent identity is less than 35%.

[0050] In one embodiment of the invention, the protein function assignment in the present invention is determined using combinations of E-values, percent identity, query coverage and hit coverage. Query coverage refers to the percent of the query sequence that is represented in the BLAST alignment. Hit coverage refers to the percent of the database entry that is represented in the BLAST alignment. In one embodiment of the invention, function of a query polypeptide is inferred from function of a protein homolog where either (1) hit_p<1e-30 or % identity>35% AND query_coverage>50% AND hit_coverage>50%, or (2) hit_p<1e-8 AND query_coverage>70% AND hit_coverage>70%.

[0051] Another aspect of the invention comprises a functional variant which differs in one or more amino acids from those of a recombinant polypeptide provided herein as the result of one or more conservative amino acid substitutions. It is well known in the art that one or more amino acids in a reference sequence can be substituted with at least one other amino acid, the charge and polarity of which are similar to that of the native amino acid, resulting in a silent change. For instance, valine is a conservative substitute for alanine and threonine is a conservative substitute for serine. Conservative substitutions for an amino acid within a polypeptide sequence can be selected from other members of the class to which the naturally occurring amino acid belongs. Amino acids can be divided into the following four groups: (1) acidic amino acids, (2) basic amino acids, (3) neutral polar amino acids, and (4) neutral nonpolar amino acids. Representative amino acids within these various groups include, but are not limited to: (1) acidic (negatively charged) amino acids such as aspartic acid and glutamic acid; (2) basic (positively charged) amino acids such as arginine, histidine, and lysine; (3) neutral polar amino acids such as glycine, serine, threonine, cysteine, tyrosine, asparagine, and glutamine; and (4) neutral nonpolar (hydrophobic) amino acids such as alanine, leucine, isoleucine, valine, proline, phenylalanine, tryptophan, and methionine. Conserved substitutes for an amino acid within a polypeptide sequence can be selected from other members of the group to which the naturally occurring amino acid belongs. For example, a group of amino acids having aliphatic side chains is glycine, alanine, valine, leucine, and isoleucine; a group of amino acids having aliphatic-hydroxyl side chains is serine and threonine; a group of amino acids having amide-containing side chains is asparagine and glutamine; a group of amino acids having aromatic side chains is phenylalanine, tyrosine, and tryptophan; a group of amino acids having basic side chains is lysine, arginine, and histidine; and a group of amino acids having sulfur-containing side chains is cysteine and methionine. Examples of conservative amino acid substitution groups are: valine-leucine, valine-isoleucine, phenylalanine-tyrosine, lysine-arginine, alanine-valine, aspartic acid-glutamic acid, and asparagine-glutamine. In one embodiment a recombinant polypeptide of the invention may differ in one or more amino acids as the result of deletion or insertion of one or more amino acids in a native sequence. See for example, U.S. Pat. No. 5,500,365, which is hereby incorporated by reference.

[0052] One embodiment of the present invention is a variant which has the same function as a recombinant polypeptide provided herein, but with increased or decreased activity or altered specificity. Such variations in protein activity can be achieved by mutagenesis or may exist naturally in polypeptides encoded by related genes, for example in a related polypeptide encoded by a different allele or in a different species. Variant polypeptides may be obtained by well known nucleic acid or protein screening methods using DNA or antibody probes, for example by screening libraries for genes encoding related polypeptides, or in the case of expression libraries, by screening directly for variant polypeptides. Screening methods for obtaining a modified protein or enzymatic activity of interest by mutagenesis are disclosed in U.S. Pat. No. 5,939,250, which is hereby incorporated by reference. An alternative approach to the generation of variants uses random recombination techniques such as “DNA shuffling” as disclosed in U.S. Pat. Nos. 5,605,793; 5,811,238; 5,830,721 and 5,837,458; and International Applications WO 98/31837 and WO 99/65927, all of which are hereby incorporated by reference. An alternative method of molecular evolution involves a staggered extension process (StEP) for in vitro mutagenesis and recombination of nucleic acid molecule sequences, as disclosed in U.S. Pat. No. 5,965,408 and International Application WO 98/42832, both of which are hereby incorporated by reference.

[0053] Polypeptides of the present invention that are functional variants of the polypeptides provided herein will generally demonstrate significant identity with the polypeptides provided herein. One embodiment of the invention is a polypeptide having at least about 35% sequence identity, at least about 50% sequence identity, at least about 60% sequence identity, at least about 70% sequence identity, at least about 80% sequence identity, and at least about 85%, 90%, 95% or even greater sequence identity with a recombinant polypeptide sequence described herein. One embodiment of the invention is a polypeptide having an amino acid sequence provided herein (reference polypeptides) and functional variants of such reference polypeptide, wherein such functional variant comprises at least about 50 consecutive amino acids having at least about 90% identity to about a 50 amino acid polypeptide fragment of said reference polypeptide.

Recombinant DNA Constructs

[0054] In one embodiment the invention encompasses the use of recombinant polynucleotides in recombinant constructs, i.e. constructs comprising recombinant polynucleotides that are constructed or modified outside of cells and that join nucleic acids that are not found joined in nature. Using methods known to those of ordinary skill in the art, recombinant polynucleotides of the invention can be inserted into recombinant DNA constructs that can then be introduced into a host cell of choice for expression of the encoded polypeptide or to provide for reduction of expression of the encoded polypeptide, for example by antisense or cosuppression methods. Potential host cells include both prokaryotic and eukaryotic cells. One embodiment of the invention uses a recombinant polynucleotide of the present invention for preparation of recombinant constructs for use in plant transformation.

[0055] In plant transformation, exogenous genetic material is transferred into a plant cell. As used herein “exogenous” refers to a nucleic acid molecule, for example a recombinant DNA construct comprising a recombinant polynucleotide of the present invention, produced outside the organism, e.g. plant, into which it is introduced. An exogenous nucleic acid molecule can have a naturally occurring or non-naturally occurring nucleic acid sequence. One skilled in the art recognizes that an exogenous nucleic acid molecule can be derived from the same species into which it is introduced or from a different species. Such exogenous genetic material may be transferred into either monocot or dicot plants including, but not limited to, soy, cotton, canola, maize, teosinte, wheat, rice, and Arabidopsis plants. Transformed plant cells comprising such exogenous genetic material may be regenerated to produce whole transformed plants.

[0056] Exogenous genetic material may be transferred into a plant cell by the use of a recombinant construct, also known as a vector, designed for such a purpose. A recombinant construct can comprise a number of sequence elements, including promoters, encoding regions, and selectable markers. Recombinant constructs are available which have been designed to replicate in both E. coli and A. tumefaciens and have all of the features required for transferring large inserts of DNA into plant chromosomes. Design of such vectors is generally within the skill of the art.

[0057] A recombinant construct will generally include a plant promoter to direct transcription of the protein-encoding region or the antisense sequence of choice. Numerous promoters, which are active in plant cells, have been described in the literature. These include the nopaline synthase (NOS) promoter and octopine synthase (OCS) promoters carried on tumor-inducing plasmids of Agrobacterium tumefaciens or caulimovirus promoters such as the Cauliflower Mosaic Virus (CAMV) 19S or 35S promoter (U.S. Pat. No. 5,352,605), and the Figwort Mosaic Virus (FMV) 35S-promoter (U.S. Pat. No. 5,378,619). These promoters and numerous others have been used to create recombinant vectors for expression in plants. Any promoter known or found to cause transcription of DNA in plant cells can be used in the present invention. Other useful promoters are described, for example, in U.S. Pat. Nos. 5,378,619; 5,391,725; 5,428,147; 5,447,858; 5,608,144; 5,614,399; 5,633,441; and 5,633,435, all of which are hereby incorporated by reference.

[0058] In addition, promoter enhancers, such as the CaMV 35S enhancer or a tissue specific enhancer, may be used to enhance gene transcription levels. Enhancers often are found 5′ to the start of transcription in a promoter that functions in eukaryotic cells, but can often be inserted in the forward or reverse orientation 5′ or 3′ to the coding sequence. In some instances, these 5′ enhancing elements are introns. Deemed to be particularly useful as enhancers are the 5′ introns of the rice actin 1 and rice actin 2 genes. Examples of other enhancers which could be used in accordance with the invention include elements from octopine synthase genes, the maize alcohol dehydrogenase gene intron 1, elements from the maize shrunken 1 gene, the sucrose synthase intron, the TMV omega element, and promoters from non-plant eukaryotes.

[0059] Recombinant constructs can also contain one or more 5′ non-translated leader sequences which serve to enhance polypeptide production from the resulting mRNA transcripts. Such sequences may be derived from the promoter selected to express the gene or can be specifically modified to increase translation of the mRNA. Such regions may also be obtained from viral RNAs, from suitable eukaryotic genes, or from a synthetic gene sequence. For a review of optimizing expression of transgenes, see Koziel et al. (1996) Plant Mol. Biol. 32:393-405).

[0060] Recombinant constructs may also include, with the coding region of interest, a nucleic acid sequence that acts, in whole or in part, to terminate transcription of that region. One type of 3′ untranslated sequence which may be used is a 3′ UTR from the nopaline synthase gene (nos 3′) of Agrobacterium tumefaciens. Other 3′ termination regions of interest include those from a gene encoding the small subunit of a ribulose-1,5-bisphosphate carboxylase-oxygenase (rbcS), and more specifically, from a rice rbcS gene (U.S. Pat. No. 6,426,446), the 3′ UTR for the T7 transcript of Agrobacterium tumefaciens, the 3′ end of the protease inhibitor I or II genes from potato or tomato, and the 3′ region isolated from Cauliflower Mosaic Virus. Alternatively, one also could use a gamma coixin, oleosin 3 or other 3′ UTRs from the genus Coix (PCT Publication WO 99/58659).

[0061] Recombinant constructs may also include a selectable marker. Selectable markers may be used to select for plants or plant cells that contain the exogenous genetic material. Useful selectable marker genes include those conferring resistance to antibiotics such as kanamycin (nptII), hygromycin B (aph IV) and gentamycin (aac3 and aacC4) or resistance to herbicides such as glufosinate (bar or pat) and glyphosate (EPSPS). Examples of such selectable markers are illustrated in U.S. Pat. Nos. 5,550,318; 5,633,435; 5,780,708 and 6,118,047, all of which are hereby incorporated by reference.

[0062] Recombinant constructs may also include a screenable marker. Screenable markers may be used to monitor transformation. Exemplary screenable markers include genes expressing a colored or fluorescent protein such as a luciferase or green fluorescent protein (GFP), a β-glucuronidase or uida gene (GUS) which encodes an enzyme for which various chromogenic substrates are known or an R-locus gene, which encodes a product that regulates the production of anthocyanin pigments (red color) in plant tissues. Other possible selectable and/or screenable marker genes will be apparent to those of skill in the art.

[0063] Recombinant constructs may also include a transit peptide for targeting of a gene target to a plant organelle, particularly to a chloroplast, leucoplast or other plastid organelle, see for example U.S. Pat. No. 5,188,642, which is hereby incorporated by reference.

[0064] For use in Agrobacterium mediated transformation methods, recombinant constructs of the present invention may also include T-DNA border regions flanking the DNA to be inserted into the plant genome to provide for transfer of the DNA into the plant host chromosome as discussed in more detail below. An exemplary plasmid that finds use in such transformation methods is pMON18365, a T-DNA vector that can be used to clone exogenous genes and transfer them into plants using Agrobacterium-mediated transformation. See published U.S. Patent Application 20030024014, which is hereby incorporated by reference. This vector contains the left border and right border sequences necessary for Agrobacterium transformation. The plasmid also has origins of replication for maintaining the plasmid in both E. coli and Agrobacterium tumefaciens strains.

[0065] A candidate gene is prepared for insertion into the T-DNA vector, for example using well-known gene cloning techniques such as PCR. Restriction sites may be introduced onto each end of the gene to facilitate cloning. For example, candidate genes may be amplified by PCR techniques using a set of primers. Both the amplified DNA and the cloning vector are cut with the same restriction enzymes, for example, NotI and PstI. The resulting fragments are gel-purified, ligated together, and transformed into E. coli. Plasmid DNA containing the vector with inserted gene may be isolated from E. coli cells selected for spectinomycin resistance, and the presence of the desired insert verified by digestion with the appropriate restriction enzymes. Undigested plasmid may then be transformed into Agrobacterium tumefaciens using techniques well known to those in the art, and transformed Agrobacterium cells containing the vector of interest selected based on spectinomycin resistance. These and other similar recombinant constructs useful for plant transformation may be readily prepared by one skilled in the art.

Transformation Methods and Transgenic Plants

[0066] Methods and compositions for transforming bacteria and other microorganisms are known in the art. See for example Molecular Cloning: A Laboratory Manual, 3^{rd} edition Volumes 1, 2, and 3. J. F. Sambrook, D. W. Russell, and N. Irwin, Cold Spring Harbor Laboratory Press, 2000.

[0067] Technology for introduction of DNA into cells is well known to those of skill in the art. Methods and materials for transforming plants by introducing a transgenic DNA construct into a plant genome in the practice of this invention can include any of the well-known and demonstrated methods including electroporation as illustrated in U.S. Pat. No. 5,384,253, microprojectile bombardment as illustrated in U.S. Pat. Nos. 5,015,580; 5,550,318; 5,538,880; 6,160,208; 6,399,861 and 6,403,865, Agrobacterium-mediated transformation as illustrated in U.S. Pat. Nos. 5,635,055; 5,824,877; 5,591,616; 5,981,840 and 6,384,301, and protoplast transformation as illustrated in U.S. Pat. No. 5,508,184, all of which are hereby incorporated by reference.

[0068] Any of the recombinant polynucleotides of the present invention may be introduced into a plant cell in a permanent or transient manner in combination with other genetic elements such as vectors, promoters enhancers etc. Further any of the recombinant polynucleotides of the present invention may be introduced into a plant cell in a manner that allows for production of the polypeptide or fragment thereof encoded by the recombinant polynucleotide in the plant cell, or in a manner that provides for decreased expression of an endogenous gene and concomitant decreased production of protein.

[0069] It is also to be understood that two different transgenic plants can also be mated to produce offspring that contain two independently segregating added, exogenous genes. Selfing of appropriate progeny can produce plants that are homozygous for both added, exogenous genes that encode a polypeptide of interest. Back-crossing to a parental plant and out-crossing with a non-transgenic plant are also contemplated, as is vegetative propagation.

[0070] Expression of the recombinant polynucleotides of the present invention and the concomitant production of polypeptides encoded by the recombinant polynucleotides is of interest for production of transgenic plants having improved properties, particularly, improved properties which result in crop plant yield improvement. Expression of recombinant polypeptides of the present invention in plant cells may be evaluated by specifically identifying the protein products of the introduced genes or evaluating the phenotypic changes brought about by their expression. It is noted that when the polypeptide being produced in a transgenic plant is native to the target plant species, quantitative analyses comparing the transformed plant to wild type plants may be required to demonstrate increased expression of the polypeptide of this invention.

[0071] Assays for the production and identification of specific proteins make use of various physical-chemical, structural, functional, or other properties of the proteins. Unique physical-chemical or structural properties allow the proteins to be separated and identified by electrophoretic procedures, such as native or denaturing gel electrophoresis or isoelectric focusing, or by chromatographic techniques such as ion exchange or gel exclusion chromatography. The unique structures of individual proteins offer opportunities for use of specific antibodies to detect their presence in formats such as an ELISA assay. Combinations of approaches may be employed with even greater specificity such as western blotting in which antibodies are used to locate individual gene products that have been separated by electrophoretic techniques. Additional techniques may be employed to absolutely confirm the identity of the product of interest such as evaluation by amino acid sequencing following purification. Although these are among the most commonly employed, other procedures may be additionally used.

[0072] Assay procedures may also be used to identify the expression of proteins by their functionality, particularly where the expressed protein is an enzyme capable of catalyzing chemical reactions involving specific substrates and products. These reactions may be measured, for example in plant extracts, by providing and quantifying the loss of substrates or the generation of products of the reactions by physical and/or chemical procedures.

[0073] In many cases, the expression of a gene product is determined by evaluating the phenotypic results of its expression. Such evaluations may be simply as visual observations, or may involve assays. Such assays may take many forms including but not limited to analyzing changes in the chemical composition, morphology, or physiological properties of the plant. Chemical composition may be altered by expression of genes encoding enzymes or storage proteins which change amino acid composition and may be detected by amino acid analysis, or by enzymes which change starch quantity which may be analyzed by near infrared reflectance spectrometry. Morphological changes may include greater stature or thicker stalks.

[0074] Plants with decreased expression of a gene of interest can also be achieved through the use of polynucleotides of the present invention, for example by expression of antisense nucleic acids, or by identification of plants transformed with sense expression constructs that exhibit cosuppression effects.

[0075] Antisense approaches are a way of preventing or reducing gene function by targeting the genetic material as disclosed in U.S. Pat. Nos. 4,801,540; 5,107,065; 5,759,829; 5,910,444; 6,184,439; and 6,198,026, all of which are hereby incorporated by reference. The objective of the antisense approach is to use a sequence complementary to the target gene to block its expression and create a mutant cell line or organism in which the level of a single chosen protein is selectively reduced or abolished. Antisense techniques have several advantages over other ‘reverse genetic’ approaches. The site of inactivation and its developmental effect can be manipulated by the choice of promoter for antisense genes or by the timing of external application or microinjection. Antisense can manipulate its specificity by selecting either unique regions of the target gene or regions where it shares homology to other related genes.

[0076] The principle of regulation by antisense RNA is that RNA that is complementary to the target mRNA is introduced into cells, resulting in specific RNA:RNA duplexes being formed by base pairing between the antisense substrate and the target. Under one embodiment, the process involves the introduction and expression of an antisense gene sequence. Such a sequence is one in which part or all of the normal gene sequences are placed under a promoter in inverted orientation so that the ‘wrong’ or complementary strand is transcribed into a noncoding antisense RNA that hybridizes with the target mRNA and interferes with its expression. An antisense vector is constructed by standard procedures and introduced into cells by transformation, transfection, electroporation, microinjection, infection, etc. The type of transformation and choice of vector will determine whether expression is transient or stable. The promoter used for the antisense gene may influence the level, timing, tissue, specificity, or inducibility of the antisense inhibition.

[0077] As used herein “gene suppression” means any of the well-known methods for suppressing expression of protein from a gene including sense suppression, anti-sense suppression and RNAi suppression. In suppressing genes to provide plants with a desirable phenotype, anti-sense and RNAi gene suppression methods are preferred. For a description of anti-sense regulation of gene expression in plant cells see U.S. Pat. No. 5,107,065. For a description of RNAi gene suppression in plants by transcription of a dsRNA see U.S. Pat. No. 6,506,559, U.S. Patent Application Publication No. 2002/0168707 A1, and U.S. patent application Ser. No. 09/423,143 (see WO 98/53083), 09/127,735 (see WO 99/53050), and 09/084,942 (see WO 99/61631), all of which are hereby incorporated by reference. Suppression of an gene by RNAi can be achieved using a recombinant DNA construct having a promoter operably linked to a DNA element comprising a sense and anti-sense element of a segment of genomic DNA of the gene, e.g., a segment of at least about 23 nucleotides, more preferably about 50 to 200 nucleotides where the sense and anti-sense DNA components can be directly linked or joined by an intron or artificial DNA segment that can form a loop when the transcribed RNA hybridizes to form a hairpin structure. For example, genomic DNA from a polymorphic locus of SEQ ID NO: 1 through SEQ ID NO: 58,798 can be used in a recombinant construct for suppression of a cognate gene by RNAi suppression.

[0078] Insertion mutations created by transposable elements may also prevent gene function. For example, in many dicot plants, transformation with the T-DNA of Agrobacterium may be readily achieved and large numbers of transformants can be rapidly obtained. Also, some species have lines with active transposable elements that can efficiently be used for the generation of large numbers of insertion mutations, while some other species lack such options. Mutant plants produced by Agrobacterium or transposon mutagenesis and having altered expression of a polypeptide of interest can be identified using the polynucleotides of the present invention. For example, a large population of mutated plants may be screened with polynucleotides encoding the polypeptide of interest to detect mutated plants having an insertion in the gene encoding the polypeptide of interest.

[0079] In one embodiment of the invention, polynucleotides of the present invention may be used in site-directed mutagenesis. Site-directed mutagenesis may be utilized to modify nucleic acid sequences, particularly as it is a technique that allows one or more of the amino acids encoded by a nucleic acid molecule to be altered (e.g., a threonine to be replaced by a methionine). Three basic methods for site-directed mutagenesis are often employed. These are cassette mutagenesis, primer extension, and methods based upon PCR.

[0080] In addition to the above discussed procedures, practitioners are familiar with the standard resource materials which describe specific conditions and procedures for the construction, manipulation and isolation of macromolecules (e.g., DNA molecules, plasmids, etc.), generation of recombinant organisms and the screening and isolating of clones.

Arrays

[0081] In one embodiment of the invention, the recombinant polynucleotides or recombinant polypeptides of this invention may be used to prepare arrays of target molecules arranged on a surface of a substrate. The target molecules may be known molecules, e.g. polynucleotides (including oligonucleotides) or polypeptides, which are capable of binding to specific probes, such as complementary nucleic acids or specific antibodies. The target molecules may be immobilized, e.g. by covalent or non-covalent bonding, to the surface in small amounts of substantially purified and isolated molecules in a grid pattern. By immobilized it is meant that the target molecules maintain their position relative to the solid support under hybridization and washing conditions. Target molecules are deposited in small footprint, isolated quantities of “spotted elements” of preferably single-stranded polynucleotide preferably arranged in rectangular grids in a density of about 30 to 100 or more, e.g. up to about 1000, spotted elements per square centimeter. In one embodiment of the invention, the arrays comprise at least about 100 or more, e.g. at least about 1000 to 5000, distinct target polynucleotides per unit substrate. Where detection of transcription for a large number of genes is desired, the economics of arrays favors a high density design criteria provided that the target molecules are sufficiently separated so that the intensity of the indicia of a binding event associated with highly expressed probe molecules does not overwhelm and mask the indicia of neighboring binding events. For high-density microarrays each spotted element may contain up to about 10⁷ or more copies of the target molecule, e.g. single stranded cDNA, on glass substrates or nylon substrates.

[0082] Arrays of this invention may be prepared with molecules from a single species, preferably a plant species, or with molecules from other species, particularly other plant species. Arrays with target molecules from a single species can be used with probe molecules from the same species or a different species due to the ability of cross species homologous genes to hybridize. It is generally preferred for high stringency hybridization that the target and probe molecules are from the same species.

[0083] In one embodiment of the invention, the organism of interest is a plant and the target molecules are polynucleotides or oligonucleotides with nucleic acid sequences having at least about 80 percent sequence identity to a corresponding sequence of the same length in a recombinant polynucleotide having a sequence selected from the group consisting of SEQ ID NO: 1 through SEQ ID NO: 58,798 or complements thereof. In another embodiment of the invention, at least about 10% of the target molecules on an array have at least about 15 consecutive nucleotides of sequence having at least about 80% and up to about 100% identity with a corresponding sequence of the same length in a recombinant polynucleotide having a sequence selected from the group consisting of SEQ ID NO: 1 through SEQ ID NO: 58,798 or complements or fragments thereof.

[0084] Such arrays are useful in a variety of applications, including gene discovery, genomic research, molecular breeding and bioactive compound screening. One use of arrays is in the analysis of differential gene transcription, e.g. transcription profiling where the production of mRNA in different cells, normally a cell of interest and a control, is compared and discrepancies in gene expression are identified. In such assays, the presence of discrepancies indicates a difference in gene expression levels in the cells being compared. Such information is useful for the identification of the types of genes expressed in a particular cell or tissue type in a known environment. Such applications generally involve the following steps: (a) preparation of probe, e.g. attaching a label to a plurality of expressed molecules; (b) contact of probe with the array under conditions sufficient for probe to bind with corresponding target, e.g. by hybridization or specific binding; (c) removal of unbound probe from the array; and (d) detection of bound probe.

[0085] A probe may be prepared with RNA extracted from a given cell line or tissue. The probe may be produced by reverse transcription of mRNA or total RNA and labeled with radioactive or fluorescent labeling. A probe is typically a mixture containing many different sequences in various amounts, corresponding to the numbers of copies of the original mRNA species extracted from the sample.

[0086] The initial RNA sample for probe preparation will typically be derived from a physiological source. The physiological source may be selected from a variety of organisms, with physiological sources of interest including single celled organisms such as yeast and multicellular organisms, including plants and animals, particularly plants, where the physiological sources from multicellular organisms may be derived from particular organs or tissues of the multicellular organism, or from isolated cells derived from an organ, or tissue of the organism. The physiological sources may also be multicellular organisms at different developmental stages (e.g., 10-day-old seedlings), or organisms grown under different environmental conditions (e.g., drought-stressed plants) or treated with chemicals.

[0087] In preparing the RNA probe, the physiological source may be subjected to a number of different processing steps, where such processing steps might include tissue homogenation, cell isolation and cytoplasmic extraction, nucleic acid extraction and the like, where such processing steps are known to the those of skill in the art. Methods of isolating RNA from cells, tissues, organs or whole organisms are well known to those skilled in the art.

Computer Based Systems and Methods

[0088] In one embodiment of the invention, the sequence of the molecules of this invention can be provided in a variety of media to facilitate use thereof. Such media may provide a subset thereof in a form that allows a skilled artisan to examine the sequences. In a one embodiment, about 20, about 50, about 100, and about 200 or more of the polynucleotide and/or the polypeptide sequences of the present invention can be recorded on computer readable media. As used herein, “computer readable media” refers to any medium that can be read and accessed directly by a computer. Such media include, but are not limited to: magnetic storage media, such as floppy discs, hard disc, storage medium, and magnetic tape; optical storage media such as CD-ROM; electrical storage media such as RAM and ROM; and hybrids of these categories such as magnetic/optical storage media. A skilled artisan can readily appreciate how any of the presently known computer readable media can be used to create a manufacture comprising a computer readable medium having recorded thereon a nucleotide sequence of the present invention.

[0089] As used herein, “recorded” refers to a process for storing information on computer readable media. A skilled artisan can readily adopt any of the presently known methods for recording information on computer readable media to generate media comprising the nucleotide sequence information of the present invention. A variety of data storage structures are available to a skilled artisan for creating a computer readable medium having recorded thereon a nucleotide sequence of the present invention. The choice of the data storage structure will generally be based on the means chosen to access the stored information. In addition, a variety to of data processor programs and formats can be used to store the nucleotide sequence information of the present invention on computer readable media. The sequence information can be represented in a word processing text file, formatted in commercially-available software such as WordPerfect and Microsoft Word, or represented in the form of an ASCII file, stored in a database application, such as DB2, Sybase, Oracle, or the like. A skilled artisan can readily adapt any number of data processor structuring formats (e.g., text file or database) in order to obtain a computer readable medium having recorded thereon the nucleotide sequence information of the present invention.

[0090] By providing one or more of polynucleotide or polypeptide sequences of the present invention in a computer readable medium, a skilled artisan can routinely access the sequence information for a variety of purposes. The examples which follow demonstrate how software which implements the BLAST and BLAZE search algorithms on a Sybase system can be used to identify open reading frames (ORFs) within the genome that contain homology to ORFs or polypeptides from other organisms. Such ORFs are polypeptide encoding fragments within the sequences of the present invention and are useful in producing commercially important polypeptides such as enzymes used in amino acid biosynthesis, metabolism, transcription, translation, RNA processing, nucleic acid and a protein degradation, protein modification, and DNA replication, restriction, modification, recombination, and repair.

[0091] One embodiment of the invention provides systems, particularly computer-based systems, which contain the sequence information described herein. Such systems are designed to identify commercially important fragments of the nucleic acid molecule of the present invention. As used herein, “a computer-based system” refers to the hardware, software, and memory used to analyze the sequence information of the present invention. A skilled artisan can readily appreciate that any one of the currently available computer-based systems are suitable for use in the present invention.

[0092] As indicated above, the computer-based systems of the present invention comprise a database having stored therein a polynucleotide sequence, polypeptide sequence, or both of the present invention and the necessary hardware and software for supporting and implementing a homology search. As used herein, “database” refers to memory system that can store searchable nucleotide sequence information. As used herein “query sequence” is a polynucleotide sequence, or a polypeptide sequence, or a polynucleotide sequence corresponding to a polypeptide sequence, or a polypeptide sequence corresponding to a polynucleotide sequence, that is used to query a collection of polynucleotide or polypeptide sequences. As used herein, “homology search” refers to one or more programs which are implemented on the computer-based system to compare a query sequence, i.e., gene or peptide or a conserved region (motif), with the sequence information stored within the database. Homology searches are used to identify segments and/or regions of the sequence of the present invention that match a particular query sequence. A variety of known searching algorithms are incorporated into commercially available software for conducting homology searches of databases and computer readable media comprising sequences of molecules of the present invention.

[0093] Sequence length of a query sequence may be from about 10 to about 100 or more amino acid residues or from about 20 to about 300 or more nucleotide residues. There are a variety of motifs known in the art. Protein motifs include, but are not limited to, enzymatic active sites and signal sequences. An amino acid query is converted to all of the nucleic acid sequences that encode that amino acid sequence by a software program, such as TBLASTN, which is then used to search the database. Nucleic acid query sequences that are motifs include, but are not limited to, promoter sequences, cis elements, hairpin structures and inducible expression elements (protein binding sequences).

[0094] One embodiment of the invention, provides an input device for receiving a query sequence, a memory for storing sequences (the query sequences of the present invention and sequences identified using a homology search as described above), and an output device for outputting the identified homologous sequences. A variety of structural formats for the input and output presentations can be used to input and output information in the computer-based systems of the present invention. One format for an output presentation ranks fragments of the sequence of the present invention by varying degrees of homology to the query sequence. Such presentation provides a skilled artisan with a ranking of sequences that contain various amounts of the query sequence and identifies the degree of homology contained in the identified fragment.

[0095] Having now generally described the invention, the same will be more readily understood through reference to the following examples which are provided by way of illustration, and are not intended to be limiting of the present invention, unless specified.

### EXAMPLE 1

[0096] A cDNA library is generated from Gossypium hirsutum tissue. Tissue is harvested and immediately frozen in liquid nitrogen. The harvested tissue is stored at −80° C. until preparation of total RNA. The total RNA is purified using Trizol reagent from Invitrogen Corporation (Invitrogen Corporation, Carlsbad, Calif., U.S.A.), essentially as recommended by the manufacturer. Poly A+ RNA (mRNA) is purified using magnetic oligo dT beads essentially as recommended by the manufacturer (Dynabeads, Dynal Biotech, Oslow, Norway).

[0097] Construction of plant cDNA libraries is well known in the art and a number of cloning strategies exist. A number of cDNA library construction kits are commercially available. cDNA libraries are prepared using the Superscript™ Plasmid System for cDNA synthesis and Plasmid Cloning (Invitrogen Corporation, Carlsbad, Calif., U.S.A.), as described in the Superscript II cDNA library synthesis protocol. The cDNA libraries are quality controlled for a good insert:vector ratio.

[0098] The cDNA libraries are plated on LB agar containing the appropriate antibiotics for selection and incubated at 37° for a sufficient time to allow the growth of individual colonies. Single colonies are individually placed in each well of a 96-well microtiter plates containing LB liquid including the selective antibiotics. The plates are incubated overnight at approximately 37° C. with gentle shaking to promote growth of the cultures. The plasmid DNA is isolated from each clone using Qiaprep plasmid isolation kits, using the conditions recommended by the manufacturer (Qiagen Inc., Valencia, Calif. U.S.A.).

[0099] The template plasmid DNA clones are used for subsequent sequencing. Sequences of recombinant polynucleotides may be obtained by a number of sequencing techniques known in the art, including fluorescence-based sequencing methodologies. These methods have the detection, automation, and instrumentation capability necessary for the analysis of large volumes of sequence data. With these types of automated systems, fluorescent dye-labeled sequence reaction products are detected and data entered directly into the computer, producing a chromatogram that is subsequently viewed, stored, and analyzed using the corresponding software programs. These methods are known to those of skill in the art and have been described and reviewed.

### EXAMPLE 2

[0100] The open reading frame in each recombinant polynucleotide sequence is identified by a combination of predictive and homology based methods. The longest open reading frame (ORF) is determined, and the top BLAST match is identified by BLASTX against NCBI. The top BLAST hit is then compared to the predicted ORF, with the BLAST hit given precedence in the case of discrepancies.

[0101] Functions of polypeptides encoded by the polynucleotide sequences of the present invention are determined using a hierarchical classification tool, termed FunCAT, for Functional Categories Annotation Tool. Most categories collected in FunCAT are classified by function, although other criteria are used, for example, cellular localization or temporal process. The assignment of a functional category to a query sequence is based on BLASTX sequence search results, which compare two protein sequences. FunCAT assigns categories by iteratively scanning through all blast hits, starting with the most significant match, and reporting the first category assignment for each FunCAT source classification scheme. In the present invention, function of a query polypeptide is inferred from the function of a protein homolog where either (1) hit_p<1e-30 or % identity>35% AND query_coverage>50% AND hit_coverage>50%, or (2) hit_p<1e-8 AND query_coverage>70% AND hit_coverage>70%.

[0102] Functional assignments from five public classification schemes, GO_BP, GO_CC, GO_MF, KEGG, and EC, and one internal Monsanto classification scheme, POI, are provided in Table 1. The column under the heading “CAT_TYPE” indicates the source of the classification. GO_BP=Gene Ontology Consortium—biological process; GO_CC=Gene Ontology Consortium—cellular component; GO_MF=Gene Ontology Consortium—molecular function; KEGG=KEGG functional hierarchy; EC=Enzyme Classification from ENZYME data bank release 25.0; POI=Pathways of Interest. The column under the heading “CAT_DESC” provides the name of the subcategory into which the query sequence was classified. The column under the heading “PRODUCT_HIT_DESC” provides a description of the BLAST hit to the query sequences that led to the specific classification. The column under the heading “HIT_E” provides the e-value for the BLAST hit. It is noted that the e-value in the HIT_E column may differ from the e-value based on the top BLAST hit provided in the E_VALUE column since these calculations were done on different days, and database size is an element in E-value calculations. E-values obtained by BLASTing against public databases, such as GenBank, will generally increase over time for any given query/entry match.

[0103] Sequences useful for producing transgenic plants having improved biological properties are identified from their FunCAT annotations and are also provided in Table 1. A biological property of particular interest is plant yield. Plant yield may be improved by alteration of a variety of plant pathways, including those involving nitrogen, carbohydrate, or phosphorus utilization and/or uptake. Plant yield may also be improved by alteration of a plant's photosynthetic capacity or by improving a plant's ability to tolerate a variety of environmental stresses, including cold, heat, drought and osmotic stresses. Other biological properties of interest that may be improved using sequences of the present invention include pathogen or pest tolerance, herbicide tolerance, disease resistance, growth rate (for example by modification of cell cycle, by expression of transcription factors, or expression of growth regulators), seed oil and/or protein yield and quality, rate and control of recombination, and lignin content.

[0104] Sequences of recombinant polynucleotides are provided herein as SEQ ID NO: 1 through SEQ ID NO: 58,798 and sequences of recombinant polypeptides are provided as SEQ ID NO: 58,799 through SEQ ID NO: 117,596. Descriptions of each of these recombinant polynucleotide and recombinant polypeptide sequences are provided in Table 1.

TABLE 1
Column Descriptions

| | |
|---|---|
| SEQ_NUM | provides the SEQ ID NO for the listed |
| | recombinant polynucleotide sequences. |
| CONTIG_ID | provides an arbitrary sequence name |
| | taken from the name of the clone from |
| | which the cDNA sequence was obtained. |
| PROTEIN_NUM | provides the SEQ ID NO for the |
| | recombinant polypeptide sequence |
| NCBI_GI | provides the GenBank ID number for |
| | the top BLAST hit for the sequence. |
| | The top BLAST hit is indicated by |
| | the National Center for |
| | Biotechnology Information |
| | GenBank Identifier number. |
| NCBI_GI_DESCRIPTION | refers to the description of the GenBank |
| | top BLAST hit for the sequence. |
| E_VALUE | provides the expectation value for the |
| | top BLAST match. |
| MATCH_LENGTH | provides the length of the sequence |
| | which is aligned in the top BLAST |
| | match |
| TOP_HIT_PCT_IDENT | refers to the percentage of identically |
| | matched nucleotides (or residues) that |
| | exist along the length of that portion |
| | of the sequences which is aligned in |
| | the top BLAST match. |
| CAT_TYPE | indicates the classification scheme |
| | used to classify the sequence. |
| | GO_BP = Gene Ontology Consortium - |
| | biological process; GO_CC = Gene |
| | Ontology Consortium - cellular compo- |
| | nent; GO_MF = Gene Ontology |
| | Consortium - molecular function; |
| | KEGG = KEGG functional hierarchy |
| | (KEGG = Kyoto Encyclopedia of |
| | Genes and Genomes); EC = Enzyme |
| | Classification from ENZYME data |
| | bank release 25.0; POI = |
| | Pathways of Interest. |
| CAT_DESC | provides the classification scheme |
| | subcategory to which the query |
| | sequence was assigned. |
| PRODUCT_CAT_DESC | provides the FunCAT annotation |
| | category to which the query |
| | sequence was assigned. |
| PRODUCT_HIT_DESC | provides the description of the |
| | BLAST hit which resulted in |
| | assignment of the sequence to the |
| | function category provided in the |
| | cat_desc column. |
| HIT_E | provides the E value for the BLAST |
| | hit in the hit_desc column. |
| PCT_IDENT | refers to the percentage of identically |
| | matched nucleotides (or residues) that |
| | exist along the length of that portion |
| | of the sequences which is aligned in |
| | the BLAST match provided in hit_desc. |
| QRY_RANGE | lists the range of the query sequence |
| | aligned with the hit. |
| HIT_RANGE | lists the range of the hit sequence |
| | aligned with the query. |
| QRY_CVRG | provides the percent of query sequence |
| | length that matches to the hit (NCBI) |
| | sequence in the BLAST match (% qry |
| | cvrg = (match length/query total |
| | length) × 100). |
| HIT_CVRG | provides the percent of hit sequence |
| | length that matches to the query |
| | sequence in the match generated using |
| | BLAST (% hit cvrg = (match length/ |
| | hit total length) × 100). |

[0105] All publications and patent applications cited herein are hereby incorporated by reference in their entirely to the same extent as if each individual publication or patent application was specifically and individually indicated to be incorporated by reference.

[0106] Although the foregoing invention has been described in some detail by way of illustration and example for purposes of clarity of understanding, it will be obvious that certain changes and modifications may be practiced within the scope of the appended claims.

The application's sequence listing, which the Patent Office published only in electronic form, follows.

SEQUENCE LISTING (117596 sequences)

SEQ ID NO: 1 - DNA, 596 bp, Gossypium hirsutum
  Clone ID: GOSHI-09MAY01-C58963_1
cattaaatggcttaagttttaacacattcctgggcaacatatcaaacggtgatgaaccaactgtcttgattatcaaggatagagaaggttacatatttggaggttttgcttctcaaccttgggagaggcatggtgatttctatggggacatgaagacttttctctttcagctctacccaaaggcatctattttcaggccaactggagcaaacagtaatttgcaatggtgtgctgtgaacttcagttccgagaccatccctaatggcattggttttggaggacgcataaatcactttggcatgtttctctcagcaagctttgatcaagggcataccttttcctgtaccacttttaatagcccttgcctctcgaagaccgccaaaatctgcccagaagttatagaattgctggggagttgttagaaaaggactggaacaagaaacaacagacgttgttaagggcacagtgttaaaaggttcaaggaggacagcatatgctcaacttggtcgggattgcaaatgcaaccgagtagcatgcacttttaaatggtctttgataatcatcgcagttctgtacattagaatgattcgaatctc

SEQ ID NO: 2 - DNA, 454 bp, Gossypium hirsutum
  Clone ID: uC-gsflmaxxa067f08b1
tttatcttatgggacctatgaagaacttgatagagggaattcggtaaccaatctccatttcaaaatgcgagatatggtgtatctgttggtgcatacatgtgaagtaaaggtaaatggtcagaggacaaaaaaggacatactcaaatccaatgggaaatctgaggtaaatgagtccttgagggattctgaaacaaggtcagatgagaaaagattgcctgatttatctattgatggacctgatattgatgacgaatctgagagcacatctgatgtacatgaggatcaagaaactgaaactaccatgattgcagagaaatctgcagattttgaacagttaaatggggatagcagggacgtgataggaaatcctaaagcaggagcgtgttgggatgtctttcgtcgacaggatgttccgaagttaactgagtatttggcaaagcattggagggatttc

SEQ ID NO: 3 - DNA, 265 bp, Gossypium hirsutum
  Clone ID: LIB3149-055-Q1-K1-H2
aattcggtaaccaatctccatttcaaaatgcgagatatggtgtatctgttggtgcatacatgtgaagtaaaggtaaatggtcagaggacaaaaaaggacatactcaaatccaatgggaaatctgaggtaaatgagtccttgagggattctgaaaaaggtcagatagaaaagatgcctgattatctatgatggcctgattgagacaattgaagccattgatgtcatgggataaaactgactcatatgagaaattgaattgacatat

SEQ ID NO: 4 - DNA, 719 bp, Gossypium hirsutum
  Clone ID: GOSHI-09MAY01-C58883_1
cttctgtaatctatggactagtcttctttccctggatgtattttggatctaattgtttatacctgtcttacaggtccatcaaatagcccgaaattttcgagataagtggattcgaaaacctgttagaaagcttggctacagggacaaggatgagggcaggatggagttttttaggggtttggactgtaacagggtttcagcatctcacaatcattggcgtgaccaggccatacgatctactgaagcaattaattgcatcatgcaatctgtggttggatcaacttcatcagatacttctacccgagagggtggttcctcgttatcagtttgtctttcccaaaccaacagtaccagaattcgcaagcggaaaagccgctgggatcagccagcggatacagagaaaattgattctcagtcaccaaagaaactcgaatgtagcttgttatctgctttaggtcaagcaacaccagatcagatagagaagatgaacagtggggataacaaatgccaagacagtttttccaaaggtgaagctattaacattgagaatggaaaccaacgctttcagcaggatgctccaccagggttctcatctcctctcaatgcatcttggtgtcgtctactttatcatcaactgctacaggtttccctacacctaaagttggccagttgaagtgccctgatgtggttcttgctattcaagaagaattatttacgtt

SEQ ID NO: 5 - DNA, 619 bp, Gossypium hirsutum
  Clone ID: GOSHI-09MAY01-C58443_1
gacatctattggtacattatcgggtgcagctatgacggggcagaaaccgagatgtatttgagaagagtattgagagtttgccacagcaatttgggttgtcacctaccccatctattggtacgttatcggatacccacctatgacgggacggaaaagagatgctcaagatgcatttgagaagagtatcgagaggaggttaaggagaaagatcaagaacagggaatctgctgcacgatcacgagctaggaagcaggcttaccacaatgagctggttaacaaggtttcacgattagaagaggataatctaaagctcaaaagagagaaggaatttgatacaaaatctcagtgtgaaacatctgaaacaaggtatcagcttagaagaacaagttccgcctctttttaactcgtgttttccgctgttttaagctctctagttggcttgttgacagagcttcgttgtgaattcgttccaagggtttggcattctgtacatttatgattatcatgtgttggtttttaccttcctctgcaaaactgccatgtttatatgtgttaggtttatatttattcggctgaacgacaagtaaatcggtgttgattaggctataatcctaccttt

SEQ ID NO: 6 - DNA, 285 bp, Gossypium hirsutum
  unsure (1)..(285): unsure at all n locations
  Clone ID: LIB3149-047-Q1-K1-H9
ctcctctcaatactcttctcaaatgcatcttgagcatcggttttccgtcctgtcataggtgtatccgataacgtgccaatagagatgctcaagatgcatttgagaagagtattgagaggaggttaaggagaaagatcaagaacagggaatccgctgcacgatcacgagctaggaagcaggcttaccacaatgagctggttaacaaggtttcacgattagaagaggataatctaaagctcanaagagagaaggaatttgatacaaaatctcagtgtgaaacatctg

SEQ ID NO: 7 - DNA, 951 bp, Gossypium hirsutum
  Clone ID: GOSHI-09MAY01-C58413_2
gcttattggaatgaccaacagaaaggatctgcttgatgaagcccttttgaggccaggacgtttggaggttcaagttgagataagtcttcctgacgaaaatggtcgtttgcagattcttcagatccacacaaacaagatgaaagagaattcttttcttgctcctgaccctcgccccccgagagcttgctgctcgtacaaagaattacagtggagccgagcttgaaggtgtggtgaaaagtgcggtgtcttttgctttgaatagacaagtaagtatggatgatcttaccaagccagtggacgaagagaacattaaggttaccatggatgattttctcaatgcactcctggaaatcgttcctgcatttggagcctccactgatgaccttgagcgatgcaggcttaatggcatggtggattgtggcgaccggcacaagcacatttatcagagagccatgctactggtagagcaggtcaaagtaagcaaaggaagtcctctggtcacttgtcttctagaagggtcaagtggaagtggcaaaacagcattggcagctactgttggcattgacagtgatttcccatatgtcaagatagtctcagctgaatcaatgattggtcttcatgagagtacaaaatgcgcacagattgtcaaggtatttgaggatgcatacaagtcacccttgagcatcattatccttgatgacatagaaaggctactggagtatgttgctattgggccccgtttttcaaatttaatttctcagacattgttggtccttctcaaacgtcttccacctaaggggaaaaaacttctggtgataggtacaactagtgaggtgggtttcttagattcagttggcatttgtgatgctttttctgtcacctaccatcttccttcattgaagacagatgatgcaaagaaggtgttggaacaactgaatgtatttgctgaag

SEQ ID NO: 8 - DNA, 534 bp, Gossypium hirsutum
  Clone ID: uC-gsflnu33B141b04b1
ttgacatctgctgtcaagtatattgaaagaggacctattttgcccaataccttgatatccatggcgagaaaggcatcttcttttaaaaagaaaaagaaaaagaaaaatagcttaatttcttctataaaagggtcataggttactactgaaaggggaagagggctaaacaagggtgcaagaaggaaaagttttttctctgaaaagagtataccgtctgcaaaacatggagggtaatggcaatgaacaaccaaaatgtcaaagaagttttgatcatcgtgggaggaagaataattgctgggagttagttatccagattttatgtatgatactggatgataacactattccgaatatacggtcttgggacaaaaaaaaagaagagaaattagaagaggccttgacgcagctggaagatattatgatgaaaaatgacttgctagagagaaagagaaatggctggaagtaatgaaatcaacctcaacgagtgcaagtcaagaggctcaactagagatggtaccggagttcatgacagca

SEQ ID NO: 9 - DNA, 443 bp, Gossypium hirsutum
  Clone ID: uC-gsflnu33B072f01b1
gggatatgaattgtgagtttttggtttgttcttcacaaggatctattttaagcttttgggttttgtttttgagtgtttagagaaagagaaatggctggaagtaatgaaatcaacctcaacgagtgcaagtcaagaggctcaactagagatggtaccggagttcatgacagcattgtgaaccagctgcttaccaagatagatggagtggagtctctaaataatgttttgcttagtggaatgaccaacagaaatgatctgcttgatgaagcccttttgaggccaggacgtttggaggttcaagttgagataagtcttcctgacgaaaatggtcgtttgcagattctttagattcatacaaacaagatgaaagagaattcttttcttgcttctgatgttaaaccttaagagcttggtatggttgttagtatttatggttgtggaat

SEQ ID NO: 10 - DNA, 519 bp, Gossypium hirsutum
  Clone ID: GOSHI-09MAY01-C58743_1
aagagagcgaggccgggcgcccaaagttttatcttgagaaccttaatctccaagctgatggagtttggtctaaaacaagttcaagggttgtatttacaagtatacctagagttatggtggaaggatttctcaaagaatacatggccgtcgatgatgttgtaggaactgaattgcacactggtgggaaccgattcacaggcttgttatccagctccggtttgctggtaaagcacaaagctttaaaggcatactttggtgataaaaagccagatgttggcctcggaagttcaagcctccatgaccatcactttatctccctttgcaaggaagcctatgtggtgcacaaggaagatggtagaaacaatcaaagttgtttgatgccaagggacaagtacccgaagccacttatatttcatgatgggagactagctttcttgccaacaccatttgcaacactctgcatgttcttgtggcttccatttgggatagttctcgctatatttaggattctggttggta

SEQ ID NO: 11 - DNA, 435 bp, Gossypium hirsutum
  Clone ID: GOSHI-09MAY01-C58603_1
caatctttttgttgcacactgatattttacccaaatctctccttcaaaggaggatgaatatcctccggggcgcaatcaaattgcacgtttcggttcgaacggtcaagccgacccacgtcttaccttcattccttcgcgaaccgccgaaacggttctccaccgaaccggatcaacagcaacaacagccgctacccgacgcctccatcaatcaatttctggattcagctagcaaaggttttgtttatgggaaactctttggaatcacaaagtatacaatgaagagcgatataatcagcttgcttgaagggtgtaatctaacgcctgatgacattaaagtcagttacagccgcagccttttccctgttgcgatgatgttgcggttcccgtcaccttctgcatttagtaatgcagcaaggacaatttggaggtttgatc

SEQ ID NO: 12 - DNA, 506 bp, Gossypium hirsutum
  Clone ID: LIB3583-015-P1-K1-G2
tcctcaagatagcaaagtccttggagcataagctagtttccttagggaagttagggttgtagcagaagaatatggagtactagtataccagagggttatagaggaagtaattatgaaagtagccaagaacttactacccgaagaagaaactaagctagctaggctatccaagcaccttccaaatccagcaagttagggggttcataccgatatccaggacatagatattgagtattatcatacgaagatggttcaagaaaatcctggcaacccttcggttttaagcaattatgctcgtttcttacatcagtctaaaagagatgtagaaggatccaaagaatactatttgcaagccatacaaagagaccctaggaatggagaaaccatgtcacagtatgctaaattgatctgggattctcaccgagaccatgataaagcttcacattattttgagctagcagttgaagctaatcctgtaaatagcaatattcttgcagcatatgcta

SEQ ID NO: 13 - DNA, 355 bp, Gossypium hirsutum
  Clone ID: LIB3149-043-Q1-K1-C4
catttacacccttttgtttgttaattgtccattttgattgacagtctaaaggagatgttgaaggagccaaggaatactatttgcaagccatacaaggtgaccctaggaatggtgaaaccatgtcacagtatgctaaattgatctgggattctcaccgtgaccatgataaagcttcacattattttgagctagcagttgaagctaatcctgaaaatagcaatattcttgcagcatatgctagcttcctttgggaaacagaaagaagatgaagacaataacacaaggcaagatcaaactcaggtttctcttcagaacagagctttgtctgcaataagctcataagtcattcattctg

SEQ ID NO: 14 - DNA, 482 bp, Gossypium hirsutum
  Clone ID: GOSHI-09MAY01-C58053_1
ttgaaacgtagggtgcaggtcgagaaggcagctagggaatctcaggctgaagctatcagaaaaattctcggccaagaggcaagtaggaagaaacgagaagataagataaaaaagaggcaagaagaaatggcacaggaaaaagctacaaattctatgatacttgcatcagacaccgtaagatggcttatggggccttcaggaacagttgtaacattccccaatgaggttggtttaccaagtatattcgatcctaagccttgcagttaccctccacctcgagagaaatgtgcagttccatcttgtacgaatccatacaagtaccgagattcaaaatcgaagcttcccctttgcagccttcaatgctacaagacaatgcatgaaaagatgtctgcccttactgcctggtagtgaaatgcactaccaaaacgtcatttctgtttgtatataagctgtgtaaaggatagcttatttatgatacaatg

SEQ ID NO: 15 - DNA, 337 bp, Gossypium hirsutum
  Clone ID: GOSHI-09MAY01-C58333_1
tcgctttcgcgtccggtcattagtttcttgagattagggtttgaagaagatgaagaaaaacaagtgtttcaaatgtcttttgtgggattgtagtttgttcacggtgtttagttgagtaggtagtctaggcttcttagtttaatgtgaatataatctaatcatcaatatctgttacttggtcaatagaagagctgtgacttttttttttcattaatgaaatgaatgctatatttcaatttcaaaaaaaaaaaaaaaaataaaaaaaaaaaaaaaaaaaaataaaaaaaaatataaaaaaaaaaaaaaaaaaaagggcttcctatttaaaaaatacaag

SEQ ID NO: 16 - DNA, 532 bp, Gossypium hirsutum
  Clone ID: GOSHI-09MAY01-C58283_1
cccagcgtccgcagacttttggaagtgcctgcaatatttgttaaagcagtgaccgatatggtagatggtgatgaaaccaactgcagaggaattcctgcagaatttggctgcggtgactgcgactctagaagaagtcgtcactcaagtcatcgattttatcagcggaaagtgcttgcctgaactttgattttgtccctacttatcaccgttttcattctgaaaaatatatggacaataaaaaacttgtaattcttacatccatgagatgcaaacattagagatgagtgtttctcttagagatcaaaacagcaacaaacaatcccatagtttttgagtagtcgagtgtttgaataagacagtcttaacgttacatggtgggcttcattgcacactggcttttggcctatattgaattttgcttacaagcaattttatgcatacaagtccatgtttgttgttatgtgtgtcctcttacgaatgcaattgtagctttcctttcgcatggtaaatgccagttcttgagtgctgtaag

SEQ ID NO: 17 - DNA, 603 bp, Gossypium hirsutum
  Clone ID: LIB3543-030-Q1-K6-B8
gttgacttggttgtggagaaactttttttttttttcgaaggcatcagtttacatcgctatttgaaagcttgatgagtagggttgtgctaggcttgccagggccatgggctgaggataaccgtgagccctctgatcattacactaccaaaattggtggacttcctgattggcctcttcctatagaggctttgaagttcaaccctacacttattcactgcacacaatgtggaagtaaactctgtcttgttgctcaggtttatgctccagtttcaagtggaactttgaacgtagaagaccgtctacttcttgtttttggttgtgtggcaccaaattgtggtagctcttctctcagttggcgagctcttcggattcagaaagtggaaaatgaatcaaaggaatcatcctccgctgctactctggataaagctccttcagcttcatctcttgtttctgttccaaaaactaactggtgggagaatttgagtgatgaggataatgaagatttggatttggaggacttgagtagagcattttctgaagtggcaagcttgagttctgagcccaagaagacaagtagcaaccggaattctgagggtgctgtga

SEQ ID NO: 18 - DNA, 359 bp, Gossypium hirsutum
  Clone ID: LIB3149-043-Q1-K1-G1
ctgaggataaccgtgagccctctgatcattacactaccaaaattggtggacttcctgattggcctcttcctatagaggctttgaagttcaaccctacacttattcactgcacacaatgtggaagtaaactctgtcttgttgctcaggtttatgctccagtttcaagtggaactttgaacatagaagaccgtctacttcttgtttttggttgtgtgacaccaaattgtggtagctctcctctcagaaagtggaaaatgaatcaaaggaatcatcctctgctgctactctggataaagctccttcagcttcatctcctgtttctgtttcaaaaactaactggtgggagaatttgagtgatg

SEQ ID NO: 19 - DNA, 760 bp, Gossypium hirsutum
  Clone ID: GOSHI-09MAY01-C58203_1
tcttccatttttgaatgatttaatagtcgccggagtaatgtttaaacccaatgattcaaggcaaagataaaagatcctagaacaaggaaatacccttttccattttctcaacaactagattaaaacgaagaatcgaaatagattctaagcgagacaaacaaaaaaggggttagagaccactcaataaaagaatgcctaaggtttttttttgagcattttgagagttatttgacttgagttatgagagtacgaatgcttttttcttcttttttttttcgaaaaaaaagacgaggttaaatgtctaattgatttgctggtttatggatctttttgacatgctaattccatacattataattccatacatagacataactttaaattaatcatttttttctcgagccgtacgaggagaaaacttcttatacgtttctaggggggggggtattatttaactacatctatcccaatgagccgtttatcgaatcgttgcaattgatgttcgatcccgaagagagggaagagatcttcgaaaagtgggtttttatgatccgataaataatcaaacctatttaaatgttcccgccattctctatttccttgaaaaaggagctcaacccacagcaactgttcatgatattttaaagaaagcgggggtttttacagaacttactcttaatcaaacaaaattcacttaatgaaatccaaaaaagagggtgtggatgattcatatctagctttgtataaatttttctttatt

SEQ ID NO: 20 - DNA, 541 bp, Gossypium hirsutum
  Clone ID: GOSHI-09MAY01-C58223_1
aggacatatccactcttcctatgatgtgaaacgttacattcagccggtattggaaaacgaatccaaggatagcttatggtgagcaacggaagataattcaagtacgatttacgacttacaaacttgttatatacttttgattgctcttggttcttagttactttgatgttgctgcctgtgtatttgccttaacaatgcaatatcttgttccatgaaaaacattcttagagattgttcttaactttcaatataatgcttctatatattcttttttatacactgtatgtactatagattttgatacaccagtactgggtaccccggaataatcccgtcctttatatgacctatctgatatcttatcggcgagctgaagtcgagcgtcggatcacttgccggtttcattttcagtggcaggactggtttctaaaacatattcccgcgtgggttttgtgttggattcatctaccatcttgaaagctaagcgcttcaagttgtcccattcgaagtcacgtttgcaatatgcagatcgaacctctag

SEQ ID NO: 21 - DNA, 524 bp, Gossypium hirsutum
  Clone ID: GOSHI-09MAY01-C59843_1
atgtcctcgtggaagtgacatcgtctttaaaccctgcgtggcaatccctgacgcaccgccgtgatgcccagggaagacagggcgacctggaagtccaactacttccttaagatcatccaactattggatgattatccgaaatgtttcatcgtgggagcggacaatgtgggctccaagcagatgcagcagatccgcatgtcccttcgagggaaggccgtggtgctgatgggcaagaacaccatgatgcgcaaggccatccgagggcacctggaaaacaacccagctctggagaaactgctgcctcatatccgggggaatgtgggctttgtgttcaccaaggaggatctcactgagatcagggacatgttgctggccaataaggtgccagctgctgaccgtgctggtgccattgctccatgtgaagtcactgtgccaggccagaacactggactcgggcccgagaagacctcctttctccaggctttaggtatcaccactaaaatctgcaggggcaccattgaaat

SEQ ID NO: 22 - DNA, 501 bp, Gossypium hirsutum
  Clone ID: GOSHI-09MAY01-C59873_1
atacacagcccattctgctccatataccagaaaaaaaacacatttgaagcatgaattcccagcaacagaagcagccctgcaccctaccccctcagcctcagcagcagcagcaggtgaaacagccttgccagcctccaccccaggaaccatgcatccccaaaaccaaggagccctgcctccccaaggtgcctgagccctgccaccccaaggtgcctgagccctgccaccccaaggtgcctgagccctgccaccccaaggtgcctgagccctgcccttcaacggtcactccagcaccagcccagcagaagaccaagcagaagtaatgtggtccacagccatgcccttgaggagccagccaccggatgctgaaccccctaccccattctgcgtatgagtcccatttgccttgcgacccgcattctgcctccaccaaaaaagaatgtgctatgaagctttatttcctatacactctgagtctctgaatgaagctgaaggtcttag

SEQ ID NO: 23 - DNA, 557 bp, Gossypium hirsutum
  Clone ID: GOSHI-09MAY01-C59593_1
aaaaagcattgaattcccgggatcccaggcagcagttagcccgccgcccgcctgtgtgtccccagagccatggagagagccagtctgatccagaaggccaagctggcagagcaggccgaacgttatgaggacatggcagccttcatgaagggcgccgtggagaaaggtgaggagctctcctgcgaagagcgaaacctgctctcagtagcctacaagaatgtggtgggcggccagagggctgcctggagggtcctgtccagtattgagcagaaaagcaacgaggagggctcggaggagaagggccccgaggtgcgtgagtaccgggagaaggtggagactgagctccggggcgtgtgcgacaccgtgctgggcctgctggacagccatctcatcaaggaggctggggacgcggagagcagggtcttctacctgaagatgaagggcgactactaccgctacttggccgaggtggccactggtgacgacaagaagcgcatcatcgactcagcccggtcagcctaccaggaggccatggacatcagcaagaaggagatgcc

SEQ ID NO: 24 - DNA, 401 bp, Gossypium hirsutum
  Clone ID: GOSHI-09MAY01-C59413_1
atcgcggagcaagcgagaggtctgcgcgcagtctgagcggcgcgcgtccagtcccgaggcccacgccagcacgccctcatggcccccgcagcggcgtcggggggcagcaccctgcccaggggcttctcggtcttcaccaccttccccgacttgctcttcatctttgagtttatcttcgggggcctggtgtggatcctggtggcctcctccctggtgccctggcccctggtccagggctgggtgatgttcgtgtctgtgttctgcttcgtggccaccaccaccttgatcatcctgtacctaattggagcccacggtggagagacttcctgggtcaccttggatgcagcctaccactgtactgctgccctcttttacctcagcgcctcggtcctggaggccct

SEQ ID NO: 25 - DNA, 499 bp, Gossypium hirsutum
  Clone ID: GOSHI-09MAY01-C59753_1
ctcagccaaaggccggtagctcgtttatcaactgagcgaatacttagttgagcccttacaaataagtattcgcttagttgataaagagttgatcttttgtgtatgtacataagggttgataatgtgaagcaagtacgatatcgtaaatttgtgcatatgaaattatccgtttagctatatgaatgctatacttttgttgtgctggaattccttgctcaaaacttactaagcataaattgcttactccgtttcattgctcctctgttttatagatttggttctccagctatcggactcgggatcttgaggtcaaagtcgcccacactatcaaagcccccccttttggtacaattttggttgaacttcgaaatggcatgtataggactacccgtttgttgtgggtcgtggaccctttggacttgtataaattttggatagccatgcgaaaatggcttatatgtgtttgagtatattgttataatcaattggtgtggatatg

SEQ ID NO: 26 - DNA, 767 bp, Gossypium hirsutum
  Clone ID: GOSHI-09MAY01-C59743_1
atggaggtgtctaccaacactgccatgattcagaccagcaagacagagatcacggagctcaggcgcacgctccagggcctggagattgagttgcagtcccagctgagcatgaaagccgggctggagaacaccgtggcggagacggagtgccgctacgccctgcagctgcagcagatccaggggctcatcagcagcatcgaggcccagctgagcgagctccgcagcgagatggagtgccagaaccaggagtacaagatgctgctggacatcaagacgcggctggagcaggagatcgccacctaccgcagcctgctcgagggccaggacgccaagatgactggtgtcccttcctcagcaggaagcgtcagcccccgaagcacctctgttaccacaacttccagtgtctctgctaccaccacctctaatgcctctggccgccgcacttctgatgtccgtaggccttaaatctgcctggtgtcccctccctctgtcttcagcacccagaggaggagagagctggcagttccctgcagaagagaggaggggctgctggacccaagcctcaatccctctgctttcaggaccccacatcccgactgtctcctgaggatgggccctctgtgctcttctcttcccattggatctctctcctctgtgacctggatactctttggtttctcaacttctctaccccaaagaaacgataattcaataaagtttcctgcctttctgcaaacgtaaaaaaaaaaaaaaaaaaaaaaagggat

SEQ ID NO: 27 - DNA, 628 bp, Gossypium hirsutum
  Clone ID: GOSHI-09MAY01-C59663_1
tgtgcagagaagcagcggcgttccaggggttacagattagtgataaaacccatgatacacatcacaacttacaaacagatggtgctgtgtttattgatgcaacagataaagctacagcaactgtggatattaatgaaataggtaccctgacttctattcatcccgaagaaccagagggagaaccgataatatttctagtattgaggcaactgttacaactgaagttgttgaagatacaactttagatgaagggtggcaagaagccaattcgaaaggtcggtcaggaaatgccactggaaagaagtatggaaggaagaaaccagtttttgcaaagctaaaggtgaatggttgtgaatattcaaatggtagagagagtgggagtaggcgagacattatctcaccagcaggaaaaactgccccgaagaacattatacgggaaatgcaaacagtaaagcaatccaagtcttccagcttgaatcctagagggacttcaattggtttacctgcttctgtttccagaggttcctccccttcagcaaatcttagtgccattgcttcaaaatcactttcttacaaagaagtagctgcggcacctccaggtacagttctaaagccattaccggaacca

SEQ ID NO: 28 - DNA, 998 bp, Gossypium hirsutum
  Clone ID: GOSHI-09MAY01-C59193_1
gcgttcgggacttaagccttgttattgcctttagaggaacgcaggataacagcatccagaattgggttaaagacttattttgagaaacagcttgatttaaagtaccctggcatgcctaatgctatggtgcaccatggcattttataccgcttatcacaatacaaccatacgccctgagaattctatatgctgttaaaaaagcaaaagagttttatggggacctcgacatcatggttacaggccattcaatgggaggggctatgtcttccttttgtgcacttgacctaacggttaatcatgaagccaagagtgttcaagttataacatttggacaacctcggatcgggaatgccgcctttgcttcttactatgccaaactcgtgccaaatacaattagagtgacaaatgaccatgatatcgtccctcatctgccaccatactattattatttccctcaaaagacataccatcactttcctagagaggtgtggctgtattcccttggactgggaagtctggtttatagagttgagaaggtctgtgatggttctggtgaggatccaacctgtagtaggtcggtgacaggtaacagcatcatggaccatttgaactattatggtgtcgatttaatgtgccaagaatggagatcatgcagaatcgtgatggatcctcgtgttgcggagtatggcaaaacggatcacaaaggaaatttcattttgtccagagcaccagccacgcgtgttcggtcgaatgaaggggaagttaaagctagtgcataattgatcaatttatggtttcaccctgccacggtttatcgagttctgactgcttcaggtaactacgttttcgttctgccattgaagcaaatgtaaaaaataattgaaaaagagcattactaatgtaggttttcgttaggaatgaattcatgtaaatatcctccaaaatgtgtacatttcttattatacttatggatattaggctaatggccagttcctaat

SEQ ID NO: 29 - DNA, 606 bp, Gossypium hirsutum
  Clone ID: GOSHI-09MAY01-C59133_1
caattcagtctgctactggtgtggtatataatattactggagaaaagatataaccttgcaggaagttaatagagtatcacaggttgtgactagtttggctgatccttcggctaacatcatatttggtgctgttgtcgatgaccgctacaatggggagatccatgtgactattattgctacaggcttctcacagtcatttcagaagacattatgaactgaccccaaggctgcaaaacagaatgacaaagttgcagggggacaagaaagaaaggggatacccttacccctcaaaccatcttccccttcaactgttccgtccggatcatctcaacgaaggctattcttttaatttccctgatctcttctttctacctgctttttgctgttagatgtgtaaagatcttgaagctcatgagtctttagttgccatttgttttatatgattgtgcgcctcttcaataattaacgagtttttgagtccaaagtagatatgtccatgtttaaatagcaaactggtatgaagacatgaccctgaaatgcctctagataaagagcttgtgaattttatcacatggattaaatttacgtagctcttttttttgagat

SEQ ID NO: 30 - DNA, 590 bp, Gossypium hirsutum
  Clone ID: GOSHI-09MAY01-C59313_1
agcagctgagcttatgatgattggtgcaagacagtgctgagaaaaatgaaagaagcctcaccgttgagcttgaaagttactctaagatccatacgagaaggtagatttcaatcacttgatcagtgtctggcacgtgaatatcggatttcccttgcctggatctccaaatcggtctctaatgatttcactgagggtgttcgggctaggttagtggacaacgattttgctcccaagtggtaccccgcaagcctggaagaggttagtaaagacatggttgagtactactttacgccactcggggaattagagcctgaactggtgctgccaacttcactaagagaaccttacatctaaggaaagatctctttgtaggggaagctatcagtttttggtagcagacaatttttggttgatcatgttcttttcatttattgaaataacatcccatatttttatgttgttatcagttatacatagaactttagtaggaacgcagagattagaaagagttgttttgtttgtgatttttcaagtaagaccagatcttattccgtatggttttatggatcttgttccgtatgtttttatgg

SEQ ID NO: 31 - DNA, 790 bp, Gossypium hirsutum
  Clone ID: GOSHI-09MAY01-C59323_1
ctggaaagtagtcattggaagctacagcaacaaccagggcatggctatactcttccaaagtcaagattttgttcattggactatgcatcgagatcctctttattcatcgttgaaaaccgaaatgtgggagtgtccagacttctttcccgtgtcgattaacagcaccaatggggtcgacacctctgttgaaaacccaagtgttaggcatgtcatgaaggcaagtttcaattcccatgattactatacagtagggacttatgttactgagcaggaaaggttccttcctgatgctgactttaccggaaccagtttggacttgagatttgattacggtaaattctacgcctcaaagtcgttctttgatggtaagaagaaccgaaggatactatgcgcttgggtaaatgaatccgatagtatggaagatgatctaaagaaaggatggtctggacttcagtcgattccgaggcagatttggcttgacctaaatggcaagcaactagtgcagtggccagttgaagaactcaatagtctacgtggcaatgaagtctatgtgtatgacaagcagctcgaaagcgggtcggtttttgaagtttcgggcatcactgcttcgcaggccgatatcgaaataatgtctgaattgcccaaactagaagaggccgagttcatagacaccagtttggttgatccccaactaatctgtgacaaacaagatgcatctgtgaccggaaaattcggaccattcggtttattagctttggcaacaaagacttgactgaacaaactgcgattt

SEQ ID NO: 32 - DNA, 777 bp, Gossypium hirsutum
  Clone ID: GOSHI-09MAY01-C54803_1
ctggaatattcgcaatatggttgattccgcaactgtttgcttacgcgtttaactgcccgatggcgaagttcttacaggcgcaaagcaagatgatggcgatggcggtgatatccggggtggcgttcgttctgcactgtttgtttagttggctgttgatgctaaaactgggttggggattagttggtgcagccattgtgttgaatgcgtcgaggattgccatagacgtgggtcagtttttgtacataattagcggcacttgtggtcaggcttggaccggcttctcttggaaggcatttcaacatctctggggatttgtcagattgtcttttgcttcagctataatgctctgtttagaggtatggtattttatggcattgatacttttcgctggatacctgaaaaacgctgatatatctgtggatgcgttgtcgatctgatttcaaagtaattttatggcactcgactatgactactagtcatacgcagatctacggattagttgggtagggtattacttctctttattaactatattctttttgacatcaattttactttttgaagatttaacaaattaatcattgcactcctctattagtatatgcagatctatggattagttgggttggattcatcgaacctaggttaggggaatctagattgtattttttttaattatttcaattttacattaagcttaaagcttgggttttttgctttaattgttctattattaataattatttttaataataaatataaaaatcaatttttatt

SEQ ID NO: 33 - DNA, 732 bp, Gossypium hirsutum
  Clone ID: GOSHI-09MAY01-C54133_1
tgtttaaccaaacacctaccctgcctctttctcttgatttcctttttgtttttcttcaaagcgttctcttctgattcatttaaaatatgggggatttatctcttcctaatgacgccctcttccttggatttgatagttctactcagtcgttgaaggcaactgttttggactccaatctcgttattgttgcttcagagatgatccactttgactctgatttgcctcattataagaccaaggatggtgtttacagagacgctaatgttaatggcagaattgtttcacccaccataatgtgggtggaggctttggatcttatttttcaaaggctttctaaatccaatttggattttgggaagattgctgccgtttctggtagtggacagcaacatggcagtgtttattggaacaaaggtagttctgcattgttatcatcattggaccccaagaagccattagttgatcagctccgcgatgccttttctgttaaggaatcaccgatatggatggactgcagcacaactgctcagtgtagagaaatagagaaagctgtcggtggtgcattggagttgtctaaaattactggttctcgtgctcatgagagatacacaggaccacaaattcggaagatatttgagacacaacaagaaacttatgagaacactgagaggatctctcttgttagctctttcatggcttgtctattcttaggggcttatgcttgtattgata

SEQ ID NO: 34 - DNA, 794 bp, Gossypium hirsutum
  Clone ID: GOSHI-09MAY01-C54083_1
cccacgcgttcgcccacgcgttcgtagatcattaaagaagaagaagaagaagaagcactatctttctatttgtgtggtccttttgattttaaactttcttttttattcatcctttttgggtttctttttggctttccatttttcttatttccggtgaagctaataccgccggaatctgaaaatgtcggtgtacgacgcggcgtttgttaactcggacccagcgttccccacgtcggttttcgggttaaagctatgggtagtgatcggaatccttttcggtactttcatagttttatctctgttccttctctccctttgtctgacagcccgccgcaaatctcggagacaccgacagcttgaccccgcgccgccaatctgcaaagagatccaggaaatagtccaccaccgtcagccatcggcgccggatcaccaacgagtcacgccgcccgttcaggaggttaaagtggacttggggaaaacggagcagcagcagcacgtagtgacggtgttctctagcggagaaagtaaaggacataccagcgtgagcgaaacaccgtcgtttgggagcgggacggtcgggccggaagtatgtcaccttgggtggggaagatggtatacgttaagggaactggagttagccaccgatggattatgtgaagaaaacgtcatcggcgaaggtggctacggcattgtttattacggggttttaactgatgggactaaaattgctgtaaaaaatttgctcaacaacaggggtcaagctgagaaggaatttaaagtagaagtggaagcaa

SEQ ID NO: 35 - DNA, 838 bp, Gossypium hirsutum
  Clone ID: GOSHI-09MAY01-C54063_1
tgctgccatgtgtctgtaccaggattctcttctcccacttgggtttttccatacagttaagaccctccctcctcacttcaatgtgctgtgctaatacactcctagttagtttgagcttttgagagctaaagtgtaagagatgttgaaagaagagattagtgatgctggtggtggaaacgattgggcgcgtgtctgcgacacatgccgctccgcagcttgcaccgtgtactgtcgagccgactcggcgtacctctgtgctggatgtgatgcccgagtgcatgctgcgaaccgggtcgcctcgcgccatgaacgcgtatgggtgtgcgaggtatgtgagcgtgcccctgctgccctgttgtgcaaggcagacgctgcatccttatgcactacttgtgatgccgaaatccattccgccaatcagcttgctcgtcgccaccagcgtgtccccattcttccaatttcaggatgtctgtatggccccttgcccactgaccatggctgtcgaaaaatggcatcggcgactgaaactgaagatggttttatgtgcacaaacggagacgagacaattgccgaggatgaggacgaggcggcttcattggtactgctgaatctgggaaaaatagcaccaaccagaataacggttcatgcttgcttgggaggttgacgactatctgacctcgtagatacaattcaagcgtggagaatcaattcactgatcagcatcaacaacaacattacggtgttccgcacaagaagtatggtggtgatagcgtgtgccagttcaatctggagaaagcaaagatcactttcagcagcagcagcagcaacaccagaattt

SEQ ID NO: 36 - DNA, 449 bp, Gossypium hirsutum
  Clone ID: GOSHI-09MAY01-C55903_1
cccacgcgtccggccatacattttttgggatttttggagtagaactgcttgaaagtagaaaagcatggcaacagtgacagcttcacactttgtttcgaggatttcccatggagctgaaactaaggccaatctgagtcagacagggttggggaatcaatccatgactcacaatgggttgaggtttttaaacaaggtagataggttgcagatgaggaccaatgcaaaggctgttgctaggaacgcagtgaaagatgaacacccaactgcaaatgacaagctatctgggaaaattatatgtggaacagggatgaatattatctttgtgggagctgaggttggtccatggagcaaaactggtggacttggtgatgttcttggcggacttcctcctgcaatggcggccaaaggacatcgtgttatgacagtgtctcctcggtacgaccagtaca

SEQ ID NO: 37 - DNA, 508 bp, Gossypium hirsutum
  Clone ID: GOSHI-09MAY01-C55473_1
ggaaatccggggcggccccaggcgtccgagaagctacagtatgagctgtggagaagtaattgaccccacaatttacggtgaagaagaagagtgtgcgcagttgcattgtggtgttcctccatacgaactggagagaaggttgcatgaattgttggaatcgaggcaggaagagcagataagagaattagaagctgctttggcaagtgcacagcaagaactggtcgacaaggaaagagagatttcatggtggaaagacactgcacggcttatgtcgattcatgtccaacaaccttcaccgtttggttcctagctgaggtgagaaaatttcttaactgcttttttttcatgtgtatcatatcaggtgtagttgtttggtgtttaaagatggattgtttgttattttggctttaaaagcattttggatgggtgattagtttgcaagtgaaacagggaaattatttcacatttttaagggatattagtttatcaatgaatagttatctacatt

SEQ ID NO: 38 - DNA, 636 bp, Gossypium hirsutum
  Clone ID: GOSHI-09MAY01-C55143_1
aaaaaaaccctagcaaaaaacactatacgatctatgaacagaagctgaaaaaataagcatcaaataagaaattaacccacagttctaaagaacccccatcaaatgatttccgatcctaagctgatactatatgcttgcattgcaaaaggacccacacttgtagctgaattcactcgcaaagaagctgtggggatcgagccattagcaagggcatgcatcgagaaagcccctccttaccattcaatgttctctcatacagtttcccaaaggtcctataccttcttaatcgatgacccttttgtttatttcatcatatcccatgaagatctcgacaaatctgagtcgttttggttcttgaatcgctttgaaagttgctttggacgattttctactcactggtttggttatgggtaccgataatttgaccccaaattgtcttcaatctcatttcgatcccgttttttcaaaagctttgggtttgggtttggattttgttccatccccattattaaaagatagtaaaaacccaaccgtggtggctcctttgttaggggtttgaaaaaaaaaaaaaaatccggtggtggtttggaagtcaacggcgttgaaaccaaaaatggttgccgtggactccgcggc

SEQ ID NO: 39 - DNA, 751 bp, Gossypium hirsutum
  Clone ID: GOSHI-09MAY01-C55053_1
gccgaccagaaggcctacgctgcggcgaagtagggggaagtgtggctaaggtgcagcccacgaagtcacgcagctcggtttgttgcgtggagttcaaccccttcggagatgcattgatagctgccggatgcgccgaccagaaggcctacgcctatgatgtacggaaaatggtggaacctgtacacattttcgatggacatacgaaaaccataacatacgttagatttctgaatgcccaaacactggtttccgctggaaccgacgggtgtttaaaactatggaatatcgttgattctcgtttacttagaacatacaaagggcacgtaaacagtcggagttttgtggggttgtcagtgtggaggcatggagggttgcttggatgcggatcagaaaataaccaggtgttcgtttatgataccaggtggggtgagcccatttgggtgcatggcttcgagcctatgggtagagatagctccgatcatcaccatgctttcgtcagcagtgtgtgctggaggcaagtcaatgaagaccagtgcacacttgttgcaggtggttccaatggagttttacacgttttcgtgggcaagaggaaatctgattcagagtagcccatgtttggaaacatgaccttcctttcctcctcaacaatgtaatattcaaggttgaatctgcattctccatatcttactgttgtagctaatacttttcggttgaattataaggtttgacaatattaattaattaatttatt

SEQ ID NO: 40 - DNA, 692 bp, Gossypium hirsutum
  Clone ID: GOSHI-09MAY01-C55043_1
cgtttacgaaaaatataatattctcactttcccggggatcaaaggccatatattttgcgaattcaattaatgggttttagaagaatgggttggcatgagttactatgggtcggaaggctgcttgttcttatgcaactgcttcatggggtgtttggttggggaaaggacggtcattttgctgtttgcaagatagctgaggaatatcttactaaagatgctctggctacagtaaaggaactgctccctgattccgctggaggtgagcttgcatctgtatgctcctgggctgatgatgtaaggtggcactatcattggtctagtcccttacactatgttgacaccccagatttcaagtgtaattataaatactgccgggactgccatgatgctgctggacataaggatcactgcgtaactggagccattttcaactatacaaagcaacttttttcagcatatcagggatatagtcctcagttgagttacaatttgacagaggcgcttatgttcttagctcattttatgggggatgtccatcagccattacatgttggcttcttaggagatttaggtgggaatacaattacagtccgttggtaccgcaggaagacaaatctacaccatgtctgggataccatgattattgattctgctgtgaagacattgtatggctcagatcttgcaacaatgat

SEQ ID NO: 41 - DNA, 378 bp, Gossypium hirsutum
  Clone ID: GOSHI-09MAY01-C55293_1
cccacgcgtccgcccacgcgtccgcgcgtgcttagatcccgttggttgcaagacggttttcgtcgataacattgatttccttaaggaattggagtgagtttcggttgaactcgtgttcttatccttcagacaatgaaattcgaatccaagctgaaaggatttgtcgaagaaagcctccatagagaatggcagccaattccgttttgtagataaatgtttttgcggtgacaatcgggtagcccgttagattcgttagcgaagaaatctttagatataaagtgtatgttcagtgatcttcctgtttttatttcaatgaagcatttatgtatatttttcgatacatatttggatatggatattgaaaaaatatgatctttt

SEQ ID NO: 42 - DNA, 708 bp, Gossypium hirsutum
  Clone ID: GOSHI-09MAY01-C56533_1
tttctaaaaaaaaaaagtataacttcgtgaaagtataaatgttgaggtgtaaagggtaaattcatgattgtatcttttattttaattccatagaaggttaagttttgagaggggtcgagatttcattggtgaaagtcgcactagtcattcgaataaatctagaaatcaagggagaagacagagaagagagagctgagagagatcggatcagagatgtcatcacacaataacaattcaacttcggccaacgatcccagacaaccgtcggcggcaaagccatacgtggcgcagcctgtttcgccgcaagatctccctgtcgattattccggttttatcgccgtgattttcgggattgcaggcgtcatgttcaggtacaagctgagctcgtggctagcgatcatattctgcgcccaatcacttgcgaacatgaagaacgttgagaacgatctcaagcagatctctatggctatgatgtttgctatcatgggattagttacaaactatttcggaccagctcgaccaggaaaacagagttaaagataactccaatgatgcggttaagtttctaatttcattttgcacgatgatatcagatcatgaagtttagataaattgtgaccttattcaagaacaattttgtcggataattattttctatatgactaattgggttatatttataaaattgaaaatcctacttttagagcc

SEQ ID NO: 43 - DNA, 327 bp, Gossypium hirsutum
  Clone ID: GOSHI-09MAY01-C56333_1
caaccagtcaaatccatcactgttaaatgatcttccagcccagggtgtaactgaaatggtgaagcaccacgggaattggttgatgtcgcttcggtttttaacatcaagtctctgacctcctgaatggcaagtggtgggattctctgattatgacgcatgtttctttttttaatttggttcttctgtctgcatatttttatctccctcatttcccccattctctccctctatcccccatctgccttcctcttccatgatggaggtgcaagtttatgtattatgacataagggatttcgtttataaaaacatttctttggatttactaa

SEQ ID NO: 44 - DNA, 514 bp, Gossypium hirsutum
  Clone ID: GOSHI-09MAY01-C57993_1
ttggtttggattcttaaatttttgaaatttgtttgagaatttaggaagaaatgtcaaggtttcgcgggatatggcatgcttccctgaatgcaaccaagaaagctctggcatggaatgttgatgattggatccctcccgctgaaaaatacatattcaatttcagttcaaaagaggagctcaagaaatggcatctttattctgatgcggaatttggagggttgtcgtcggcttcattggagatcaaagacgatgctgataaatcaagtggagttttctctgggaatctttcccgggatgtaaccgaaggtacaaaatggaacataactaggagcggcttttgtggaatgcggtctaagaagtttgatggcttcattgatttggaagcatatgatacaatagcattaaggattaaaggagatgggagatgttatatatctacaatctatacagaaaattgggtgaattcacctggacagatggaagattattcatggcactcttttgttttggtccc

SEQ ID NO: 45 - DNA, 390 bp, Gossypium hirsutum
  unsure (1)..(390): unsure at all n locations
  Clone ID: LIB3149-038-Q1-K1-G8
tgattttcaaagcctgatctataaattgttttttttacgctacanaaacggctatccgggggccggttttctacttgctcctgatgctacacaggtgaagctattcattgatgaactttcagagacgggaaaacttgatgggtcaaagtttacattctgggatgaacgctctacatcaaaaaatgtggaattgctgataaaacctttgagcttgcatccagtactaacaaaaactgtagttgataagtttgctgctgttcacatacttcaagcataccttgattatgtgaacaagaaagaacgtaggtgagatataaccctattggaatacatctaggcgttatgtcatctgaataacacccggatcgtagctttgcaagtgaaaatact

SEQ ID NO: 46 - DNA, 352 bp, Gossypium hirsutum
  Clone ID: LIB3149-038-Q1-K1-G7
tgattttcaaagcctgatctctgaactgtctctggtaggcttcgtagttggctatccggttggcagacaacgacttgctcctgatgctacacaggtgaagctattcattgatgatctttcagagacgggaaaacttgatgggttaaagtttacgttctgggatgagcgctttacatcaaagaatgtggaattgctgataaagcctttgagcttgcatccagtactagcaaaaactgtagttgataagtttgctgctgttcaaattcttcaagcatacctggattatgtgaacaagaaggaacgtaggtgagatataaccctattggtatacatctaagcgttatgtcatctg

SEQ ID NO: 47 - DNA, 297 bp, Gossypium hirsutum
  Clone ID: GOSHI-09MAY01-C57473_1
aaggaagaacccaaaagggaagagatttttgctgttgttatgatggggggtcgccaatacagggggttccctggaagatagcgctacacccagagactgaaaggggcaaatgtcaacgataagattgttctaaacaaggtattacttgggggaacaaaaacaacctacatatatcggaaaaccctgtggtaactaatgctgctgtacatgctgttggtgaggagcagggactaaacccaaaagtagttgtcttccaatataagaagaagaaaattatcggagaaatattggacatcg

SEQ ID NO: 48 - DNA, 727 bp, Gossypium hirsutum
  Clone ID: GOSHI-09MAY01-C57763_1
aaagaaaaaaaagcttcatccaccactctatacaatggaaaagattcagcacaaccgtgtggaagctaaaggactaaagcttcatgttgcccagattggaactggtccccaagtggtggcattcttgcatgggttcccggaaatttggtattcatggaggcaccagatggttgcggtggctaatgctggctatcgagctatttccattgattttaggggctatggactctcagagcatccatcagaaccagagaaggcaacctttaatgattttgttgatgatgtcgttgccgttctcgactctttgggcatcactaaggcgcatcttgttgccaaggattttggggcctttgtagcagccatggtgggcatacttcaccctgatagagtgtccaccatcattttactaggcgttcctttcctgctaccaggtctctctccactccagtcgcaacttcatctcattccaccaggcttttatatgctaagatggatggtgccaggaggagctgaagcagattttggccgctttgacgcaaagacggttattcgcaaggtttatattatgttctctggaagtttacccccggttgctgctgataatcaagagataatggatttggtcgactcatctgcacctctcccaccatggttgagcgaggaggatcttgcagaatatggttctttatacgagaaaagtggattccgtacggcactgcaagttcat

SEQ ID NO: 49 - DNA, 856 bp, Gossypium hirsutum
  Clone ID: GOSHI-09MAY01-C57733_1
gttatcagttgctttttcttagtgcacgtgcaatagcccaggcatatatcaccagacaatttttagtcaaccttaagcaggatggtaaggcattaccagatgggccaattgttatatcccctgatggactttttccatccctatatcgagaagttattagaagagctcctcatgagttcaagattgcttgcttagaggagattaaggcattgtttccatctgattgcaatccattctatgctggtttcgggaatagagtcaccgatgaaatcagctacgttaaggtcggaatcccgaaagggaaaatcttcattattaacccaaagggtgaggttgccgtgaaccgtcgtgttgacacaaaatcttatacatctcttcacgcccttgttcatggcatgtttccaccgacaacctgctccgagcaggaagatttcaattcgtggaatttctggaaactgccacctcctgtattcgacatatgaagttgtcggctaaagtatgttgctttagcatttggatgccaagatagatggatgatgatttcttcgatcattccagagctgtccaggttataaataatcatgactgcttgaagaactttcaccctgctcttgaaggtgcagattcggtcaactctcggttgtcgccgaaaataatttatttgaaattttttatagaatctctgaagctttatattggcttcattgtagtttggtttataatttgtatagtgaattattgtgatcccacgaacatttcccagtatgtatacattcatgggagaaaagggtagttctaattattgtttatatatatatttgttgcttatacaaaataaatctttcattattagttc

SEQ ID NO: 50 - DNA, 740 bp, Gossypium hirsutum
  Clone ID: GOSHI-09MAY01-C57113_1
tacccttcagtgctgaaaaatttcagtgctattggctggggtttacaaggagctacgtcaggcatggtagggtgccaaagagcaaattgtacaggagtccaaaaattccacgctaccatctcaagagaggaggcagctataaagaaaaaatatggagggattattcccaagaaaccaccactaatctccaaggaccatgaacgtgcctacttcgattctgctgattgggcacttgggaaagcaaggtgttgagaagcccaaaggaccacttgaagccctccgtcccaaattacagccaacacaacaacaaacacgatacaggaaatctccttgtgccccagcagatggtgcaggtggagggagtgctcaaccagagggtgggactgccgacgaatgagaaactacccttaatcgtctgatcttgtgaggactattggttgctactctaatacccagataggtaatgaataattttaaactgtttccatgaataaaaacttgatgaaagatgtttcaattttagttaagttcgacaagatacaacatttatgcagtttgagaatggtgggaactgaaaatgtctattgttccaatgttttttttttaaactaatgtggaacattattcttcgtgatatgagtaatcttccccttttattctcatggtggaaaatcaacatgtccggcctaagaacattgtaataaaaaaaaaatgtaggctggaccaaataaaaggctccg

SEQ ID NO: 51 - DNA, 761 bp, Gossypium hirsutum
  Clone ID: GOSHI-09MAY01-C57093_1
cccacgcgtccggtcttcttcaagcatcactggaaggcttgctcagggttatggtagactgacgcccgtcacgagtattctacccaactgatgcgaagctatcggaagaggatctggagatcttaaaggaatactgtatctctggaggtgacggacttcctcgaggagtcgttgaaaatcaagttgctcgtgttcggctcgttgtaaagtggcacggattggagactcgagaattgggcgaggactggagatcttcaagtggcaaactaggtgctgataaccagactctactgagaatattatgccacagggctgattcagaggcatcccagtttgtcaagaagcagtataagatacccaagtcttctgcataggctgtagttcgacccagaatcggcttgaagtaggagaaagcgttgacttgaaatccagcttgacgtaggagaaaatggcaaatatgcatcagccggtttgtgtgaaatataagttcatcactcccttgtaagagaaaacaactggattttctttcatccttctttatggcatctttaaatcactctgttctctttgtatgtttacataatcacatttgagttgcgtatatgagatggaaaccataccatggcccagtacagctgttttgagcctttggagctatgttacctggctttcatttttcctaagatactcgccatacattcaaacttgagtttgagatttttagctttcaaatatatagattttttttaaaaggaataaaa

SEQ ID NO: 52 - DNA, 702 bp, Gossypium hirsutum
  Clone ID: GOSHI-09MAY01-C57393_1
gttccataccaacgtctgaagctcttcttctcactctgtttggataccgagaaaatgaaaggaaaatggcgcaaaccctggcgatgcctgttgcaccctctctctcctttatatgcaacaaagtaagctctatgtctctctccaacactgcttccctccccgtttcaaaccctcccaagcatcatggtctaagcattgtatgcgttcgtgttggcggagtggaaattccaaacaacaagagagtggaattctctctgcagtacatccatgggattggtcgcacgagggctcgtaaaatcctatgtgatctccaaatggagaacaaaatcaccaaagatttgtcagaggaagagctcattacgattcgtgatgaagtctccaaatatatgattgaaggcgacttgaggaggttcaatgctcttaatatacggcgattgaaagagattcagtgctaccgaggggttcgccatattcagggattgccttgtagaggacagcacaccaaaaacaattgccggactttgaagggtaagagagttgccattgctggtaagaagaaagccccccgttgatcttaaccgtttttgtttcgatgaagcgaatcatgttgaattttatgtttgattcgaaatgaatgcattgtagacttgtagtacaatatggtttgatttgatattgaaatgggatttgcactgtctatat

SEQ ID NO: 53 - DNA, 619 bp, Gossypium hirsutum
  Clone ID: GOSHI-09MAY01-C57253_1
cgtactgcctactactactgcttctactacctaagataattaattatctgcgcaaaaccaagctacctttcttcgtcctcatctgtgcaaagcctctgtttctagtgccgttctcttaatttgtttcttattgtttgctcattttcgttagtattagatcagagagagagagggtggagatctggacaggtctggctgtggccgaaatcaaagaagaatatttgagggaggaggagaaaacatcgaacaagattaaaccgaaacaaattaggaaaattctatggattggtggcataagatgatcttccctgttcgaagactctggtttgttgtttcttctcgcgttaaggctcgcaaaaatggagccgggttgttgaagcttcacgatgatgtacaaacatgtggatacgaagatgtgcaggtgatgtgggaaatgctgcgaagatcggaatcggagctgttggctgctaacaacaatcccaagcgcaagcaccgcccagctttctggagagttttcgtttggtcttctaaccacacttcatccttctcgcccaattatgcctaacttcacaccatttgcatgcatacttcctaatattataatataatgataatgatg

SEQ ID NO: 54 - DNA, 775 bp, Gossypium hirsutum
  Clone ID: GOSHI-09MAY01-C57243_1
gcgcgatcggaagactacttgaagcttgctgttaaaacaccgtaattttccagatgaataggcgtgtaagatggaatgaggaaaatctgggggaaattgaagcaaataaacccgtaaggcagaaaataactgaacccaagacgccgtaccaccgcatgattgatgacgatgggtctttgtctcccagaggacgtagtttcaatgattgtgtcattgatgtggatgctgaggaattatgctctgctttgaaagatgtggcttcctcaagtagaaaaacaactgggcaatcaggtggttggacttcttctgaggatgaggctgatcctatggatcatgatgaagaagatcggaatagtaagagttttaaggagcaaaggaaagcacactatgatgagtttttgaaaataaaggaactgcgacgtaagggttctttcattgaggatgaagatgatgaagtggagggtgattcatcatcatcattaagctctggtgtcaaagacataggaattggggaaggtcctgcaagtttgccccaaaagtcttctgcaagtcctgggcatccaggtaatggattgtgattgtagaagtcatccgaccagtcaaagacgcaaaagctcgctcttttgacattctttatggttgtttgatgtttattttgatgcaccgcaaaaaagttagggattttcctttttccatatttgagttcgcttgtacaaaattatctaatttggcatgtttgtatgaaatcttgctcatctaaacttgtggtcttaac

SEQ ID NO: 55 - DNA, 508 bp, Gossypium hirsutum
  Clone ID: LIB3585-015-P1-K1-F3
cccacgcgtccgactagctgattttaagaaggatgttcccattttgatcatagttgttcgtttttatgcttctattttgttttgatatagttagctactgtaacaagaattgtaagtttttgtagttataatattcttagttgtgttttggatctaataataattctttcttggggaaacagtaggcgtgtaagatggaatgaggaaaatctgggggaaattgaagcaaataaacccgtaaggcagaaaataactgaacccaagacgccgtaccaccccatgattgatgatgatgggtctttgtctcccagaggacgtagtttcaacgattgtgtcattgatgtggatgctgaggaattatgctctgctttgaaagatgtggcttcctcaagtagaaaaacaactgggcagtctggtggttggacttcttctgatgatgaggctgatcctatggatcatgatgaagaagatcagaatggtaagagttttaaggagcaaaggaaagcac

SEQ ID NO: 56 - DNA, 705 bp, Gossypium hirsutum
  Clone ID: GOSHI-09MAY01-C50983_1
ctttgacattgctggagaaaaaatcaaggaatggaatatctcaagatgtgtgcattaatgatttagaacctcctgcttttgaagtcttaccatctcttaaacggctaaagcaacgggtaactgcagctggccgtgggcagtacgatgccgtgtttatgtctgggagtggaagcaccattgtcggagtcggttccccagatcctccccaatttgtatatgatgatgatgattatcgtgaagtatttttatcagatgcaaacttcatttaccgggaagaaaatgagtggtataaagaacttgtttcaacgactgtttgtgaccccctgggaacagcacgaaccttcgagtgattcatccattcctggttgaagaagaaggatggaactggttttgcttgtatgatttagttattatatctggatgacatcagtttgtgtttgtaaatgccatcagtatatgcaaagctttggggattgcaaaatgtgaggaaaagctttatattacccaatattttcctaaaaaaataagctccccctttatttgttccccagttacctaaggtttttttcttgttctttagatgcttggttttggttactaattgttctatcaatagcagttctggaaaatattggtctctataagactacctttgagaacaacatcaagttgggaacaattacttttgagaacaatgctggaacg

SEQ ID NO: 57 - DNA, 632 bp, Gossypium hirsutum
  Clone ID: GOSHI-09MAY01-C50923_1
cccacacgtactggctctgttactgtttaaacctcctccactttatatacttgaccacgtttgtgcttctctatatctaaccacactcaaatataaggagaatgattaaggctcacttttcgcactcccagtttattgttgtttcactgaaagagggcatgtttaataacgccaacgttcttttccgaacaaaattcgtggatggtgtttccacagtcctgaggaccgttgcatctaagtctagcaggtgatcgtccagtccaacgacaaatagaaaaacaagtgaaacctctttccagtgaatttcaactgagaaggccggaagcctgctacatgatgtacgtatgattgtataaattatggagtttgtgtgcgagtggaggtctagaaatccttgaccatggtaacttctcatatttaagatgcgtacttggtagtgtatgttccaagttctatacaccaatgtttctttattcatattgagtatgcaagtagcagaactggatctatttggactgagctcttcagtaagtgttctacttacatatatgcattggatttaactgtgaaaatgaaatggtagttatatcaattgttagtagtactgattgaaacagtacttgttttttgag

SEQ ID NO: 58 - DNA, 562 bp, Gossypium hirsutum
  unsure (1)..(562): unsure at all n locations
  Clone ID: LIB3827-002-Q1-N6-H11
gcacataaaatantctgaaactcacacctgaatccggttaacataagagataagcaacagtgaagtatgataatcacctcagcagatagcatttgatggtcagatttggccattccttttgaaaaagcaccaactggggcggggttaagtaaaggagggacctcgtaaaagctacatttctcaaaagcctcttctacagataatattggttctaaattcttcttgtcataatcaaccactgcaagtttggctgccatatctgcatttttctgtgtatctgcaaccaccaatgcaatgcgctgaccagcacattgagtaagctcatctgcataaaggttcagaaccaaatatggtctgagcccctatattctccccaggaatatctttgaaagagatagccgtggagactccatggggtgatgatccaggctaaaattttatgccctgcacccgtgccaaaggctctgtgctataaataaatgctccatgcagacagtttctcggagatggaatgtcatcctcataaacagcctcaccatgaaagcaaggaccagccactttc

SEQ ID NO: 59 - DNA, 427 bp, Gossypium hirsutum
  Clone ID: LIB3146-022-Q1-K1-C6
cgaggtcccttctttacttaacctcgaaccagttgggaaggcatatatgatggggggtgttcaggaacttcggttgggacccaaaacaaggcgagagtaatctggattttagtatgcttcatctaagaaaatgaaggaaatagggacgttctttggtaataggacaaaggcttcaatggttagaaccttgaaacaaagcatggaacaaatctatatcaattccaagtgcttttaatagaagaggcttttgagaaatgtagcttttacgaggtcccttctttacttaacctcgaaccagatggtgctttttcaaaaagaatggtcgaatctgaccatcaaattctatctgcttaggtgattatcatacttcaccgctgcttatctcttatgttaatcggattcacgtgtgagtttcagatattttatg

SEQ ID NO: 60 - DNA, 441 bp, Gossypium hirsutum
  Clone ID: GOSHI-09MAY01-C50853_2
cacgcgtcgaaaatttattaattttatgtcagcttggactgctaccccttattagttgttcggtggctaagtccccttattgtggctcccaattagcacttgaagatatggcgcttttatgctaaagattaaactttctgtatcttcgccgtatgaaattggtaatctggactttttctgtctgtaactgtggagtgtttatttcgattactttctcctgcagattcaagtgtgatcttgtcaattcatagacatatacgatcaaggccccctaattgttttggctttcaatataaagatgttcattatcttatcactctgaaatgcaggtaaatatgaagggggaaagcctgatgctatattttcgtgcacggatgatgattttataaggttgccactggaaagatgaatccacagattgcttttatgaggggtgcgatg

SEQ ID NO: 61 - DNA, 836 bp, Gossypium hirsutum
  Clone ID: GOSHI-09MAY01-C50853_1
ccaataaaaaagtttttattggaaagcgtgtcaggtttgattatatcgcctgggaaacagtgtcgtacgggcgaagaaaacaaatttcaatcgtaagcccaagctaatttccactctcttcttcttcttcggtttctgtaattttggtttaataatggcgaataccgagttgaaatccgataatttgtttgagatgatgaaggctcacttggctagtgatgctggtaaagagctcaccaagaagatcggcctcgtttaccaaatcaatattgcccccaagaaaattggatttgatgaggtttcttactttgttgacctcaagaaaggagaggttaccaaaggtaaatatgaagggggaaagcctgatgctatattttcgttcaaggatgatgattttatgaaggttgccactggaaagatgaatccacagattgcttttatgaggggtgcgatgaagattaaggggagcttgagcgcagctcagaaattcactcctgacattttcccaaagcctgcaaagatgtgagcagagatgctaatgtattatgtgttagttctttcgtatgttgccccaagtgggaaaattataaatggactgtcaacctctttctttgatagtacacttgacttttgtcaaaaaaaaaaaaaaaaaaaaaaaaaaaaaaaaaaaaaaaaaaaaaaaaaaaaaaaaaaaaaaaaaaaaaaaaaaaaaaaaaaaaaaaaaaaaaaaaaaaaaaaaaaaaaaaaaaaaaaaaaaaaggggcgggccgttttaaaaaaacccaattttacttccccttgtttggcaacaaataatcttttttttggggccccca

SEQ ID NO: 62 - DNA, 338 bp, Gossypium hirsutum
  Clone ID: GOSHI-09MAY01-C50453_1
tcgaattcggctttattggccattcccaatataaaaaaatggttggtttaatcctctggaccgggtggggcctcttgctgccatcttttcctcttttccaaatgtttgctggttatgggagtgtcaggcacattgaggaggagggcatgcgcggggtgtggtggccgagcgttgaacgtgctgcccgagcacatggtgagcggcggctggaggcttggggctagggttggctgctaaaaattcttaagattagtgggctgctatttgggctcttttttattggtttggggcttggtattgttttaattgtctgggccaaaaattggccatttcaataa

SEQ ID NO: 63 - DNA, 575 bp, Gossypium hirsutum
  unsure (1)..(575): unsure at all n locations
  Clone ID: uC-gsronu33B170b02b1
gcggngtcnggcttggctgttgctacccatttcttccgtttggagccgtgactgaactctgaccagcttacgcggctccggaaaaaaagtgtaagcaacaagagactggcgcacgtggcagctaggcatgggcttaaccgcttcgtcaggaggaaagacactgctcctcttgacctcattgttaggaagtatgtaggggcagttaaacaaggagatgatcataaaaacttggcagttccaggtattttggctgatattgtcgaagctctagccggtgctgtttatttggatctcaattttgatctcaccaagctgtggacgatatttaaagatgtattagtgatagatgaaattaaggtgccaaaggattttaaatcttctgagattattggagcacaaaataagctgtatggattatgtggcaagagaaaatggggaaatccagtttacagcgaagtgaaagctgaactttgcgaatacggaatgaaatatgtatattcagttaaagttgaaacaaacgatggtgtttgcggccacgagggtgatgaaaaataaacccaaaagatgcccgtaac

SEQ ID NO: 64 - DNA, 421 bp, Gossypium hirsutum
  Clone ID: LIB3146-016-Q1-K1-C5
gaaaaataaaattttaaaatttttctcaggcaattgggccagaaaggggggttcaccgggagccatttgctggtcaaatatgctgagacgcatttttcttctctctctaaaatcgatctaatccgataaattttgaaaaatatgacctaatctagtaattcttcaaaattttcagcattctgggtgattcactctcagtagagctatataatttcaattaatcaaaatgtaatacattcagcccatgatatatatatcttattggctgaaggttaggaagtatgtaggggcagttaaacaacgagatgatcataaaaacgtggcagttccaggtattttggctgatattgacaagctctagacggtgctgtttatatggatctcagtttgatctcaccaagctgtgacgatatttaaagat

SEQ ID NO: 65 - DNA, 563 bp, Gossypium hirsutum
  Clone ID: GOSHI-09MAY01-C50403_1
ctcttttgctcaccccttgctcctcgccgaaaggcttatgccaagccttcaacttctccgaaaactgcttgcgaccaacgaagtagggccctccagtggtgagagcgcgacgcaactccggtgtgcttctcccacttactcttatatttcgtatttgtattagatccaaatgaaaaggggaaaaaaagggaaaaaaatagaattaatttccggcaattattcaccttagaggtttatttggattattttctattgatctttgtatgtattctgtatacaatttctctgaaaaaaagaaagaccccccttttacaatccaaatttgacagcttttatatccaaatacaagtggtttcttgccgttttcttgctcaaaatgcaggttgtgaagacgtgggagcggagcacacgaacgtggggtgtgcaacgcgcaagccagggtcatgcgtggagcgtgcgtggggctgctgcccaaaaggggaactttagggtttctgaaaccctaaaaattagggcctatcgggccgttgtaaaattttggcttgtaaaccgaacccatttaa

SEQ ID NO: 66 - DNA, 756 bp, Gossypium hirsutum
  Clone ID: GOSHI-09MAY01-C50783_1
gctttttgatacgactacatgccgaatttgagcttgcattcacatcttcatggacaccattcatcggaatgtcttcttgattggacccgaaggatgaacattgctattggctctgctgagggaattgcctatcttcatcaccattcgaccccacacataatccatagagacatcaaagctagcaacgtgttactggattcagaattccagcctcaagttgctgatttcgggtttgctaagtttgtcccggacggtgcaactcatgtcactactcgagtcaagggcactctcggctatcttgctcctgaatatgctatgttaggaaaagcctcggagagttgcgatgtgtacagctttggcattctattgctagagcttgcaagtggcaagaaacccctcgagaaagtgaatagaacagtgaagcggtcgatttccgaatgggcactgccattagcttgtgaagggaagttcgatgaaatggcagacccgaaactgaacggggagtatgtggaagaggagttaaaaaggttcatccttgtcgcacttgtttgtgccgataatcggccagacaaaagacctaccatgcttgaagtcctcgagctactcaaaggtgagtccaaagagaaattaactgaactagaaaacaatgaactatttaagactctgcaaactgtttgcgacgatgacgggataacagctgccgaaaaaaactcagacataattaaagaagagaaagatttgaaaccggcgaaagat

SEQ ID NO: 67 - DNA, 837 bp, Gossypium hirsutum
  Clone ID: GOSHI-09MAY01-C50613_1
cccacgcgtccgctgttaacgagaattctaaggtggagggtattgttagccctttagtttcatattgtgatgcatgtccatacagtggagaagagaatgatgttcatctgaatgctgacttcaaattctacctggttgataagccagggtcatcagagataaagatgaatgaccctgtaccaatctcaagtttaaccaagaatttggatgtgactgttcactggtcagataagatgattgaaaagtctgatacatgccttctcagctcattgcctgaagttttcaagcctctgttgtttgcaaaaaggcatgaagaatccatttccttgtataaatgtctggaaggtttcttgcaagaagaacctttatgaccagatgatatgtggtactgccccaagtgcaagaagcatcagcaagccatcaaaaagttagatctttggagattacccgagatgggactaattcatttgaagagattctcatatagccgtttttttaagaacaagctagaaacatatgtggactttccaattcatgatctcaatctctccaattacatttcccatattgataaccaattgtccaattgttatcaattatatgcgggaactaatcactatggaggcatgggaggcggtcattatactgctttaattgatcacgggcatggtagatggtacgagtttgatgacgacagagttttccccatcagtgaagacagaattaaatcatctgcagcatatgtccttttctatagaagagcccgggagatgtaattttaacggagtgaaacatatatcgggatttaaaggcagaacttaaacccgggttttaata

SEQ ID NO: 68 - DNA, 290 bp, Gossypium hirsutum
  Clone ID: LIB3146-018-Q1-K1-H9
gacccacgcgtaacgcatatgtcctatagcccgagctcccttattttttttaaagccatcaaaaagctagatcgtggtagattacccgagattttactgattcatttgaagagattctcatatagccgtttttttaagaacaagcttcaaacatatgtggactttccaattcatgatctcaatctctccaattacatttcccatattgataaccaactgtccaattgttatgaattatatgctgtaactaatcactatgcaggcatgggaggcggacattatactgcttt

SEQ ID NO: 69 - DNA, 564 bp, Gossypium hirsutum
  Clone ID: GOSHI-09MAY01-C50183_1
ctgaagcagctttagctatacagatgggaaatgctagaattctatgcggtaaaccaattaagtgttcatggggtagcaagcctactgcaccaggaacaagctctgcccctttgcctccaccggctgctgcacatatgcctggtttttcagctgccgacctggctgcctatgaacgacatatggcaatgagtaaatatggcggtgcacaggtaatgggtatgatgcatccacagggtcagcaccgcccttaagcaagtggccatgggaatgggtgcggctgcagctggtcaagcaatctatgatggcggataccaaagcgttgcaacaactcagcagcttatgtactatcagtaaatggcgagatcctgatctattttggcttctcgtatttggagaactgctaggatgcttctgttgtttcctttttctcttcgttttcccccttttttgggtaagattgctgaatgccttcaacttgtatgtgtactaaatccattcctttgctaactaatgtcttttgggatcattatcgtatatgagatagcttcatatttctaccccttt

SEQ ID NO: 70 - DNA, 365 bp, Gossypium hirsutum
  Clone ID: LIB3146-013-Q1-K1-C12
ggcgcgacccacgcgaacgggaacatatcgaagatgtgcgcgtgcaacgagataaaggttttggttttgtgagatacagtttgcatactgaagcagctttagctatacagatgggaaatgctagaattctgtgcggaaaaccaattaagtgttcatggggtagcaagcctactgcaccaggaacaagctctgcccctttgcctccaccggctgctgcacatatgcctggtttttcagctgctgatctggctgcctatgaacgacatatggcaatgagtgaatatggcggtgcacaggtaaatgagtatgatgcatccacagggacaagcaatctatgatggtggataccaaaacgttgcaacaac

SEQ ID NO: 71 - DNA, 744 bp, Gossypium hirsutum
  Clone ID: GOSHI-09MAY01-C50103_2
ttccacgcgtccgcccacgcgtccgcccacgggtccggtgggatctatattcccatctccaatgcactatgctggtccaactgaagtgcagtggcatgctaaggctcggattaatgccggagccaatttttacattgtcggtagagatccggctggaatgggtcatccggttgaaaagagagatttgtatgatgctgatcatgggaagaaggtcttgagcatggctcccgcgcgtccgcccccgcgcccccttcctttcagggttgctgcatatgataaaacccaaggtaaaatggcgttcttcgatccctcgagggctcaagacttcctcttcatattcaggcaccaagatgaggacattagcaaagaacaaagagaaccctcctccgggatttatgtgccctggcggctgggaagtgttggtcgaggattacgccagcttaacaccatcggacaatgacagaataccgcaacccgttgctgcttagatgaattgaatttggaagcaaacctcgaaacactatttatctccatcgcgtaatctggaccttgtgaagtctcttgtgtccagatttttgttcaataaaaaccatgtggagaccctgtttcatagtcatgaaacttgcctccttgttactaggatgcccattaaggcatccaccattgattccattaagccatttaagcgtaagggcaaattgtactatatatataaatatattacgttattgtcttctaatgagg

SEQ ID NO: 72 - DNA, 909 bp, Gossypium hirsutum
  Clone ID: GOSHI-09MAY01-C50103_1
gaaaacgcaatgctgatgctgtgtttgcattccagctcagaaatcctgttcacaatggtcatgctttgctaatgaccgatactcgtcgtaggcttcttgagatggggtacaagaaccccatacttttgcttcatccattgggaggctacacgaaggcagatgatgttccacttagttggcgaatgaaacaacacgagaaggtgctcgaggacggtgttctcgatcctgaaacaacagtggtctctatattcccatctcctatgcactatgctggcccaactgaagtgcagtggcatgctaaagctcggatcaatgcaggggctaatttttatatcgttggtagagaccctgctggcatgggccatcccattgagaagagagacctgtatgatgccgatcacgggaaaaaggtcttgagcatggcgcctggactcgagcggctgaacatccttccgttcagggttgccgcgtacgataagacccaaagcaaaatggctttcttcgatccctcgagagctcaagacttcctcttcatatcaggcaccaagatgcgagctcttgcgaagaacaaagagaaccctccagacggattcatgtgccctggcggttggaaagtgttggtcaaatactacgacagcttgacaccatccgacaacggaaggatccatgaagccgttccggcttagaccaatgttcgataaagatactccatatgattgggaggagcatatttaacactgtttgatttccaatgtgtgtgtgatgcagaatctctttaataaaaccatgagaggcactggtacagagccaatgaaaaaagcttgcctctccctgtaattaggttgcccccattatggtgtctgccattggtgctcgctttgcttgtgggcaacatgactatatatgtct

SEQ ID NO: 73 - DNA, 569 bp, Gossypium hirsutum
  Clone ID: GOSHI-09MAY01-C50083_2
tatcctagctagtggtgtggggatccgcacaatagatgtcggtgctccccaattatcaatgcatagcatacgagaaatgtgtgctgttgatgatgtgaagcattcatatgagcatttcaaggcctttttccaagaattctctcagcttgatgccaagatcaccgttgacacttgacacttagatcctcttatccttgatgggaagatacccaataaaccaaaaataacacttctcaatggctgctttcgtaagttatttctcaaaaatggaccgcaaacaagtttccggcttagttggtgcatatttctggatatacaatttatatggtggcttggtaaaaagtgttatgtaatggcttcagcatctggtacctgacaattataagcttgcagatggattgaatttgtctaattttaaatgtttttctgccacaatcactagcaatctttggatgttagtaaaagtatcgtggaggtttttgtattaagagtcagattgtattttgtctattttacttgaaaaataacaaactaatttttatatatcggattaaagagcagattggttt

SEQ ID NO: 74 - DNA, 1117 bp, Gossypium hirsutum
  Clone ID: GOSHI-09MAY01-C50083_1
cggccgcgtgggcggcgcgtgggttttacccgtcctggcaacatcagttaaagtggagctcaataaagagtttgctgaaaacggacatcatgcaatcctgacacagatgattgcaaataagcttggatgtcaaccagatcaaatatgtgattttgagttgcaagcatgcgatactcaacccagtatagttgccggtgctgcaaaggaatttatcttttctggaaggcttgacaacctttgcatgtcgttttgctctctgaaggcattgatcgatgctacatcctctgagagtgaccttgaaaatgagagtggtgttagaatggtggcattgtttgatcatgaggaggttggatctaattcagcacaaggagctggatctcctgcaatgttagatgctctatcacgacggccccgtgccttcacctccgattctaagatgctaacaaaagcaatccagagaagtttccttgtttctgctgacatggcacatgcccttcacccaaattacatggacaaacatgaggagaaccatcagcctaagttgcacgggggccttgttatcaaacacaatgcaaaccaacgttatgcgaccaatgcagtcacgtctttcatattccgggaaatagctatgaagcataaccttcctattcaggattttgtggtgcggaacgatacaccttgtggctcaaccattggtcctatcctagctagtggtgtggggatccgcacagtagatgtcggtgctccccaattatcaatgcatagcatacgagaaatgtgtgctgttgatgatgtgaagcattcatatgagcatttcaaggcctttttcaaagaattctctcagcttgataccaagatcaccggtgacacttagatcctcttatccttgatggaaggtacacaataaaccaaaaataacacttccacatggctgctttcgtaagttatttctcaaaaatggacttgttttagttggtgcatatttctggatctacaatttgtatggtggcttggtaaaaagtgtaatggcttcagcttctggtacttgacaattataagcttcccgatggattgaatttgactaattttaaatgttctgccacaataactatgttct

SEQ ID NO: 75 - DNA, 420 bp, Gossypium hirsutum
  Clone ID: GOSHI-09MAY01-C50013_1
ggatggtggcggaaacaacctctaccctttccttcatctttcttctgatggtaacctcttcatcttcgccaaccgtgactccatccttttcaattatcaacgaaaccgtgtggtcaaaacctttccgaggattccagggggtggttccagaagctatccgagctcaggatcatcagttattctcccattggatcaccaagacaggttccaaaaagtcgaagtcatggtatgcggcggcgcggcctcgggagcttacgaagcggcagccagagggagattcctccctgcattgagctcctgtgggagaatggtgattacagggaacaatctcatatggaaaatggaaaacatgccaggacctcgtaccatgcatgacatgttgatccttcctacaggtcatatactaatcatcaatggcgc

SEQ ID NO: 76 - DNA, 479 bp, Gossypium hirsutum
  unsure (1)..(479): unsure at all n locations
  Clone ID: LIB3584-019-P1-K1-A2
gcatcatnagtgattcctcttagcattgaagcctctacagcaaaagtgaagaatgctcaaaagttgaacagattaatctatgaaaattacactgtatggaaagacatcagtgctctgtcatgctgatttctagttggtcacaactcagaagcatacacattaataagtaacatcaatatcaaaatgccaattttgctattgtgcttattagatgagaatgagaatgtctattttcactgaatcctgaaaatgaaagatttgtcaagtattacaaagaaaatggttactgttattcatattatgtttgatgactgttgaaaattgcatgtatacttgttgctaaaattgtatgcagttcaagggttcagatgttgtggaacgccaaaatgaccatttttcagctactatgattaagcatattacttgggacacaaatatgtctgaaccatttttagagggtgatgtgaagttgaaatcta

SEQ ID NO: 77 - DNA, 432 bp, Gossypium hirsutum
  Clone ID: LIB3146-014-Q1-K1-F5
tcggaatatcaaaatgcccaattttggttttgggcctttttaaatgaaaatgacaatgtctattttcactgaatcctgaaaatgaaagatttttcaggtattaaaaagaaaatggttactgttattcatactctgtttgatgactgttgaaaattgcgtgtatacttgttgctaaaatggtatgcagttcaagggttcagaagttgtggaacgccaaaatgaccatttctcacgtacttattatggcatttgtatacctctgagctaatataggtttggttttatttagagtgacagatgttgtttagatggactaaaattcttgtcacatagtgctaaacctattgtttgaaaaccaatcattttaaacttaaaatgtatgcccttttggattttaaagactcttgctaaacttttcattttgtccctagc

SEQ ID NO: 78 - DNA, 459 bp, Gossypium hirsutum
  Clone ID: GOSHI-09MAY01-C50253_1
ttcttaaaaaaaccaagcctatcctcctactattcggccgaaccaaaggacacccctcaacttctcttgttggccgatcatgggtttcatcggcgtctacacctccacctctgtcgtggttcatggctcaagtcacggaaagatgagatgacgcctattcatctcttttggtccgatacccaagccggagaacggcctccgacaatcgaaaccgcaggtaagaacctccaaaatcttttcttttttcttatagtagtgaaaagagaaaaatgagagtttgaaagcgagatcagtagccaaatattgaaacgaaaaatcacctcttttgatttctttgccctttttttgtgctatgtgcgcgtaaaaaaacatacaatctagtcttggggctttatagcccaatacatgtgatttgatttttgcttggtatttgggttatctctgcttttgctgtttctt

SEQ ID NO: 79 - DNA, 628 bp, Gossypium hirsutum
  Clone ID: GOSHI-09MAY01-C50263_1
atccaaataagtaaggctttggaggaagggcataccttttaaaggaagttgatatgagcaccaatttcataagaagggctggggcttggcatttggctcaggtagttgttcagaaacctggctttaggctgttaaacatcaatgggaatatcatctctgatgatggtgttgacgaggtgaaggaagtattcaaaaaatatcctggtgtgcttggttcctttgatgagaatgatcctgaaggaggagatgatgatgatgatgatgatgatgatgatggagaaaaatccggtgggggtgaagctaatgaggatgaactggaatctaaaatgaagaatcttgaagttggccaagaagaatagatagtttacaaaaatttctcagctatgcagctttaggttttaataattgtagaattcattgctgagcttattttcccagcgaatacccaactcgtgttttagtagggtagcctcttctgcaggatcgttgttctccttttattttcgttagggtatgtatgatccttgaaagttggatcttcctttcaaacttttataagtcttgttgtgatagccattagccaagcttctctggacatagctaatgatgcttgagatccgttctgttc

SEQ ID NO: 80 - DNA, 614 bp, Gossypium hirsutum
  Clone ID: GOSHI-09MAY01-C51993_1
gcttgtatctggtagtgatgattgcaaggtgaaagtttggtgcacaaagcaggaggccagtgttattaatattgacatgaaagcaaatatatgttgtgtcaagtataatcctggatctagcaatttcattgcggttggttcagcagatcatcacatccactattatgatttaagaaacatcagtagtccacttcatgtgttcagtgggcgcaagaaagcggtctcatatgtgaaattcttgtctgaaaatgaacttgcttctgcatctacagatagcacactaaggttatgggatgtgaaggagaatctgccgcttcgaacttttaaaggccattcaaatgagaagaatttcgtaggcctcactgtaaacagtgaatatattgcatgcggcagcgaaacaaatgaagtgtacgtgtaccacaaggaaatatcgaaaccggtaacatggcatagatttggttcacaagagatggaggatgcagatgaagatgggggtggatcgcacttcataagtgcggtgtgttggaagagcgatagccctaccatgctaactgctaacagtcagggaaccataaaagtgctagtccttgcggcttgacaaaatcgaagttcaa

SEQ ID NO: 81 - DNA, 923 bp, Gossypium hirsutum
  Clone ID: GOSHI-09MAY01-C51953_1
cggaccggccttcccggttcgacccagcgttcgaagacccactggggattggggtggggggggggggtgatgatcaacagcgaagagttcaatgggaccgaaattgttagggccatcaagaagaagatttcgggcaaaaacgccgtcacccaatggttgagcctcgatttgttggaagcttgtaccaccaattgcgagaaggtagcttccgagggggcttccgtgtttgttttggaagagatgatgaagatgattgagaatcccaacacggatcacgggaatagaggaagggccttgcagttgattcgtgcttggggacaatctcaggatcttgcttacctccctgtgtttcaccaaacttatgagagcttgaaagaaaggagtacacatgtaccagtaggtaacgggaaatcaggccttttgcagtattccttggagtcttgtatgagattgcctccctctgaagattatcctgtcaatgacccagaattgcatgccagtgattttgcctacaactatgggaatctttctgttgagcaaaagaaggaagttttcgaagtaactcggaacagccttgaggtgctttctagcatgttgggtaaggaaaccgagccgaaacccacaatggacgagttgacaaagagcatgttggagaagtgcaagcaatcccagcctgttattcagatgatcatagaaggcactactgatgatgatggaattctctttgaggcactgaatctgaatgatgagcttcaacaggtcatctccaaattcgaggaactggaagccggctcaatgtctggaagacagcataccgaaaactctggcaccactgcagctaatgccactgttccagttgagacctgtaacgaaaatacgatcagtgattccccttcaacacatgatgaaaccaagacaacagc

SEQ ID NO: 82 - DNA, 504 bp, Gossypium hirsutum
  Clone ID: GOSHI-09MAY01-C51943_1
ccgtccggaccgatcacctgtgtagaaatgcattctccaatggaaaatactttagtaaacagtctgatcagtgttggtattagaaaaagaaccaagtgtgtcacacagcattgatagaagatcaccacagcaacagtctgaaagttttgttcatcatttagcttctcctactcctccaagaaatccattagcttcaatgtcattgcagaataaatatgtgttgcagtcgcgtccgcttagtcatccttttccaactgacaatattgacaaatcacctgggggaagtgcatctgctgttgaaagtatcaaaaaacaatctagtcaggttgatacagaaaaggaacggaatgtgtctctactcttaaggtctccaatattagaatcaaatcaaaccacgactgctaatgcaaatactgagctcgatgggggagattttgctggtctttttgacaaatttgttaatgataatgataggagacttgattttggtattagtgctgtctc

SEQ ID NO: 83 - DNA, 559 bp, Gossypium hirsutum
  Clone ID: GOSHI-09MAY01-C51913_1
cccacgcgtccgtggcattctcttttctgggatatttggaactgggaatgggtcatccgtttcagtcgagaatggcggtttgttggcaatgacacgtgtcggaagtagaagagttgtccaaatatctgcagggttcatgatcttcttctccatccttggaaaattcggagctgttttcgcttcaattccagctccaatcattgcagctttatattgtcttttctttggatacgttggttcagggggtctcagcttgcttcaattctgtaacctaaacaacttcaaaataaagttcaatattaggtttctctgttttcatgggactatcaataccgcagtacttcaacgagtacacagcaattaacggtttcggtccagttcacaccggcgccagatggttcaatgacatgataaatgtaccgttctcatccgaagcatttgttgcgggttcattggcgatgtttcttgatgtgacgttgcacgggaaagacaatgcgactaagagggaacgtggcatgcacttgtgggagaagttcaaatcatttaaaaaagatgcaag

SEQ ID NO: 84 - DNA, 479 bp, Gossypium hirsutum
  Clone ID: GOSHI-09MAY01-C51903_1
acgcccacgcgtacgcccacgcgtacgaccacgcgtacgagtgagtttgtggatattttgatgcattacaatattccaatggctttggtttcgactcgaccaagaaaaactctagaggctgcaatgagaacaatcggcatcgaagagtgcttcagtgccattgtggcagcagaggacgtatgtcgaggaaaacccgatccagaaatgtttctatacgctgcacaacttctagaattcattgcagagcggtgcattgtattcggaaactctaaccagaccgttgaggcagctcatgaggcacggatgaagtgcgttgctgttgctaacaagcatcttgtctatgagctcagggctccagacttggtggtaagacggttagacgagctttctattgtcgatttaaagaaccttgcagatatagagtcggctgaatttggatccgtttttcctatcccggagatggagattgaggaggatcc

SEQ ID NO: 85 - DNA, 548 bp, Gossypium hirsutum
  Clone ID: GOSHI-09MAY01-C51593_1
gctgcaactgccaggcaaccagctgttgaattccatgacatctcggtgttacgattccaacagattcctgcctgtaaagggcaagcaaaacacagttgaggttctcaaccaaggtgtagaagaatccacagttgcttcaaatatgggtacgacgcaagatcttcatcgtgctctctctcttctgtcaaatgagtcttcggtttcttgtgagccaaaacaacatggttcacttgcgtaccctgtgcatgttagtggtagcagcatgtctcagcccacgatgaatgtgatttcgcagagtttccccattccatatgccttatctgaaaactggcagatggaacaagagcagactactcaatcccaagttgagggtgacaaccatcttcaagagtttcagattctcaaggttccatatgataatagcttttattccaatcagatgaattgattgccacaaatcttaaactttaatttttaacttggtaaggttcacacgttgaagataatgtaatttttcctgatcctattttagtcaaatttactctttt

SEQ ID NO: 86 - DNA, 1430 bp, Gossypium hirsutum
  Clone ID: GOSHI-09MAY01-C51623_1
cttacctaaacaaattgagccatcatattacacaaaaaaggaaaggatcctctagtatatccgtatatctcgcttttaagtatccagttgctaccagctatgtcatacctgtctaaagaagcacgagaggaagaataccatattgatgctgctcacatagcaattgtgctagctgacaatggggtcctttctgaagtttctggagccggacaaaagctgggagttatggatgcttacgcaaaagcttctagcattattaggcagtatggctctatgtatctacggcttggtaaccttcaaatggctctagaatattacgcacaagctgctgctgcagtaggtggtggacatgtatcatggactgggagaggtagtgtggatcagcaaaggcagatgaacttgatgctgaagcagcttctcactgagatattgtttcgagatggtggggtttatcttttacttggttcgagaggtgctggagaggaaggtgaactgagacgatttttgactgatcataaagcaagacaacagtttctgctagaagctgcccgccaatgccaagattctgggctgtacgacaagtctatagagattcagaagagaattggagcattttcgatggcattggatacgataaataagtgcctctctgaagcaatttgtgccttatcacgtggtagattggatggtgagagtcaaactgctggcctcattcactccgggaacgagatcttggagactttcaaatattatcctgaagtcagtttccaagagagggaacatgtttcggagcaacaaaccatattaagacagctcgagactatattatcgatccataaattgatgagactaggccagtatcttgatgctctacgagaagttgccaagatcccattccttccattcgatccacgagcacctgatacatctgctgatgtgttccaaaatttatctcctcatgtccaagcttgtttgcctgatttgctaaaggttgctataacttgtttggacaatgtatccgatacagatggatcacttcgagccatgagatcaaagattgcaaccttccttgcaaataatatgcgtcagaattggcctcgtgatttatacgagaaggtcgccaaaagcttgtgaagcaaatatccaacgatggtgtgaaatgcccggaaaatttgatggaatccgaggcatggtggtagaaggggaaaaaagagaggttaatgatgagaactcatctccctttgtagccataaccttatataatttgaccagtttttattagcagagttttcaaaatgtaatagctaatcggttatactcaatggtggtaatttttttttttttttgatttcttgagaatattgtttttaagatatattttaacaaatttatcggtagatttaatattataaaaaaaaaaaaaaaaaatc

SEQ ID NO: 87 - DNA, 839 bp, Gossypium hirsutum
  Clone ID: GOSHI-09MAY01-C51183_1
cccacgcgtccgcccacgcgtccggaaggctttcaccatgtttctatcatgtcctatacagcaaaatatgcaagttcattttatggccccttccgagaagcactggactctaacccacgctttggagataaaaaaacgtatcagatgaacccagcaaattacagagaagcattagttgaggctcagtgaagatgaggctgaaggtgctgacattctattggtcaagcctggtctcccttatttggatatcattagacttctcagggatcaatctcctttgcctattgctgcctaccaggtttcaggtgaatactccatgatcaaagctggtggtgttctcaaaatgattgatgaagaaagggtcatgatggaatccttgatgtgtctccgccgagctggtgccgacattatccttacatattttgctctacaagctgcaaggtctttatgtggtgagaagaggtgaacttggtctgattttcctcctatgaagctttggttgattctgcaaaaaaggcttgagacactaaatcttccattcgagagtgctagttgttagaacgatgaggagtcctttagaatgcttgagttagctgttcgtagtccgcatcttcataagcctcaagtacataaaaataaaactaaaatgctgtcaatgtatgccagatctgaatgaaactagaagtgacttgatcgtagttgtggtgtggttaggtattggcaatgttaatccaacactgtactgaggtacttaataatacgcattgctttgttacttttcagacttgggtgtgattgtcaaataggatcatatgtatatgtttgatgcaagtatgttt

SEQ ID NO: 88 - DNA, 1167 bp, Gossypium hirsutum
  Clone ID: GOSHI-09MAY01-C51053_1
atttggataatggaggatgtggagtatgtcgagcattaatgatagaggtccttctaaatatagtatgagtgtaagcatgtatcgaggagggggcagaggatatggacggcctagaactgctcctcccgtccggccttctttgctcttagatgctcgaatatgttatcttggcatgccaattgtaccagcagtgactgaacttattgttgctcaattaatgtggttagattatgataacccttcaaagcctatttacttatacatcaattcatctgggacacagaatgagaagatggagactgttggatcagaaaccgaggcatatgctatagctgacaccatggcttactgcaaatcagaaatgtacactgtgaattgtggcatggcatatggtcaagcagcaatgcttttatctcaaggagctaagggttatcgtgcagtacagccaaattcatccactaagttatatctgcctaaagtcagcagatcaagtggggctgtcatagatatgtggataaaggccaaggaacttgatgcaaataccgagtcctacattgagctagtagcaaaaggtacgggaaaaccaaggaagaaattgctaaagatgttctgcgtcctaaatatttccaagctcaagaagccatagactatggccttgctgacaagataatcgattcaagagatgctgcattcgagaaacggaattatgatgagatgcttgctcaatcaaaagcaatgaggagaggagctgcaggtggtccacaagcgactccttccgggttcaggtgatttagaaggggaaaactgattcattcattcaagcatcaattgctgttaatgaaatgacaaaaccattgctgttctttcaacatgcttcaaaaggacctcatatattttgttcctcacccttccatatgctacgaattcgggactttctggtgttgatttgccgttacttccctccatcatatctaaaaagtcgttcaatctcttgatccgacacatagattcagctacctggccatgaggtacctttgaaaggcgttcattatcgaacccgtctaaataattctcgatataacctaaaaaccatgttttacattcatcttgcaatgagtctgcaagatttctagctatattcaagaaagtgggatagatcagatgcca

SEQ ID NO: 89 - DNA, 544 bp, Gossypium hirsutum
  unsure (1)..(544): unsure at all n locations
  Clone ID: LIB3582-019-P1-K1-G3
atccttttgtgacatcttggaatcatgtattggaagttttcatacctattcgtgttgattgattgagtctgatctatatagaatgagaagatggagactgttggatcagaaaccgaggcatatgctatagctgacaccatggcttactgcaaatcagaaatgtacactgtgaattgtggcatggcatatggtcaagcagcaatgcttttatctcaaggagctaagggttatcgtgcagtacagccaaattcatccactaagttatatctgcctaaagtcagcagatcaagtggggctgtcatagatatgtggataaaggccaaggaacttgatgcaaataccgagtcctacattgagctagtagcaaaaggtacggngaaaaccaaggaagaaattgctaaagatgttcagcgtcctaaatatttccaagctcaagaagccatagactatggccttgctgacaagataatcgattcaagagatgctgcattcgagaaaacgaattatgatgagatgcttgctcaatcaaaaagcatgaggagag

SEQ ID NO: 90 - DNA, 382 bp, Gossypium hirsutum
  Clone ID: LIB3146-026-Q1-K2-D9
ggcgaaaatgccgaagagaacaacgcacacatactcaagcgaagacgcagcaccggatggacctgactctgatcttttcgtctactattgcaagcactgcggttcccacgtccttattaccgaaaatgcccaagcgaaagactgataaagcagatgtgctagacaagaaaaagcaccttgctaggcttaacatcagcgaggcgggaaaagttctcttgaagaggggagacgggaaattggagaagcaattccgtatgaattgtataggttgtggcctatttgtttgctatcgggctgaagatgatctcgtaactgcgcctttcatttatgctgttgatggtgccctctgtacagttgcagtagagaccaagcctccagatgc

SEQ ID NO: 91 - DNA, 296 bp, Gossypium hirsutum
  unsure (1)..(296): unsure at all n locations
  Clone ID: LIB3583-031-Q6-K7-H4
caagcgaannacgcagcaccggnatggnaccctgactctgnatctnntttcgtctactttattgcaagcactgcggttcccacnngtccttattaccgatnnacccaattgcagaaaatgnncccaagcgaaagaaactgataaagcagnnatgtgcttagagaaggaaagaagcaccttgctaggcnttaaacatcagcgaggncgggaaaaagttctttcttgaagaggggagaaagggaaattgnngagaagcaattccgtatgaaattgtatagnngttgtggnctatttgt

SEQ ID NO: 92 - DNA, 485 bp, Gossypium hirsutum
  unsure (1)..(485): unsure at all n locations
  Clone ID: uC-gsronu33b112a02b1
tcctcacgcgtccgcccactcgtccgcccacgcgtccggacaatattcctgcgcctgctggaaattcacaccgttctatccaacgagaagcagctctaaccaagtttcgattgaagcgtaaggatagatgctatgagaaaaaggtccgatacgagagcagaaagaaacttgcggagcagcgacccagagtaaaaggccaatttgttcgtcaagtacaggttgatcatcctacgcagacaattcactcgatggctagttacaacatagagaagtgcatggattgaagtttacaatggatctttagaattggtcgcacttgcaatttcagccaaacactaaagattcttttgttcatatctatactcaaaattacattagtaggttataacacagttaggttactatgtacttgtaaaaatcacattttgagcttagagttcaccctaacagagtntgcttccctgagctttgtcagggttctctgg

SEQ ID NO: 93 - DNA, 394 bp, Gossypium hirsutum
  Clone ID: LIB3146-051-Q1-K1-D7
tgctatgagaaaaaggtccgatacgagagcagaaagaaacttgcggagcagcgaccgagagtaaaaggccaatttgttcgtcaaacacaggtcgatcatcctacgcagatacaagcagagtgtcattatcacaattcacccgatggctagttacaacatatagaagtgcatggattgaagtttaccatggatctttagaattggttgcacttgcaatttcagccaaacactaaagattcttctgttcatatctacactcaaaatcatattagtagttattaacacagtaggttactatgtacttgtaaaaatcacattttgagcttagagtttacccttaacagagtttgcttccctggttttcattaggtttctctggggcattctctatttg

SEQ ID NO: 94 - DNA, 458 bp, Gossypium hirsutum
  Clone ID: GOSHI-09MAY01-C52973_1
ctgtttcgtgggtttttctaagaaaccctaaactgtggcttctcccaactgtcctctggggtccagccgcaagcaaggccaacaccaagccttcatttgcttccgtaacgaccaacagagggccggagaacccctcttgcgaggcgaaacgagaggccgtgaagttgtggagaacgaggggcatagagtatgggcgcaaacatggagcgaggcgcacggggatcgtgcgtggagtgccgacgtgggggttgcggcgtggggctgctgtgcaaaaggggaacttagggtctctaaaaccctaaaactttgggcctatcgggcgttgtaaaattttgggcttgtaaaccgaacctatttgatggactatttaattattgtgttatgattttggtttcaaaaaaaaaacagtttcccgttagctttaaaaattaaaaaacagggccagctccccctcactg

SEQ ID NO: 95 - DNA, 776 bp, Gossypium hirsutum
  Clone ID: GOSHI-09MAY01-C52913_1
gctgatctaatgcaagaattcaagacgggttaccttactctatcatcagccaagtctatgtttgtgagccagttactgggaacagccatgggatgtgtcattgctccactcacattctggatgttttggactgcttttgaagttgggtcacctgaaggtccatacaaagcaccttatgcggtgatattcagggaaatggccattcttggtattgagggcttctcggaacttcccaagcattgtttggctttatgtttcggattcttcattggtgctgttcttgtaaacctcttgagggatgtgactcccaaggaaatttcacagttcattcctattccaatggctatggcagttccattctacattggagcttactttgcggtcgacatgttcgttggaacagtaatcttgtttatatgggaacgaattaaccagaaggaagcagaggattacgcgggtgcagttgcttcaggtttaatttgtggtgacggtatttggacaataccatcagccatactttctatcttgaggatcaatccaccaatttgcatgtactttgggccttctctgagtagttgattaggaaaccgactggctatcgtatggaagtgtattgtatgaagtggaaggtctattagattctgtgtatatgtctgttcttttgtatatttccaatcgtggattataagacaacaatctctctcaagtaattggattcatcagacgacttctctgaaatctcaaagtcggttttacaagaaacttctctgttcgta

SEQ ID NO: 96 - DNA, 495 bp, Gossypium hirsutum
  Clone ID: LIB3585-049-P1-K1-G3
cccacgcgtccgtgctgcttctggatatgtggccttggctgctatatcaacagctactattccaataatctttccacgcctggagtggtatttggttcttgtttcatacattattgcccctgctcttgccttctgcaactcttatggaactggacttacagactggagcctgtcttccacttatgggaagattggtcttttcattatagcttccttagtcggaagcgatggtggagtcattgctccactcacattctggatgttttggactgcttttgaagttgggtcacctgatggtccatacaaagcaccttatgcggtgatattcagagaaatggccattcttggtattgagggcttctcggagcttcccaagcattgtttggctttatgtttcggattcttcattggtgcttttcttgtaaacctcttgagggatgtgactcccaaggaaatttcacagttcattcctattccaatggctatggcagttcc

SEQ ID NO: 97 - DNA, 171 bp, Gossypium hirsutum
  Clone ID: LIB3146-050-Q1-K1-F9
gcatcaatccaccaattgagcatgtactttgggccttctctgagtactcgataacgaaatcgactggctatcgtatggaagagtattggatgaaatggaaagttcataaaacactggatatatgtctgtcatacgcatatttccaagcgtgcagtataagacaacaatctc

SEQ ID NO: 98 - DNA, 633 bp, Gossypium hirsutum
  Clone ID: LIB3543-065-Q6-K6-A5
ccccgcgtccgcagcttttttgtgtgggggtgggggcgactccccatttcacctcttccaccaccaaacctcaaacaactctctctctctctctctctctctctctctctctctctctctctctctctctctctaaggcaatttctgggactctccgctttgttttctttattattgtgggggggggggagaattttatattccatttaaattcttcactttcacgctataaaacctctctccgtttctctccctttccccttcctctctctcttttctctctgccacagattccttcgctgataccgattaaggtttggtggctaagtgaggaaggaaaatgaacacgcaacttttggagattgagccaaaggaacttaaattcgtatttatattgaagaagcaaagctcctgctcgattacgcttacaaataaaactaaccagtatgttgctttcaagggtaaaactacatctccgaagaaatactgcgtacggcctaatgttggcattattatgccaaaatcaggcttgggattttacagttaccatgcaagctcagcgggaagcccctcctggaatgatatgtaggagataagttcttaatccaggacacagttgcccccatggggaac

SEQ ID NO: 99 - DNA, 287 bp, Gossypium hirsutum
  Clone ID: LIB3146-050-Q1-K1-D2
cccacgcgttcgccttcttttccgcccacgcgtccgggaggatgaacactcaacttttggagattgagccaaaggaacttaaattcgaatttatattgaagaagcaaagctcctgctcgattacgcttacaaataaaactaaccaatatgttgctttcaaggttaaaactacatctccgaagaaatactgtgtacggcctaatgttggcatcattatgccaaaatcagcttgtggttttacagttaccatgcaagctcaggaggaagcccctcctgatatgatatgt

SEQ ID NO: 100 - DNA, 691 bp, Gossypium hirsutum
  Clone ID: GOSHI-09MAY01-C52413_1
cggacgcgtgggtaataagagagctagtaataggaatctcagaaccatacagtcttcaacgaagccgccaaaagaaagcactgcaagttcagtaaagagttcaggaggatctgtgagcccgagactgcagcaaaagaagcttgagttggaccgacgatctcgtccacccactccaccatctgatccaagcaaacttcgaaggcaatccaacaggcatccattggagtcaggctcccctagcggtaaacgtaggtcaaaatctcacaacacgcagcaatgtgacgaccaattgagtcaggtaagttctgaatcatggacttcgagtcaccaaggagatgagatttctttgcaatcagacagcaatcttaccttggagtcgaagttagatacagaagtcaccagtcgtgaacaatctatcgagaccaattgtattcaaagtccatccatgaatgcaaccaagtactcagtttcgggcataatgcagaaaaaatcaacatcaagactgggcgaggatggatcagtggcagaacttgctatggttactccggaacaacctagtccagtttccgttcttgacacctcaatatatcgagatgatgcgccatctccagtaaggcagattttgaatgccccagaaggtgatattgcagaagtttcaatgacggtccgcaaagaagagcaatgggacccc

SEQ ID NO: 101 - DNA, 621 bp, Gossypium hirsutum
  Clone ID: GOSHI-09MAY01-C52783_1
taaagatcatagacaacgttggttaaattcccgtcttcttacgctatttcgagtgccacatttcccgacagagatttggatcgatttattgctttagcatcggctacagccatggcttcgtcggcaccaccagagtcgtcctccaccgtccaaaatgcaaggaagccgcttggatttatgaaaaacgcagtgaaatacaaacacaacttcattcagttcttcgcgatgaccgggattttgcttttgagcgtccgatctttgggccagaagtaccgcctccacgacctccaggaggatacagcagctctcaagcaagagcaacaatctcttaatgatcggatgagcaacataaaacgtggcctcctccacgaggcctctctcgagccctctggacgctttgcctcacgcctccgcctcctctttggtgacgataattagactcttctgatcctactgtctagtatttgccttgataatatcatatctttagtgtctccaccttacgtcaagagaatgcactgaaatgttagggttttaaattttgcacttttgctctttgcgtaataatatatatttagaacattcctgaatcatttcaagaaagtcatcgttcttgaattt

SEQ ID NO: 102 - DNA, 428 bp, Gossypium hirsutum
  Clone ID: LIB3146-047-Q1-K1-G5
aagttctcagcctttgtatcgtcttcttgacagtttaacttaatacattctttctaaagttttgtctctggattcctcctcgaaaccctgtgattgtctataggttgattttgtggtggctaatagcaataccaacaattcgtgagtacaacttataccttcaagaccgtaaaccagtgaaaaaggtaggagcattttgttggctttccctcgcgatttgcatcatcgagcttctcatatgtatcaagtttggacatggtttatacccgaagccgatgccacaatggttggtagttttctggttgtccatgggatccactctcgtattgttccttatgatttggtcatggaaactgcagcggagttaccagaaaaagagacgataatttcaatatactattcttttggttacttgcaccattgattgg

SEQ ID NO: 103 - DNA, 434 bp, Gossypium hirsutum
  Clone ID: LIB3149-035-Q1-K1-A10
gtctgtggattcctcctagaaaccctgtgattgtgtataggttgatcttgtggtggctaatagcaataccaacaattcgtgagtacaactcgtacctccaagaccggaaacctgtgaaaaaagttggagcattttgttggctttcccttgcaatttgcattgttgagcttctcattggcatcaagtttggacatggtttatatccaaaggcgatgccacaatggttggtaatattctggttgtccattggagtgacactggtttcattcattctgatttggtcatggaaactgcaacgcaattttggcaaaaagagaagatagttttgggaaatgcagtaatactattacactattctttggttgttatttactactatcggtattgtattgaggtttgtaaataccgtgtatcaatcacttgataaattgtat

SEQ ID NO: 104 - DNA, 303 bp, Gossypium hirsutum
  Clone ID: GOSHI-09MAY01-C52033_1
ggtggcttctcttctttatatgaaagcaactaaaaacagaggaaacgtcattagaaaaggggaaagaatcctccaagtccctgtgctctttgtatttttggaatttaatctctctatttttcatattttaaaatttaggtctaattgttaacgcactcaaattcttctgttcaatttgccgccatgatatttttttttgtaaaaaattacttaagtaaccatataccaaaaaaactgttgtaataaacttaaatttagcaaaaaagttttaactgtgttcaaaaaaaaaaaaaatattaaaaa

SEQ ID NO: 105 - DNA, 717 bp, Gossypium hirsutum
  Clone ID: GOSHI-09MAY01-C52023_1
gcgttcgcggccgcgtgggctttgtgatatgggaacttgtcattttagctttcctggttttttcagctgtttctttgtattttgggcatatgcagcttgcctttatcctagtatgcatcacaatgctattgcttctctgcatgaacggcactgggcggccggaccggcccacgaaaaagaaaagaaggatgcttcttccattatctatttagagctacttgaagcttggattagtttaaaagggaccaaatttcgtggtgcaaatttgagatttattgatcattgcattagggccacacatgcactggtatattttaaatatgtaattgtggctgaagctagctgaagaagggatatgaataggatcacctcgaaacatggtttaccacggtgaacctaatgattggaaattgaaagttgggatgttctacttctacacacagcagttagtttaaaggtatgtttccttctgactacctttatgctattaatgcaagggtctgaaaaattatattgtaattttaatccaagtgggaatatattgaacaatatttgcttcatttagtagttcttttgtcatttagttgaagacatcagaggatagagatggacggcttgagtgattgaaacaatttttcatctattatgtacccatacagtagttgatttgcaacagatcaaataccatacaggatttcaagtttttccctgttgatg

SEQ ID NO: 106 - DNA, 580 bp, Gossypium hirsutum
  Clone ID: uC-gsronu33B157f07b1
ccttttcgtccgtgcgtaattgaatcgaatattcatactgtctcccttccctttcttctacctccaattcatatcttgctctgcaaatcctcagttttaacaatttttctgagattcaaagccaaacacaaatcataattcggaaggcagagaaaggagaagggaaaccatgataacgcgatcgaatttagctgagcaattgagagagtatcagcttcgatctaagcacgattgggcttccgtttcgtttttctcatccacgtctaatctatcatcttacagggtggatgttatggtctttgtgatatgggaacttgtcattttagctttcctggttttttcagctgtttctttgtattttgggcatatgcagcttgcctttatcctagtatgcatcacaatgctattgcttctctgcatgaaaatcacaaagcaagtaaagttggccaggaaaaagaaaagaaggatgcttcttccattatctatttagagctacttgaagcttggattagtttaaaagggaccaaatttcgtggtgcaaatttgagatttattgatcattgcattagggccacacatg

SEQ ID NO: 107 - DNA, 949 bp, Gossypium hirsutum
  Clone ID: GOSHI-09MAY01-C52303_1
cggccgcgtgggaaaaatgaaatcctctaaagacttgaatcgtaaaaagacagaacagatcaaaaaaaaaaaaaaaaaaagaagaaagaaagaaagaaagaaagaaagaaagttgtttgaagaaaagaaaattattaatttagagaatgtctttaacatgtgtgaaaatgtctgaggatgtttggttaacttgtcttacacatgcattgtccactgaaactgaagagatcatgggtcttcttctcggtgatatcgagtactcaaaagatggaaatgttactgcattgatatggggagcatcaccacaatcacgatctgatcggcggaaggaccgagttgagacaaatcctgaacagttggcagctgcatcagctcaagctgatagaatgactgcatcgactggcagaacaacacgagttattgggtggtaccattcacatccccatattactgttcttccttctcatgttgatgtgcggactcaggcaatgtatcaacttctagattctggatttattgggctcatattttcttgttttagtgaagatacaaacaaggtgggaagaatacaagtcattgcttttcagtcatcagatgggaaacagaatcatgttacaggaccaattgctttatcaccactgaatagaagctcagttatcgatcttgagtcatctctaagctcttctgaaaatccattgttgacatctggatctgcagaagtagatagtcacatgcaagacactagtgattccagaccggctcaaggatctgccaaggtgcaatttatgattattgaagttaaaatttgtcatatggcttgttaacgtatcagggctcttaaacgagcgaaagtgaggagataagtaatgctttagatgatggaatggaacatttttgtatattatgctgcacaaattttaagttccataaacaaagtgcttttttagat

SEQ ID NO: 108 - DNA, 405 bp, Gossypium hirsutum
  unsure (1)..(405): unsure at all n locations
  Clone ID: LIB3583-013-P1-K1-A1
tttcagtcatcagatgggaaacaaatcatgttacgggaccaattgctttatcaccactgaatagaagctcagttatcgatcttgagtcatctctaagctcttctgaaaatccgttgttgacatctggatctgcagaagtagatagtcacatgcaagacactagtgattccagaccggttcaaggatctgccaagagtgggatacgatctgtagacttaggaggtttcttcgccaatgctgatgccaactatctagggcaagagcaaggcagaggttactacaaaaccaataatatacagaatgctgntgttgatattgatcccatggatatgtcggaaagcatgcaagaagccatgcaccgctcgaatttggacatgagtggtgcagagtatgtccgaaaagaaa

SEQ ID NO: 109 - DNA, 550 bp, Gossypium hirsutum
  Clone ID: GOSHI-09MAY01-C52243_1
cggaaagttcaaaaaactatgatggctccgttgctttatatatttatttcgtctgtgattcagcaatcccaaagtttctttttttttcaaaaaaaagaaagaaaaaaatagtctttttttttcgtactcttttattttataacataaatattgttataaatattgttaatagcctctggtgtgaaaagaaaaaaagtttgtgacgctgagatgggcccacgaaagctaagataaaattggaaatgccctttctctcatactactctttcgatacataatctaatggtttgaaaaaaaaaagaaatcaaaaaaaatatcatatcgaattcgaagtgccatgctattattacttactaattcatatttcatatggcgaaggcatagtcttcttttttctttccatcaaataaaaaaaactcattggcgccgagcgtgagggaatgctagacgtttggtaatttctcctccggccaggagaaaagatcccattgaagcagccaatcccatgcatattgtatgcacaatctggttgcacaaattgcatagtatc

SEQ ID NO: 110 - DNA, 621 bp, Gossypium hirsutum
  Clone ID: GOSHI-09MAY01-C53883_1
cgcgtccggaggaagtgaaagagtagtttttcttttccagaaactcttcaccatggcgggtgacgtcgataatcgacagttcaggcgccttgaaccggctttgaacggtgtttttgccccgttgaagctcggtccaagtacccaaatccaccgccctgtcaaacatgttttcatcgaccatgaatatgatgactcttccagtgatgatgaaggaaatgagatcaacgggcattacaaagagttgattatcaagtccggtaacgagcttgaaccttccatcttggaccctagagatgaagcaacggccgataactgggtcgagcgtaacgcttccatggttcgtctcaccggcaaacaccctttcaactctgaacctcccttgaaccgcctcatgcaccatggtttcatcactcctgttcctcttcactacgttcgtaaccatggtcaagtccctaaagcttcttgggatgactggaccgttgaagtcgccggtttagttaaaagaccggtgaagttaaccatggatcaactgtttaacgagttccaaagccgtgagttcccggttaccctggtttgtgctgggaatcgacgtaaagaacaaaacatgatcaaacaaaccat

SEQ ID NO: 111 - DNA, 364 bp, Gossypium hirsutum
  Clone ID: GOSHI-09MAY01-C53583_2
ctaatgtctgacatgcaggtgactcagatgaagtctgatgggacacttgaggaaagtggtgaagcacgaaggcttcgaatatctttagaggaaatggcagatgaagtctagagctctggccttttgaaggaatgtgggcgttcctgaggatgctctattggtaactccagaaaattttaaagagaacagatggtcctggtcagacgtaaaatctctctctggcagccttcttctggcccttgatgctagtctggagcatgcactgttgggctctgtaatgtccatggatagatatgcagcagcagaaagcttttacaagcttgcaatggcatttgccccttgtcccagatcttcacataatgtg

SEQ ID NO: 112 - DNA, 829 bp, Gossypium hirsutum
  Clone ID: GOSHI-09MAY01-C53583_1
gggaactcctgaaaaggttacttgtggcagagggtgaattctcagctgagctcccctagccagccatattccttgagagaagctctggctcaggcccaatcttctaggattggagcttcagcccaagcacttagagaatctttgcatccaattttgcgacaaaaactggagctttgggaagaaaacttgagtgctgctgttagtcttcaggttttagaaatatctgagaaattttctgcaatggcagcatcccatagcattgctactgattatggaaaacttgattgtttatcatctataattatgagcttcttttcccgaaatcagccactggttttctggaaagcttttctgcctgtcttcaacaatgtatttgatcttcatggggcaacactaatggctagggagaatgatcgtttcttaaaacaagttgcctttcatcttcttcgacttgcagtctttcgaaatgataatattaggaaaagagctgttattgggcttcagatactcgtgaggagttcattctacttcatgcagactgcaaggttgagggtaatgctgactatcaccttgtccgagctaatgtctgacatgcaggtgactcagatgaagtctgatgggacacttgaggaaagtggtgaagcacgaaggcttcgaaaatctttagaggaaatggcagatgaagtcaagagctttggccttttgaaggaatgtggacttcctgaggatgcttattggttacttttgtgttttttgggagaatggatggttgtggtgggaggtgaattttttttgtggggggggttgtttttgggttttgttgtggttt

SEQ ID NO: 113 - DNA, 655 bp, Gossypium hirsutum
  Clone ID: GOSHI-09MAY01-C53503_1
cccacgcgtccgctgaagtaaagcagttaatggaagctgctgacgtagatggaaatggaactatagactatattgaattcatctcagctacaatgaatagatacagacttgatagagatgagctcctctacaaagcattccagtattttgataaagataacagtgggtacattacaaaggatgaactagagactgctatgaaggagtatggaatggtggatgaagccagcatcagggctgtaatctctgaagtggataccgataatgacgggagaattaactacgaggagttttgcacaatgatgagaagtggaacacaacaaactgaaaaagcttttttagatactattaacagttccattacctagcaacaactgagtcactgaagactggagggatttaacagtgttagagagcactcacggtggaaggtatgggttggatatggactcatagtccaggataagttccttttgggtccttagctaatagctatcctgggtctagaagtgggcactttgtgaatttgagggtagaaactagaattgatttaagttgcagtactgcttgtgtatatctattttctggaataaattgcccatcagttttcaagttcaactgatttttcaaccttttaggcgattctttttatctt

SEQ ID NO: 114 - DNA, 878 bp, Gossypium hirsutum
  Clone ID: GOSHI-09MAY01-C53783_2
cttttccagaaacgaaagcagctgttccccccaccattttcttcatttttagatctgctagggtttcaaaaggaacccatttcaccgccgtcgtcagaccgccaccgtatacggtggccgacgttcccaagtcacccttttttcggccgatttggctctccctacctcgttttaaaacccaaaactcttaaaaaataaaacaacagacaataaaccctcggtttcctcctccaatcttaagaaaggtaatgttttttttcttctcttttctttttattttcttttttcctaacaaaacccacccggccggcaaaataatcaagataatggaacaacctttttactattttttgtattttgatttctatgggaccttttttgtattgattttttgaatattcaagaatcccctcattcacaatcggttcccccctttttgaattcgaaaaaaccgcttttttaaattcggaaaaaaaacccccttaatacattcgtttcttctcggctttatagccggttacaatattacgaaaatcttatttatttttgtcattttcgtttgtctgcttctgtcttggtgtctgcttcatttttcaggtgtcagatgacccttagaggcgtgcggagtggagatgacagaggcgtggtggccgagcacgcgtggggaggccgatggttcggcggccacatgcttggggctagggttttttacttgtttagcaaaaaatattttgtgggctaagtttttatgtttattgggcttattgggcttgcaactgggtaatgggttttgtaattgttttatttggtttttgggcccgggcaaaatttgggccttacaaatactttgcagaatagaattattttcaaattgtatt

SEQ ID NO: 115 - DNA, 626 bp, Gossypium hirsutum
  unsure (1)..(626): unsure at all n locations
  Clone ID: LIB3826-001-Q1-K6-B10
cggccgcgtgggcgtttcttaaaaacgctgcaaaataccgtcgtttttataaaaaacgccacaaacatcttttaatagaatgaaaacgacttcgttttttggagccccaaatttcctttactttctccaattcagattacccctgaacgtctagttccccaaaccttgaatctccaaatcccataaaacttcccccaattcgatatcctcaaatcagtttccccaaatccccaaatcaaaatacctttgattttcgccgaagtccctttgattctcttttttttttcattttcattttcacagtacactccatcactcgcatccactgattctcactgcttttgcagtacccatatctcaaaatcaattctacgcagtgttttagttacccactgaacgttgactgcaactctctattttgtatttccaatatatcgatctgtgtttgaagatatggtggaagcgactgtgtaaggcccaaattttgcccggggcccaaaaaccaaataaaacaattacaaaacccattacccagttgcaagcccaataagcccaataaacataaaaacttagcccacaaaatnattttctgctaaacaagtaaaaaaccctagccccaagcatgt

SEQ ID NO: 116 - DNA, 969 bp, Gossypium hirsutum
  Clone ID: GOSHI-09MAY01-C53723_1
tattatgtatgttgcagtagataacactggaggaggaaatgggtctgagagaacttcaatagaccaatcgaagaaagagttgatgcattctctttcatattccaaccctaccagtcaaaattctggtgctgttgatgataaccataccagagagtctggactagatgcattcgggactagtacggtaattttgcaaggagaggccgatattggtcctattaaacctcaacctgatacaactataggtgatgtttcaattggaatccagtagtcatactgatagtttggaagctcactggggatctattttcagttctttcaccccaatcggatgctcttttccaaggcagagaaaaccaagaaggcaaaagctgtatctaagcaacattttgatacgtccgatgaatttgagccaccatctttcatgacactggttgagcctggaggtatcaacgaaaaatccactttttctgaaattcaggcagcacaaactgctgaaaacactcgaacgatgcctttgcaagctggctggtttccttctgttattcatggtgcccacgcgtccctgggaagaaagaagaacgatgagatcataaaaaaagtaaccaaatggaatgcaaagcaacacactccattgaagaacttactttctgaacccaacagtgaaacaaaaccgatgtccccgaattcaaaacaaagcgccacaccagttgtgggtcaaaattatgataaagtaggtgaagataatgaacatatgggaggtaaagttagctcaactgcgggccctgaaacaccagtagctgagccaactaacattgaagtagagaaagaatggagttcgccggcaaggttccctgccgagattaagcgagagaaaaggagagtaaaaggtaggccattgtggtttcaatttgtatgctgctcatctataaattaggatcataaaaggctctaaagactttaaagttt

SEQ ID NO: 117 - DNA, 536 bp, Gossypium hirsutum
  Clone ID: GOSHI-09MAY01-C53173_1
gtacactatcattatacgttctttctttctttctttttttaaattcccgggccttattggctactgtaaacaaaaccctgtttgtaaaagaaatgaagctcgttttggtgacattcctgctggtttctcttgttctcagctcctttctctttgaggagtcgatggctggttcaggtttctgtgcgtacaagtgcaaggcaaggtgcgcaaaggcagattttaaagagaggtgcttcaagtactgtaacatttgctgtcagaaatgcagttgtgttccgtcagggaactacgagaacaagcacgaatgctattgcttcagggacatgaagaacttcaagggcttgcctaagtgcccttaaatactggcttaaatacatgctattgcttaacttgttgtagaaggccaattttagcttttgtgggggctgtacgtcttaaagagtcttcttggacgaggacccataaaaggtttctattaagctaatataattaagggttttaaatgaataaatggtgtctttcatagcttctgggta

SEQ ID NO: 118 - DNA, 459 bp, Gossypium hirsutum
  Clone ID: GOSHI-09MAY01-C53103_1
acaaagcacccatgcctctaagcccaccaccaaaccaaccaacgaacccaccgtcgtggccgcactctctacctcttctctcctttggatccattcgcccaaaccgatttctcccaaactcgctcttttcactgctacacgctttttcactccaaagaagtccacctccattgttatggctgctccccctacgactactgctaccgaggtggtgccagcaattattgttggtggtggaagagtgggaaaagcattgcaagatatgggcaagggagatgattcgctggtgaagagaggtgaagcagtaccgcttgattgtgaaggtcctatattggtttgtactaggaatgatgatcttgaggctgtgcttgaggccactcctaaatctcgttggaacgatttggtttttttccagaatggcatgctggagccatggcttcaaagcaaaggtcttaatga

SEQ ID NO: 119 - DNA, 533 bp, Gossypium hirsutum
  Clone ID: GOSHI-09MAY01-C53053_1
cccatcgtccgattaaaatggagaaaaaattgcagcttaagttctttcatttcaccctcttcttcctttttcttcttattgtttgcatttaatattgtgggtgcttttggtactaggaaaacactatccatggaaggctctaatgcaccaaacggtggttccaatggtgctactggttcagcccatggtcctaactgggactacagttggggatggggttcaagccctggtagtggatggggttatggttctggttcagggagctctcctaatgggttcgggaggggttacgggttcgggtttgggtctggtactggttcacgttctggttctggttatggttatggagtggggggatgctaatggcggccaattatgactttggaagaaagctttactcaacttattgtggtctgcaggtcacccacacttttgcgaccactatacatacttatggaacacatatggtggagcttaaccatattaatttggttaatgctaattgatagttatggattaggagatgactcatt

SEQ ID NO: 120 - DNA, 505 bp, Gossypium hirsutum
  Clone ID: uC-gsflnu33B071c06b1
tgttaaatggagaaaaaattgcaacttaagtgccttcatttcaccttcttcttccttttcttcttattgtttgcatttaatattgtgggtgcttttggtactaggaaaacactatccatggaaggctctaatgcaccaaacggtggttccaatggtgctactggttcagcccatggtcctaactgggactacagttggggatggggctcaagccctggtagtggatgggcttatggttctggttcagggtaggtacctaatgggttcgggaggggttacgggttcccattcgcacgtggtactggttcaggttctggctttcgagctgaaacttggtatggtagcagcattgcttagacccatggatgaggtaactaactgcccgcagtctgcaaggcttctccattcctcttgttattatatgggccaatgctaactgtgccaagaatgatccaaaatcatgcgtaggtggattacttatattggatatataatgcttttgagt

SEQ ID NO: 121 - DNA, 601 bp, Gossypium hirsutum
  Clone ID: GOSHI-09MAY01-C53063_1
ggaaggcgttactgtgctgtgcatgatgtggggagggctataaatacattctacgcgtataaaaagtttaagtttgatgtgggaattgaggagttccatggtctgttatctgccctttgtcgatacaaaaatgtgcaggatgctgaacatctgatgttttgtaacaaggatgtcttcccacttaataccaaaagttttaatattatactgaatggctggtgtaatgccatccgtagtccacgtgaagcagaaaggatttggagggaaatgagcaagcgaggtgttaggcatgatgttgtgtcatatgcaagtatcatgtcctgctactcaaagggttctaatcttaacaaggtactgaagctttgcagccaaatgaaatcaatgaggattgaaccacataggaaggtttacaatgcagtgatccatgctcttgcaaaggctaggcatgtaaaaaaagccatcaatcttctcaaagttatggaagagaatggtattggtccaaatgttgttacttataattcactcataaagcctctatgtaaagcacggaaggtaaatgaggctaaacacgtatttgatgaatgttgcagaatggcctctc

SEQ ID NO: 122 - DNA, 946 bp, Gossypium hirsutum
  Clone ID: GOSHI-09MAY01-C53013_1
gggtcctgcccgtgcccgtttgagcaagttactgcaacccttttaaattttgtgcggctgtttcggaaagcaccatgaaagaatgttaaacaggctgaactggacaagaagaaagccgagaaggaggctgaaatggagaaagccaaggaagccaaccttaaaaagaagagtgcaaagtagtgaaaatcagtttctgcattcctacaaggtaatatgctccttccaatcagcagaaacctgtgcagacgagtatgagtgaaatgagaggaacagctgctttggaggactttagaggtgcctcctattttgtgccttgggagacgttgtgaatgaggctttttagggccttcaattatgcataaggcttcaggagacattttctatgggaagatattcagatccggttgccatggataattccatgaatgttccaaagtagatgtcagatggagcagagagcgggttatgatcacaactgagtaacagataatccgaatatgcagagttatcaaggtaactgctacgagccttgtagcattattttgagtatgaaatttgtagactgggtggaccttctacgatttcatttcagcttccaccattcacctggcatatttgattcagcctgtggaatcgtaagagctggtaagtcccactgtaccatgaaaacatgtagtgtacaaagttctaaccatccacttactgtagaattcaattctttatcttgtattcttgtaacataatctttttttttttctttttcctgaaaaaagcccaccggagaaagaggttgtataggaggttaggttttagagaagggaaatctacaagaggggctttcttattgtaactgtaaaatagcacccagactatatagcctactgatttgtaaaacctcttttgtttctttcatttcatgggatatgatttgatttgatttgatttg

SEQ ID NO: 123 - DNA, 460 bp, Gossypium hirsutum
  Clone ID: GOSHI-09MAY01-C53373_1
cacagaccaggaaatccccaaaaccctaaccctatagttgcaatttcgacgtttctcgctcggaaaagaaaaagcgtcagaaaaaaaaccaaacccagttctgaaaccaaagaacccgaccaagatttcatggttaaaccctaaaccaaattgtataacccaaacgacgatactcctaaagcgtgttcgatgcctgccgatggggattctatggttgcaagtattgctgcttctgctgacccgcttgcactctttaacgatagtactcctaaagagtggttgagaaatgttgtgttgcctgatggttgggattctatgttggaaaagaagattgtagtgatggaaatggaaaggaagaaatcggatgaagcttgtggtgatgagaaaaatgaagttgaagttcaagtgaagagaaaaaagaaaaagaaaaaggaaaagaagaagaagaggagaagaagaa

SEQ ID NO: 124 - DNA, 715 bp, Gossypium hirsutum
  Clone ID: GOSHI-09MAY01-C53363_1
tgtcagtccaacgaggaaagataaccattttcctggaccatcccatattgcaccagaagggggttcttcttcttctacgttatcattaactggttcttcaacttcaatcatcgagcaagggcaatgggcaaatttgcctccggaattacttttagatataatacaaagagtggaaacaaaggaaatatgttggccgcgaaggagagatgtggttgcttgtgcttccgtttgtaagtcatggagggaaattactaaagagattgtttaaacaccggagcaatgtggcttcttcactttccccatatctttaaagcagcctggaccaagggatgcccccattcaatgctttattaggagggaaagagaaacttcaacatatcgattgcatctgggtctcactcctgctttgtctggtgatttgagtaaacagttgttggtagcgaagagagttagaagggctacctgcactgattttatgatatatttaaagggggatgatttctcaaaatcaagcaacgattatattggaaaacttaggtctaatttcctgggatccaagttcaacattttcgagagccaacctcaatatgattctactgcacaatccagtcctcgatcacgttggaaaacttacttgaagtcggtgcctccgaaggtccctaggattagcttgaacactgccagtatatcttatgagctcaatgttcttcgcacc

SEQ ID NO: 125 - DNA, 1116 bp, Gossypium hirsutum
  Clone ID: GOSHI-09MAY01-C53303_1
cggacgcgtgggtggagatctgtatcgtggtatctaccttgggcaagatgttgctgtcgagaatggttagatctgagcatttgaatgatactcttgaagatgagtttgctcaagaggtggcaatcctacgggaggtccagcacagaaatgttgttcgttttattggtgcctgtacaaagtttccacagttgagcatagtaacagagtacatgcctgggggaagcttgtatgactatttgcataagaatcataatgttttgaagctctctcagttgctgaagtttgctattgatgtctgcaaaggaatggagtatttgcatcaaagccacataattcatcgggacctgaagacagcaaatttgttaatggatacagacaatgttgtcaaggtggcagattttggtgtcgcccggttcttgaaccaaggaggagtaatgacagctgagactgggacatatagatggatggcacctgaggttataaaccatcagccctatgatcaaaaagctgatgtattcagttttgctgttgtactgtgggagctagtgacagccaaggttccttacgataccatgacaccactacaagctgcactgggagtgagacagggcctgcgtccggaactacctgagaatgcacatccaaaactcttagatttgatgcagagatgttgggaagcagctcctgacaagcgaccgtccttctcggagataacaactgagcttgagacactttttgaggaagttaaggaaacaacagaagcagtaaatgggaactgaagatttttgttatgtaagtaagctgattgacacattttaatatatcttttcatcacatagtaagtataactacacacggaagggacaccctaaacaaaatgctgattcgcaattcttttttggttgtctgttttgtttttgtaataacactctcttacttgaacatggtgtagaaagaaaaaaaatatgcttaaatgcaaatatgatacgaaatttcctcgctaggtgatagttttcttctggctattatatcaccgttcttaaagtactttcatttatttgttgttattttgcattaaaagaaaaacttgattctttaatggataattttttctcc

SEQ ID NO: 126 - DNA, 1233 bp, Gossypium hirsutum
  Clone ID: GOSHI-09MAY01-C53333_1
cggacgcgtgggcggacgcgtgggcggacgcgtgggcggacgcgtgggcggacgcgtgggcggacgcgtgggcaaggactggctagctgagaatgcgagagaagccttattgggaaatggaaaagagctgagcattagcggtattgcaccttaccagccttttgatggattgatggagttcaaagtggctgtggcaggattcatgtctcaagtcatggagaatgctgtttccttcaatccttcacagatagtgctgactgctggtgctacccctgcgattgagattcttagtttctgcttggcagatactggaaatgcatttcttgttccaacaccatattaccccggttttgacagggatgtaaaatggcgaactggggttgaaataatacatgttccttcccgcgcggccgacaacttccatttaagtatagctgctctcgatagatcattcaaccaagcaaagaaacgcgggctgaaagtgcgtggggttataatatcaaacccatcaaatccggctggcaatcttctaaaccgggaaacactttacagcctgctagactttgccagagagaagaacatccatatcatctccaatgaaatactggctggttctactcttggaaacgaagaattcgtgagcatggcagaaatcgtcgaccaggaagatactgacaggaaaagagtccatatagtatacggtttgtcaaaagatctctctcttccaggtttccgggttggtgttatctacacttttaatgaggatgttctggctgctgctagaaagttatcgaggttctcagccacctcagctccaacccaacgtttgctcatctccatgctatctgatacaaaatttgttcgaacattcattaccacaaactgggagaggcttcaaaggatgtatgtgcagcttgtggcagggttggaaaaaatgggcataaagtccataaaaagcagtgggggtttctactgttgggctgatatgagcgggtttatcagctcttacagtgagaaaggagaagtggagctgtgggataagttgttgaatataggcaaggtcaatgtaactccaggatcttgttgccattgtattgaacctggatggttccgcttctgttttgctacattgacagaaaaagatatccctatagttatggaacggattcagaaagttttgaagcctgtaaattgaatagttgtaatgctgttgatttattctaggttttggac

SEQ ID NO: 127 - DNA, 441 bp, Gossypium hirsutum
  Clone ID: uC-gsflnu33B051g05b1
cccacgcgtccggctggttctactcatggaaacgaagaattcgtgagcatggcagaaatcgtacaccaggaagatactgacaggaaaagagtccatataggatacgggttgtcaaaagatctctctcttccaggtttccgggttggtgttatctacacttttaatgaggatgttcaggccgctgctagaaagtcatcgaggatatcagccacctaagctgcaacccagtgtgtgctcatctccatgctatctgctacaaaattggtcagagcattcattaccacaaacagggagaggctaaagaggatgtatgggcagcttgcggcagcggagtgaaaaatgtccttaacgtccataaaaagcatcgtggggacatcactgcgtgactgactgagccgatttatgaggtcttacagagagaaaggaaaattaaagtcttgg

SEQ ID NO: 128 - DNA, 1195 bp, Gossypium hirsutum
  Clone ID: GOSHI-09MAY01-C53323_1
gtggagagtctctctctggtctttttttccccaaattttttttatttctctttcttttaatttcttcatttttccctaattagggttttttttttgttaatttatgaactttttagggactttatttcaataaatttaccaagtttctcaattacttagatcgaaactcgaacgagagagaaaaaaaagtagcgttcttttctcaacagaaggaaaaagaatggagtcaaattcatggaggtttcgattttccaattcttcttcgtcttcctcaaggcgtcatcaatctcgatctgatccgtttctgggtggaggatatgaagaatttgatggagacgaggatttcaaggcggagtttttatgtccgttttgcgctgaggatttcgatattgttgggctttgttgtcacatcgatgaggaacatcctgttgaagtaaaaaatggggtttgcccggtttgcgcgaagagggtcgggatggatatagttagccacattaccatgcagcatgggaattttcttaaggtgcagcgcaagcgaagattacgcaaaggtggatccaatttgacattttctatgttgagaaaagaaccgagagatggaaacttgcatgcccttctcgggggatcttcatgctttgtttctccccccaatgtcgaagccgatccattattgtcatcatttatgttcaatccacccacagccgatgagcctttaagcttgcagtctctctctattgctgaatcaagtgcagacaaggaaagcacagataaagaatctctagaaagaaagcctcaacagtcacaactgtcagaccaagagcacgaggagaaggctcgaaggtgtgaattcgtccgagggctgctgatgtccactattctcaatgagaatttataagttaaatgagggtatttgtagaatctattggtaaaatatatataatattaggtctgagagtaaagcataaagaggaaggtcttcactctacctcagaaatggcaatcggctgagctgggggtcaaacaaaactctgtattcctactgtatttagagcttttgtgcataatggaaagatggaagaacttctatcctcctatatatatatatatacacttatatgtgtttatgctttgtctttaaatgaaacatgattggaattagctgatttattataactaaatatctatatgcggtttc

SEQ ID NO: 129 - DNA, 602 bp, Gossypium hirsutum
  Clone ID: LIB3825-032-Q6-K6-D8
actttatttcaataaatttaccaagtttctcaattacttagatcgaaactcgaacgagagagaaaaaaagtagcgttcttttctcaacagaaggaaaaagaatggagtcaaattcatggaggtttcgattttccaattcttcttcgtcttcctcaaggcgtcatcaatctcgatctgatccgtttctgggtggaggatatgaagaatttgatggagacgaggatttcaaggcggagtttttatgtccgttttgcgctgaggatttcgatattgttgggctttgttgtcacatcgatgaggaacatcctgttgaagtaaaaaatggggtttgcccggtttgcgcgaagagggtcgggatggatatagttagccacattaccatgcagcatgggaattttcttaagatatccttttttttatgttgattttgtctcggcttatttagttttgatgtcaaagctagttaaataatatctatctatctatctactttaaaaaggctaaacactttaatctgatttgatcttcaccatggtgcttgacgatctttgccatgcattagggatatgggaatttggttttcatttttgtatagtgatcta

SEQ ID NO: 130 - DNA, 408 bp, Gossypium hirsutum
  unsure (1)..(408): unsure at all n locations
  Clone ID: LIB3828-025-Q6-K6-F10
tcgtagctgctgnagcctcttaagcttgcggggggcgggggatggggtgaatcaagtgcagacaagggaaagcacagataaagaatctcttagaaagaaagcctcaacagtcacaactgtcagaccaagagcacgaggagaaggctcgaaggtgtgaattcgtccgagggctgctgatgtccactatgcggggggagaatttataagttaaatgagggtatttgtagaatctattggtaaaatatatataatattaggtctgagagtaaagcataaagaggaaggtcttcactctacctcagaaatggcaatcggctgagctaaaaatcaaacaaaactctgtattcctattgtatttagagcttttgtgcataatggaaagatggaagaacttctatcctcctaaaa

SEQ ID NO: 131 - DNA, 911 bp, Gossypium hirsutum
  Clone ID: GOSHI-09MAY01-C53293_1
ccacgcgtcctcaggaaaaatctcaaaccaacaacttttgtctttccttttatctttttgtttgttcttttggcgaaaggtgaagttcatgaagaagcttcatggttctatcctattcatcccgggaaagtcacagttttgaatacagccgaagtaccaagaatttttaatattactacgccgggttacttttgaggccggttgttacgttgttgatttggtcacagctctctctctctctctctctctctttcctgttgatttataaaaacaccattgttgccgatattgacttgcttgcttcctcatctttcctattaaagtctcggagcatgacaactatttcgctccttctttatatgctttctctctgctttcttctccaacccaaaaccaaccttgttgctttcacttaaaagggtcaggatttttctgcttttctcttctgaatgcagctcttcatcaccctagcaccaatccatatagtagatcatgtcgtttttaccagcacgaaaggggagacacagacaacggtaccaggatcatctcagactggttgctgggtgcatcccatactgactcccggcggatgtcgaggatagaaacagcagtgtgacgagcaggataaatgttcttatgatttccacaccaaaccgtgatgatcttgtgttccctaagggtggatgggaaaatgatgagacggttcatgaagcagcatgtcgggaggccctggaggaagccggagtgaaaggaatacttgatgaggatccactgggagtctgggagtttagaagcaagagtagacaaaactgctgcaacatggaaggtggttgtagaggttatatgtttgccttggaggtgactgaagaacttgactcttgggcagaacagacaagttacaagaggaaatg

SEQ ID NO: 132 - DNA, 490 bp, Gossypium hirsutum
  Clone ID: GOSHI-09MAY01-C53263_1
ctctcgtgtccgcacgatcaaaaaattcagagatgcattagtcaaacacacaccagaccggtgcagcctcagcacgacaaaagggctcgaggagaaggagcttttggcattatccgcgaacaaagacctttccttcaactacacaccggttcgcacacatgaagagattcttatttggaaacaagctccatctgattcaacgagaaagctcccgctttcagtcccgacaacatccgcaaaacaaagggacagtgaggagaaaactttggttggtgtcggaagatgatgtagttaggttttctgccatttccattgcccagtgtacattcttacagtataattggaggtgcagggcagtttggatttattttttggatcctagccctgcatgattcaagggtaagtttgaagaccaaaactagtgtgtatatttttgagggtgtcattttaatgttcaagggaaaaccccttttgtgaatctaaaaacctt

SEQ ID NO: 133 - DNA, 458 bp, Gossypium hirsutum
  Clone ID: GOSHI-09MAY01-C53233_1
ttctcttcctgatttagatccaatgtggttcatgaggaagggagtgggagaagtcaagtgatgttcaggcggtgcaaaattcctacctgcaaaccaagatggtcaagaattttggtatcaatgtatctgttgagaggagactgaattctcttcctgatttagatccaaatgtggttcatgaggaagggagtgggagaagtcaagtagatgttcaggcggtgtctagaaaggggaagaagtcgcaaaaccgtttgatgaatggaaaaagagtggggaagaagaaaatctcatggcaagttcaggtggcgtttaagatctaatgaataatgagtattcttttcactcattgttttagcagttaactgaggtaggcacaagaattaaccgtctccctgtaataacttctgattggcattgctacagatttttaatatcattgtcttacacttttttttccc

SEQ ID NO: 134 - DNA, 583 bp, Gossypium hirsutum
  Clone ID: GOSHI-09MAY01-C48883_1
aaaaaattgaaacaagaccttcctggccacgcagatgaggtttttgctgttgattggagtccagacggtgagaaagttgcctcaggcggtaaggatagggtgttgaagttgtggatgggctaaaagcctacagataaatggagcctaaagagcatatcccatcaagttgaaatataaacatgtggcgtttgcatcaatggcaacaccatatatttatctgataggatcagtgatacgtgcatactgcaatgaaccaggattgattggtaggaaccttgatgtgtgacattgcagttatgcagccatttatcacggctttcaggatttctgagtgtataacaatatatactagctggacgaaacattgcaaactgatgtaatatcttttttgaagtgtaaaatagccgattgctaaggttggcgattggcaaaaaaaaaaaaaaaaaaaaaaaaaaaaaaaaaaaaaaaaaaaaaaaaaaaaaaaaaaaaaaaaaaaaaaaaaaaaaaaaaaaaaaaaaaaaaaaaaaaaaaaaaaaaaaaaaaaaaaaaaaaaaaaaaaaaaaaaaaaaaaaaagggggggcc

SEQ ID NO: 135 - DNA, 628 bp, Gossypium hirsutum
  Clone ID: LIB3543-044-Q6-K6-H4
cgttgatctagcttcaggatataatcactgtagtagcttcgcagatcaggattttgtttacttacactcaagacactgataggctgcttcccgaggaatgatttttttcattacctattgatacttgtgcaatgtcgggattacttaattcttctatcaacgggtcggcatctaatcttccagacagtagcggacgttcttttgcaacatctttctctggctctcttcagggactgcataatattcatggtagctttaatgttcccaatctgcctggcacgcttgcatcaagaaactcaacgttaagtaatgttccaactggtggtgttcaacaacctactgggagcctttctggtggaagatttgcatcaaataatctcccagttgcactttctcagttatctcacggcagctcccatggtcattcaggagtaaccaatagaggaggattgggagtatccccaattctgggaaatgcaggtcctaggataacaagttctatgggaaacatggtaggtgggggcaacatcgggaggacattaagctctggtgggaggttatctgtgcctggtcttgcatctcgtctgaatttaagtggcaatagtggatctgcaagtttaactgtgca

SEQ ID NO: 136 - DNA, 343 bp, Gossypium hirsutum
  Clone ID: LIB3135-047-Q1-K1-C3
ctcacggcagctcccatggtcattcaggagtaaccaatagaggaggaatcggtaaccgcaatgctgttccaggattgggagtatccccaattctgggaaatgcaggtcctaggataacaagttctatgggaaacatggtaggtgggggcaacatcgggaggacattaagctctggtggagggttatctgtgcctggtcttgcatctcgtctgaatttaagtggcaatagtggatctgcaagtttaactgtgcaaggacagaatcggttgataagtggtgtgctttctcaaggatcttctcaggtactttcaatgttaggcaattcttatccaactgctggggg

SEQ ID NO: 137 - DNA, 431 bp, Gossypium hirsutum
  Clone ID: GOSHI-09MAY01-C48483_1
acgcacgcgtccgcacaaccctagcattccccctttaatcctttcagccgaaccctaacattcctctaagagcggatctaccaccatgaatggccatcagcccatccgagcctcagagttattttcagccttaagaccccttatatactccgatttcgacgaagaagaagaagtttcatggtgtactttcaaggttaagtcttatttccttcttcctttcgattttttaaatgctaaacatatgaccaacataaaaattattggcagaaaagaaacttgagttaagaatcacctttaaggattttaataactttctctgcattctatgtgtgtgcgtatgcgttcggcccttgcaggtacattcgacggcttttttatttccagatttacagagtaaataaaaactaaaattacattttcttgctatcatc

SEQ ID NO: 138 - DNA, 612 bp, Gossypium hirsutum
  Clone ID: GOSHI-09MAY01-C48413_1
gttgaaaccctagtccttcctttcccttctcacccttcaatccctcctggagttgaaaacatggtgggtttccctatttcttttggacccatcttcatggaagccatggctgagctttacaatcctctctttcaatggtttcaaactcacccatcccctcctgttgctattatctctgacatgttactcagttcttgggtcaataccttatcttctaatctgaatattcaccatttaactttcatggttaccaatgcaaattcaacgttgccattggtgcgaaaggggatgaaaaaattgtctccctcgatagaacaattcgctaagaatgcagttgtgccgagtctcaaaagttgggggatcattttcaacacgtttttggagttagatggtgataaaaatggagatcatcaaggaggaattcactgaacacgaccgattgtgggctataggaccattgctacccattaaagctactaacaacgagagaggtggaccgagttctataccaagagatgaagtcattgcatggttagattcttgtaaacgagtcaactcagtagtgttcattgggtttggatcccagatttccttgaccaaactacaaatgga

SEQ ID NO: 139 - DNA, 748 bp, Gossypium hirsutum
  Clone ID: GOSHI-09MAY01-C48423_1
gtcgttcattattttcactcttattcgattaaattccagaactcgaagcgaagagacaaagatcgccatggcacctcctgcaaaagcaataactagtcccgtgcctgatgcgtggtatccaaccctagccgtcttcatgctcgccattggtcttgtcctcactgcttccttcttcatctacgaagcaacttcttccaaacgaaatcgcagtcttgcaaaggagctcacaactgggggagtggcatctgtcttcctgggattcgggtcactgtttttgctactatcagccggcgtttatgtctgattttcatatattttttcaaccattttaaaaatttgctgagcagaatggtgttgaatggaggatcatggcttcgaccttgttacctatagactttttcttttttgttattaatcagataaagagtgcttctatgagaatattttgatatctcttgggttttcttggtgcatgcccaaatttataggagtcgtagttgcatcacattggttaagttgcacactggttcaacttgcagttacctcattcacatcgactaaaaaataaaataaattaataaataaaataatattaaaaaatttaattaaattataataaaaaaatattttaaaaattttttataaataatttaaattttataattatttatttttttttggggggggcccttttaaaggatccatatttttttcccgggtttcgaaaccttataattttttttttgtg

SEQ ID NO: 140 - DNA, 345 bp, Gossypium hirsutum
  unsure (1)..(345): unsure at all n locations
  Clone ID: LIB3149-057-Q1-K1-D12
gttgaatggaggatcatggcttcgacctttttacctatagactttttcttttttgttatgaatcagataaagagtgcttctatgagaatattttgatatctcttgggttttcttggtgcatgcccaaatttataggagtcgtagttgcatcacattgtttaagttgcacactggttcaacttgcagtnaaaaaaaaaaaaaaaaaaaaaaaaaaaaaaaaaaaaaaaaaaaaaaaaaaaaaaaaaaaaaaaaaaaaaaaaaaaaaaaaatacaaaaaaaaaaaaaaaaaaaaaaaaaaaaaaaaataaaaaaaaaaaaatttnaaaaggggggcccttttaaaaa

SEQ ID NO: 141 - DNA, 200 bp, Gossypium hirsutum
  Clone ID: uC-gsronu33B049g08b1
tcgtttttctcttattcgattaaattccagaactcgaagcgaagagacaaagatcgccatggcacctcctgcaaaagcaataactagccccgtgcctgatgcgtggtattcaaccttagtcgtatttatgttttccatatggtatttgtgctctccgttttctttcttattcactcatcatttacttgtactctcttttt

SEQ ID NO: 142 - DNA, 987 bp, Gossypium hirsutum
  Clone ID: GOSHI-09MAY01-C48613_1
atacggcccagttgcagagctagcgccttctttgcaggctgatccgacaaggagtactgatatgtcaataactggcacaatggatcctgaagatgacacaatttttctcaaagtacagattacagacaaggaaggtcaagctcggaatatctattttccttttgacatagtgaatgacactgcaattgatgttgccttggagatggtaaaagaattggatatcaatgactgggagccattggagattgctgatatgatagaagaggaaatatcttctcttgtcccaacttggaaagactggggctcctctcaagtctaccatcagcacagctttaagtacgaagatgaggacgaagatgatgcccaaaatgaaatctgccaccctttctatgccaccttctcccattcttcctacgaagcacaattttctcacgggaaaagtgtgacttccaagtgcaattggccacaggatttattcagcaatgatgatgcaagttccagttgctctatgaactccttccagtactctacaatgaattatgaagactttgattcgagtctacatcaaggggagcacccctgcattccaaagggtcttaaatctacacgattttgtccatcagagagcatgactggtcacagctacgaacagtgtgatgcacaacttgattcatggaggtcttctcacttaaatggccatcggaagctaacaaaggttcgttcactcgtggacatacgcagcaaattgctgcaccaaatggtcatggcagagataaacaagaggcgcttattcaagaccgttggagcagtggagaacattggatatcaagagctgggagaagtttcaggcaagatatcttgaatatgtaggaaacggaaggatttgaagatcatgtcgaagatttcacgggagatttaggtggtaaaggtcccatcaatctctgtgttaatatgcttttagactttcagtggtgatggtgtacaata

SEQ ID NO: 143 - DNA, 701 bp, Gossypium hirsutum
  Clone ID: GOSHI-09MAY01-C48193_1
gagatgtgcagttcaaatagctgttcttacagtgagtgatactgttgcatcaggtgctgggcctgatcgaagtgggccaagggcagtatctgttgtgaattcctcatcggaaaattaggaggtgcaaaggtagttgctacaggtgtggtttcagatgatgtgggaaagatcaaggaagttttgcggagatggagtgatattgataagctggatcttatccttacacttggtggcaccggattcactccaagagatgtgacccctgaagcaactaaagaggtgattgaaaaagaaacacccggtcttttgtatgtcatgatgcaagagagtttaaaggtaacaccatttgctatgctctcacgctcagcagcaggcataagagggtcaacattgatcatcaacatgcccgggaatccaaatgccgtcgcagaatgcatggaggcattgttgcctgcccttaagcatgcactaaagcaggtaaagggtgacaaaagagagaaacatccccggcacatccctcatgaacatgctacaccagtggatacttgggagcgcagccataagttggcctctgctggtagtgtcaaacccagttgtccttgttcccattaatatgctctttttgtttagaggataagaaagcaagatacaatctttagcgatctttgagagccataacttttttgttattatctgacatc

SEQ ID NO: 144 - DNA, 929 bp, Gossypium hirsutum
  Clone ID: GOSHI-09MAY01-C48183_1
gagagagggcagtgaatcatttagagaagtcagtcagttcaaaacttgaggtgacaatggccaggcgagattcaagcacaatttcaaacttctggaaagcaagcacttcaggatgcactaaggtctagcttggaaacgtctgttattccagcatttgagatgtcatgcaaatctatgttcgagcaaattgatgtcacatttcagagagggctaatggaacacacagctactgctcagcagcaatttgaaaattcacattcttcccttgccgttgctttaaaggatgctattaattctgcaagttcaatcacacaaagcttatgtggagaaatggccaatgcacaacgaaaacttctagctatagcagcagcaggtggcagctccaaggcaggaaatcccttggtgacacaattgagtaatgggccattggctcatctgcatgagatgcagcctgaggcacagttagatccaacaaaagagttgtcaagaatgatagctgagaagaaatatgatgaagcattcacctctgccttgcatagaagtgatgtctcaatagtttcctggttgtgttctcaggctgatctaccagggatattgtcaatgaaaccatgttcactgagccaaggattattgctggcactttttcagcaactggcttgtgatatcaacaaggaaacaagtagaaagctggcatggatgactgatgtagcagttgccataatcccatcagatccaacaattgcagtgcatgtggtaccaatctttaggcaggtgtctcagatagtggatcatctacaaagcatgtcactacatctgcctcagaatccgccagcattcaggttcttaagtttgtcataaacagtgtgttaagcgggaaaggatttgttcaaaattgctagaatatctccttttttttttctttttggttt

SEQ ID NO: 145 - DNA, 691 bp, Gossypium hirsutum
  Clone ID: GOSHI-09MAY01-C48033_1
gtagaataccaaagagtttgtagaaaaaaacaccgagagcgagtgtgaaaaagctcaaaaactagtttattaccttcaaggtgaaaagttcaaaaatgacagcatcggagttacagctgccacctggattccgattccatccaaccgacgaagagcttgtgatgcactatctttgccggaaatgtgcatcgcagtccatcgctgtgccgattatcgctgaaatcgatctttacaaatacgatccttgggaccttccagatttggcgttgtacggagagaaagaatggtattttttctccccgagggataggaaatatccgaacggttcacggcctaaccgggcagctggttctgggtactggaaggcaaccggagctgacaaaccgattgggcagccgaagccggtcgggattaagaaggctttggtgttttacgctgggaaggcacctaaaggagagaaaaccaattggattatgcacgagtatcggttagctgacgtggaccgatcggctcgcaagaagaacagtttaaggttggacgattgggtgctttgccggatttataacaagaaaggcgccatcgagaaacagtcaccgcaaggaagcattggcaaaagctctgccgtgacggagatcgaagacaagaagccggatatagcgacacttggcgtggacacgcgccaagttgcccc

SEQ ID NO: 146 - DNA, 593 bp, Gossypium hirsutum
  Clone ID: LIB3543-031-Q1-K6-G11
cgtccgcacaaaacacggggtttgtttggtgggtggcggaaaaaaaagaggcgttgttcatgagtagtgtgattcagaaaccttgtgattcagaaaagatcttttcaatcatgtggtggagattcaagttggattttattcagtggacttttcaccgaatcatcggggggggggggagggatttttttttccaggacagtgtggtccattaaattattttacacctctcacacattcaataacgacattcaaaaccgatcctagatcacacaattattcctttcccatttaggaaaatattccttcttatcattaaaaataaatgctgaatttaaaactctgattatttttaatatttaagttaaattgaatttcacttttcgtttatgcagttggacgattgggtgctttgccggatttataacaagaaaggcgccatcgagaaacagtcaccgcaaggaagcattggcaaaagctctgccgtgacggagatcgaagacaagaagccggatatagcgacacttggcgtggacacgcgccagctgcccccgcctcctacggggctaggtaacgattacgtgtactttgacacg

SEQ ID NO: 147 - DNA, 875 bp, Gossypium hirsutum
  Clone ID: GOSHI-09MAY01-C48213_1
catagactctcttccacggttaaacccttttcagacaatagtcaaatggcttccaatgatcaccatggccatcaccatgaccatggccatgaccatcaccaccaccaccaccatcatgaccatgataaatcaacaaaatcatcatgggggggagctgatgggaaggtttaccatagccatgatggccttagcgcctcactcacatgaacccatttactcacctggatacttcagcagaagagccccaccgcttgttaacagggatttcaatgagagggctttcactgttggaattggtggccctgttggtactgggaaaacagctttaatgctggcactgtgcacgttcctgcgggataagtacagtcttgccgctgtgacaaatgacatattcacgaaagaggatggtgagttcttggtgaaacaccaggcacttcctgcggaaaggatacgtgctgtagaaacgggaggctgcccacacgccgcttttcgtgaagacatcagtatcaatctcggccctctcgaggagctttctaacttgtacaaaacagatatacttctttgcgaatccggggagataatttagctgccaacttcagcagagaactcgctgattatatcatctatataatagatgatctgggtggtgatagatccctagaaaaggtggccctggcataacccagctgactctggtgataaacagacggaccttgcactgcgtggagctgctggagtcatgaacgcgatcgcttcgatgcgtgatggaggcgcttcgatttgtcagtgagcacgggaagcgtgaggaattataacttgtttacagctgggagccgcactggagagcgaatgactctattgagacctggattctc

SEQ ID NO: 148 - DNA, 1148 bp, Gossypium hirsutum
  Clone ID: GOSHI-09MAY01-C49943_1
atttaataccaccctccccatcttcttctcagttcatctaatccaaaaataccatctcttccttttattggaatcaccgaaatgggcggaggaggagtcatgagggcggtggggaaggtcgccggggtcggaattgttaactccagccttcgtggtggtgttcagggaactccgctgtctgctgagcaatccgttatgcgtgtcgccgccgcttcccgttctgcttcttccgtggtttctgtttctagtgaaggagtttcgtctgttgccgacacgactgcgtcggtcagtcacaagtcatcttgggagatggtggatgattgggaattcgctggtgattttgaacaggaagctgctctggaaggatccatccccgcctcacccagcccccttccgattgctcgggttttgtttagtggcgtgccaagcctggtggaggctaaagaagccactaatgatttgaaagatgcactggaacaaggtttatctgtcatctccacaatacagtgaaacggttcaggtgactggcgttgcatcgctttcgaacactgaggagactaaagattgtgttgctgacagcattgaagccacttcagtgccaaaacctgctattcaggcattcaaattactcaatgagagcccagcagttcagtctgttgttgcttccattgcttctgatccaaatgtatggaatgctgtcctgaacaattcagcttatatggatttcattaaatcccagcagacaaatgataagtttgaatttccgggatctccccgaagttctgtatcttcagtgaagcttgaggaaaatgaagatagtggagattcattttcggcttttatacagaaaatcaagactagtgtggtcgagatggtgagtaaaacgactgatttcctccatagtctctttagtttacccttggcggacaaggctaaagaaaatgctggatcgaacaatatggataagacaattggagctagcttgatgggattggcagtgatggttattatggttgttcttttgaaacgagtgtagcaccctattttaaagtaaatttgccgatattacaaactcaaaaacacttgcttgtttggttactcatggatgataatgatgatcaatataaactttaaagtccactgcccgt

SEQ ID NO: 149 - DNA, 638 bp, Gossypium hirsutum
  unsure (1)..(638): unsure at all n locations
  Clone ID: LIB3582-055-P1-K1-A11
ccccgcgtccgatcttcttctcagttgatctaatccaaaataccatctcttcattttattggaatcaccgaatgggcggaggaggagtcatgagggcggtggggaaggtcgccggggtcggaattgttaactccggccttcgtggtggtgttcagggaactccgctgtctgctgagcaatccgtcatgcgtgtcgccgcctcttctcgttctgcttcttccgtggtttctgtttctagtgaaggagtttcgtctgttgtcgacacgactgcgtcggtcagtcacaagtcatcttgggagatggtggatgattgggaattcgctggtgattttgaacaggaagctgctctggaaggatccatcgccgcctcaggtagacccgaaccgattgctcgggttttgtttagtggcgttccaagcctggaggaggctaaagaagccactaatgatttgaaagatgcactggacaagtaaagtttattcctttcagttctttntatttatttatttatttcagcttttaggaattgttcacaaaagaatatgtatcaagccgaaatttggttaattattgcttttgtaggagaaagaattgaatttaaagggttttgctaactatttctatctaaattatgatct

SEQ ID NO: 150 - DNA, 344 bp, Gossypium hirsutum
  Clone ID: LIB3146-010-Q1-K1-D11
cccacgcgtccgcccacgcgtccgcccacgcgtccgcccacgcgtccgcccacgcgtccgcccacgcgtccgcttccttttattggaatcaccgaaatgggcggaggaggagtcatgagggcggtggggaaggtcgccggggtcggaattgttaactccagccttcgtggtggtgttcagggaactccgctgtctgctgagcaatccgttatgcgtgtcgccgccgcttcccgttctgcttcttccgtggtttctgtttctagtgaaggagtttcgtctgttgccgacacgactgcgtcggtcagtcacaagtcatcttgggagatggtggatgattgggaatt

SEQ ID NO: 151 - DNA, 810 bp, Gossypium hirsutum
  Clone ID: GOSHI-09MAY01-C49923_1
gtttatcgcctcttgctttcatctcttgtcaccagaaaaaactattcctcttagtccaaagcttaacaacggaggttccttgaggatttgaagctaatatccgatggaaggaatcggaggggacggtgcatcggtggcatcaccgatgcctcaatggggacatgatgcttggaggatgtatcagtattatctagataagtcgactcctcatacggcttataggtggatcggaacccttgttatagtagctatctattgtttgcgggtctattacgttcaagggttttacatagtcgcgtacggtctagggatttacctactgaatttgctaattgggtttttgtctcctttggttgatcctgaactcgaaggttccgatggacctttgttgccaacaaaaggttcagacgagttcaagccgtttattcgtaggctacccgagtttaagttctggtactccatgaccaaggctttctgcatagcatttgtcatgactttcttctctgtattcgatgttcccgtcttttggcctatactactttgttattggatcgttctcttcgttcttacaatgaggcgtcaaataggacatatgatcaaatacaagtatatcccattcagcatcggaaaacagaaatattccggtaagaaagcttcccctagtagcagtggctcccgtggggattgaacctcggccggttcacaggtatgcattacgacatacgtgatcattgattttcatctttggagaagatgaatatatgctgattatggattctttttcttttatttaaatatgcagtttatcac

SEQ ID NO: 152 - DNA, 485 bp, Gossypium hirsutum
  unsure (1)..(485): unsure at all n locations
  Clone ID: uC-gsflnu33B026a03b1
tcccccgggtacccaccacgcgccctttttgttngccangnacatagaagtctcggggtcgattttctatttagccaaacaagatgcacatactgcggaagattctaaccggcaagacgatcactctcgaggtaaggaatcccgtgctacggggcatcgcgaaggccaacatccactaaatggagacattatgctcggaggatggcgtctgatcttcgagcggagacaactcctaatacgacttataggtggatcagccaacatgcataggagccatctactgccgcgggcctattacgttcaaggggtttacatagtcacgtacggcctatggacttacctactgacacttgcaagtggggagctgcgatccctaggtgatcctgaactcgaaggttccgacggacctctgttgccaacaaaaggttcagacgagttcaagccgtttattcgcaggctacccgagtttaattctgggactccat

SEQ ID NO: 153 - DNA, 434 bp, Gossypium hirsutum
  unsure (1)..(434): unsure at all n locations
  Clone ID: LIB3584-061-P1-K1-G6
cccacgcgtccgcggacgcgtgggttccaatccatatagatctgctcgtttctcgctcccgattctgaggaaaagaaaacggtttctcaagagttcaaagcttaacaacggagagtcctttcaggatttgaagttgatattgaatggagggaattgggggcgacagtgcagcagttgcatcacctttgcctcaatgggggcatgatgcttggaggatctatcagtattatctggataagactactcctcatacagcatataggtggattggaactctngttgtagcagctatctactgtttgcgggtctattatgttcaagggatttacatagtttcatatggccttgngatctacctgctgaaattgctaattggggtttttgtccctctggttgatcctgaacttgaagtactgatggcccttgcttccaca

SEQ ID NO: 154 - DNA, 371 bp, Gossypium hirsutum
  Clone ID: LIB3493-058-P1-M1-G1
ctttcttctctgtattcgatgctcccgtcttttggcctatactactttgttatgggatcgttctcttcgttattacaatgaggcgtctaatcggacatatgatcaaatacaagtatatcccattcagcatcggaaaacgggttcgcctttagtttatactcgtggccaaccaggaaatcttaacaatttttttttcttacagaaatattccggtaagaaaggttctgctagtagcagtggttctcgtgaggattgaatctcagcatacatgatcattgattttcatctttggagaagatgaatttatgctgtttatggattcttttttttttttttaaatatgcagtttattacaaaaacataagttcagt

SEQ ID NO: 155 - DNA, 542 bp, Gossypium hirsutum
  Clone ID: GOSHI-09MAY01-C49823_1
agacagcatgagcagcaggtacatgaagaaattgacaccgcaaactctcctttcatcaattactccaagaagagttttgttgacaccaataatcaagctccaatggggttctctgcaacacactttgagggggccgcacaatttgagggtcactttgggttttttcagtcttcttcgccatctcctgaccagctacaaaataaccagtggctttcaggaaatcaaagagcatggagttggaaatttgagattaaagcaatggaagaaaggagttgccataagtcaaaagaataaagatctcaaacagaattttattttatttttttataatgggtagggtagggagctgttcaggaatcaaatttagaactagtgttaacccagtactggcaattgcaatgggaaataaattttgttcagtgtttgttttctaaaaaacaaaacaaataaaaagaaaaaaaaactaaaaaaaaaaaacttgaagctaacaatatgcaaggtaattggtaaaattagacctatttagcccttaaatttggggg

SEQ ID NO: 156 - DNA, 575 bp, Gossypium hirsutum
  Clone ID: GOSHI-09MAY01-C49463_1
ttttataggggaactggactactttgcagcaattcgcatgagaaagaatcccagttggaagctacccatttggaaaaagccaagaactatatacaagagtccttgttcagcatacagataatttatatgctgctaatggtgctgcagtagtattggcagaaaaaggccagcttgatgtttcaaaagatatttttactcacgtccaagaaggtgcaagtgggagcgtttttgtccaaatgccagatgtatggataaacttggctcatattttcttcgctcaaggaaattttgctttggctgtaaaaatgtatcaaaattgcctgcggaagttctattataatacggactcccaaattcttctatacttagctaggacgcattatgaagctgaacaatggcaagaatgcaagaaaactttattgagagccatccacttagctccttcaaactacacattacggtttgatgcaggagtagcaatgcagaaattctcaacatcaacactacagaaggaaaagaggactgcagatgaggttcgttcaacagttgcagagctagagaatgctgttcgcatt

SEQ ID NO: 157 - DNA, 1585 bp, Gossypium hirsutum
  Clone ID: GOSHI-09MAY01-C49693_1
cccacgcgtccgctgaaagtcgcaaggctggtgaagctgagtttgaggctgctgtttcctcatcagatcagacgagagtgggctgagcaggatgctgttaggaaggaagaagttgttttgccgctaaagaaaccaagcaccaaagattcagttgatttggaaagacctaaagagaagacggctgctggaccatcctctccaagaagcccttccaaaaatctactacctgctcagtttaggtcagaggaaacgagtgctggcagtgtagattctatgtcagttaggaagacattatcaaatggcttgcaacagagtgatcaacctgcatcttctagtacatcagtccaaataactggtattttgaaatctgagactcagaagtctgcaactccaaaaccatctgaacctactatcccacaagtccctgtgatgtcaaggccctccagtgcccctctaatacctggtccctgcccaacgccttttgtttctatggttcaaactactcctttgcttgctcgatcagttagtgctgttggccacttaggccctgacctatccccagctgctggttatgttcctcaatcttacagaaatgccataatgggtaaccataatgttgcttctagttcggctggttttactcctaactctcctactcaggcatcaacccatcactagtatactcacaaccacctaccttggtttctgcaccactgtatatgcccccgagctctgggaagatggagccaaattctgtccaatcaggccttccatttggcttggtaactaggaaaactttcggagtgctccccactggatggagaattctcagaaggcgtcctcgcgtcccatgcactctaatactttgcttggtgaatttgaaaatcttgacttgtacaggtctgtgcaaaatgggtcccgggaacacttctcaatggagtttccagcatgtgcatctgggcctcagacccaaggtgtcttggcagacgagtttccacatcttgacatcataaatgagttgcttgatgaggagcacaatgttgggaaggcagctagggctggagcaggcttccattctcttggcaatgagccatatttattaaatcagcattttccttttcattccgatttgggcttgtcagatggaatgggatcctcaagtggctcgtgcagatttgagcgaatgcggagttaccataatgatgggttccaacaaggttatagtagctcctccagcaaccatttcgatacagagagggagtttattccacaagctagccccctacgttatgctaatggacaacaaattgatggactggtcccaaaccggtggcaaatggcatcttcggatctgtctttactcagcatgaggaatgcagatggtgaaaattacgcatactacagcccagagtatccgaatatggcatgtggcatcaatggctataccgtattccgaccttcgaatgggcactgaaaagaggtaaacaactaggggagtttgcccacaaatttgattgttacttatctgatgtaataattgatttgaggaaaatttgatggggtctcaaatttgaagtaagtttgt

SEQ ID NO: 158 - DNA, 596 bp, Gossypium hirsutum
  Clone ID: LIB3825-018-Q1-K6-H4
ctcgtagtgaggggtagaaaaggggcaaaggatgatgtaccgaaaatggagttcgctgacaggaccattctccatccttggcggaatcaatggagccactgttggtgcccacctaattttccttgcttgaaagttgctggatcgatgtctgaaaaccaagaagaagactgccgacagatgcacagaagttgccagatgctttgatggttttggcaatatgcataggtttgtatgacataataccaaatctggtggttgtgtaatattattggcttatcttactaaaagctaggatgaaagcaaatgatcaattcaatactaactacaatacacgaaattcattgtataatataaagctggtgattcgttagatactcctgcaccaaagattagttgatttggaaagacctaaagagaagacggctgctggaccatcctctccaagaagcccttccaaaaatctactacctgctcagtttaggtcagaggaaacgagtgctggcagtgtagattctatgtcagttaggaagacattatcaaatggcttgcaacagagtgatcaacctgcatcttctagtacatcagtccaaataact

SEQ ID NO: 159 - DNA, 566 bp, Gossypium hirsutum
  Clone ID: GOSHI-09MAY01-C49173_1
cccaattttagtggcaacagatgtggccgctcgtggtcttgatataccccatgtagctcacgtggtcaactttgatctccctaatgacattgatgattacgtccatcggattggaaggacagggcgtgccggtaaaacaggattggcaactgctttctttaacgaaggcaatttgtcaatggcaaggccgctagctgagctaatgcaagaagcaaatcaagaggtacctgcatggctcacccgatatgcatcccgggctccttacggtggtaataaaaaccgacgatatggaggaggaggagggcgttttggtgggcgtgatttcagaagggagggttcagtcggtaggaacctacatcactacggcggaggtaatagtggcactgcatacggagttcccgggaattatggtggaggatatgctccggggatgacaagtgcttgggattagatcccactttatactggattatatattttgtatttcgctgagtatatatatttgtcgtcagattttcaaggatcattctctgtttttcagtatttagcatttgcatcaaacaaaa

SEQ ID NO: 160 - DNA, 438 bp, Gossypium hirsutum
  Clone ID: GOSHI-09MAY01-C49303_1
gatctaagatcgcggagcggacggcgcgtaatctgctaggttttctttaaagccctagctaccaccacggcgccgccgtcaaaactccgccgccgactccgattcaagtggaatcggcgcaactactaatcgtgggtgaagcgacgtgggtgatgggcggttgctgcaacgggaggacaacgtgcggcgccaatctgctgttacccactgcttaggggtaggctgggatttgggttagtgacttgggcttggaatgggtttgggctttaggcttagttgggcccgggctaaatttaggtcttacacataaaattatgaaaatgtgaaaaatcttttgttcgtaaaaatatatgtaaatatgtatgtgtacatttatgtatatgtataaagctatgaaatatataaaatatataggtaggtatatgtatatgtgtttat

SEQ ID NO: 161 - DNA, 581 bp, Gossypium hirsutum
  Clone ID: LIB3828-021-Q1-N6-A12
tcgcgatctagctaccaccacgtcgccgccgtcaaaactccgccgccgactccgattcaagtaagttccgtccttttctttttctttttttttttgtttttgcacaaaaacagagaatcaaagaaataaataaataaaatacaaagaaaatcacctgtcaaaatcaactgctgtattcttattatttttgtttttgtatttcgttgtaccctgatttctttctctatttcttgtttcaatctaaaaaatcctattcgcttttttttttaaagttttttctcttttcctcccccccttctgctattctagcctctttttatttgttgtattgctattcatcatttgcaggtggaatcggcgcaactactaatcgtgggtgaagcgacgtgggtgatgggcggttgctgcaacgtgaggacaacgtgcggcgccaatctgctgttacccactgcttagggttaggctgggatttgggttagtgacttgggcttgtaatgggtttgggctttaggcttagttgggcccgggcaaaatttaggtcttacacttaaaattttgaaaatgtgaaaaatttttgtacg

SEQ ID NO: 162 - DNA, 554 bp, Gossypium hirsutum
  Clone ID: GOSHI-09MAY01-C49273_1
cccacgcgttctataatactatcaagtgaaacagatcggatttgaagagacgcccaaatattctaaaggatatcgcaggtccatagaagatgatccgtgtcttccggtcctttcttgcaaagagggcatagaacatcaacctttaaggtcctttgtagctaattactgtaatggagcagaaaattattaaccaatctccatagatgtattttggttttttctggaatatgtaaagtccataaggacttgtagaaatccttatgagcctcaaaattaggcgtggtgtaattattgtcctgtaaatactttgtaacaagggcccgataaccactcccaacagagtaatctgcagaaccctcatatttccagaccaatatatcctccggactagctagaaagtgggatgggaagaatgcggcttacctactcctcatcaacaagtattaaaaatcaaatccctgttccagccaaggttcattccaaatattgacactataactattaccaatttgccacaaaactccgttttcaataaaatctcgagccccttccca

SEQ ID NO: 163 - DNA, 633 bp, Gossypium hirsutum
  Clone ID: GOSHI-09MAY01-C44993_1
tccacgcgtccgcccacgcgtctttcgaaaaagagggaaaagaaaaaagcggtcgagattttcacagccatggcgagcaccaaagtacagaggattatgacccaacccatcaacctgatcttcaggtttctccaaagtaaagctcgcattcagatttggcttttcgagcagaaagatttgaggattgaaggccgaatcattggttttgacgagtacatgaatttagttctggatgatgctgaagaagttaacgtcaagaagaaaagccgaaagtcattaggaaggattcttcttaaaggagacaacattactcttatgatgaatagtggaaaatgattgtagatccagcagttatttggactcgtgaatgcaaaatcttcttgtcatcgtataggtcaatctactatgactatatcgtgctatctttaaaaacatgccttcgtgttaggacattcaccttctaggaggtgcttctagtatttcagacagtttactgatgcttttgcttagattatctaatgatttgacatgttggtctctgctctttgatctgcattataagatttctgattaagtcggcataaaaaacccttatttaaaaaaaaaaaaataaaaaaaaataacaataaaaat

SEQ ID NO: 164 - DNA, 946 bp, Gossypium hirsutum
  Clone ID: GOSHI-09MAY01-C44803_2
gtacccaagcacacaactctttcttttcctgctctcaagagacaacttttcatcattaaagctcaaggccttactttgataaatgagtttcggtcccatctcttgagctgtgaagcagattttcaaatctgggtacttctcattttttctacaaaacccgacaaacatttgtttttgtatgtattaacttgtaggtttttaccccagatcttgcaatggtctgaaactcttgagtaaagctgttttttcttttgttggggggggggtctttataaagggtagaaaatggcttatagcttagagcaaaggttttggtgtcagcgagttttaaggtttgggtttgcatttgtatgtgtgtgtttgggtgggtacattgttggtccgacatcactgttgtggcgtttgaaggacaagtcaagacctagggtctcatgtcttccttgtgtttgtgattgctcctcccatacagatgacttttttctaacaccaggttgtggccaaaacgatcctgatttaaaccaagaactggagaaggatactgtggccttactctccgaggagattgcattacagaagatcgtaagcaaagaaaccatggaccgcacctcggcactaacaatggatgccaaaagagcctcctcacactaccagaaagaagctgaaaagtgcaatgcaggtgtagaaacatgtgaggaagccagggaatgggctgaagctcaactcagagaggagctcaagcggactgccttatgggagcaacgagctcggcaactcggctggaaagatcgaaaaagggcatatacttgactgtctatatatatgtacaaactcattttttgttcattttctattagaaatgcaaatgcttcatcctcttccacttgcattcaatgttgttggttttttaattaaacaaaggcagtgaaagcattctagatatttattt

SEQ ID NO: 165 - DNA, 1070 bp, Gossypium hirsutum
  Clone ID: GOSHI-09MAY01-C44803_1
tcgtccacgcgtccgcaagcacacaactctttcttttcctgctctcaaagatgacaacttttcatcattaaagctcaaggccttactttgataaatgagtttcggtcccatctcttgagctgtgaagcagattttcaaatctgggtacttctcattttttctacaaaacccgacaaacatttgtttttgtatgtattaacttgtaggtttttaccccagatcttgcaatggtctgaaactcttgagtaaagctgttttttcttttgttggggggggggtctttataaagggtagaaaatggcttatagcttagagcaaaggttttggtgtcagcgagttttaaggtttgggtttgcatttgtatgtgtgtgtttgggtgggtacattgttggtccgacatcactgttgtggcgtttgaaggacaagtcaagacctcaggtctcatgtcttccttgtgtttgtgattgctcctcccatacagatgacttttttctaacaccaggattagccgacaacacatactcaggttgtggccaaaatgatcctgatttaaaccaagaactggagaaggatactgtagccttactctccgaggagattgcattacagaagatcgtaagcaaagaaaccatggaccgcacctcggcactaacaatggatgccaaaagagcctcctcacactaccagaaagaagctgaaaagtgcaatgcaggtgtagaaacatgtgaggaagccagggaatgggctgaagctcaaatcagagaggagctcaagctgactgccttatgggagcaacgagctcggcaactcggctggaaagatcgaaaaagggtatatacttgactgtctagatatatgtacaaacatattttttgttcattttccattagaaatgcaaatgcttcatcctcttccacttgcattcaatgttgttggcttctttaattaaaacaaaggcagtgaaagcattctagatatttattttcccccatgcagtctttattttgtgctctttgtcatcaacatataaggtcaaagtttaatgatggtggttttgattttaaggagtt

SEQ ID NO: 166 - DNA, 549 bp, Gossypium hirsutum
  Clone ID: GOSHI-09MAY01-C44463_1
gaaaggagccgctgagatgtacgagagtgggacgttcgtcacagtcgatcttcagttcttggtggatgctcacatctgcgtctttgaagatgtttcatcctacggtcgatatctatgcttcaatcacgccattactaaccatgaagatgctattcacctcgcccgtttgcttacaccttctgctccttcccctcctcccagttatgaagaagcttacatgatcatccaacaaagattaagcaacaagaaattgaacaaagtgatggtggattttgagagtgagctgcttttggaggattgatccattcaggctgagggggaaggtccttatgaaacaacagcagaaagaaaatcaattagtttttctttccttccttcctcatccagaagcaaaaattatttacagtttgtcttataattaatgggaattgcaaactattttatccctcaacatgcccccttgcaagggatgtcccaagttttgggctttgctgtagctcgaaagctggatgatatttactgtttaagtaatcctacttctattgtttc

SEQ ID NO: 167 - DNA, 692 bp, Gossypium hirsutum
  Clone ID: GOSHI-09MAY01-C44413_1
ttactattgtatatatcttcggtgagtgtgtttagtctctttttctctttgttcctgtttgatgggctgttgatgtctttggcggttggtgagaatccaagtcccaaaaccatggggtttgataaggaggggagtgctactgatagtgaagcttcagagacaaaaacaccatcaaagattcctccaaacgaagatgccgttgacggacatcatccccctggaatcaatagaaaagcaagcgagagttctctttgtccaactgaagacgaagacgatgatgatgaagaagagagggagattgagttaggcccgaagtgcacccttaaagaacaactcgaaaaagataaggatgatgagagtttgaggaggtggaagcaacaacttcttgggactgtggatttcgagtcccgtggagaaaagctagaacctgcagtgaagatattgagccttgcgatcaaatcacatggtagacctgatatggtacttccaattccggagaacggaaagcctaaaggcttgtggtttaccctaaaagaaggaagcaaatacagcctgcaattcactttccaagtgagcaacaacattgtatccggcctcaagtacactaatatggtttggaaaactggtgtcaaggttgatagcacgaaagagatgatcggaaccttcagtccccaggcagagccttacacaca

SEQ ID NO: 168 - DNA, 787 bp, Gossypium hirsutum
  Clone ID: GOSHI-09MAY01-C44753_1
gctagtagtttttccggcagcggtaccatctccgagaggccgcctaaggtgttagcagcacccgaatccgaggcaattctaaccgtatggaaaaaatccttgctcttcaactgcaatggcttcacagtgtttggtagtaaaggtgatttggtgttcagggtagataattacatggacggtaacaagggtgagatccttctcatggatgccactggcaaccctatccttaccatccgccgcaagaaaatgagcctgggagatagctggttggtatacaaaggcgaaagtacctcaacgaatcccctactttgtgtgaggaaatcgatgaacatcttaaacaacaagtgcttggcttacgttatccccggcgacaacactagcaaccgaagcaacaacgtcgtatacgagatcgaagggtcgtattcgcaaagatcgtgttccgtatacgatgacaggaggagattagccgcagagatcaagaaaaaagaggccgttcatggaggagttgcctacggaaacgacatctttcgccttgttgttcagcctggtcatatccggacggattttgccatggctctcgtgatccttcttgatcaaatgttcggatcttcaagacgataaccatctttaatttcttgcttttctttaccaaaacattgtctgactgtttgtctatctatatatcgatatgaaaatcatagcaacaatttccaaacttgcagcatctggttatatatatatatgtctggttttgatcatcttcaagctggtttgtttcgtttttgat

SEQ ID NO: 169 - DNA, 522 bp, Gossypium hirsutum
  Clone ID: GOSHI-09MAY01-C44743_1
cgggccgacgacgcgtccgacaaacaaaggaagacgagggattattaatgtgaaaacatcaagacgtacgctcctttgtgggcgtcttccctttcatctaaccttggttttctctactgtcatatcggctaaggactattagtatctaaattctaagttatggttcttgatggcattgtatcttctccccatcggagatcaggatcaatgaggaaacaattcccaaaagatgagttggggagctggtcaacacttgttcagaggcatagattcctcttaacagctttgggactcttagcattcttatgtactatctacctttactttgctgttactctaggagctacagacacatgttctggcttggaaggaacagagagagcaacgtgtaaactgcagcacgcatggtcgactctatcccacgggaaactcaaattattttagcatgtttttatggaaaaatcactggttgcttttgacattctagtaatcatttttttaggcaatttgagggtttttaaa

SEQ ID NO: 170 - DNA, 606 bp, Gossypium hirsutum
  Clone ID: GOSHI-09MAY01-C44653_1
ctacgcatgtaggtatattcctgttggtctgtaagatgtcatcccccatcgtctgaattgtcgacctccttcatactatggacgatatgatcttgacacgctaatggcttgtgattgtgcagctgactggatccgtatatctaaaatgctgcttggcaaggttccatatggtttcacattcgcacctaagcacaaatccaatgcttatgatcgtgcagaaaatggctaattttgtgtcatttatttaatattacagcatttttatgaatgcaagtcatttggtctgcagactatgtttttcattccctaggtttatttaattccagaaaccgcatcgaggtgatatcactatctttcaattttgtagtgaagttagcggtatctgatagtagctcgtgctgctatctagcttgctattattcaagggagtatgctcatcttgctccaaatttagtaccattttattttactactatagccattaaataatgtaattgttcaagatactacagattacattttcatttgaatggttaaaatataattaagggaaaaaaaaaaaaaaatgaaaaaaaaaaaaaagaaaaaaataaaaagaatgaaaaa

SEQ ID NO: 171 - DNA, 280 bp, Gossypium hirsutum
  Clone ID: GOSHI-09MAY01-C44603_1
cccacgcgtccgaatgggtaccattgaaaaaaaaaaattgtgatatttgatgcttgttagtgctgattgtgcccgcgtccgctactgtaccttttcttttataagttgttaggatacttaaactttgatgcttgttgtgaatttaatagcatatgtaactacaaatacaaaacttctgccatactttttgttaaattccttgtttcctcattctgggaatatgttgtgaaacattgtcatttatatgtatctaaaagttctattgtgcatgcatttgcag

SEQ ID NO: 172 - DNA, 716 bp, Gossypium hirsutum
  Clone ID: GOSHI-09MAY01-C44303_1
ataccttctggccgatccgtattcttcacctcgacttttctgcatctccttgatccccgaccagcagtcccgcttgaaaatggcagcaaaatatattattggttctgttgtggcatcatttgctgttgcttatgtaattgataaacttgttgctgatgagaagatttttggagggactacaccccacactgtttccaacaaggaatggtgggaagaaactgacaagaaatttcaggcatggccacgcactgccggtccacctgtggtgatgaatcccatcagccgccagaatttcattgttaagtcgggttctgaatgacgtaatatttgcttgtattttagtcgaagtgtcagtttgattttacattcgctgtgaagaaattgttgtattagacttgggttaatccggctttgcatttaagagtagctcttgggtcctaaatatgtctgtactctttctaaaggtcaaaattcggtcagatcgaccagatgatgtcaatcgtactagatctcaataaacatctgcaaagcagtaccaaacttttgttttggcattccatgtttcattgacaaaacaaattttaatggtgtaaattgctctctaacagaaggctgattacttccatttatattgcaaggcaaataaataatgaccttcggcctcgtataatcaaaaaaaaaataaaaaatatcttttattttttattttttaaaat

SEQ ID NO: 173 - DNA, 714 bp, Gossypium hirsutum
  Clone ID: GOSHI-09MAY01-C44283_1
cccacgcgtccgggagggccgaacccgaactgctaaagggctgtctggcttttgttatttcttggttgattgcttaccatagctagagcttcggaaatgtttggttggaataattgctttttttattattatcttattagttgtaacttggttttgaagtgtctacaactttcatgtttgctgttgtcatattagtaatcactcttgtgtttcttattttaaaattctcaagattcaataaggtgtacagtttcttttcaatctcttcagtttaaaatgctttagtatataatattagtttaaaatgcttaaatttggttgcttggctggttgcagattaaggcatactgggccatatctcctcgctgcaatgccgatgtctcaagaagcatctaattacgatgaggtttccatgcagcagagcttgttattctctgatagtctcaaggatttgaaaaatctgagaacacaactctactcagcagccgagtactttgagctgtcctacgccaacgatgatcaaaagcaaatagtgatagaaacattaaaggattatgctgtaaaagctattgtgaacaccgtagatcatttgggttctgtgacatacaaggttaacgaatttttggatgaaaaggttgatgacgtttctggaaccgagcttcaggtttcttgtgttgaagagaaagtacgcaaatgtcaagagtatattgatct

SEQ ID NO: 174 - DNA, 529 bp, Gossypium hirsutum
  Clone ID: LIB3829-035-Q1-K6-C10
caaaattattattcttccttttctaccatctcacatcctcttcagcttcccatcggagatcttttcaacaaatctcaaagataattggaatttcgagtgagcaagaagaagaggggtttgaaagaacaacagcagcagccatggcgaagaagatcagcgtaacaaagaaagccttgataccaggttcaatcaaaccctcaagaatgtccaagggtacctctttctaatcgttccaatttcccattacttttcttcctctattttctttctggtttctcaatgtttgaatctggattgttcttttttcattggatttagagaaataccttttgatctttcgaatttcagttttgattctgaattcacgcggaagattttttcctcttcagggggaaattttgaattcgcaaaaattttcaattaggtttattgggtttaatttgttgcggtttgcacttaaaaacgccttttgggaattaaagccagatctcacaagttctacttaatggcataacccagtttctcttcc

SEQ ID NO: 175 - DNA, 507 bp, Gossypium hirsutum
  Clone ID: LIB3829-035-Q1-N6-C10
aacaataaagtatttccatgataatcaaatcaaaagtacgatcatatatacatataaaggttgtgaaatcattctggaagcaataaagtatatatggtacctaatatgaccatttgtcctgagagctctttagtgaacttcgtaaccctggcagaatctgtagttcttgtgcccattgcagagttctggacttcatgggcagcatcctcattcttcgaggatgaagatgttaacttattaacagttgtattaccatcacaattatttgtatttctgacccctccctaaaagaaaggaatgcttttcagttactaaaatcacgaacctttaaagaagtctaaagccacactagtacaagactaaatcatcttcccgtattgtcgtaatagaatacatgaaagatactacagtcactctaaacctgacctccatggatgtgtccatgtcatcacttgtaccagcatcgttctgtgagaaccttctttgacaactagggagatcattctt

SEQ ID NO: 176 - DNA, 425 bp, Gossypium hirsutum
  Clone ID: LIB3148-023-Q1-K1-A9
ccacgcgtcgccacgcgtcgaaatctcaaagataattggaatttggagtgagcaagaaaaaggggtttgaaagaacaacagcagcagccatggcgaagaagatcagcgtaacaaagaaagccttgataccaggttcaatcaaaccctaagaatgtccaagggttcacaagaatgatctcctagttgtcaaagaaggttctacagaacgatgctggtacaagtgatgacatggacacatccatggagggaggggtcagaaatacaaataattgtgatggtaatacaactgttaataagttaacatcttcatcctcgaagaatgaggatgctgcccatgaagtccagaactctgcaatgggcacaagaactacagattctgccagggttacgaagttcactaaagagctctcaggacaaatggtcat

SEQ ID NO: 177 - DNA, 309 bp, Gossypium hirsutum
  Clone ID: GOSHI-09MAY01-C45923_1
tatgtttgttggccatggcagtggcttgggctggactttgtagggtttcataaaccagagacacagcaacagagttcgaatgaaatggagctttctgaaccactttctgaacctcttctctgattatacttctctctttttctgtgtaaaatcagttcatagtaatttcattcttcaaagctccttcatttgcaatgattttgtcacttctataattctgacatggcaatgatttccgagagttgaatcttccttgttcatacttccatggcaacgaatctttataatcaaactcatctattttccatt

SEQ ID NO: 178 - DNA, 466 bp, Gossypium hirsutum
  Clone ID: GOSHI-09MAY01-C45873_1
cccacgcgtccggtagcttcaaattaatttcattctttgcgctgctatgactcatattatgtcaggcctgaagcagttgctgcattttggttgcccctgtttgacattgatgatatgatatatgatatatacatatatatatctataggtttggactttcgtgccttaaggcttcttgcgcaacagttttgattttgaaagcggtttagattagatgtataatatgaaattatttttactgattttggagtatttttgatgtctttgtttttattattatttattttttttttttttttttttttatttttttttttttatttttattatttatatattttttttttttttttttattatattattaattttttttaattttatattattttttatattttttattatttttattatttttttatattttatttttttttattttaattttttatattatattttt

SEQ ID NO: 179 - DNA, 863 bp, Gossypium hirsutum
  Clone ID: GOSHI-09MAY01-C45423_1
gcgttcggtttcactgtgcttgaaacgagcgggggcccatgaaaaggactgcaggaaaatattactggctggagagaattttaagaagcgtccgcccacgcgtccgctccggtgatgttggcacttccttcaagatgcaagatgaaggacgatctagggttagagaaactctgacaccttcgacagcgcagtcagcattacgaaggattctgccttacccttgcaaaaaacagtacactgtggtgattcttatgccacaagcatctcggtttaagttgttaagatcactattcaagcaaaatgctcctagtagagatgcaaagattttagcagccattgctggtggaacagtcttggcagcctgcttgtggagatattcacggaagtcatagcacaactgtacgtataaaagccttcaattgctccccgacctcaaaacttgaagcaagaattaggatcggatttttgttcattgatgttcaaccgtacaaccatacgggttgctctatggagcattcatattacaggtagtcaaggagaagtaacccccaaatctactactgggttttcaataggggggcttgtatactcattttttttaccttaccagttaacttgcttcattgatttttttttttttgccctttttcatttttaactttccatttttttcatggttttacgtgtgttagtagtattgttactcatattgcatagggctatgggcccaaccctaaacaaagtacgaagcttgtgtgtaagattacgaggttggccttttaaaaagaatgaccccttttcataacatatttgatagacatatatacgaacaggtagtccttttttttaagtgccctttcatc

SEQ ID NO: 180 - DNA, 478 bp, Gossypium hirsutum
  unsure (1)..(478): unsure at all n locations
  Clone ID: LIB3148-043-Q1-K1-D3
cccgggttcgatcccaatcgcgtccgnncttttttttnntttttttgtgnntaatatannatgatatttcccatttatcaaagggtgattgacaatactttcagtgagtgacaagataatgtataaaggggaggaagaaaaacagggaaatnngaaagtgggtgaaatctaanntatgtaanntaataatattaaaccaagaaagatacccagctttatacaaaaatgaagnnaaactataatgagnggaaatttnngtgtctagaaaccagagcnaagggtagagannaccctaatgcttgtgttattttgttgatggaaaattggtgatggggaaattgagaatgtcatcaatggagaatatataggaggttctaaaaaaaaggaaaaagaaacacaaagaagattattaaaatcctttgtatatatagatggtgaaatgcctctttttactcctttttggttttttgattatgta

SEQ ID NO: 181 - DNA, 312 bp, Gossypium hirsutum
  Clone ID: LIB3148-052-Q1-K1-E12
ggcttatagagcttataatcctcatatgactacttactattatgttcaaagcatggaagagaaccctaatgcttgtgttatttgttgatggaaattggtgatggggaattgagaatgtcatcaatggagaatatataggaggttctaaaaaaaaggaaaaagaaacacaaagaagattataaaaatcctttgtatatatagatggtgaaatgcctctttttactcctttttggttttttgattatgtataagtaatgttgtttgtgtaggggagtagattgaataaaaatcaaattttgggaatttgttttg

SEQ ID NO: 182 - DNA, 532 bp, Gossypium hirsutum
  Clone ID: GOSHI-09MAY01-C45193_2
aacccaaggttcctcttccacctggcgtcgtcgtctctcctcccagacctcgtggtcgtccgcctaagccgaaggacttattggctccccccaagcccaaacccgtcagcaccggaaggccgcgtgggcgccccactaagaaggccaagactggtaccgccgccgctcctccacctcctcccggcgtgaagcgaggccgcggtcgacctcccaaagtgttaccgtcggtgggttttcagtaaagtagccaagttaataaacgaaagagaatggagaaaaggactcattccgtcactgctcctaccccagccgcgttaggtttaatatttttttaaccttaattgtttaggtgtggtttagttatctgctaattgacgttttagctttttcggttttttggtgtagttaacttttggtggagtactgtaatgaatttagtgtagggtttagattttacttgagttcgactctttgtaatttcaatatgtgatttacatgtaaacctattactctgtcaaccggtgatgactct

SEQ ID NO: 183 - DNA, 728 bp, Gossypium hirsutum
  Clone ID: GOSHI-09MAY01-C45193_1
cttcctctcactctcttcttcgctttctcttaaataatacgaaagctaagagaaaaagctctaaatttcaatggcgaccgaagaaattagtcgaactcaaggcctcaatccttctcaacaatcttcttcacttccagactaccctcagatgattttggaagccatagaggcattgaatgagaaagagggttccagtatgtcatccatcgccaagcacatcgactccactcactccgatctcccagcgtctcactccactctcctctcccaccacctcaaccagatgaaacaaatgggtcaaattgttatgttgaacaacaattactcgaaacccgaccccaatgccccacccaagcgtggacgtggacgtccacctaaacccaaggttcctcttccacctggcgtcgtcgtctctcctcccagacctcgtggtcgtccgcctaagccgaaggacttattggctccccccaagcccaaacccgtcagcaccggaaggccgcgtgggcgcccccctaagaaggctaagactggtaccgccaccgctcctccacctcctcccggcgtgaagcgaggccgcggtcgacctcccaaagtgttaccgtcggtgggttttcagtaagttggctagtttttttttccaggagactggtgaaaatgactcattcccgtcctcctccttcccctgccgcgtttggtgttttttttttttttcccttttttttttaggg

SEQ ID NO: 184 - DNA, 870 bp, Gossypium hirsutum
  Clone ID: GOSHI-09MAY01-C45163_1
cccacgcgtccgagaggatcgacatggtgaccgggacagggagaagtcccgtgaaagaggaagggaacgggagagggagcgtgaaaaatcacgtgagcgctcccatgacagaccgagagatcgcgatagggaggatagacaccacagagatcgtgaaagaactagagacagagatagggacagagagagagaccgcggtggtcgtgatcgtgaccgagcacgtgaacgaggccgggatcgtggtcgtgattatgagcgcgatagagaaagagaccgtgacagggacagggacagggacagggattatgatgctggtgactatgaccgtgaccgtgggcgttccagggatagggatagggaatctgattatgaccgtgtcgagtccaaacatgagagagatcggcacagtgagagggattatgatcatggtgagccagatgaggatcatgggtggtttgagcagcatgatcatgggcataggcggtcggacctagatgaccaacactatgaatactatgatcatcatcgaggtcgaggagaatatgatctggatgctcatggggatcgctatgatcaatattctgaccgtgaccgtgatcgtgatcgtgatcgtgatcgttatgatggaatggaagaagatgattacaggtgattatggtcataagacaaatcaagctcgggaaattgagcagctactttctctgccagtgctcctagtttagtttagatctcaaggaaactgttttcaatctgctttctattttgatgtcgctggctacttctgagttcagtagtgtttctttggagttggaacgctatatgcttgtttttaattttttgaaaaagttttttatgactttgctttggttt

SEQ ID NO: 185 - DNA, 514 bp, Gossypium hirsutum
  Clone ID: LIB3825-012-Q1-K6-D11
aaattgccaaattcaagcaccttaaaccaaacggaagcagacaatagatcagtagcatagagcttaaactaaagcaaagtcataagaaaaactttttcaaaaaatataaaacaagcatatagcgttccaactccaaagaaaacactactgaactcagaagtagccagccacatcaaaatagaaagcagattgaaaacagtttccttgagatctaaactaaaccaggagcactggcagagaaagtagctgctcgatttgccgagcttgatttgtcttgtgaccataatcacctgtaatcatcttcttccattccatcataacgatcacggtcagaatattgatcataacgatccccgtgagcatccagatcatattctcctcgaccccgatgatgatcatagtattcatagtgttggtcatctaggtctgaccgcctatgcccatgatcatgctgttcataccacccacgatcctcatctggctcaccatgatcataatccctctcactgtgccg

SEQ ID NO: 186 - DNA, 432 bp, Gossypium hirsutum
  unsure (1)..(432): unsure at all n locations
  Clone ID: uC-gsronu33B141d03b1
atcataacgatccccatgagcatccagatcatattctcctcgacctcgatgatgatcatagtattcatagtgttggtcatctaggtccgaccgtgaccgtgatcgtgatcgtgatcgtgatcgttatgatggaatggaaaaagatgattacaggtgattatggtcataagacaaatcaagctcgggaaattgagcagctactttctctgccagtgctcctagtttagtttagatctcaaggaaactgttttcaatctgctttctattttgatgtcgctggctacttctgagttcagtagtgttttctttggagttggaacgctatatgcttgtttttatattttttgaaaaagtttttttaannaaaaaaaaaaaacccagaaataaccaaaataaatctccttaaaaaaaatccccttttgggcgggggaa

SEQ ID NO: 187 - DNA, 961 bp, Gossypium hirsutum
  Clone ID: GOSHI-09MAY01-C45133_1
cccacgcgtacggtctagattccaacaaacgcgaggacaagctgctgacgtgctcataacctatctctctcgtcccactgaacctttgatctgttgctgaaataaaatcaataaatgacaacttctacaaaataaggcattcactggaactttggacaagtgcaaggcttgcgacatgactgtccatgtggtcgatatgatgacactcgacggggtgccataccataaaacttgcttcaaatgcagccattgcaagggtaaccttcagatgaccagcttattctgggatggcatggaatactgtattgcaagcctcattttgagcaactgcttaaggaatctgggaatttcagcaagaatcttcaaacagggaccaggccgactgaactgaataggactcccagcaaactttcatccctgttttctggaaccctagacaagtgtgcagcttgcgagaaaacagtgtacccgttggaaaaggttactatggaaggtgaatgtttccacaagacatgttttaggtgcgcccacggtggctgcccactgacacactcatcttatgctgctctcgacggtgtcttatattgcaagcaccatttcgctcaacttttcatggtgaaaggaaactataaccacgttcttcaagctgctacccatagaaggaacaattcgacggcatcgtcgtctgagaatgtggaaactcgtgccgaaccggaggaaagtgctgctgatgaagaatccaaagaggcatctgataattgaaacacacaccatttggttcttttataatttcctaccaccatgacgatgatcttttagagcttttgcaaatgaaaccagtttgattgagtggcagaccatctcatcaaaaactgaatgttcttttttggattggattgatttctatgtatttgatgattcgaacaacttgcatgatcaattgataatatatactttgaat

SEQ ID NO: 188 - DNA, 452 bp, Gossypium hirsutum
  Clone ID: uC-gsflmaxxa054a08b1
ccttcgcgtccgcttatttgtccttcatttggccgaggttaattacaacaaacgggggcaagctgctgtgtgttttttcttctttctcttgtcccactgttcctttgatctgttgctgaaataaaataaaataaataaataacttcgacaaaaaatggcattcactggaactttggacaagtgcaaggtttgcgacaagactgtccatgtggtcgatatgatgacactcgaaggagtgccataccataaaacttgtttcaaatgcagccattgcaagggtaaccttcagatgaccacttattcttggatggatggaatactgtattgcaagcctcattttgagcaactgtttaaggaatctgggaattttaacatgaatttttaaacagggaccaagccgactggactgaataggactcccaacaaactttcattcctgttttctggaaccc

SEQ ID NO: 189 - DNA, 601 bp, Gossypium hirsutum
  Clone ID: GOSHI-09MAY01-C45393_1
ccatcttgttaatcagttcaagggttgaaaccgatacttttgatgctgctttgttgctcaaggagcgtgaaaagaaagcaaagaagaaggcagcagcagcatctgcaagcagcgcaaatgttgaggaaccaaccgaaactgttgcagaggttccagaaccagagaaagatgttaatgctgaggaacctgttcctgcccccgttccggtgaagaataaagttcagaaggagaatacagtaaggtacaagaatcgaagtagagcacgggagtcacttcctagacctgtcctgaaacgtaagaagtcgaccaactactggatatgggcggctcctgctgcggttgtggtgctgatacttatagctttggcttactattatcttgtttgaagaagttaaactgagagttatagacaaagtttatgggttgatagtgggaaaaggtagttaatttggttggatgcatcccatgaagggatgtactaaaagaactcgtaatgttgatgttagtgcagtcttaatgcttagtgaggccaaaactatatgtacttttggttttgttggtgctacttttttaaaattttgacttctgagatgtttcagtt

SEQ ID NO: 190 - DNA, 620 bp, Gossypium hirsutum
  Clone ID: GOSHI-09MAY01-C45303_1
ctgagattttagggttaaattagtgaggagagaatgaggaagccttgctgtgataagcaagacacaaataaaggggcatggtctaagcaagaagatgagaagctcatcaattacattcgaattcatggcgaaggttgctggcgtactctccctcaggctgcagggctccttcgatgcggtaaaagttgtaggctgagatggataaattatctaaggcctgaccttaaaagaggcaactttactgaagatgaagaggatcttattatcaagcttcatgcactcttaggcaaccggtggtcgttgatagccggaagactacctggaagaaccgacaacgaggtgaagaattattggaactctcatctaagaaggaagcttataaacatggggatcgatcccaataaccatcgtttgatcactcacaatcatcttcctcgcccacatgatcccaatagtggtgcaagtataatatctcctgcttcaaaagttccagtcaccgataatactaatattcatccaccggagaaatccagaggtgacaatgatcaagtttcggatgctgcaagttccctggaggatcataagctccctgatttgaacctcgatctcaccatcagtgg

SEQ ID NO: 191 - DNA, 933 bp, Gossypium hirsutum
  Clone ID: GOSHI-09MAY01-C45273_1
caatctttgacaaaccttgagatgtacccgaagaataaaaacgaataagcgttatgctggatcctcaaatggaccgttcaggaagttgctgaatccgttaaacaggatttcagaagtattgacattcttgtgcattcactagccaatggccccgaggtcagcaaacctcttttggatacatcccggaaaggataccttgcggctttatctgcttcaagttactcccatgtttccttactcaaacattttctcccattaatgaatccaggaggttcttcaatttctcttacgtacattgcttctgagcgaatattcccaggatatggtggaggtatgagttctgctaaagcagctctcgaaagtgacacaagagtacttgctttcgaagcaggaagaaaacataaaatccgggtcaacgcaatatccgccggccctctaagaagtcgtgctgcgaaagcaatcggatttatcgacatgatgatcgagtactcgaaggccaatgcacctctccaaaaagaactgtccgcagatgaagtggggaatactgctgctttcttggcatcaccattggcttcggctatcacaggtgccgtcatatatgtcgataacggtttgaatgcaatgggtatcggagttgacagtcccatatttaaagacctcaacattccgagcgacaagcactagaatccggtatgccaaggtcgagacccgaaattcgatgccaaatgtttagtatcgatgtttaatctccattgcccggcctttttaaacttttctgtttttggtagattgagttttgtcacaataggtttcagcaaaattgtggatgaacaatttaaattaatggatggatttggtggggtcttaagagttaaacagccctttcattgtttcatttattacttttttgtattttatttaatattctttttt

SEQ ID NO: 192 - DNA, 478 bp, Gossypium hirsutum
  Clone ID: GOSHI-09MAY01-C46993_1
ggcgaccccgcgtgcgccacgcgtcaaaaaaattccaaaaccccttcccctctcctttgctagggtttcaaccggggcggggggcacagtcatcggcccgccgtggtacggcggccggagttcctaaagggaaccctttttggctgatccaacctccccaatctcgatctaagggttatgtacccaaactacccagccaaactgcaagataaaagtgaaaaagaggagaaaataaaggggcctttcggctccctaataatgccgatgggattttcaatcgagtcccctaactcggtgaccttctaggccggagaaagctccaagcacggcgcttaaggcctagacgaaagcgatgggacggggcaaagggtggttgaaaggtgtcaagcatcacgtgggtgagcggcgcggcgcacagggggaaccctagggttcctccgaaagtgttaaatttctgggctagggttttttagtttta

SEQ ID NO: 193 - DNA, 766 bp, Gossypium hirsutum
  Clone ID: GOSHI-09MAY01-C46983_1
taccaatcagtctgctccagctggagctgccgaagcatctaagatacaagacccaaaatcacatgtttctggttctggccctgagttgaggagaacatcttcttttgacagaacatgggaagagactgttgcagaatcagtggctaatgaacttgtcctacaggctcattcttccagcgtttcttccactaaaagtggaccacttgtttccactgagcaacaagatgaatcctctaaaaataaaatgaaagacacaaaatctgttaagtctggtcgatcatctcagaagagaagaaggttggaaaatccaatgaagagaaaaaatctaggcctcggaaaatgatggaatttcacaatatcaagataagtcacgttgggctcctagttacatatgaagggtccagatttgttgtaaatgatctcaagttgctgatggatacatttcaccgtgtggagttcactgggacttggagaagactgttctctcgagttaagaagcatattatatggggagttctaaagtctgtaacaggaatgcagggtaaaaaattcaaagacacggcgcatactcaacagccaagtggaactggtgttcctgatagtgacctcaatctcagtgacaatgaccaggttgagaaacctggcccgtacccgatagcttttcttaagcgtccaactgatggagctggggatggatttggtacttccattacgggcctcttcaacactcaacggcggaaagtccaacaattcgggctacgaacta

SEQ ID NO: 194 - DNA, 771 bp, Gossypium hirsutum
  Clone ID: GOSHI-09MAY01-C46953_1
atttgtatttcaaggtgggacaagattgcctgaaggagtggaatttgaaatgcatacattgccagtagatgggaatacagtaccagatggggatggtttaaatgtgtatgtgaatactgatgatccgggggagtcgccgaacatacctagagccgttcttatggctgtggttcgaagatcaaaagcacgtgctaagaaaaactatgccagagctgatgaacttcgccagaagattattgaatcaggataccaggtcatagaccttcaaaacgaagagattcttgctcgaaagtatcggattcgactgaggggtatagatgcacctgagatgtcgatgccgtttggaaaagaagcaaaagaagagttggttaagcttgttcatgggaaatgtttgagagtgcttgtctacggggaagatcactatggtcgttgtgttgcagacatatattgcaatagcattttcgtgcaggaagtaatgctaaagaaaggacccgcatggcattatgtagcctgcgaccaacgggttgaattcgcaacttggcaaaaagaggctcggacaaagaaaaccggcctttgggtacaatcaaacccagagaagccatgggaatggaggaagaagaacaaacatgaaggtaggtaacactgtccttaaggatccataacatcttgagaagtgataaaagtacacagttatcatatttgtgtaaagaaccatgtttgatccattcctatatctcttgtttgcatgcaatgcttattattatcaaatga

SEQ ID NO: 195 - DNA, 234 bp, Gossypium hirsutum
  Clone ID: GOSHI-09MAY01-C46913_1
acgcgtacgctgatgtggactacttgaccatcgcccctccgaagtgaaaacatggcgattcaagtcttctcccaccaggtgagaggtctctcctctatctaaagtgtcctttgctagtctatgtgcttgcgagttccctaatctgtgaatatgcgcatagcattaatctcttgagagcaaggcttcttattctggatatcactgatattggctccactcactgatttgtctggt

SEQ ID NO: 196 - DNA, 593 bp, Gossypium hirsutum
  Clone ID: GOSHI-09MAY01-C46863_1
gttcaggtaagcaggtccctttgttaaacctagatgagtataccaaagataccgatgaggctgaaaccgaccttccagttgatggcaatactgacatggatttgctaatcgatgaggatagtgattctcttacgtcaaaactgccttctgcacaagaaaatattggaatcatggaagaaaagcagggaaagtgatgggatatacttccctttccatcttgggcagaagtgagtggaaccatttccatagcattatcagaactgaagttttgggattaaagaacaggtcggcacccagaggcagaggtgaggatcttcgaggggaagagaatgaagcacaaacagaagtatttccccggaagtgggtcctatagagtaatcctattatcaacacttcaacttcttaggagatattggcaacagatctaacattctaggcaagcagtgttaaacttgattgatgtaaaggtcgaggcttaggcaatgggagaggaagtattgcaggagcagattagaaagcaaaatggtaacagttgatgtgtgtgtatatatatatataatgtggataagaacttggctaatggctgagctctt

SEQ ID NO: 197 - DNA, 636 bp, Gossypium hirsutum
  Clone ID: GOSHI-09MAY01-C46813_1
cccacgcgtccgcaaaacaatttcaaaatattaaatattctttctcttttgatcgatacttgaataatatgtcaggaagaggaaagggaggcaaggggttgggcaagggcggagcaaagcgccaccgcaaggtcctccgtgataacatccagggaatcacgaaaccggcgatccggcgtctagctcgtaggggaggtgttaagcgtatcagtggcttgatctacgaggaaacccgtggagtgttgaagatcttcttggagaacgtgatccgcgacgccgtgacctacactgagcacgccaggagaaagacggtgaccgccatggatgtcgtttatgccctcaagaggcagggtaggactttgtacggtttcggtggttagattggtgtttactgttcaggattgctgaagttggctgcgatggcggcggcggcgatggtggtggggggatttgaagtcttgcggtcaagaatgtttgagcgtagtatcagcgttagggctttgtaattagtgactattagaaattagacattgggtactgtatgctttcgtttacgatttgtgattcttgtactggattacagattttaatgaagttttgagttcatttctaagattagaagtgtacttgtttgtt

SEQ ID NO: 198 - DNA, 648 bp, Gossypium hirsutum
  Clone ID: GOSHI-09MAY01-C46823_1
cccacgcgtccgctccctatgtcttcatgttgaggtttataaaggctgctcagtcagacaccaagcttgaacatctagccttctacctcattgagctgtgcttggttgaatatgaagctttgaagttcaagccttccttgctatgtgcatcagctatctatgttgctcgatgtaccctgcaaatgtctccttcttggaccccattgctttgcagacacacacgctatgatgcatcagaaatcagggagtgtgcggaaatgatattaagattccaaagagctgccagttcagggcaattgaaggtgacatttgagaagtacgcgagccatgaactcagtcaagttgcaatgattacacccttgggtaggcttccttgaacttgattttagttgaatgagttcaattttagcatgtaagtaaatataaaagtgaaatgtcatatataacacacaaaatagtccggaagctttcatgtcaattggagttgtggtgttgtagttgtaagcgtgttgattgtattggaggtattgtttcctccttttgagtttgagattgatgacttaatgtaatgatggatcatgggttcgtacttgatcgccttcttgacttagctccaaaaaaaaaaaaaaaaaaaaaaaaaaatataaa

SEQ ID NO: 199 - DNA, 339 bp, Gossypium hirsutum
  Clone ID: LIB3146-039-Q1-K1-E4
agccttccgaggaccccgggccatgaactaagtaaagttgcaatgattacccccttgggtaggcttcctgggacttgattttagttgaatgagttcaattttagcatgtgacgtaatataaaagtgaaatgtcatatataacacacaaaatagtccggaagctttcatgtcaattggagttgtggtgttgtagttgtaagcgtgttcgattgcattggaagtattgattcctccttttgaggttgagattgatgacttaatgtaatgatggatcatggggtcgtaaaagtactaacacctgtgagcaagctgagcctggcttaaaccaatgtcaatatg

SEQ ID NO: 200 - DNA, 686 bp, Gossypium hirsutum
  Clone ID: GOSHI-09MAY01-C46593_1
atagaccaataattattagacaaatgaaagtttttgataggtttaaaattgtagtcatttttaatgattgagctttgagattatatcactcttttttttttttgtatgatgatgcaggagtgaaaattgttgtgtatcagttgaataaagaaaatttggacactgttctctcatggaggcgagtttacaattacagagattttccagttatggttgcttcaaaatcgaaccattattggattcctttccttctgttaaaactacacagtttaccccatggcgtagcaagtgctctgtcatttgtctttcacatagagttactgctagtgctgctgatttttccaagaggagacaaagaaggttgtctaaaggtgtcaactccaaagggtttcacttcgaaaacacgaatgagtactcagaagagaaaaccacaaaagaataatgaacagaaagaggattctagcattcccaagttgagtgagtttgtagagccatataatagggaaactgaattgaaagtagatgaagttgaaaataaagaaggaaaagaggatttatcatcaattggaaaagagttagatattcgcttaagcaaccataatgttgtaaatggaaatggaaatggaatgattcttggatatgttgtcgggttggagaagaaagagataaattcggaaaatggcact

SEQ ID NO: 201 - DNA, 757 bp, Gossypium hirsutum
  Clone ID: GOSHI-09MAY01-C46463_1
ctcgatgggctgctgctgcccagtttgcacttgcggttagccttacttcatcgcagaatgaccttactcgcttggaaatcgaagatgagaatagtatcctcaagaaaacgagagatgctgtgataactcttcagggagttctggaggggaagcatgataaaacaatcgaagagtccctagatcagcgtcagatgtctaaagatggatggtggtcagcactttacagaatggttgaaggtcttgctataatgagcaaattgggaaggagcaggcttcatcaatctgattatggtttcgaagacagatcaatcgactgggatcaaactgaaatgtagagttcaatctctcccgtctggattttggattcataactgaatgcgttttggagtgtagcatctgaaaattgtccaaagtttacatcaaggattgttagccatgaatctgtctgataaccttctcttttttttttttgcaattttgaaccccaaaattgccggacaatttagttgaattgttaaaagagctgcattataattatcttcttttgcacttttctttttccattttataaaaaaaaaaaaaaaaaaaaaaaaaaaaaaaaaaaaaaaaaaaaaaaaaaaaaaaaaaaaaaaaaaaaaaaaaaaaaaaaaaaaaaaaaaaaaaaacaaaaaaaaaaaaaaaaaaaaagggggggggcccttttaaggaaccaaatttttttccccgggccggggaaggaaaatttttttttttaggg

SEQ ID NO: 202 - DNA, 453 bp, Gossypium hirsutum
  unsure (1)..(453): unsure at all n locations
  Clone ID: LIB3829-007-Q6-N6-B11
aaattgagaatactcactcataattataatgcggtgcttttaacaattcaactaaattgtgcgacaattatggggggcaaaattttgtgcgcgagctcaaaattcaaaaaaaaaaaaggcagagtcatgggtaacaatccttgaggtgaacttcgggcaattttcagatgctacactccaaaacgcgttccagtgtatgaatccaaaatccagacgggggagattgagctctacatttcagtttgagcccaggccattgagctgtgttccaaaccataatcagattgaggaagcctgctccttgccaatttgctcattataggaagaccttcaaccattctgtgaagtgcggaccaccatccatctttagacatctgacgctgatctaggggactcttcnattgtgttatcatgcttcccttccaaaactccctggaagggtatcacagcatc

SEQ ID NO: 203 - DNA, 414 bp, Gossypium hirsutum
  Clone ID: LIB3829-018-Q6_N6-D5
aattataatgcagctcttttaacaattcaactaaattgtccggcaattttggggttcaaaattgcaaaaaaaaaaaagagaaggttatcagacagattcatggctaacaatccttgatgtaaactttggacaattttcagatgctgcactccaaaacgcattcagttatgaatccaaaatccagcacgggagagatcgaactctacatttaaggtggaccccacaaccttgaccggtcttctaaaccataaacctgattccggtagcctagcccttccacactagccactgtctgcacgacctaaaaccggccttgaaccacggcccccgaatcaacgctgataatcagcagcctcaccacccttatgaccaaattcaccatctccttgtggacctacacggtatccatgcctg

SEQ ID NO: 204 - DNA, 374 bp, Gossypium hirsutum
  Clone ID: LIB3148-053-Q1-K1-F2
cgtaaaaggatcggtgacctcccacaaagtaggggttgcaccggagaatcgtttgtctctgaaaacggaactttcaagacaatcgaggagttttgggatggggaaatttgattacattttcattctaaaaaatagccttgagtcattatgttaacttggaatttattcttcatattttttaaaataataaggatgtttgcttgaattaagattcaaaaatcttttaagatatttaaatatatttattatgtattaattagtatatatttttattaagtgaaactacattcaagatcactttaatattgatcaaaagaaacaaaaataaaaaacttaattatatgcataaaaggaaaagcaaatcttaaaaatgg

SEQ ID NO: 205 - DNA, 375 bp, Gossypium hirsutum
  Clone ID: LIB3146-057-Q1-K1-B2
cccacgcgtccgcccacgcgtccgtgaaaacggaactttcaagacaatcgaggagttttgggatggggaaatttgattacattttcattctaaaaaatagccttgagtcattatgttaacttggaatttattcttcatatttgttaaaataataaggatgtttgcttgaattaagattcaaaaatcttttaagatatttaaatatatttattatgtattaattagtatatatttttattaagtgaaactacattcaagatcactttaaaattagatttgtcttatttgtcttattttagttttttttttcaatttagtcacttaattaaaatgattgtcaaactaattagtatgttaaaaattatgttaattcac

SEQ ID NO: 206 - DNA, 388 bp, Gossypium hirsutum
  Clone ID: GOSHI-09MAY01-C46693_1
cataagccctgtactaatagtcagattggattttgttccctttactaaaaaatgggctaatgggtccctgtacatgagatcggagaacatattggtcttttttgttaagaatttcatccattcctactgttaaaagccgttgtgattgatggagtaattagacagctatacgtggcatgccatgtatatcttatgttgacatacatgggctagtttttaagagtcataatggatgaaatttttaatagaatgaccaacttattttttgatccaacgactctttccgccatttttggaatagatgaagtagagtgccatcagcttactagtagtacaacagtctttatgatattttcactgatcatattctacactgttcgcaacatga

SEQ ID NO: 207 - DNA, 733 bp, Gossypium hirsutum
  Clone ID: GOSHI-09MAY01-C46623_1
gggaattgttaaatttgatctgcacacggaaccagaggcaggaaaagaaaagattgaagttgggggaaatgttgttggggtatttgacttgggtcctggtagattcggttcagaagctgtttttgtgcctcgtgagcctggtaccacttgtgaagaagacgatggctacttgatattctttgcacatgatgaaaatactggaaaatcagcagtgaatgtgattgatgcaaaaacgatgtcagcagatcctgttgcagttgttgaattaccctacagggttccttatggatttcatgctttctttgtgacagaggaacaacttaaagagcaagcatactagaaattgttggagacttctattttcagacaaattaagagacaagacgcattatatcaccagctgacagcagtgttgttgacaactgggctttttttaaactttttctgtgagaccaataatgcttctcctgtattatacacatttataactgtcttgggcgtgtaataaaaataccatactttttaaattttagccaatgggaaaggtcttcatttgtgtagtgtagggttttgatggatatgaaaaggattttttggggggaggggtttggggaataaatatttttgaaaaatggcaagtgggggagagaaaaacaatgatttttatgcagatttggggtggaataaagaatgttcttcaacagagcttatgactgctttttataaacttttt

SEQ ID NO: 208 - DNA, 182 bp, Gossypium hirsutum
  Clone ID: uC-gsronu33B098f05b1
gctgttttcttctattttcagacaaattaagagacaagggacattatataaccagctgtcaggtttgaaattgacaactattttttttttttctgtaagaccaataatgcttctcctgtattatacacatttataactgtcttgggcatgtaaaaaaataccatatattttaaattttagcc

SEQ ID NO: 209 - DNA, 590 bp, Gossypium hirsutum
  Clone ID: GOSHI-09MAY01-C46023_1
gtagatatgccaaagatagatcccaagggtgctagtagttccctaaggcccagccaattctcaagctctcctgctgcaaatgtgagtaccatcacttggccatttcgttcgccagtctcatcagggccttcgccaaatatgcctattgtgcctcctccaaagttgcccccaggttttgctgagcttaaaggatccgggactcaaaatggaagtaaagttcccaatccgagtggagattccaagtgataatttagacctggtcctggcttgaattgttgtcgcacctcataattgataccgacgcattgacgcctgttatacacccctgcttacactttcacgagttttgcaggattaaaaaaaacactcgtactccccccccgcgatagttatttcatggtttacatcgatattcagtgtggacagtggtagcatcatttgcgctttcggcgatgagcgccacgcttcgggggttgcaatttaaaatctccttggtggcaaagctaagaatttattcccaaaacccaaaaaaaaaaaaaaaaaaaaaaaaaaaaaaaaaaataaaaaaaaaaaaaaataaaaaaaaataa

SEQ ID NO: 210 - DNA, 638 bp, Gossypium hirsutum
  Clone ID: GOSHI-09MAY01-C46383_2
ctaagatatcgagccatcccccaaatctaatagtcagtttttacacgatggcggagttgttggacaaggcgaagaactttgtggccgataaggtggccaatatgaagaagcctgaggctagcatcacggatgttgatctgagccatgtaggccgtgacggcatccagtatgacgctaaagtctccgtcaccaacccctatagcgctcctatcccctcctgcgagatctcttacactctcaaaagtgctggcagggtgattgcatccgggaaagtaccagacccgggttcactgaaggcaagcgactcgacgatgttggacgttgcagtgaaggtaccgcatagcgtattggtaagcttgataaaggacatcggtgcagactgggatattgactatgaattggaagtgggactcaccgtggatcttcctatctttggagacctgaccatccctctctcataaaaaggagagatcaagctgcctactttcaaagacctcttcttttgacttatatgcatccctcatgtattctttcttttccgaaacttgaatagtatgttaaaaatacgatatgtgctgtaggttgaatagattgatttacccgatcgaggtaatattgcatctttttttttaataaag

SEQ ID NO: 211 - DNA, 420 bp, Gossypium hirsutum
  Clone ID: LIB3148-053-Q1-K1-C12
aaaatatttttatttatttttaatatttttattatgacattatcatgatgtaatttattccacgtgtcacgatcttattccgtcacttgtcctgaatttaacgccgttagtctcaagtaccagacccgggttcactgaaggcaagcgactcgacgatgttggacgttgcagtgaaggtaccgcatagcgtattggtaagcttgataaaggacatcggtgcagactgggatattgactatgaattggaagtgggactcaccgtggatcttcctctctttggagacctgaccatccctctctctcagaaaggagagatcaagctgcctactttcaaagacctcttcttttgacttctattcatccctcatgtattctttcttttctgaaacttgaattgtatgttaaaaatacgatatgtgc

SEQ ID NO: 212 - DNA, 588 bp, Gossypium hirsutum
  Clone ID: GOSHI-09MAY01-C46353_1
gcatctagttccagatgattatgcttgacaaaaagtgtgtgcttgatatttatctttcgaatattttgagttttttgcgtgtctttggcggtacataaattcgggagcgttctgggatggttgactcttagttgcagaacttgatgatctcgaacaaagtcacaatatcctcacaagttaatcatgattcgccgaccttgctatatatctttgggtcccttggtaggctgcaaaacaagcataggtgaagtgactggcctgttatctttggtgtgactggatgatatttaacctaccaaaataggttggtttcttgtctagctgtttaccatctttgaataggaagactaatcatcatttggcgtcatgaattttttttgctgtatacgagatgctaatgttgctcaaatgtcccaatcatgtttttggccctctggttaactctgaaacaagacttagggacaaagttttcatgtcagatatttaagagtgaggtcatgttagattgggtgttgttttgttttataaacagttggaatgataaaaagtccaacaaattcattgttcatgagtttaatttaatttctg

SEQ ID NO: 213 - DNA, 440 bp, Gossypium hirsutum
  Clone ID: LIB3825-032-Q6-N6-A7
aacattaaatttgttggacattttatcattccaactgtttataaaacaaaacaacacccaatctaacatgacctcactcttaaatatctgacatgaaaactttgtcccaagtctagtttcagagttaaccagagggccaaaaacatgattggaacatttgagcaacattagcatctcgaatacagcaaaaaaaaattcatgacgccaaatgatgattagtcttcctattcaaagacggtatacagctagactttggtaggttaaatatcatccagtcacaccaaagataacaggccagtcacttcacctatgcttgatttgcagcctaccaagggacccacagatatatagcaaggtcggcgaatcatgattaacttgtgaggatattgtgactttgtcagagatcatcaagttttttgtcaagcataatcatctggaac

SEQ ID NO: 214 - DNA, 628 bp, Gossypium hirsutum
  Clone ID: GOSHI-09MAY01-C46273_1
catctttctggtaacgaagagagtcagaagccatataaacacaagggaaaaaaaacttggagcttgacaatagaagtgttcaatatgatgaggaatatatcttgaattctcgaggtttaaagctatttacatgcaaatggattccagtgaatgaagaacccaaaggtttaatcttcatctgccatggttatgccctggagtgcagcatcaccatgagctctacagcaaatcggttggtgaaagcaggatttgcagtttatggaatagattatgaagggcatgggaagtcatctggtttgcaaggctatatctcaagttttaacaatgttgttgatgattgctccaattttttcactcaaatatgtgagaaaaaagagaacaaaaggaagatgagaattttgctaggggaatcactgggaggagcagtgttgttgctgatacataggaaaatgctagactattgggatggggcaatccttgctgcccccatgtgtaagattgcagatgaaatgaagccacatcctttagtgataaatgttttgaaaaagctttgcaattttattccaacttggagaataattccaagtccagatgtcattgatactggctgcaaattgcctcagataac

SEQ ID NO: 215 - DNA, 412 bp, Gossypium hirsutum
  Clone ID: LIB3148-051-Q1-K1-G10
aacgaagagagtcagaagccatataaacacaagggaaaaaaaacttggtttgttctgattatattttaagtttaaacatcagttttattgttaatattttctattatctaattaagtatttatgtttttaggagcttgacaatagaagtgttcaatatgatgaggaatatatcttgaattctcgaggtttaaagctatttacatgcaaatggattccagtgaatgaagaacccaaaggtttaatcttcatctgccatggttatgccctggagtgcagcatcaccatgagctctacagcaaatcggttggtgaaagcaggatttgcagtttatggaatagattatgaagggcatgggaagtcatctggtttgcaaggctatatctcaagttttaacaatgttgttgatgattg

SEQ ID NO: 216 - DNA, 980 bp, Gossypium hirsutum
  Clone ID: GOSHI-09MAY01-C47993_1
cgtgtctccaaatgggccactgaaggagattctggtagttcctccaccggcgaaaaatggctgaggcaaagaatttgggggtggttggcagtgggcaaatgggttcaggcattgctcagctgggtgccatgcatggtctccatgtttggctcctcgatacggaccctaccgcacttcgccccgccccccacgccatctcttcttcccttcaacggtttgtttccaaaggccaaatctcacaggctgcttgtactgaagctttgaagcgtctggaatatacttcaaatatagacgagctccgatctgcagatttcattgttgaagcaattgtagaatcagaagatgtgaagaaaaagttgttcatcgaactcgataagatcactaagagttcagccattttagcatctaatacaagttccatctccattactcgattagcatctgcaactagcagaccatgccaggtcattggaatgcatttcatgaatcctcctccaataatgaagttggttgagattgttcgaggtgcagacacatcggatgaaacatttcatgcgacaaaggcattggcggagaggtttcataagacgataatatgctcccaggactattcgggctttatcgtgaatcgaatccttatgccaatgttaaatgaagcattttccacactatatactggggtggccaccaaggaagatattgatacagcgatgaagttaggaacaaatcatccaatcggtcccttggagcttgctgatttcattggactcgatgtgtgtttatcgataatgaaagttctacatgctggtctaggagacagcaaatatgccccttgccctcttcttgtgcggtatgtcgatgcagtcgtgttggagataatgtggcgtcagtgtatatgactaccgtaaggggtcttgacctataaggcatcttcccgactctgaatatatcttggttcatggataatgataccaaaagca

SEQ ID NO: 217 - DNA, 804 bp, Gossypium hirsutum
  Clone ID: GOSHI-09MAY01-C47933_1
cccacgcgtccgattgcccgtagatacacagggctcgaccggggcatcagcttcctgcaccggatgggaataggattcatgatatcagtattagccactctggtagcaggcttcgcggaagtgaagcgtaaagaagcggctttagcacatgggcttcaagacaaggctcatgcaatcatccccatctcagtgttctggcttgtgcctcagtacagtcttcatggaatagcagaggcattcatgtcgattggacacttggaattcttttatgatcaggcacctgaaagcatgaggagcacagctaccgcactgttttggactgcaatctcagtcggaaattacatgagcacgctgctggtttctttagtacacaaattcagcgcaagagctgatggatcaaattggcttccagataacaacttgaacgagggcaaattggagtacttttactggttgatcactgccttgcaagtggttaatcttatttactacatctgttgtgctaagctgtatacgtataagccgattcaaatccatggcaaagacagtggatctgatggagatgcaggagtagagcttgctagcaaggcttagtttttgcatttgaggaaactagatggtgaattcttgttcctttttctaaaactgtctagccatacatcttgttgagagagtctaatacattacaatctgaatcgtaggataggcatgtaaagtcctaaataacattagaaagaaaaatccaccaccaagtattgtattttgtaatagatgaaaaataaaaattctgaagctggttctatt

SEQ ID NO: 218 - DNA, 525 bp, Gossypium hirsutum
  Clone ID: GOSHI-09MAY01-C47833_1
aggggttgctgcttccatggggtattctccttatcctatgtatgaggaccaaaggaccaggttcaagcaccagagccttatgcaagactttgaagacttgcacaaggaaacagaagccatgagaatgaaattgcagatgatgaaagagcaaaaattaacccttttggccgaagttcggtttttgaaacggaggcacaagttcttgatgcaaaaccgatcttccaacaccctagccggccgaaactttgtgcaaccacagagtacggtggttaaaagagccaattcaattgtgaaggaaaagaattcaactggaaaggaccacagtttgcgacatctagctattggggttcgatctgaaccaaaagggaaagccttatagtgaaaaggaaaccactttcgctcatccttctctgatatttgacttaaatcagaagcagcacaaaaatatcaatggcgaggaagttattctgcgaagttcttcaccaattcttgacttaaaccagagggaaaggctttacagtggaa

SEQ ID NO: 219 - DNA, 1017 bp, Gossypium hirsutum
  Clone ID: GOSHI-09MAY01-C47583_1
cgagaatcagattacggggttaattcccagatgctttgggtacttgaaatctcttgtttttcttgacctaagcagaaacaagtttagaggtccggttcctgaagggctccatcagttgaagtacctcaaacatctctccttggcaagcaacaacctgactggttctattccttctagctttgcacagcttcgttcccttggagtgttggacctttcatcaaattcgctatctggtgagattccacatggtcttcttgatctgagaaacctaacttctcttcagctcaataataataaattctcaggggaaattccttctggtttctcgaacttgaagtctctttctatgcttgaagtatcatccaacgacctgtctggatcattaccattgaatggtaatgcagtgaatcatacaggtgtccatgaaaagcctttacttcgttcacaccatttattctcgctgtctgtacggtctgctgaaacaaccttcactggaagttcacaaattggtgcagcttctccttccagtaataaaattgatgatcaaagtctagattccattgagatcgcatccatagcatctgcctcagccattgtttcagttcttctagttctagtcattctcttcttttacaccaggaaatgggttccaatgtccagggttcaggtttctgaaactagggaaattacagcttttgttgacattggggttccattgacgtatgaagcaattgtccaggcaacagggaacttcagtgctggaaaatgcattgggaatggaggttttggtgctacgtacaaggctgaaatactccgggaactctatggcagtgaagaggcttgctattggaaggttccaaggtgttcacagttccatgctgaggtgaagacccttgaaacaatgaggcaccctaatcttgtaaccttaataggttaccatgccagtgaaacggagatgtttctcatatataattatttgtcaggtggtaatttaaaaaattttatcaaggaaaggtc

SEQ ID NO: 220 - DNA, 366 bp, Gossypium hirsutum
  Clone ID: GOSHI-09MAY01-C47423_1
aaagaaatgaaatgaaagcagaacaccctctgctagggtttcatcattcgccctaaatcgccgcttgcctaccgttcaaaggcgcttcgcgtctcagcccttcgccaggctcccgatttgagcgaagcgagtgtgggtcttcaacggcgaagcttcacaggtaaagcccctccctcctttgctgatcttatttgtaaaacacaatcattatacatcaaaacaaggacgcgattcaccttccagttcctctgtaccttcaggattgctttcctcttttcttcgtcttttctctacagattaaaaatcggccatttatagccaagaagcacaaaaataaaataaaatcaaattataaaaactatttat

SEQ ID NO: 221 - DNA, 432 bp, Gossypium hirsutum
  Clone ID: GOSHI-09MAY01-C47753_1
accaaagggtcaaaacaaatgggatatggctgcatatagcagagcaagggacaggaccacttgttctattgcttcatggcttccctgaaatatggtattcatggcgccaccagatcactttcttggctaaccatggctatcatgtagttgctcctgatttgagaggctatggagactctgactccccacttagcccaacctcctacactgttatgcaccttgttggggacatcattggcctgcttgaccattttggggaacagcacgcttttatagtgggacatgattggggagctggtattggctggcatctagcactgtctacacctgagagagtcaaaggattgatcaacttatctgttccatactttagtagaaacccgaatgccaaatttgctgaattcttaatcaaaacatattgggatggaattt

SEQ ID NO: 222 - DNA, 431 bp, Gossypium hirsutum
  Clone ID: GOSHI-09MAY01-C47773_1
catgtcacctctagcgatggaaggactgtgaccagcttcaacgtggcaccgggaaattggcgggttggacttacatttgagggcgatcagttctagagtttcaggacagttaagggtctttaaatggaagcttgtatatgtaatagccattgtttgagagaggggaaggtttttgttggtgagttagggtaaaggagaggctcagccggccccatatggctgtcaattgctgacgtgatttattggcacccgctaggcctatacatatatctttacttgattgatgatgatcaaggatattttcatctgtttggcttttgtctaattcatcacagccatgccatggaacgaatcataacatttatttaaaagatgtcttttcttaaaaggcgacatcaattgtcctttttaaaatatgtttaactttatgg

SEQ ID NO: 223 - DNA, 759 bp, Gossypium hirsutum
  Clone ID: GOSHI-09MAY01-C47653_1
ccttcttcgtccgggcaacgcctccaccatatcttccgtcaaaaatcgacatctggaccatcctatccgaatccaggcgcatactcaaagcccacagtggccacttccaagctctctcactcctctttctcctcccttcctcttgttttttatccatttatcccttcatctatcaacacttctctcccaccattgaatcccacctcagcttccttgagcaaaatccccgcatcttccccattaaactccccatcttcaatctcctttacaccctcatcctctccatcttctctttcttcgctatcggtaccatcacttacagcgttttccacggcttttacggtcgacccctcaaccttttatcctcttttaaggcagcatccacttccttcttccctctcctctcgacttcccttgtaacccagtttatcgtttatggaatcagcttagttcttggtttggtcttttttgcattaatcaaagcaacccaattttactcttcacctactttcatcgtacttatcctcgtctatgtgatcattttcacgtctactataacttatctccaactgaactggatatttgctcatgctgtcgtagtagttgaatcaagctggggacttgaaccattaaagcgaagtcgaaatctagctaaaggaatggaagggcgtgcctttaaagatgatgctgtttttcggcttcttctttgcgtgtaatatctggctctcaattcaaagactggaggatccagctggtgat

SEQ ID NO: 224 - DNA, 958 bp, Gossypium hirsutum
  Clone ID: GOSHI-09MAY01-C47143_1
gcgttcgccccgcgtccggaaggtcacgccaggtctaaaggcgttaaaaaagagagtgatgtgagagcagcaaccgttatatacaagtcaaagatttgggggaccaaagaaaagccagctgcagttgtgtataaaaataatcaggatcctttgaattcaaagcatacaatagaaggtaaaagaaatgaacaacaaagcattgcccctgaaactcatgacgctgaagatggactatctaccaagcccaagaaaactgatttcaagagcaataatagaaagagacaaaggaacagtatgcacagtaagaggtcatcaaacaaaccagaaggttctgtattaaagagagaaaggaaccatatgcacagtaagaggtcatcaaacaaaccagaaggttctgtattaaagagagaaaggaaccatctgcacagtaagagttcatcaaataaacgagaaggtacctcacaaggtcgacatattcgttcttctcgaagttcaaagaccacaccttctgtcccgcgggcgcatggcaggggtgcagattctattgcatatagaataccagttaaagaggcatatgccccatccactagtgggtatccaggatcagctcatggtgctttttctggatccaaaaggccttcttcttatatggaatctcatgccggattcgcacaacctgtgaagcacaatgaccaatatctcacagaatgtatcgcacctgcttttcatcatcaaaggcaagcttatgcagggtatcttaagctagatcactatgaaagacaacctcctgctaagtacttcaaacctgctattgggaatgatgccctacctcatgcaggatttcttgagtcttctttcagaaagcaaagttttgatggagccagaaggattgccgagtatagtggcccggacaatcaaaggcctgttcatggatcaggtagtatcaccaatctagata

SEQ ID NO: 225 - DNA, 999 bp, Gossypium hirsutum
  Clone ID: GOSHI-09MAY01-C47233_1
cccacgtttccttccacgcgtccgcccacgcgtccggttttggttctttcatacaagtttcaagcaagtcctacagtgaagctaagagaagagaaattgaaatccttgaggcggcggtccaatggcggagaaacctcaaccggtcgtcgttcaatactgtcaagtctgcggtttgcccgccgaatactgcgagttcggatccgaattcgataaatgcaagccctggttgatccaaaacgcgcccgacctgtacccggatctcctcaaagaagcgaatgctaaagaagctgataaagttgctgatcaattacaatccactggcatctcttctgctgattcaggtagtagttcagaagctaagcaagaggaagttaaacgtcttcctggtgggaaaattaaaaagaaagagaagaaagaagttgtaattgaaaaggttgtgcggaacaaacgcaaatgtataactactgtaaaaggcctggaactttttggtgtaaaattaagcgatgcttcaaagaaacttggaaagaagtttgccacaggagcctctgttgtaaaggggccaactgacaaggaacagattgatgttcaaggagacatatcttacgacattgtggaattcatcaccgaaacctgggctgatgtcccggaaactgcaattttctctatcgtggatggaaaaaaggttccagctgcttgattttaaaaggaaggctgatacatgatagggatcgcagtatgtcttcctttttgaataggactctgtaagatgtattatcccatcaaattgagaagtttgctgcttttcaaaattcagaaggcagtatgacatttttcttctttaagagtcactttctacacttttgctgaaatagtataatttttgctgttgaaatgaacatatatgtgcatttaagtaacagatgtggtctttgtatagtggcaactatcaatggtgtacactattttcatttaatgtagaatttccttaacaaaaatcgc

SEQ ID NO: 226 - DNA, 1976 bp, Gossypium hirsutum
  Clone ID: GOSHI-09MAY01-C40963_1
cttgcttcaggaatgcagtgtaagacgttccatggatttcagctttcatctgctgggattattcgattaccaaagtttgagatggtaatggctaaacctgaagctaacagtaagcctgtccttgcttctgaagatgtctatattgtcactgtttatgggagaatttactgcttgcaagttgatagagttgcaatggtactgcattcatatcggttttaccgtgatgctattatccaacagggttcattaccaatttactcgagcaaggttgctgtgagtgtggttgataatgtactacttgtgcaccaggtagatgcaaaagttgttatactctatgacatatttgcagattctcgagctcccatatctgccccacttcctgtactattgaggggttttcaaaggtccgatatttctaattctcgacctagcaccaaggaaagtgaaagttcagaggcctctgattcaaatgataatgaagcaattatttatggagctgactggaccccctcgcgtccggaccttatatgtgatatagctaataagcttttatggaagaaccacttagactgggaggcaatttctgttagttcctctgaagttccattggtattggaattcttgcaaagacgaaagttggaagccaacaaggcgaaacaactatgtttggcaattacgcaaacaatgattctagaacgcagacctatcaccgtggttgccaaggcaatggatgtattagtcacctcgtattcgctctctcttaaaactggcagttatttcaagggaataaagactgagaggaccccctcgagtgtgccaaatgtgagtggcccagggcaagccacagatgtattcaccagcagaaccgatggaaaatctgtccaacatgaacctgctaccggagtcaacagtgtatcttttagtagaccttcaacttattcgtcttcagagacggaggataattgtatctttgaaccatcgaaaatcagctcaaatgatactcaggttgttggtggcaaagtggatgcaagtgctgaaagttctaccaactgattatccattaaatgctagcgtttctgagcagcaggagtctcagctcacttcacctgcaatttcacccgatgagatgtacagattctgtctttgctcctattgaggaagagatgactgtggagccttcttatctggttgccatcattcttgagtgttttcgatgtgcccacttagatagggtcaaagtgcatccaagcctatatgtgttaactattcaattattggcccgtagtgagcaatatgcagaacttagtttgttcatcataaacaaggttattgagccctcaaaagaagttgctctacagctgctagaatcaggtcgtcaaagtttgcaaattaggaagctgggttcggatatgctaagacagctttctttgaatcatgattatgtgttgttattagtgcaagatggatattatcttgaagctttacgttatgcacggaagcataaggtcactactatccggccgtcattatttcttgaagcagcatttacctccaatgactcgcaacatctggccgcggttttgagattcttttcagatttcattcctggcttccgaagcacctcggatttctttacgtactacaacgttctcaatgagatgagctcttcagtaactgcttaagaggtaataaggaggacgaaaactgtgtaattgccagtcattattataggtatatgtgatttgctgttgaagttttgatcactttctaaataatacaatgccaactatcccaatcatatgaaatgtagaacataaaaaactgaacagttgggattagattcctagcgagggcagaagaaatatcatacttttcttcatttacacttgtgaagaactgatcattatgtcttaatattcgaacaaatagttcactttgtaattttcttacgttattagcatttcgtttcttttttt

SEQ ID NO: 227 - DNA, 364 bp, Gossypium hirsutum
  Clone ID: LIB3147-036-Q1-K1-F7
gcggaatgggtcaaagtgcatgccatctgctatgtgttaactatgaggctacaggcccgcatggagcaatatgcagaacttagttagctcatcataaacaagggtattgagccctaaaaagaagttgctctacagatgctagaatcacgtcagtcaaagtttgcaaattaggaagctgggtttggatatgctaagacagctttctttgaatcatgatgatgtgtcgttattagagcaagacggatattatgttgaagctttacgttatgcacggaagcataatgtcactactatccggccatcattatttattgaagcagcatttacctccaatgacttacaacatctagcatcggttttgaga

SEQ ID NO: 228 - DNA, 715 bp, Gossypium hirsutum
  Clone ID: GOSHI-09MAY01-C40563_2
atttggaactttcttggtcgtgttggtgggggttacttctcagagattatagtgagggatgatgcttatccaaggccagtatctatggctgttgctcagcttgttatggctgttggccatgttttctttgctatgggatggcctggggccatgtacattggtactttctgccgtccgcttgcctacgcggctcattgggcaattgtcccagctgctgcctctgagttgtttggcttgaaaaagtttggggctctgtacaatttcctcacgctggcaaatcctgcaggttcacttgtcttctcaggtgtaattgctagcagtatttacgaccatgaagcagagaagcaagctcatcaacatcatatccagctgcagatgtcaggcttacttttctcagggttgtatggtcaggatgaagtgctcaagtgtgaaggttctgtatgcttctttctgacttccatgatcatgtctggattttgtgtcattgcagctgttttaagcatgatacttgtgtaccgtactaagactgtttatgccaacctttatggaaagtctcgcacttgatttcaagaatgcaatctaggaaggtctctcatggatgttttgtcccttttaagtggcattttttcgtgaaaactgagattggattagttttcactaagtttgtgataacagtgttgtaaagatggtactgcagaaatctggtcagtgattc

SEQ ID NO: 229 - DNA, 866 bp, Gossypium hirsutum
  Clone ID: GOSHI-09MAY01-C40563_1
aatcttcttagtgtgagccacactttagtcacaatttttactgtgattttgttctttcttcttgtcactcccataattgttcctattgcattgagttgctccgaagagcctagagatccggcagaagaagttcttctaccaaagtcggagcaacaagaagctggaaaacctgagcagagtgatcaggaacatgaagtgatattcagtgaggttgaagacgagaaacctgtggaagtagacttgcttccagcatcagaacggcaaaaaagaattgctcagttgcaagcagaacttttccaggccgctgctaaaggagcagtaagggtgaagagaaagagaggccctcatagaggagaagactttaccttgatgcaggctttgatcaaagcagacttttggctcatctttttctctcttctattaggttcaggatcaggtttgactgtgatagataatcttggtcagatgagccagtctctggggtatgattatactcacatatttgtatctatgattagcatttggaactttcttggtcgtgttggtgggggttacttctcagagattatcgtgagggactcacgcttatccatggccagtatctatggctgtggctcagcttgctatggctgctggtcatgttttctttgctatgggatggcctggcgcaatgtacgtccgtactttattaataagggcttggctatggtgctcattgggcaattgtccccgctgctgcctctgagttgttcgggctggaaaaagttgggggctctgctcaatttcctcacgccggcgaatcctggcggtcccttggtctctcaggtttatggcaaccttatttccaccctgagcccaataaccat

SEQ ID NO: 230 - DNA, 639 bp, Gossypium hirsutum
  Clone ID: GOSHI-09MAY01-C40533_1
gagaagtcgaaacatcatattgcactacattcagcaagcaagaagcagcaaagggtagttagggaattaaatttgagggaggaggatgagatggataatttggaaaaagtgttggggaaggaggaggtgaaggaaagaacagaagaacataaaggaagagcaggaaaggagagaagcggtgtaagttcactttctagtctcttcaggtgacacattctcttttccaacagcacaagtcgtgtaccaaagttgtgataaaagtgatagatagaggagaggttggtaattggatatggtgggattacaaatttcttaacaaaaatttgacagtttagtggttaatgtgctttatatcaattaaacattagcgtgttttgtattggtaacgttctttctattctgatgatgaatattactcgacccaattccaaacaaaaaaaaaaaaaaaaaaaaaaaaaaaaaaaaaaaaaaaaaaaaaaaaaaaaaaaaaaaaaaaaaaaaaaaaaaaaaaaaaaaaaaaaaaaaaaaaaaaaaaaaaaaaaaaaaaaaaaaaaaaaaaagagacacaaaaaaggaaaaaaaataaagcgagggaaaacaacgtaaaatatgggaaaacctgcttttctacccgcttcg

SEQ ID NO: 231 - DNA, 611 bp, Gossypium hirsutum
  Clone ID: GOSHI-09MAY01-C40453_1
cagcatactggaagtcatgatgctggaggtgaagatataaacctgaaagaagaatctcaatttgaggatcaagaagaagatggtggtgattgacaacaggagctttatatattttgttcaagttccaaaaatgcagcaccggcattgcagtgtcagtgtacatattttagagtgagcaagagtgtcttgaattccaattcaagatgaagaagcaaggtgccttacaccagttctcaaactccagtgagtcgggcctctaatcgaatccatcagaagcgatattaagttcttttacacggtgatgtatcgtataattgaagcttcgtcgggaaaggcaatcgtgtcttctgcgagttagcctgcaatcaattttgactagtcttaccttgttcttgatgtacaaacgtaagtttttgtggatctattttgggacattcccaaatgattatgggcatttttcatgcatgacataacatgattaaggacagaatgagataggtgttttcctttaatccattactaaatatctatctatcttatttatgccataaattaaaacgagactgctataaatcaatagcattgctaaaaaaaaataaaagctctcatac

SEQ ID NO: 232 - DNA, 555 bp, Gossypium hirsutum
  Clone ID: GOSHI-09MAY01-C40423_1
tgataattaacgacgtgatgcatttgagatgagaaggatgtgttttctttcttgtacctacctgtgcttttcagaatctttgtggtcctggtaaaatggatggccatggagaaactccacgctgagttagttgaacagtttagtagcgtctggcatcacagcagagttagaagataccttacatccgaggactggcccggtcctgaatccaaggggaaaccatggtacggtctgcttatgttgttgagaaaatatcctgaacactttgtcattaacacaagatccaagggtcggataacattggagttcgtctctcttgtatctttgctttcgtagaagaatgctaatgaagcaccaaatgacacttccccttgcatggtcatcttacatatgccatgtttgggaagacaaagaagttgcaaagtgtagaatatcatgatactaatgttgttcttatcttttagatccacccactttgagctctgaactggctttgctggctaaatgcacctggattttatggattttaagatatattgacatcaattttcattt

SEQ ID NO: 233 - DNA, 1512 bp, Gossypium hirsutum
  Clone ID: GOSHI-09MAY01-C40783_1
aaaaaagtcaagggggaatcaactgaaattctaaaacgcgataatcggttgttggttccaccttgctaccaatcaacgccagcgcaggcccaacgctaattccacctccttattttcttcttcttcatcattagaaattcccttttttccccaaataattttttttagccctcgcccccggagattttgaataatgtatccgccgccagggccaggaggcatgtactacaattacccgccgcctatgctggtcaactgctccggctgccacacccctttgcagcttccgcaaggtgcccgatccatccgttgtgccatctgtaaagccgttaccaacatcgctgaccctcgatccctccctcccgcgtcccaatcacctgctccttccacccacgcgcttccttctccctccccttacaatcatgctcctcccggggcacctccccacgcccacggtcgaaaaagggcggtggtctgtgggatttcgtatagatactcgaggcatgagctcaaaggttgcatcaatgacgccaagtgcatgcgttaccttctcgtcaacaagtttaagtttcccgaggattccattcttatgctcacagaagaagaaactgatccctacaggcttccaacgaagcataatataaggatggcattattttggttagtacaaggttgtcaacctggtgattctctgttatttcactattccggtcatggttcacggcaacgaaattacactggtgatgaagttgacggctacgatgagactctttgccctttggattttgaaactcaagggatgattgttgatgacgagatcaatgcaactattgttcgacctctacctcatggtgttaggcttcatgcgattattgatgcttgccatagtggaactgtattggatttaccattcctttgtagaatgaatagggctggacagtatgtatgggaggaccatcgtcctgcatcaggtttgtggaagggaacaagtggtggagaagtgatctcctttagtggttgtgatgatgatcaaacctctgctgatacatctgccctatcaaggattacatctaccggtgccatgacattctgcttaatccaagccatcgaaagggggcatgcagctacatatgggagcattctcactgcaatgcgcaatgcgattcgaagtgtggggagtggtggaggtggcggtgactttggtggtggtgctgttacatccctcatcagcatgcttttgacaggtggtaccactgttggacttggtgggttgaggcaggagccgcggttgacagcatgctaaccgggcgatgttgatatgaaacctttctccctttgataaatttttaaaatacgaatttgttatatgctatttgtaaattgaatttatttatatttctggataaggggttgaatttcttttgtgttcccaaagtacattggttgaacaagaattttctgggttcctctcattatatttaacaaatctggattacatcacctgcgattaat

SEQ ID NO: 234 - DNA, 897 bp, Gossypium hirsutum
  Clone ID: GOSHI-09MAY01-C40713_1
cgctgcgagaacgaggatggaaatacaaaatgcaggcttcaatgttggaaatatacaatgaaaccatccgcgatctgttatcaaataatcgatcatcaggctcagatccaacacgtcctgaaaattcagtttccggaaagcaatacacaattaaacatgatgcaaacggtaatacatatgtcagtgacttgaccatcgttgatgttagcagcatatcagagatttcctcacttttacggcaggctgctcaaagcaggtctgtgggaaggacgcaaatgaatgagcaatcatcaagaagtcacatggtcttcacattaaggatatcgggaaataaatgagagcactgagcaacaagtacagggagtattgaaccttattgatcttgctggaagtgagcgactgtcaagaagtggtgctactggagataggttgaaggagactcaggcaattaacaaaagcttgtcgtgtttgagtgatgtcattttcgccttggcgaagaaggaggatcatgtgccgtttaggaattccaagctgacatatcttctccagccttgtcttggtggagactcgaaaactcttatgtttgtaaacgtgtcacctgatccttcatccgtgggagaatcactttgctccctccgctttgctgccagagtgaatgcctgtgaaattggagttccccgtcgtcaaatgaccttgcggcccactgattctcgattgagctgtggaggaagttaatgatttatcacattctttaataacattaagtaactatcatgatttgtaatgatatgcctttggtttgtaccatcatttgtagaggttctgctttaacctccttactgctaatctgtattcctagatttcaaatgtgtttctgattggtcgatttcgtggacc

SEQ ID NO: 235 - DNA, 501 bp, Gossypium hirsutum
  Clone ID: GOSHI-09MAY01-C40613_1
tgccaacaaacgcaaatttttcgtgtcctagataatcgccttgaagggcagtatccaatcgaaggagcctttaaggctgttacccttgctttgcgatgcctgtcgatcgatgcaaagttcagaccaagcatgaatgaggttgtaactgcattggagcacctccaggattctaacgactccagaattaatcacaacaatactaacagcgtacctcggagacgtaggcaaagtgcagatgatgctaccggtggaaggagtacgactgcgtaccctcagccatctgcttcgcctctttatgcctgataacagaatcaaggtcctgaaccaaagttgcttacctaccaagtatagtgggtgaatcgtctccagaacttgggcattcagtttttccagtatatgccttttggctgtacagttattatatgaagctaatgtactcaaaagttggaatgaatgtgcaatgccgtattttgattttgagattacaaagcgtttgtttca

SEQ ID NO: 236 - DNA, 737 bp, Gossypium hirsutum
  Clone ID: GOSHI-09MAY01-C40063_1
gcgtccggaggaaataaagtatcggggcaaatgtcaatgtaaatatcggtaatcttctaccactttcggcttcacgacatccaatctactctcgcttttagatcaacattgaagcatttcgaaaattttaaatattctttcccatccaaaatccttcttcaagtttaacctcaaattaatcaaaatctggtttctttattttacttgtactaaatttgtatttgtttttaaaaaattgactatgaaagaatcgaaatcagttaaattgaattcacagcaacatcaacagcacgaaaacggtcacttctctccgttcaaattcgctaagttattagatccagaagcttcttgggacaaggatcaattaggagatgtattgcattggattcgacaagttgtagctcttttctgtggcttgttatggggagcaatcccagtggttggaggcatttggatcttcatttttctggccatatccactggtattatatatggctattatgcaatgatactgaagatcgatgaagaagaattcggtggtcatgcagcccttctccaagaagggctttttgcttcaatgactctctttctgttggcgtggattctcgtatacagcttggcccacttttgatacgtattttagcatcaactccgctgccctctgtttctaaattcacatttcaaggatctctttagatgaggaacaattcattatctctgaaaacagtgcgaaactt

SEQ ID NO: 237 - DNA, 744 bp, Gossypium hirsutum
  Clone ID: GOSHI-09MAY01-C40353_1
gggggcaattttgagtcatttgtgggagtctaattttactcctcagaagattataagaggcttaggtccttggggtccagatcttgtacggaagtatacagctgctaggtttactaacagatattcacctgagggtgtatttacagaggaggagtctagacttctatctgattatgtgtaccatacctcagctgccaaagcaagtggagagctctgcttaaaatatatatttgcatttggagcatttaatcgggcacttttaaacagtgcatctgagtggaaagtgccaaccacttttatatatggggctgaagattggatgaactaccaaggagcccaagaagctcgcgagcaaatgaaggtcccatgtgaaattatcagggttcctcagggtggacattttgtgttccttgaaaatagagatggattccattcagctgtgttgtatgcctgtaggagatttctttcacctaaccctgataaagaaccctttcctgaaggtttggtatcagcatagaagaagcatagtatttttttaatttctctccacatgttgtatggcgcattacaccgagtttcattggccagaagattatttgggtaaagaaaaaaacattatttgcctgtagcttgtatcataatatttttatatacgtattatgtgttttgtagtaccttgaatctggttactggtttaagggaatggatattgaagaattgattttaacaaaaaaaaaaaaaaaa

SEQ ID NO: 238 - DNA, 770 bp, Gossypium hirsutum
  Clone ID: GOSHI-09MAY01-C40283_1
gttcacttctaccaattgttggaggagttgttcttgcatctgttactgaggcatcttgcggttggcctggattttggagtgcaatggcttccaatttggcaaaccagtcccgtaatgttcttagcaaaaaactcatggttaagaaagaggaatcgctggacaacattaccctcttctcaataataacaattatgtcctttatcttgctagctcctgtggctatctttgtggaaggcataaagtttacccctgcctacatgcaatcagctggtttgaatgttaaagaagttgttgtaagatctctgcttgctgctctatccttccatgcctatcagcagggtgcatatatgatactgcaaagggtgtcccctgttactcattcagtgggcaactgagtaaagcgggtggttgttattgtcagctctgttattttcttcaagacacctgtctcactgatcaattctcttggcactggaattgctctcgctggagttttcctgtattctagggtgaagcgatttaagccgaatgcaaaggcagcctaatttgtttgctttgctgataaattccagttattacatatgttttacgccactgattttaagcagagaacttaattttgggtattatttctccattctattccattttcatctttggataattttatatcttctctttaaaaaaaaaataaaattcaaatcgtcaattgattttgaaaaaaacaatttttagattaacctttataacttttgcccccatttaaaaac

SEQ ID NO: 239 - DNA, 796 bp, Gossypium hirsutum
  Clone ID: GOSHI-09MAY01-C40253_1
agagcatggactttacaagatgttcaagtgtattttcaatcagtaattgcaaccaaagattgtatctactttatctactgccttacatttgtcacttcacatctttgccttaaatttgctttgattcccattttatgccgatcagtcgaacgcattgcaaagttcttaaggcataattttagttcttctaccttgtacaggaagtatttggaagatccttgtgtgtgggtagaatcaaacaccaccaccctgagcattctatcatcacatgctgagattggacttggctggcttctacttgtttccttgttctcgtggcaacgcaacattgtacaaactttcatgtactggcagctgttgaagcttatgtaccattctcctgttagcgctggttaccaccagagtgtgtgggcgaagatcgggaggactattaatccacttatcctgcgttatgtaccatttttgaacactccggtttctgcaattcagaaatggtggtccagatagaagtaatatacaaaggattctttcttcgttttctagctttttttttttttttgttgggtggaggggggataaaatgaagttctattccaacatccaaaatgcaagataaacttgctacgtgagaactatgggtactgccttacaagttacagtttactacataattgaacattgacagcagtgtatgtgataattcctacaacccttgaattgagtctctgaattgagtctcacaatattagcaataataataataatctgatatgttttggcattgcattgaaaaaaa

SEQ ID NO: 240 - DNA, 606 bp, Gossypium hirsutum
  Clone ID: AW187289.1
gaggaccggccgggggagcgacgggggcccccgacaaaagcaaggcgggtgagaaggaacgagcgcgaggaacaaggcgcacaccgggcgaccggccatcgagcggactccgcgacgcgagccgacggaaggggcacatggaaacccggcgaccagggcgggaagccccggaccgtcgacgagcgactgggggcgggcacgcggagttgcgccggccaaacggctttagtctaaccggcaacggccgtcctccgggcaatcagcgagagggggcggattccaacaacaccaccgggaccattgagtgatcaccggccgggagaggaccgggcggcttaaaatattgtcctggttgtggggacaacgcaacgacgaacaaactttcaagtaccgacagatgtagaagcccatgtaccatgctcgtgttaccgctggttaccaccaaagtgtgtgggcgaagatcgggaggactattaatccacttctcgtgggttatgcaccatttttgaacactccggtttctgcaattcagaaatggtggtccagatagaagtaatatacaaagaattctttgttcgttttgtaggtggaccaccatttctgaat

SEQ ID NO: 241 - DNA, 589 bp, Gossypium hirsutum
  Clone ID: GOSHI-09MAY01-C40243_1
cccacgcgtccgcccacgcgtccgcggacgcgtgggatttgggcctcaaactgtctcacctgttcctaaatctcttcctattcagtggattgatggtgtcctttctaaaggagataaagtggagttcttttatgatgagtaccgttgtccagtatatgtcaaggatgtcgtggctatcatacggactttgattgacaaatggctatcagagggtaagaaaatgcagttgctactgaatgtgggtggaccagacagggtttcccgtgttcaaatggctgaagctgtggcacaaattagaggatatgactcctcattaattaaaccagtgtctgcatcatctgttgaccgtggtgttaagtccccagctgatatatctatggatatcaccaagctggttcagaagctaaatatttgtcctactccatttaaagatggtgttaaactgacacttgcagctgaagcaagtttgtgagtttagtaagatcgatagttgccccttttcttgaactactcggcatctaaaagtagtataaaaatgtgtcatgctggtatttgttggtgataattaaaggaacaccagtatagctgt

SEQ ID NO: 242 - DNA, 472 bp, Gossypium hirsutum
  Clone ID: GOSHI-09MAY01-C41993_1
gcacatcaaccgcttcacttttccttcttttcatcttctcaatcacaccaccgtcctttgggttcgagggggccaacgctacaaattatcctgtgctcgacatcgatggtgactggctccgcacaggcgttgaatatctacgttgtgtcagcgtatttttggtgctggcggtggggggcttgccctaggcaggtctaccaaacaaccatgcccggaaatcgtcgttcaaagacgatccgatttcgacaaaggtacaccggtgatattttctaatgcagacaccaacgatactgtagtccgcctatccaccgatgtaaacatagagttcactcccatcaggaccaaactctgccgaacaacaacggtgtggaagattgacaattatgatgattcagccgggaaatggtgggtgacaaccgatggggttagagggaaccctggtcccaacactttgaccagttgggtaaaatag

SEQ ID NO: 243 - DNA, 517 bp, Gossypium hirsutum
  Clone ID: GOSHI-09MAY01-C41953_1
tcgattggttcgactagtgcagcgagctaacatgagcaagagaacaatagggacggaccaaggcgcatctccacgaaccaacaacactgatgaacaacatgactacatgtcttaaattgctgtactgtagtagccttgcattttgaatgtaatcatgttgaatgtttttatttgattgcaagattactatataaattccaccccagctgtagctccagtttcaagctagccctgcattttgtattatgctgcaatacagtacttaccaggggcagttaagtgcccggcccgattttaaaaaattccaggcctgagactcagcccggccaggtctgctcaaaaagcacatattattgtttgaaaataataaaataacacatttttttataaaaaataaaatatttattatattttataatatttaataattattaaaaaattttaaataatattttaattttaattaaattatttttaattttttatattattttttttttttttttatattttattt

SEQ ID NO: 244 - DNA, 439 bp, Gossypium hirsutum
  Clone ID: GOSHI-09MAY01-C41943_1
cccacgcgtccgcccacgcgtccgaaaacagtgatgtcgcatttctaaaagagaagcgactgaggtttgccaaagaactcctctgatttttcctccaactataactgtttctgttgtgagtctttctgccatgtggtccgaaatgccactgcaatgacgctgattacttccttttcattcttaaagcatgataatgccccaacttattcctttactagtgtgaccattaaagccaaatatttagattctgtattattagttgcatttcctttctccttgtgaggaaattataataattttctggtttcttttgttgatgggacatgagttcttgggtgtgtgtctaggttagtttaagccaaaaggctttaatagttgcgaacatatgaatctgcattgatttggatgaaatggatccatggctatggccattgtttat

SEQ ID NO: 245 - DNA, 523 bp, Gossypium hirsutum
  Clone ID: GOSHI-09MAY01-C41973_1
taccaactgaattcggaggaaaggctgtattggagtacaaccatgaagaattctcggagcggatgagccaggatgatatcaagtctgccaatttgtggggatttgatgataaactccaatgtatcggcttcaggcactctggatccgacgttgtctccagagccagtcttgccttgcaccatctgccagttgatctacctgccttatgcctgttatgttggaatataattcatattatacatttgtatattgtctatgcgactgtatagtgtgcagcaggtagtgaagcagcgaattgtcctttttgtctaacaggggctacccctgcaagtgatgcatggggattattttctgtcattcccccgatgatgtacggtacctgccaccgcctttaccctcctatatctagtaaagagaagcatgcatgtgagatgcctacaaggaagttgccaaatctaaacctaacacgtaaaacatagtaagattttgtgaatttgattctgtccaaaaagaagcatgaaat

SEQ ID NO: 246 - DNA, 495 bp, Gossypium hirsutum
  Clone ID: GOSHI-09MAY01-C41923_1
ttaggacttgtcagttattccgggaatggatgagaatgctacatttcttgattcttccaatttactaaaatgtaaggtagatgaggtgatgagcattgaagagctaaatgaatgcattgcaattgaaacaaggaaggaatttcgcaaaaggctgcgtggaaaggatgccttagttagaagtagtaagagagcaaagcagatgatgacgaagacgaagaaacagcagaagattattatccaggatttacgttccaggatgataagtagaaagttttgcaacttcatcacttgtagtgtatagccattcaaggataataacttaatttttttggccaagagaaagcatttttattaagcttgaaaaactcaataccaagaacatttgaaaactgaatacccccattcggagaaaattttggggaagttaaaggttcttatggagattagaagaaagaatcagatttaaacttaataattcaaagtaatattcccctc

SEQ ID NO: 247 - DNA, 579 bp, Gossypium hirsutum
  Clone ID: GOSHI-09MAY01-C41803_1
ccaccactcccttcttttcccccttttacctctaaaatccacctcttccatttctcttcctctccctctccctctcactcgctcttcccgcttccgctctactcacgcgccgtctcctaggcccatcgccgcttccttctccgccgttgaatctaccacctccaccgacggtcttggcaactccaagacgcctcttctcgaagtcagaggtttaactgccgtgattgctgaaaccaagcaggaaatcctcaaaggcgtcaacctcgtcgttcaccatggagagattcatgctataatgggaaagaatggctctgggaagagtacgttttctaaggttcttgtcggtcatccagattatgaggtgactggaggagatgttgttttcaagggagagaatttgcttgacatggaaccggaggaaagatctcttgccggactttttatgagtttccagtccccggttgagatcccgggtgtgaacaatatcgactttttgcacatggcatacaatgctcgaaggaaaaaacttggtgagcctgagcttggtccacttgagttctatgcttacatatatcctaa

SEQ ID NO: 248 - DNA, 542 bp, Gossypium hirsutum
  Clone ID: GOSHI-09MAY01-C41833_1
tttctttcgtccgaaaaggggaaaagttgcagagcaaaagaaaagaactccaatggtgtgcgagaagtgtcaaaagaagctgtcgaaggtgatcgtgccggataagtggaaggaaggtgccagcaacacaaacgaaagcggtggccggaaaattaacgagaataaactcctctctaaaaagcgaaggtggactccttatggaaatactaagtgcatcatttgcaagcagcaagtgcaccaagacggcaagtactgtcacacttgtgcttattccaaaggtgtatgtgcaatgtgtggcaagcaagtgctcgacaccaagctttacaagcagagcaatgtataataaggaaggggcattagctgttcttcaagtagataccttagttcctctttgttattgacaacgcatgaatatgatcgcgaaggctgtataagattgtcaatgttaatgtttatcttgcatacccaccggtcttctttctggtcatttgtatttcatttccttccatggtttttactagcaaatggaacccttttaattt

SEQ ID NO: 249 - DNA, 645 bp, Gossypium hirsutum
  Clone ID: GOSHI-09MAY01-C41593_2
cggacgcgtgggcggacgcgtgggcggactcgtcggcccacccacaccaaactccacccttcttcgtttccgtttccctactgctacttctattttctaaatcccaaaatgggaaggtctccttgctgtgagaaagctcatacaaacaaaggtgcatggaccaaagaagaagatgatcgcctcatcgcttacatccgagcccacggtgaaggttgctggcgttctctccctaaggctgctggccttctccgttgtggcaaaagttgcaggcttcgttggatcaactacttaagacctgacctcaaacgtggcaacttcactgaggaagaagatgaactcattatcaagctccatagccttctcggcaacaagtggtctcttatagccgggagattaccaggaagaacggataatgagataaagaattactggaacacacacataaggaggaagctattgaacagaggaatcgatccagcgactcacaggccactgagtgaggcaggtgttcatcagatgtgtcatccacaatatccttcaatggtgttaaacagaaaatgacagatgaataacccccatggttttgtggagacagatgagaagaaatcccagcagttgaagaaaggtgtccagacttgagtttgg

SEQ ID NO: 250 - DNA, 708 bp, Gossypium hirsutum
  Clone ID: GOSHI-09MAY01-C41593_1
gtaacaagtaagtgttgtatataaatatagatagattatatattcaactttgttagtgtgtggtgtttgaaattttgattggttttttatgggggattccttgaattttataggtggtctcttatagcggggagattaccaggaagaacagataatgagataaagaattactggaacacgcatataagaaggaagctattgagcagaggtattgatccagcaactcacaggccactcaatgaggcttctcaggatgtaacaacaatatctttcagtggtgccaaagaagtgttagagaagatgaatactaacagcaataataaccctattggatttatcaccaaagctgaaatgagaatcccagttcaagaaaggtgtccggacttgaatctggacctcagaattagccctccttattaccagcatacccaaccagagtcattcaaaactggaggaagaactctttgttttatttgcagcttgggagttaaaaacagcagagattgcacttgcatgcaccatcactactgctgctggtagcagcagcatgcacgcagtagccacagcaacagcaacaacagcagcggttatgacattcttaggcttgaaagctggtatcttggaatatagcaggtcggaaatgaaataataaagagtgaaaatttggactcctaactatgtagtgcaactccccccccccccccccca

SEQ ID NO: 251 - DNA, 664 bp, Gossypium hirsutum
  unsure (1)..(664): unsure at all n locations
  Clone ID: LIB3584-009-P1-K1-F1
cccggttcgaccccgcgttctgctcatacaaacaaggtgcatggaccaaanaagagntgatcgcctcatcgcttacatccgagcccacggtgaaggttgctggcgttctctccctaaggctgctggccttctccgttgtggcaaaagttgcaggcttcgttggatcaactacttaagacctgacctcaaacgtggcaacttcactgaggaagaagatgaactcattatcaagctccatagccttctcggcaacaagtaagtattatgttcaactttggcttacttttttttttttttgcaaaatttcaaatccttgattggtttttaaattgatttacaggtggtctcttatagccgggagattaccaggaagaaccgataatgagataaagaattactggaacacacacataaggaggaagctattgaacagaggaatcgatccagcgactcacaggccactgaatgaggcaggtgttcatcaggatgtgtcatccacaatatccttcaatggtgttaaacaagaaaaagacaagatgaataaccccaatggttttgtggagacagatgagaagaaaatcccagcagttgaagaaagttgtccagacttgaatttggacctcagaatcagcccttcttttttccatcaaacccagcagcacgc

SEQ ID NO: 252 - DNA, 419 bp, Gossypium hirsutum
  Clone ID: LIB3272-005-P1-K1-H9
ctccatgttgtgagaaagctcatacaaacaaaggtgcatggaccaaagaagaagatgatcgcctcatcgcttatatccgagcccacggcgaaggttgttggcgttcccttcctaaagccgctggcctccttcgttgcggaaaaagctgtcggcttcggtggatcaactatttaagacctgaccttaaacgaggcaatttcactgaggatgaagatgaagtcattatcaagcttcatagccttcttggtaataagtggtcacttatagccgcgagattaccaggaagaacagataacgagataaagaactactggaacacacatataagaaggaagctattgaaccgaggggtcgatcccttgactcataagcaactcaatgaaagcactgcacgtcatgttgcaaatgcaatatgttgc

SEQ ID NO: 253 - DNA, 1440 bp, Gossypium hirsutum
  Clone ID: GOSHI-09MAY01-C41583_1
aactcatccagtttcctcctctcttcccctcctcgacggattccccaaaaccctttccttttatttcttctctgtaactcttttaaatcctctttctcatttcctttcaagttcttctctcttacaaatccaatctcatttcttattctctctgtcgattgaaaaataaatggcctcttcactctcaacaacaccctccgctgccttcgcttccgttgctaaaacaaccactgccttgcctaattccactaaccttcagctctccaccgtctcctttcgcttttcttcgaggctaaaccttcgattcttctccaagagtttgcaacatggtcagaactctaaagcagtggtgaaagcccaacttaatgaggttgccatagatggatcatcaaatgcttctgctgcacctacaatcaaatcaggggcaccaacagcagaagcaaaggatgctaagacatcaagcgatgtatctcctccagctatggccacagaagagtcaattgcagaattccttatcaagtttcaagtctagtaaagctagttgattcacgagatattgtggagttgcagcttaaacaacctgactgtgaactgggtaattccgaaaaaggaggccttgccgcaaccaccatctgcagctccagttgtgatgatgcagtcaccctctcaaccaccagtaatgcctcctgtcccatctgtccctgcacttcctcctggtcaagcatctgctgccccaactccagcaccttccctagctgcttctaagtcagccaaatcatcacttccgccttttaaatgtccaatggccggtacattctacagaagtccggctcctggtgaaccaccatttgtgaaggttggagacaaggtgcagaagggtcaagttttatgcatcattgaggcaatgaagttgatgaatgaaatagaggctgatcagtcgggaaccatagttgagatccttgcagaagatggcaaagcagtcagcgttgatatgcctctatttgtgattgaaccttgaaactgagtaggcaaagccaaaacgatggagtaaaatctagggagggcatgttgagtttgtgtttttttttggtaaacgttgtgaggcattgttttgttgtgagatagtgttttggtagagatgcaaataacctggtatcataatgataatgaaatagttgcgtgtgatgagaatttatcgctgcagttgggaatagtagtttttaccttttttacgcatttaaagttttggatcggttcaaaaaaaagaaagttctggattggttaaattctgaggatggtccctgtacttatctatttgtctggatttagtctgtccctgtacttatcgatttgtgcggatttagtcctctacttttatttgctccaaaaaaaaaaaaaaaaataatttaattataaatatttatattttaattaattttt

SEQ ID NO: 254 - DNA, 765 bp, Gossypium hirsutum
  Clone ID: GOSHI-09MAY01-C41513_1
ttttgatgtgtctgacatttttggttcaaaacaaaaccccatgaatgatggaaaccttaataaaatgagtacaaagtcatcacaagactctaaagctcctcaaaagaaggatgcttttcaggtgaagtctggaatttgggctgattcactgaaccgtggaataattgatcttaacatatctgctcccaagaaggtttcactggcagatgttggaatagtctgcggattaagtgatgtgggtgaaagagtgaaagggcctccaacttcattttatatggggagagcaatgggaactggctctggtcttggtaaaactgggttcgcatctacaccatcaactgatgaagatggtctattctcaagccttggcaaccaccaacagtatcaattcggtagctttaaaaagtaattttgttcattccccctttgcattcatttcctattttggtgctaaaaacaaagttatcgactgttgtgcattttggtgtgctactttcgtatcattctatggtacaactccccgggaagtcctttatctttccacttaggaacatttgcatgtgaaattggtattgagatttgattcggacttagttaccaccatattgttgttgttcacacactgtgttagaattatttttagcgtcgtctgggtcaagttgtatagtccgtgtatcagggggcctccccagttactgaagcctgtttccctatattctgtttatcatccagtgtattcgtggtgaataaatatcagtcttcatc

SEQ ID NO: 255 - DNA, 639 bp, Gossypium hirsutum
  Clone ID: GOSHI-09MAY01-C41503_1
cccacgcgtccggcggaaactccgcgcttcagttatctaagattaaaatgggttggaaagcggctgagaagcttattaggcactggaaaattcttaggggtgacaatgtaatgataatcaggggcaaagataaaggtgaaactggcattatcaaacgcgttgttcgctctcagaatcgtgtaattgttgaagggaaaaatctggtaaaaaagcacattaagcaaggtccaggtcatgaaggtggtatatttactgttgaggctccacttcatgcctcaaatgttcaagttcttgatcctgttactgggaagccttgtaaggttggagttaaatatctaaaagatggaactaaggtgagagtatctaaaggtataggagcttctgggtcgataattcctcgccctgagatcttgaagataaggactactccaagacctacagttgctggtcccaaggatactccaatggatcttgtgttgcagaagacatacgatcctaaaaccggggtgggcatgcctgacctttaaagaaccttgttcaatctcattcgaggcaccaaacgtatggggcaaagaggctataaaaatatggtccatggttcaggggcatttgcctatcatcaataatactcttgatcac

SEQ ID NO: 256 - DNA, 681 bp, Gossypium hirsutum
  unsure (1)..(681): unsure at all n locations
  Clone ID: AI731789.1
atttagaacaatttaaaacttttatgtatgtacgttctttttttttttaataataaaattttttaaatgcacaagggaatagtgaattgacttcgtaatgggggcagattgaaaacccgataatccaataggctagaagcgagaaccctaaaacctggcactgaacgagcaccatccagatcatccaagtcatcggcaaaagttcggtgctttacctctcttcggttctttccaccgttcctgccttttcatattcatttccatcttctttttcttgggatttactgaagcttttgattaaagattgaaatgggttggaaagcagcttagaagctcatcaggcattggaaagttctcaggggtgacaatgtgatgataatcaaacgcgttattcgctctcagaatcgtgttattgtcgaagggaaaaatctggtaaaaaagcacattaagcaaggaccaggtcatgaaggtggtatattcactgttgaagctccctttcatgcttcaaatgttcaagttcttgatcctgttactgggaaaccttgtaagatangagttaaatatcttgaagatggaactaaggtgagtgtctaaaagtatangagcatctggttccataattccccgccctgagatcttgaagatgaagactaccccagaacanctgttgctggtcccacc

SEQ ID NO: 257 - DNA, 442 bp, Gossypium hirsutum
  Clone ID: GOSHI-09MAY01-C41523_1
cccacgcgtccggggacttccagtgggtcttcaggtttagatccccgagctgagattcgcagacacatgcgacgtgggtgtaacttataacatcttataaagagtcgactggaatcgagagcagtgaacacaaagacaagggagttggatctgatccatcttccaagcacaaccaaaggcggagaaaaacataaaacgtctaatcaaaaatttgtagaacctttatgaactaatcacagctggtttagggttggaatatccccctcatgcacagattcaatagtcatcaaacatcaaccatacttgtattttaggtttcctttacccttttttgaatgctcataatattatatatatcattattttcatttttcacaaatgccttgagttttgtccagctcttcacgtcttcttttctctttgtaatttatacttagacatg

SEQ ID NO: 258 - DNA, 806 bp, Gossypium hirsutum
  Clone ID: GOSHI-09MAY01-C41453_1
ggctgctgtttagacgattcatccaaccttgcatctacctgcaaatagacaaccgtcgactcatgttgctggcttgtttgccagctcagcagctcctgctgcagcctctgccccacagacttctgcagcaacatcagcagcttcctcgggaggcggattgtctctttttagtacaccgtcctctactcctgcttcttccatgtcatacttctctgtttgcaactccaactacaggtgctgccatccaaacatcccttttcagttcttcatcaggatctctcctaggatctgcatccactccctctctttttgctagtaccgtaccagctttcggctctactgcatctgctggaggttcacttttttcaacaccatttgcatctggtgctccaacaggatctggtgctagctttggggctgcatctaaatcatcaaggccgaaatctcggactgcccggcgttagtcatcatatcttgaatatggaaatcctgaagctactttctgttcactgcaatgatcatttgaacatgaaggggccacatatttcgttttgacagtatctatacccagtatattcctttaagtgcaatgtcattagctcttgagttgatctcgtacgcatgttgttgatatccaggaaaacaagatgttagctttgtcgaatatcctgatcttatttccagtcattccagcattgattttgtttgctacaagatccttattactgtaatattgtagaacacacattgagggattttttttttctattttttgagaagtaatatttgaaactgttattcgtgtg

SEQ ID NO: 259 - DNA, 673 bp, Gossypium hirsutum
  Clone ID: AW186780.2
gtgtttcgatttatcaagcaccgcagcttggcaatgtgtttgcagctcgagttggacgtgctctgtattatatattgaaagcttttaggactgctgcatcaaaactggagaaaatcggatatgttgacaccgaaaacgaaagcgaaactgttgaaccaaagggcggtaaagaggctattgacttcaaggaagttaaacgtgtggatcatattttagcttcggagcagcgaaagaatatattttgttcatgattttaaaaacctgcattacccccgtttccagatggttttgttccgcattcaacagcagaagtagagaaagatcccgaaaaccagcaaatagcagagcctcaaccttgtggtgttgatcccatcattgatcaaggtccagataagagaatgaaattttgaggccattgtttttctcccatttaaatggagcatttacaacttattagctaaccgaaaaatcttggttcagtttattcagttttgacaataaatttggttcggttttagagactttgaccgaatgctcaccctgccttttagccttgtgttacccacaagatttgtcatctaatgtaaattagatgaactcttaaacttttaaagtgattcaattaaaagtttaaagtgattcaattgaaaaaaaaaagaaaaaaaaaaaaaaa

SEQ ID NO: 260 - DNA, 394 bp, Gossypium hirsutum
  Clone ID: LIB3147-041-Q1-K1-C9
cccacgcgtccgcccacgcgtccgcccacgcgtccgcccacgcgtccgccgcagctttgcagtgtcttgtgcagctcgagttggacgtgctctctattatatatcgaaagcttttacgactgctgcatcaaaactggagaaaatcggatatgttgacaccgaaaatgaaagcgaaactgttgaaccaaagggcggtaaagaggcaatcaacatcaaggaagttaaacgcgtggatcatattcttgcttccttgcagcgaaagttaccacctgcgcctctgccacccccgtttcccgatggctttgttccaccttcaacagcagaagcagagaaagatcccgaaaaccagcaaacagcagagccgcaaccttctgctgttgatcccatcattgat

SEQ ID NO: 261 - DNA, 422 bp, Gossypium hirsutum
  Clone ID: GOSHI-09MAY01-C41153_1
catggacgagatcagcaatgctgcggtggtgcacttcaacgggaacatgaaaccatggcttgtcctcccccgcgtccggttcaaacctctttggaccaagatacgtggactatgatctggagtttgtccaggcctgcaatttcggtgtttaaataaaacatcatcattgaaggttctgcactggtaaatgcttcaaaatctagtttttgttacagcaagagtttccaccataccatctgcattattatttcttcttgcacgttaaaattcaattgtctctaattctgcgtggaagaaaattagcatctttattcttagtatagaatactttttcatttttagaatttcttggtttataaattattctgcaaatgttgaaattatcctgcaatgataaaaaatgatgaagagtttttttgttc

SEQ ID NO: 262 - DNA, 390 bp, Gossypium hirsutum
  Clone ID: GOSHI-09MAY01-C41143_2
gggtgaacgcgtgataacggagctctcatgttgcttttaatatggttagtaaggatgagagaagcaatggattctttattaatccaaggagattttcttgcctcttagcaaatcttttttatttctcatcttttggttcatggatgggatttggaggggcagatggtatgattcacatatatatataaaaagagtggatttttgtgagttaatgtgtaatgagagggatagattattggtgatgggctttttacatttttggtcttgaattaatatatagttgtaatacaaggatccatggtttaaccttatgaagtagccaattcatcgaacaaataaaaaataaaaattatatatattttaatatcttatttttattttttttttttt

SEQ ID NO: 263 - DNA, 647 bp, Gossypium hirsutum
  unsure (1)..(647): unsure at all n locations
  Clone ID: uC-gsronu33B055e03b1
ggagctttacctctctgaattctatttactgaagtagtgaagattttagaagacaagtgtgaacgcgtgataacggagctctcatgatgcttttaatatggttagtaaggatgagagaagcaatggattctttattaattcaaggagatattcttgatttttagctaatctttttatttacttatactttggttcattgatgtgatttatctcttttatattaattttttttatttttctttttattatcttttatttttcgtgaatttttgttagttatatactgatacttttttttagattatatatatttacttttttataattctaaatattttttatttgtataaatatatttctttttttttaattttttttatatttttatattctaataatttgtatncatctaaatatttcttatttatattctattttttttattcttatgtttaaatactttttttattattatattcttttatattttaattattataatacttttttttatatcatatttttaatcatattagttattattttttttatcttttaaacataattatatttatttattatttcttttattatacttattatatttattatttatttaatatttttatatacttatttatttcttt

SEQ ID NO: 264 - DNA, 448 bp, Gossypium hirsutum
  Clone ID: GOSHI-09MAY01-C41033_1
cccacgcgtccggaaatcagttcaaatgggagatgctgttgctttaataaggggcgagggaaagaatttgcggaggaaagagaaacgagtcaggatcgagcagattagagctaaccttggcctctcagattcacagagaacaccaacgcctggagaatcattgagggatttctatagacgtactaatttgtactggcaaatggctgcccatgaacatactcagcacactggcaaggaactccgtaaagatggttttgatcttgctgaggctcgttacagggaacttaaaccacttcttgaccagttggccatattagaggcagaacagaaggctgaagaggcagaaggaccagaaacaagttcgagaaagagagggaaaaagagagtttaagaatttagcaccctgcatttgcaatactttcagactttgggtaagctgtgaaatttt

SEQ ID NO: 265 - DNA, 862 bp, Gossypium hirsutum
  Clone ID: GOSHI-09MAY01-C41303_1
gttttctgagcttcctagttgaggttgatggtgggagcactggtatgtttaatgatattggtgctggtgttcgatttggaggtgcacgagatcgtggatatggtgatatgggttttggtcgttctggtcggcaagcggaatatggatttggccgttctggaggcaataggggtcctggatttggtcgtagtggcagtcagttttctgatgagatgggtggttatggaggtcgttttggttctaataaccggtctggaaattttggtggttctgcatccagtcgttctagtggctttggtaattttggttctagacgtactagtggatttggggactttggttcaggtaacccaggtggatttaaggacaatcgttctggtcaaactgctggtggttttggcggctttggttctggtggatttggtgacaagcattcaggccaaagtagtgcgagcaatggtgatcctccatctagtcgatttagccgctttggggtctctgatgttgataatgatcagagcactggaagaacacccttctaaattctttgagggaagaagcagcaatctcgatgacagctttcagtgggaaacagatattgggaaacaaggattttttgttttggttcgtgataagttttgttgggaagaaagaaaggatatataaccctaatccctttcctctcccctcgccggttagtgcttaagttaactaatatatatactagttactcacatgggaatgttttaagatgcttgactattaatattgaaattgattctatgtgaagagaaaatataataaaaaaaacatccagtacgatcatgtattacgatttaagttatcatagtatattttcaat

SEQ ID NO: 266 - DNA, 608 bp, Gossypium hirsutum
  Clone ID: GOSHI-09MAY01-C41323_1
atcgtcatcccttcattttctctgtgaaaaaatcatggagtttttggacgaagacgctagacccagattcctcttccaatcaaagcctcaatcttcttcttcctccgagcgatcaaaaccattccttttcatttccctttcaatctcttccattatcctttccctttccctcttctccattgaatccgaacccttcaaatctctcctcttttggttctctttctcccttttcctcggcccattcgctccctccttccctcaccggcggtgacatccgcgtcggcgttggccccaccatccctgatcccatcgaacaagacccacaacccgagactgaatctaagaaaaaatcatctcaaaaacgttcaaagcctgataaaatcgatgaaccaattggaaatcctggggagttagctggaaacggaaatgggttttcagagtcaaaggtgaaaagcaaagagtcgaagaaaaaagaagatctggggagcaatttcgatggagaaggtaaggaatggagtgaaactgaaattgagattttgaacaaacaaatggtgaaaaacccagtggggaaaccgggttgatgggaagctatagcttcagcatttaaa

SEQ ID NO: 267 - DNA, 436 bp, Gossypium hirsutum
  Clone ID: LIB3189-050-P1-K1-G12
attttctctgtgaaaaaatcatggagtttttggacgaagacgctagacccagattcctctggcagggaaagcctcaatcttggggttgctccgagcgaccctccccacaaaaaccctcaaaaccattccttttcatttccctttcaatctcttccattatcctctcccttgccctcttctccattgaatccgaacccttcaaatctctcctcttttggctctctttctcccttttcctcggcccattcgcccctccttccctcaccggcggtgacatccgtgtcggcgttggccccaccatccctgatcccatcgaacaagacccacaacccgagactgaatctaagaaaaaatcatctcaaaaacgttcaaagcctgataaaatcgatgaaccaattggaaatcctggggagttagctggaaacgggaatgggtt

SEQ ID NO: 268 - DNA, 523 bp, Gossypium hirsutum
  Clone ID: GOSHI-09MAY01-C42903_1
gtaatttatcagcaattcaccgtcttagctcattcgccgtatcagtcatggcagacgcgattgaactgaaaacagccccagctgactttcgtttccctacaacaaatcaaactagacattgtttcacccgctacattgagtttcataggtgcttggctgcaaagggtgaagagtctaatcaatgtgagaaatttgccaaatactaccgttctctttgtcctggtgaatggattgacaagtggaatgaacagagggagaatggtactttcccgggtcctctgtgactgtgatcacatattggaaaggaggtgaagcattgcttctttggcatggaaaacttgtcttgtagctagtttcaatggtttttcttgaaaatttcgaattaataagctacaaatggaaatttgtggccgatgagttgttaaaaaactggaatatgctctgatgttttaattcatgaacctgcttttttcagcagattgtttcatcttcatttacattttagtggggtgggattaacttt

SEQ ID NO: 269 - DNA, 349 bp, Gossypium hirsutum
  unsure (1)..(349): unsure at all n locations
  Clone ID: LIB3135-031-Q1-K1-G6
ttgtcctggtgaatggattgacaagtggaatgaacagagggagaatggtactttcccgggtcctctgtgactgtgatcacatattggaaaggaggtgaagcattgcttctttggcatggaaaacttgtctgtagctagtttcaatggttattcttgaacatttcgaattaataagctacaaatggaaatttgtggccgatgagttgttaaaaaactggaatatgctctgatgttttaattcatgaacctgcttttttcagcnnaaaaaaaaaaaaaaaaatttttatttacttttaaatattaaaaatttttatagtattttttataataagttcttttataaaaatat

SEQ ID NO: 270 - DNA, 760 bp, Gossypium hirsutum
  Clone ID: GOSHI-09MAY01-C42883_2
cttcatcatttccaaattttgattatttttttcttttttattttatttttatttaaaaggggaaactgctaacattattacattttcattagcctcaagagaagaaaaaaaaatgtcatcgaattcaatgtctgcttcatggacagccaagcaaaacaaagatttcgaaagggctttagctgtttacgacaaggacacaccagatcgttggtacaatgttgctaaagctgtgggagggaaaactgttgaggaagtgaagaagcactatgagcttcttctggaagatgttagacacatcgagtcgggtcgggttccttcccccgactattggaccgttaccgggaatcgtcaaggtaaaaaacccgcgagcatgaaagattccgaagctcaaatgaagaagaaaaaatggtggacttgcatggatctcacccttatatgtgtgtgtgtgtgtgtggcagtaattgtagtacttaagaatagccataaatgtatttaggaagaggaagaagagcttaatgggtgatcattgtttcctcttttgtttttgtttttaattgaggaaggaatgttattgtaatatatatatatatataaagttaaaaaaaaaaaaaaaaaaaaaaaaaaaaataaaaaaaaaaaaaaaaaaaaataataaaaaaaaaaaaaaaaaaaaaaaaaaaaaaaatttaaaataaaaaaaaaaattggggggccgttttatagaaaaaaaaaatattttgtttgggttaagaaaaattta

SEQ ID NO: 271 - DNA, 779 bp, Gossypium hirsutum
  Clone ID: GOSHI-09MAY01-C42883_1
ccgggcgacccaccccacccgtccgtatccttcttcatcatttccaaattttgatgattttcctctttttttattttatttttatttaaaatttgaaactgctaacattattacattttcattagccttaagagaagaaaaaaaaaatgtcatcgatttcaatgtctggttcatggacagccaagcaaaacaaagatttcgaaagggctttagctgtttacgacaaggacacaccagatcgttggtacaatgttgctaaagctgtgggagagaaaactgttgaggaagtgaagaagcactatgagcttcttcttgaagatgttagacgcatcgagtcgggtcgggttcctttccccgactattggaccgttaccgggaatcgtcaagcatgaaaaattccgaaggtcaaatgaagaagaaaaaatggtggacttgcatggatctcacccttatatatgtctgtgtgtgtggcagtaattgtagtacttaagaatagccattaatgtatttaggaagaggaagaagagcttaatgtgtgatcattgtttcctcttttgtttttgtttttaattgaggaaggaatgttattgtaatatatatatatataattatgtagcatatgaagtgtttttattttgagaaaatcaatagaacaataatgctaaagttggaggccccctatttgattggttttggttaacattcgatgaatgttcaactgatttagaaaaagggaaataccctataaaaacaaaacaggtttgtaactaaaatgcatc

SEQ ID NO: 272 - DNA, 1048 bp, Gossypium hirsutum
  Clone ID: GOSHI-09MAY01-C42843_1
ggaataacttcactattttgttgtttcattacgatggcctaaccagtgaatgggatgagtttgagtggtcaaagcgagcaattcacgtgagtgttcaaaagcaggctaaatggtggtatgcgaagcgctttttgcaccctgatattgttgcaccctatgagtacatcttcatgtgggacgaggatcttggagtggagaacttcaatgcggaggaatacataaaacttgtcaaaaaacatggtttagaaatatcccagccaggtttagatgcaaatagtgctgggctgacatgggcaatgacaaggaagagaaatgacaccgaagttcacaaggatactgaggagagacctggctggtgtaacgatccgcatttgcctccatgtgcagcgtatgaaacataatgaaccccctttgttaaaatgattaaacatattgttgcttatttcttgaatcgtagctaatcattcttgcatactggatgcttaggtttgtggagatcatggctacagtgttttctcgggatgcatggcgatgtgtttggcatatgattcaaaacgacttggttcacggatggggtctagatttctctcttaggaaatgtgtcgagcctcctcacgagaaaatcggggttgtagatgctcagtggattgtacatcaaagtgtgccttctcttgggaaccagggagaagcagagggtggaagggctccatgggaaggggtgaggcaaaggtgtaggaaagaatggacaatgttccaagatcgtttgactactgcagagagagcatattatgcatcactgggaattactgatccttacaatttaacagctaattaattaatggatataatatagtttttttttacaatagcattagagttgtacaagtcagtcacttctatatgtgacctagtaaactttgatttttggatacaagaaaaggcgactttgatcctatcagagcacatgcacaagtgttgtttatatcataattgtcggaactaactcaactaaatcccactcagatttatgaagtttcttatttgtttc

SEQ ID NO: 273 - DNA, 423 bp, Gossypium hirsutum
  Clone ID: LIB3148-003-P1-K1-H6
cccacgcgtccgcggacgcttgggtagcctatgatgcacgagaaaagacactttgtttgcgttcttgtcatagaagttactaaatggtaggcaaaggtgtacgaaagaatggacaatgttccaagatcgtttgactactgcagagagagcatattatgcatcactgggaattactgatccttacaatttaacagctaattaattaatggatataatatagtttttttttacaatagcattagagttgtacaagtcagtcacttctatatgtgacctagtaaactttgatttttggatacatgaaaaggcgactttgatcctatcagagcacatgcacaagtgttgtttaaaaaaaaaaatattaaatttttaatttattatattattctattatattttatcttttttttcttttttttttat

SEQ ID NO: 274 - DNA, 566 bp, Gossypium hirsutum
  Clone ID: GOSHI-09MAY01-C42873_1
caccaccagtgatggtcgaactcttgtctctaacaatgtcgtccctcctaattggtccttgggccaaaccttcaccggctcacagttcccctaaactctccagaatccgtaatataatagtgatgataatcgtaatattgcattgcagtcttattactgtttgaattaagctggggtgtaaaagattaatgtttttaggggtagagtggtcgaaatgaatagattaatcataatatgaggttataactctatatcaagtaaaaaaaaaaaacctttaaattcgtagagtagttgaaatggtgagaaggcttttaattttaagatgggccctcgtcattgaaattaaatttaaaggtggtggtggtggttgctgttttatttctgttctgctctcttttgacgaaggcggagacagagaaattggcagcggtggcggtgggtatttgatttaaaaacctgccggccgcctcttctttttggtttgctacaatttttgcttttaggtgaagcaatctgtaatcagcattcgagggataataaaatttgtactagttttatataaattt

SEQ ID NO: 275 - DNA, 1054 bp, Gossypium hirsutum
  Clone ID: GOSHI-09MAY01-C42413_1
gaagcaaccaacaactttgtggtaccatttcctaataacagttttggagtaataccgcctatggtagcttcatttggaaatgccgaatctcaagcacgtgaagtttctcgcctttcaagttttgttgttcctcatccatttgacccagcaacttattatgcccaattctaccgttcaagtgttgacaatgatggtcgcgtttctccctttgcttcttctggagttgctgcaaagtacaatgggaacgtttcagttcttcctccacagacttctcagtctcaagagggtggaaactcattggtactgaccacaacaagctcatctcctgtagtgactcaagctgctgggatgatgcaaagttctttggctgtgactcagcagccagtccctgtctaccgctcagcagctggggtgcatttaccacattatcctccaaactacattcaatatgcccccttttactctcctttttatgttccttctcccgcgatccaccaatttataaacaatggggtgtttcctcaacaacctcaagctggtactgtttatccttctgtaccagcggctcctactacaggagttaaattttcacttcctcaatttaaacctggaagtaatacaccaagttctattcatattggaatgccaagtggttatggaccatatggctcctccccagctggttataatcctagttctgctgtggcaactgggaactcaaccacaaatgaggatcttagtggtactcagttcaaggaaagcaatgtctacgtcactgggcagcagagtgaaggttcagctgtatggattgctccccccgggcgagacatatccaccctaccagcaagttcattctataaccttgcccctcaaggtcagaatgtaacttttgctccaacacaggttgtgcctggctcctttgctggtatatatcatccacaagcagcaacagcagcagccgttcatcctcttctacaacaagctcaaactatggccggagctgttaacatggggggatctgccgctggtgtttatcggcagcctcaacatgccc

SEQ ID NO: 276 - DNA, 524 bp, Gossypium hirsutum
  Clone ID: LIB3585-013-P1-K1-D10
tttccttctgctggaattgctacaaaatacaatgggaatgttgcagtacttcctgcacagacttctcagcctccacaagagggtggaaacacttcagtactgacagcaggaagtccaaccccaacagtaactcaagctgctggtttgatgcaaagttctatatctgtgactcagcaaccagtccctgtctaccgctcagcagctggggtgcatttaccacattatcctccaaactacattcaatatgcccccttttactctcctttctattatccttctcctgcaatccaccaatttataaacaatggtgcgtttcctctacatcctcaagctggaactgtttatccttctgcaccagcaccacctacaacaggagtcaaattttctcttcctcaatttaaacctggaaataatccggtgaattctacacatattggaatgccaagtggttatgggccttatggctcctcccctgctggttataatcccagttcaactggaaactcaactacaaatgaagatct

SEQ ID NO: 277 - DNA, 551 bp, Gossypium hirsutum
  Clone ID: GOSHI-09MAY01-C42753_1
gaaaaaaaaaaaagataaggaaaaatgatgcgaagtcggttgctatggttcagcttagggttttcggtgacagcggcttcaatctctcaattcatatatagagacctttggactgatcgttacgcccttaaatctgatatgaaggagaaattcgatgctttagaagctagggtttcgaatctagaatccctccctacggagaatccaaatccagctcaggttgatggctagatgtttatttggggttcacataacttttgtgctttgaatgtatttgaattttttttgtttcctttttattatatatttgaggttattgaaactaagagttcaaagctctatcaacagacgggatcacccggttgttggcgaatgtatttgatttcgaaacaaaaaggaaaaaagaagatttaagttacttttattatgacattttgaagaatgttgttgtagaatgatcgttgcctttttggaataatgtgatttagatctccaaaccatcaaattttcttaatagaatacaacctactgttatttccagggtattaatc

SEQ ID NO: 278 - DNA, 512 bp, Gossypium hirsutum
  Clone ID: GOSHI-09MAY01-C42663_1
aaagctgtaattatggctctctgttacgaaaatccaggattgaccaacgaatgtaatggcgtggaagaaatcggagtccccgaaatcgatgccggtcttctaatgtcgttgttagaggaatcacagtgtgaggagtactgcaatgaggagcaggtaactagtttgatggaatctctagaagctgagattagaatggtgaatgctggttcatgcagtattgaaggagacattggaagcaacaattactttgaatggagtgaaatggaaatggtgccttcctctccaagcgatgacatgaattggtatgtggaggatcatgcccaagagatgtcgatggacggctacttggtgcaatttggaaatgattttcctttgaattgctacgatagtcagtcagaaaatggctttacttctctgtggcaagagacctacgatacagctatatacaattagattacatgcatgtgtttataatattttttctaatgcaagaaaaattatatagtaagttc

SEQ ID NO: 279 - DNA, 568 bp, Gossypium hirsutum
  Clone ID: GOSHI-09MAY01-C42073_1
ctcaattagctcacaactgcctccaccgggacccaaaatcccgtcctacaatggatgaagtagtgaaagttctcactccgttgcaagaccttaatgatctcgccatcttatcctaccactctcgtctatctcaacaagggaggcgaaagaagaaaccagagggatctcagcaactctccaacactcaatctaaaagcatcagcggttctcctttgaatactggcaaacagaggtgtagatgatctgtaaccgactcctgccatcattggctcagctatcaaatgaaaacagatgttgggatgccatggtcgcattttcgattgtgtgaagacatatatgtcaggcttggttgtgcaatttcagggagtttgaaaactttggtagaggtaaaaccaatttattacactagagagctaaccatccccactgttgtaattgaggagtatctcttgtaattagatcaaacctcccatttcaatgactggtatttgcagctacccgaatgtctaatttcttattgagttttggaacctgcagtatgtttctccattgacacttgtatgatttt

SEQ ID NO: 280 - DNA, 552 bp, Gossypium hirsutum
  Clone ID: GOSHI-09MAY01-C42003_1
ttccacgcgtccggtttctaattgatcaaggttatagctttaaggtgataacaagcttgcctccttctgatgctggtgccgacttgagttactaccatctcgatgagcagttggctcttttaggaaaggtcttgactgctggtgatgatgcggttggtttggagcagttagaagaagatgcagatgatatagcccttcacaaagctcgtcgctctatgggatccatgagtgcaatgtcgggtgcaaatggaatggcctacatggaatacagcactggaaagcataaacttatggggcatggccagaataagagtaaacctaaggatccatccaagcggcatcatttgtttaagaaacgctttggttgagatgaaagccaaaccatgcagaatgttggttgttttatgacaatctacgaggttacttcccgcattgctttgtttaagagatgctatggtcgagatgaaaagcataaacccgaattacgtttggtttatatatatcatctaagaggttccaagaagaagaagaagaagagttttatttcttcag

SEQ ID NO: 281 - DNA, 444 bp, Gossypium hirsutum
  Clone ID: GOSHI-09MAY01-C42353_1
tttaagagatgcggtttcacgatccaccacacaggtatatcctaaatcatggactgctatttacatggctcttgataatgttggaatgtggaatgtgagaagtgagttttgggcaaggcaatatcttgggcagcaattttacttgagagtttatacacctgtgaactcactcagggatgaatatctcattccaaagaatgctttgctttgtggcagagcccaaggaagaagcacaaggcctctttgaaacatttccagtagccgaaattgttgagaatcaaccattagtcaattataaaatatgcctcaattcttttcattttttgtttcaccagaatctgtatttggttttgtatctaaagaaatgaaaataattgtattaaattagaacattctttttgctgaggaaataatacaaggctcaattttctgtgttaaaataaa

SEQ ID NO: 282 - DNA, 515 bp, Gossypium hirsutum
  Clone ID: GOSHI-09MAY01-C42333_1
gaccaagggtatgtgccttcagatgtgcagtctgaatcaggatcagaggatgaggatgatgatagtgaatcgttggttgaatctgaagatgatgacgaagaagactcagatgaagattcggaggaagatgaaggaaagacttgggaagagttggagagggaaccgacctatgcagatagagagaaaggagatgattccgatagcgaggaagaacggaagagaagaaagatgaaggctttcggtaaaggtcgtgtacctgataagagacccagcggtaaccttccgaagaggtccaaattgaggtgacatgctttttgaaaacaaatgtagtagtaccagccacctagtaaaatatggtagtcgtactaaataatactagttgctttcagtagtatatgtttaatcaaggtttttttttttgttgctttccatcccttttttgtgtgtcaatcaacttgttataaacttttaccagtaaattagctaagacgaaatatcatggaggttttacctgt

SEQ ID NO: 283 - DNA, 836 bp, Gossypium hirsutum
  Clone ID: GOSHI-09MAY01-C42293_1
ttgagcaagggattcaattctcaatctttaaggatcattcaagtaagacctgcattcttgatgattttgaattctacgagactcgtcaaaagataatccaagagaaaaaggctaagcatcggcttttacagaaacaggtttcgaatggggagcctaatgatgatgctgtaactgatagcaaacaaaatgcagccatagcaaaggaggcttcggaaaaatcaacgtctgcatcgacggcggaggtagcgaaggcgaatggagatgttaaacatatagaagagaatggatcagttgttgtaaccgaagatggccccgtgaaaccggtgtgtgcagccagtgcttgctaaattggattggtagatttggaacagggttgtacttcgggtttgttatgaagaagttagataaattggtatcaggtattgggactggtcttatagcttattccttagaatgtaggaataggtaaaagcaccttttacagtgttaaaaaccatttcgctacgggcagaatgtgactgctcattagtctttataagtttttttcttttctttttgtcatttttatctgtttttatttttctttgtttttattaatgagaaagagttgacaagggaaaaaaaaagcttaagcagaaaagtttagtcttaaaaaaaaaaaaaaaaaaaaaaaaaaaaaaaaaaaaaaaaaaaaaaaaaaaaaaaaaaaaaaaaaaaaaaaaaaattaaaatttacaaacccctaaaacccggtttttttctaaataaaaataaattttaatcctcttattttactttattttaaagggggggcctttttaaggaaaccaaatttt

SEQ ID NO: 284 - DNA, 930 bp, Gossypium hirsutum
  Clone ID: GOSHI-09MAY01-C43993_1
caaaataaaaaatggctctttcaatttcttccttatcatcatccctttcttcgctttcattttcctctcagatttcccggaatccaagcagtatctcaattgcccaacgaccgaaaaacttgcacatttccctgtcctctaaacacactcgttccctttcaatttccgctacggtggctgctccggttgagactgaaccggttgagaacctgaagaagttcgttaagtctaggctccctggtgggtttgctgctcagactattatagggacgggacgaaggaaatgtgccattgctcgtgtggttcttcaggaaggaactgggaagttcattatcaattaccgtgacgctaaggagtatcttcaagggaacccattatggttgcagtacataaaagttccattggtgacattggggtatgaaacgagttacgatgtattcgtgaaagctcatggaggtgggctttcgggacaggcacaggcaatctcactcggcattgctcgtgcattgctgaaggtgagtgccgatcataggagcccgttgaagaaagaaaggcttttgaccagagattcaagggtggtggagaggaagaaagttggtctcaagaaagctcgtaaagctccacagttttccaaacgttaagtggatggaaaactggggatttatatacatcgctttcatggttggtttgtagaaattcagtaacatttgctgatgaattttttttacaaaaattctaaattgtagaagaaccctttttgataatgtagatcttgttcttgattggttgtgctgatgaacatttctcttgcatttcatgtgaggaatgttgatccttagtctattgttacttaagggtaaaagtaccaatataagattactttttcttttttactacgttacatcaaaaaataaaatgttttttttagtt

SEQ ID NO: 285 - DNA, 611 bp, Gossypium hirsutum
  Clone ID: GOSHI-09MAY01-C43503_1
ccgggtcgacctcgcgtccgaaaaatttttgatttctttccaaaggggtttgtgggttgctgttggttctctcttcctttttgcaggtatctagcgaggaaatcagtgggccaagatgattaggccctgatgatgacggtgctggcgctgatatgcgttttattcgacttcaactacggccagatttgagacctggaatcacggcgtcgatgagggtagatggaacgatcgaggttgaagaggtgtgactgatggggtgcttacggcgcgaagcttctagaaaccctagggtttccagattctgtttaggcattgggccttatttaggttgggtcttgtttgggtttgggtgtaacgggttaatagattttgggccaaaagtttaggctaattgggttgtaactaggtactgcgttttgggtagtttagctaggttacgggttaatggattttgggctatagtattgggtttgtaaactggactgtacaaaagctattttatttttatttttttgtttttatttgttaatgtatcggcccgggtaaatttgggttgctacaatcatcatatgattattttggatatatcttacttacaatttctcggtaaa

SEQ ID NO: 286 - DNA, 835 bp, Gossypium hirsutum
  Clone ID: GOSHI-09MAY01-C43473_1
cccagcgtccgcccagcgtgcgaggcgaggggtgggaggaaccttggcaacagtaactgaatatatggtgaatggatcccttaggaatgtcctaacaaagaaggaaagatcacttgatcttcacaaaaggctcataattgccatgggtgcagcttttggcatggaatacttgcgcgcgaaaaacattgtccattttgatctgaaatgtgacaatttgcttgttaatctaagggacccacaacgacccatatgcaaggttggagattttggattatcaagaatcaagcgcaatactctagtttctggaggtgtgcgaggaactctcccatggatggcaccagaactgctaaatggtagcagcaccaaggtttctgaaaaggttgatgttttctcatttggaatttcaatgtgggaaatcttgaccggggaggagccatatgccgatatgcattgcggtgccattattggggggatagtgaagaacactcttcgacctcctattccagaacattgtgatcccgagtggagaaagctgatggaacaatgctggtctcctgatcctgaatcaaggccatcatttaccgagataacgaacaggctgcgatccatgtctatgttgcttaaacccaagggacctcgcaatcaaccgaaacaaacaaggccataatgtcaacggtatgattcaacattatatgcaagcacctgttttgttattttaggtatacctgtaaaagcttaatgtcttcaacacaccatttgaagatgtgcatatgtagaggttgaacattgatagccaaatttttttcccctggtggataatatatcttcattgttt

SEQ ID NO: 287 - DNA, 422 bp, Gossypium hirsutum
  Clone ID: uC-gsronu33B134f11b1
tcgactctgctctgtttctcctctgttggtagttgttactggtttcttacactacttgtaagataaccactattatctaccaaaacagcaaaatagagaggaagttgtcacaaaaatttccggttgttacactattagttacttcaaattcggtggctttctctactattttatcagtgttcttggggcattacgggcagattaagaaagggtatttgtttcatggtcatggaaaggctgaactcaaatctgtaccttcagaactgttacataatgaaagagaatgagaggctcaagacgaagcacaagctctcaaccaggagaatcaagccctttatctgagctgaaacagaaactctcaaaggccaacaacaactcacagggaaaaaattcagcaaacactattgctgacctcaatctca

SEQ ID NO: 288 - DNA, 430 bp, Gossypium hirsutum
  unsure (1)..(430): unsure at all n locations
  Clone ID: LIB3148-016-Q1-K1-G12
cggacgcgtgggttatttttcaactactgctactagctgttacgaaccagatttcagcttggtcggctaaagctccctaaccaacctccttgaaaaggggcattacgggcagattattaagggtatttgtttcatggtcatggaaaggctgaactcaaatctgtaccttcagaactgttacataatgaaagagaatgagaggctgaagaagaaagcacaggttctcaaccaggagaatcaagcccttttatctgagctgaaacagaaactcttaaaggccaacaacaactcanagggaaaaaattcagcaaacactattcctgacctcaatctcagctccacttctaacccaaacccttttattctagcaaaacctgatccagcaggatacttatcatgacccccactttggcttttcttccttttcttt

SEQ ID NO: 289 - DNA, 474 bp, Gossypium hirsutum
  Clone ID: GOSHI-09MAY01-C43723_1
ttttcacgcgtccggcttgcgattgggaaggtgttcgtccagatgttgtgatactaggaaaagctttgggtggtggcgtaatacctgttagtgcagtgcttgctgacaaagatgtaatgctttgtattcgacctggagaacatggaagcacttttggagggaatcctttggccagtgtggtggccattgcctcactagatgtgtgccaggaggtgaaactcgctgagagatctgcccatttaggagaagaacttttgtgtcatgctggttaagattaaggaggaatttccaaactacgttaaggaagttcggtgaagaggcttattcactgctttagagttcaatagcaggagttcattctcctgtttcaccatatgatatctgtctaaagatgaaagaaaggggagtctttgccaaacccacacatgacaccattgtacggttgacttctccactttgcatgagtcgggatga

SEQ ID NO: 290 - DNA, 608 bp, Gossypium hirsutum
  Clone ID: GOSHI-09MAY01-C43103_1
cgggtcgacctcgcgtccgcttgaaattttcatagttaaaaggaatggtaaatgggaacaagtattcgaattagaagaaaaagtggaagtggtagctgaagagaagatgaaatttgataacttaaaagggttattacttgaagaactacctggcctcattcagttttgtcccaaaggatatcattttgtattcccaaaaggggtgcagttgaaagtaagagattgccctaagttgactactggtttcttcattgattcacagagatttgtacattgcaaaacaaaggtacctcagttggttgagcaagatgcggttgaagagtctaccactattcgaaatgcaattttcaatgagaatatatattggagcctattttggggtgagggtcaactaccacacattgcatgaaagaatggatggttttagggcagccttcaaagccatgttacatcagtaggtagagcaatgttgctcagttgtttttagttaagtgtctgatataatttgtgtctgatagaacatgaccattaacggtgcttttcccacaaacgtcactaaagaacatggcctttaaaaaacttattttaattaaataatatttatttct

SEQ ID NO: 291 - DNA, 460 bp, Gossypium hirsutum
  Clone ID: GOSHI-09MAY01-C43313_1
cccacgcgtccggtggatatgtgcgtgcaatgtataatgcttccctttgttatacatttggggaaggtttatcacatagtcgtagacaagcgaggaagtggatgaagagagcagctgatcgtggccatggcaaagctcaatttgaacatggacttgctctattttccgaaggggaattgctgaaagctattgtgtatcttgaacttgctacacgttctggtgaaactgctgcaactcatgtcaaaaatgcagttcttcagcaactctcggcaacttctcgtgaccgtgccctgcttcttactgataattggcgtgctttgccttcctcccgatgagtatacctacactgtttattgaactttctcatctaatcctgtaattgcctgttactttcggttctcttggtaaatgcttgacgagtgacaagaaaattattaatatattatggtgttgtctcaaa

SEQ ID NO: 292 - DNA, 931 bp, Gossypium hirsutum
  Clone ID: GOSHI-09MAY01-C43303_1
tgcggataaaagccgtggtattggttcattgaatgctgtaatgggcaataagttggctgtactagcgggagattttctgctttctcgagcttgtgtggcccttgctgctttaaaaaatacggaggttgtatcattagtagcaacagttgtggagaatctggttatgggtgaaaccatgcaaatgacaacttcatctgaacaacgttgtagcatggactattacatgcaaaagacatactacaagactgcttccttgatttcaaacagttgcaaggcaattgcgcttcttgctgggcaaacagctgaagttgcaatgttggctttcgagtatggcaaaaatctgggattggcatttcaattgatagacgatgttcttgatttcaccggcacatcagcttcccttggaaagggttctctatctgacatccagcagggaattgtaacagctccaatcttgtttgccatggaagagtttccccaattacatgctattgtttatcaaggttttgacaaccccgaaaacattgagattgcccttgaataccttgggaagagtcatggtatggagaggacaaaagagctagccatgaagcatgctaatcttgctgctgcagcaattgattctctcccggagagcaatgatgagaacgtaataaggtcaaggcgggcactagttgatctccctcaaagagtaatcccaagaaacaagtgacataagagagagaaaaggctgtggacttgtaccaatccattatgcattgtgccaaaggttttgcttattgttgtaatccttgttccttcaaggtaaggggaaatcccctgcttggaggagtctacggttcagttgttacagaattttttcataataataaattttgttgttgtcaattgtagtttctaggctaagccagtgcagaagtgttcatgggtt

SEQ ID NO: 293 - DNA, 449 bp, Gossypium hirsutum
  Clone ID: GOSHI-09MAY01-C43223_1
cttagaagggtttggttgtaaactattgttgctttttccgatgagcaaattagcatttatgaaaaatagaagaaggggatagctggaggtttatgatgaatatgaagccatcggaggacatagatggagatgatgaagataactaattaagaagaaataattttaaaaagaaagtggaaattcatactgtagatatctacacatacggtttttaactggttgcaggcaagtgatggatccatatgatgtttgatgttagatttccttacttcctgaagaagtaaaaaccattagaatttgtgttggaagtttatgtaagaacagacttctttttcttaatggaaatctcatttttctgcgttaaaaaaaaaaatatattttatattataaattttttaaatatttttattattttttatatatattttttttattttttttttattttt

SEQ ID NO: 294 - DNA, 730 bp, Gossypium hirsutum
  Clone ID: GOSHI-09MAY01-C78913_1
tgcttccatgcaatggcgatttcaggttcagacactcaaaacccaacatgcaaactgagtacccccctcgagactcagtgcgttaaatgcgactcttgtggcttcaccgaggaatgcaccgttgcttatatcatgcgtgtccgtgaacgttaccagggccgttggatttgcgggctctgcatcgaggcggtcaaagatgaggttgtgagatccgtaacgcttatctccaccgaggaagcattggatcgtcacatcagtttctgtaacaagttcagggcgtggagtccttcagatgaaacggagcaccccatttttgccatgggaagagttcttcgacgaagcttggattcgcccagacctcttacgactaaatcaagtagcgtattgcccggacttgaaggagtcaaacgcccttctcttcttcgatccgatagttgtttctcagctctttctatctaaatctcaacaaaaggtaaatgtatcacgaaaaaacccaaaaagaagagacctatcacattgattgttacatatataaagggtctttatggctcacatgtctgggtatatgacatctaatctatcttatggtgtcttgagtgtgtgtatatgacgactgctccacgtttgagagttactttgatttagcctatgttgttttagtcttctacattcttgactctcggggataatatttgaagatcacatttggtcgtaaagaaacaaaaacaaa

SEQ ID NO: 295 - DNA, 473 bp, Gossypium hirsutum
  Clone ID: GOSHI-09MAY01-C78903_1
gggtggatgaaaaattaggttaaactttcaactttatccttcatttctttctcacgtttgaagcattttcctcttttttcattcttcttcctatttcctcccaacattatctccctctttttcatgtttttatctcaccaaccctatctccctttcacaaaccctaacaaggcttttaatctaagaatcgtttttctaactctaaccttcaacaaggccttctcttgctttcgattgaggtggaaacttgagaagagaaacaattggatggtggttcgatatgagcaatcctccctcagctaaaggagtgattgaaggtagcaacaagtaggagaaaaatatcactcaaggccgtgctaaggttctagaaggcttgggagtggtttcacatcgtatcgataccaggtgtgtccccgaaaacgtaaaaaatacggtttcaacgaaagccgaaaaccccactgtcgacgccacac

SEQ ID NO: 296 - DNA, 649 bp, Gossypium hirsutum
  Clone ID: GOSHI-09MAY01-C78423_1
ccttctggttgtttgattcaagacatgcctaatggctactcaagggtgacgtgggtagaacatgcagagatagaagagaaaccaatccatcaaatattcagccacttcgtacacagtgggatggcatttggagcaaatcgttggttagctgttttagagagacaatgcgaaaggattgctagtctcatggccactaatatccccgacattggagtgataccatcaccagaggcaaggaagaatctaatgagactgtcccaaaggatgataagaacattctgtgtgaacatcagcagttgcagtggtcaggtttggacagctgttcctgattcctccgatgatactgttagaatcaccacaaggaaagtgagtgaagcaggtcaacccaatggtctcattctttgtgctgtttccaccacttggctgccttatcctcaccaccatgtcttcgatcttttgagggatgaacgccgccgtgctcagctggaggtgctatcaaatgggaatgccttacatgaagtggctcatattgctaatggttcccatcctggaaattgcatttcactccttagaatcaacgttgccagcaactcatcacaacacgtagacctaatgctacagagaacttgcacaacaaatcccgcaagcg

SEQ ID NO: 297 - DNA, 581 bp, Gossypium hirsutum
  Clone ID: GOSHI-09MAY01-C78783_1
gtccgaccacgcgtcgcccacgcgtccgccaaacctaagcatcgaaaataccaattgcatcatcaaattcattatttgacccaaattcctgggaacggaattccttttctccatcggagttccatattcccccctcctgaattctcttttttcccctaccctcaaaatctcctctttgttctatacagaataaataaaattttaattttatggcatggaacgtgttcaaattctgtacggcactacgtgctttgggttcgattatgatcgttttcgttcttgcggttatcggcctcacttactatgctgtggtcattgctcattatggtccaagtctctttcttggaagctttgaaaccttttttgccatcgtagttctcatcgtgtttcattctctgctggtaatggtaatgtggtgctattcttctgttgttgtaactgaccccgggggtgtcccaccgaattggaggcccttcacggatgaggagaaaggtgatgccgatcctttggtaggttctggttatggaagtgcacaattagatcccaagcagtcagctatggtagccgtgagccaggagatt

SEQ ID NO: 298 - DNA, 608 bp, Gossypium hirsutum
  Clone ID: GOSHI-09MAY01-C78663_1
cccacgcgtccgaccacgcgtacggcagccttgagcataatctggagtattttcgaaccaaaaaaaaggaagtataacaacaatgaaactgagactgagaaatcatgaatccagagaaaccctgagaatccaactcctatctccttgttcttttcttcaactccaggaaaccctttccctctccctccctccgccccatactcctccctcttccctccgtttttacctcaacgccaacgatttgctcctcccgccctcccctcacgcttccctccattccctcggcgtcgctgccggcgaccttctttatttctcctccaatcccaccgctttttccgctgtttcagtaacccaaatggatgaccccaatcaggtgccggacaacaacaagaatcaagagacccaaatgcaagaattacctcaatttgaagaacccatgtcgaaagatcccgaaatttctccagaaactatggacatcgatgcctctgcccttagcgaaaggttgtcggagccctacttcttgaggaaggttttgggggaagagctgggtgatagtggctgcattcacaagctgttggcgatttcggtccacgcccgtttacttgagt

SEQ ID NO: 299 - DNA, 595 bp, Gossypium hirsutum
  Clone ID: GOSHI-09MAY01-C78013_1
atttctttctcccttctctacactctcatcgtctcagcttcaaaaatttcttcgcagactttctttagaaagatatattttctatttccactttcatttctactcattttttagacgcataattctctgtggcttgtaattttttagactgttgtaaaggaggaaaaggagagaccgtttctggaaatttttggaatgggggagttggaaagattttgaattttctctgtattttaataatgaaaaatctttccaattcctcccattccactgatttctaacacttcctctccattttcttactttcttcaatcctttttgtttcatcatttcttgcagtttgtaagtgaaatcggtaaaccttacctaattttcttactcttctgttgtatttttatatagatctattcttaaccgtcttccatggatcttttgagatttgcttcttgctatatagttccagatccttggttttattttttagttaaaaattaggtacaagggaacttattaatcttgaaattgtaagtggaaaattctggatccgtcgttgagttggtggagatcaaattaaagtcgggatatattgatttaa

SEQ ID NO: 300 - DNA, 695 bp, Gossypium hirsutum
  Clone ID: GOSHI-09MAY01-C78003_1
cccacgcgtgcggccctgaggatgctatctacagcctcaccatcgccatcttctctatgtttctcaaaccctaaactttaccaccttccttcctctcctcaaccctggtttgttctacccttcaactctcctctctgtggttttcgcgcttcctctcaccctcagaggatgacactgtccatgtgctcctctgccaccacggctgctgatcccattcccacttcagatccgcacccaccccattcacccgactctcaatcactcgtggttgtttccttctacaagtttgctgatttcccagaccatgctgatttgcgcaagcccttgaagcaactctgccaggacctgtatgtttcaggtggtatcattctagctcctgaagggattaatggcagcatttgtggtacacgagaatcagtggaaagagtccttatgttcatccaaaccgatgaccgtctaaaggggttgaggcagatagagtccccggttagtcccgagcaggaagctatccatcatggacattctagtagctctcctcttgcagcaggtaaggacgcaccctttcgatgggaacatgtgcgagtaaagttgaagaaagagattgttactcttggaatgccagatgtatcaccgattgaaaaggttggaaagtacgttagccccagggattggaatgctttaatcagtgatccaga

SEQ ID NO: 301 - DNA, 654 bp, Gossypium hirsutum
  Clone ID: GOSHI-09MAY01-C78033_1
ctcccttcagccgaactcgtcccggcccttgttgataactcttacttccactttgtccttgcctcagataatgtgcgggcagcctcggtcgtcgctacatcccttgttaaaaacgcgttacgccccgaaaaattcgtgctccacattataacagataggaaaacttactcccctatgcaggcctggttctcattgcatcctttagaccctgctataattgaggtcaaggctttgcatcaattcgattggctttcaaaagggaaggttcctgttttggaagcaatggaaaaagatcaaagagtaaggtcacagttcagagggggatcatctgcaatcgtagcgaataacactgagaagcctcaagttattcgccgcgaaactacaagcactcagtcctaagtacaactccttgatgaatcacattcggatacatgtaccagagttgtttccgagccttaacagggtagtcttcctagacgatgacatcgtgattcaaaccgatctttcacctctgtgggacatcgatatgaatggaaaagttaatggagcagtggagacatgtaggggtgaagactcgttcgtcatgtcgaaagcggtcaaaagctatctcaacttctcccatcctttaattgcaaagaattttgaccctaacga

SEQ ID NO: 302 - DNA, 493 bp, Gossypium hirsutum
  Clone ID: GOSHI-09MAY01-C78203_1
cccacgcgtccgcccacgcgtccgctaggtctgcgtcttccttggagacgcctcattcagattctggcaatagcatactagaagatacagaaatttccaaaaccccaactacttaaagcgatactactcttgagtcgggtgctgattagagatgagtggagcagaaaaggttgtgtgcgtaactggagcgtctggttacgtagcttcgtggctcgttaagctcttattacaacgcggctacactgttaaagccactgttcgtgacccaaatgatccaaaaaagacacagcacctgcttgcccttgatggggctaaggaaaggcttcatttgttgaaagcgcagttgttggaggaaggatgctttgactctatagtggatggatgccacggtgttttccatacagcctcccctgtcatcttttcagctgccgacccacaggccgagccttccgttcctgctgtctgggttcgccttatggtctttaatcatgtg

SEQ ID NO: 303 - DNA, 454 bp, Gossypium hirsutum
  Clone ID: GOSHI-09MAY01-C79543_1
aactcatccaagggaccaacacattcagggtcctcagaggtcactagtatttactcaaggagagaccttgatcaccacttcctaatcgatcatcttggattatcggtccactctatctcatcgatgatcaataatcaacgtggaggcacgattacagttgcaacggcagacaactgttgcaacctaaaagtttgatatcaatggaggggaaaattgtgggatttggtgctacctttttgcaccaaaaaaacaccgcttttcccctttagcaatcaatggaagtaacttggtttcgcaattaactgttacagggtcttttgcattacaaggtttggttgctaggcaaatcattctttggctcaacttaagataagctctttcttttaccaatgggtgaagaagctgaaacttcaaaatatatatatgggtcagactattaaatgggggtgttttc

SEQ ID NO: 304 - DNA, 522 bp, Gossypium hirsutum
  Clone ID: GOSHI-09MAY01-C79413_1
gcagaattgacctacttcatcaaagggcagaagttacttgagggctacaagcagggaaatggtatagtatgttgctgttgtgagagagagcttagtccttcacagtttgaagcacatgccggaatggcggccagaagacaaccgtatcgccacatctatacttctaacggattgacgcttcatgatatagcattgtcattagcaaatgggcagtgtgttacaactggttccagtgatgatacatgtgcagtatgtggaaatgctggagatctgcttctttgtcgtgaatgctctcaggcttttcatccatcttgtttgaatctagagcaccttcctgaaggtgaatggcgttgtctaaattgtgcagatgaacacggttctagtaggaaagctgttgctggagaagcttcaagcacagcaagaccaattgtgatacgattgacaagagttgtcaaatcaccagagtttgaaattggtggttgtgttgtttgcaggggtcatgactttagtggctcttcattt

SEQ ID NO: 305 - DNA, 623 bp, Gossypium hirsutum
  Clone ID: GOSHI-09MAY01-C79663_2
gttagaaaggttgtggagaaagattctcctcctaacagctttcatcgagaatgtgcataagatcccttttccttttactaaatacttatgaatggcaatgaactaacggacgcgcgggcggacgcctggctgtaatattctccaccacgttacaggtggatccccgcatccggtggaggtagacttaatatcaaatacttcatctaaatccgaggatgaagaaggatgaagccatggcctattactgataatagcatctggggttcttctagaattccaaaattgctggtggtggattaagaagtagatttgttggcaggatattttaaatcagattggaggagctgttgagatacaatgtatcatgtaagcagtggagcctaaataaattgtttttatgctcactgcggaaatcttatgtattttaaagaggtagtagttcatctgagtaatgtgcatcgattgttgctctgattttaatctttcttaagagtatactttttgggacgtggtggtgatatgaccaatgatccttcaaatacttgggaaaacttcttatccgacatgctcaagtccaagtaacatagtgtagcatctcatgtcaaggtactaaagttcaaatc

SEQ ID NO: 306 - DNA, 1190 bp, Gossypium hirsutum
  Clone ID: GOSHI-09MAY01-C79663_1
ttcatttcttcaaattctaccaccttcttatttgctctttataattaaaaattggtaagcaaatactttcccagcacttactctttatccatcaaccgaattccccacactctctctccaaataaaaaatcaagaatctaagaaattcgattcaccatattcatggcccgttccctttctcaatccgttctcaagcttccgcctaatcaccaaacctcacccttcttcctctcgtctccttgccgtccgaacccaatccaaccaacccaacccttccgactcctccgatgcttcatacgattcttcctctgatccgctcctgcggaaacttgaagacgccatccaccggatcatcgttcgccgttccgctcccgattggctccctttcatccccggatcctcttactgggtcccgccgtccacggcccaatcttacggccttgcccagctcgttgagaaattggcgaacccgttgacctcggaggaatccatgtccaccactgccgcccgaggctggccctcctctgactatttcatcaaaggtggttccccgcgcccagtcctcgtagacttaatatcaaatacttcgtctaaatccgaggatgaagaaggatgaagccatggcctattcctgataatagcagctgggaattccaaaattgctggtggtggattaagaagtagatttgttggcagcatattttaaatcagattggaggtgctgttgagatgcaatgtatcatgtaagctgtgcagcctaaataaattgtattttatgctcactgcgggtatcttatgtattttaaagaggtagtacttcatctgagttatgtgcatcgattgttgctctgattttcatgctttcttaagagtatactttttgggacgtggtggggttatgaccattgatccttctaagccttgggatttcttcttatccgtcatgctcaagtccgagtaacatagtgtagcatctcatgtcaaggttcttagtttcgacttctttcacagcttaagtctttatgtattttaaggagtggactagttgcgtttgagttagattaccgcgtgcagctccccatttcgatgtctattgtgcctggaactgcgactcatgcggtgttgagtaccctttgtagattctcgaatcctgtgattttggattgtaatattcttcttagtttcccttt

SEQ ID NO: 307 - DNA, 749 bp, Gossypium hirsutum
  Clone ID: GOSHI-09MAY01-C79113_1
cggacgcgtgggatccaaagcaactctgaggggaaagtagcttcatccaaagcaacaactgaggagaatacaaccttatccaatgtgacaaatgaagagttatctccaattcaacagcaggaggcggttcctacagttgattcaggagaaagtcagcctgacattgatcaacagccagtgattggagagcaaggacagctggactttgtacaggagcctattgcaccatgatgttcatatacaaagctgttgacctcattttgcctaaataaggaagtctaagactgaattactcgatgatcaaggtatgaaaaacttctacattagcttatgatgtcttctctgatatttggcagctttggttgtttcggtcgttgcttgcaggactctgtgtctatcttttaccgagttgtcctaatgtatgtggtttaaggatgggctttattgaatatattttggaaagttttaggagtttttcttttgttgttgtttagataaatccatgattagggtttctccttggctgctgaataacttggttttgtgaattaaaagtcctttttaaatttctttgaagtttgctactgtgtgtaaatgctttccgttcattccatgaaatagcttgtagattatttttcagtctctagattgtgccgcaagtgacttttaggttatacctagcggatggcaattgatagtacgaatttgaatattcatggatatctgagttgattttttacgaatttggg

SEQ ID NO: 308 - DNA, 547 bp, Gossypium hirsutum
  Clone ID: GOSHI-09MAY01-C79333_1
gttttccagtctaggagcttggtactaagaagtcaaaataagagctatcgaccagttttctttcgaaaggaggatttagagcaatcacttctgagagcttcccgtgaccagaatcaattgaatcctgcctttagacctggggatattcaggttgctgttttccaggacatgttcaagggaatgaaagacacttctacgttgagttggggtgatgttgttttcattcctcctggttttgatgtttcaactgatcccacccaactacaacagtaggcagctaaatgagtcgatggtctacttgattatgctggcaccggccttcttcagcagtggatatgagctgtgactgtttgagtgctgagtccgtcttcgtaggttctttattgatgttttttttttccggggaagatgtaatatttgtgttatgttacttagttgcatatgctttaccatgtaggttgtaggtttcaatctgcttaaaaaggtcagaggtagacgtgtctatgactcgaatttagtggacctaaatataaaattttgtttgttc

SEQ ID NO: 309 - DNA, 550 bp, Gossypium hirsutum
  Clone ID: GOSHI-09MAY01-C79283_1
gtttataaaagcataaagaccgtagttttctcgaataagcttaacttgctcatgccttttggtcctctagcaatcctggttcataaaatgactgatagtaatgggtgggtcttctttctaagcttactcggtataacacctttggctgagcgtttgggttatgctaccgagcagttggcttttttcactggacctacagttggtggtcttctaaatgctacatttgggaatgcaactgaactgattatttcaatttatgcactgaaaagtggaatgaaacgagttgttcagttgtcattgttgggctcgattttgtcaaacatgctgcttgttcttggatgtgcgttcttttgtggtgggcttgtatatcatggaaaggagcaggtctttagcaaggcgacagctgttgtcaattccggactcctgctgatggcagtcatgggcctactctttccagcagtcctccattacacacacactggacggcatgttgggaaatcagagttggctctttcaagatttagtagttggggtatgcttttagcttatg

SEQ ID NO: 310 - DNA, 559 bp, Gossypium hirsutum
  unsure (1)..(559): unsure at all n locations
  Clone ID: AW186955.1
taattgggcgggcccctcagtcagttcaacttgatcatcgccagtgattggaaattccctcaatgattattgtgatgagatgtgccaccatgctacacttcactggtgatgaggcttttaactcgcgaccccgagattatcgtggtgaaaagatgcagatagaactattgaagcttggaattgatggaagatgattcagggaattcatccgtntcatcatcttgcccatcttcatcaaatgatgaattttgggtcngnngagancttntgaattccntaaggaattcaaccaggtcggtgaaaaaattanaagccattgtattttatccatggaactccttggtggcagtgatgattcaagcactcgcacaccgcataaattatgtgtgggttgtccaaaaaaatcgaactttattcgggattgttacctttgctggaatgatgaaaattttccgtgaaacgattgaggaccatgacttagggaaagctttgaagaaatcccccacataaaaagccaaaaaatttaagaaatccataataataataaaaaccatatatt

SEQ ID NO: 311 - DNA, 519 bp, Gossypium hirsutum
  Clone ID: LIB3585-059-P1-K1-C4
ggatgttgcagcagccattgctacactttcagctggtgagttgatggcttatatagacttcggcggacccccagaggatttgattcagttggtgaaagaaagattgcaagagaggaaactagtgaaggccttggaattgatggaagatgattcagggaattcatccgtttcatcatcttgcccatcttcatcagatgatgagtttggggtcgggaggagcgttgtgaagtcagtagggaattcagcaaggtcggtgaagagatcagaggccattgtatgtcatccatggagctcgttggtggcagtgatgattcaagcactcgcacaccgcataaattatgtgtgggttgtcgaagaagatcgaactttattcgggattgttacctttgctggaatgatgaaaattttccgtgaaacgattgaggaccatgacttagggaaagctttgaagaaatccccaacataaaaagccaaaaaatttaagaaatccataataataataaaaaccatatatttggt

SEQ ID NO: 312 - DNA, 856 bp, Gossypium hirsutum
  Clone ID: GOSHI-09MAY01-C79263_1
cccaaactcactcatcgttcattgcttctatctttatcgatgaaaaagcttgaatgaggtaattcaaggaaaagcgaccccaaaagtaaaaaagaaaaaaaatgaagtcgattcaagctaataatacattcttcttacctcgtatcaatggctccaacccaagaaaaccggagctcttattcccttcctatccttatcttgtctgcttcaacgctaaggttctggttaccaagaagttgattgcgggttcatcactatgttctcaacagtttgctcctttattgaagcacaagagatgtgtttcggtttcgaaatgccaccaagggactactgtttgcaaatttggaggccaacattagcttgctggtgacgatgagggttcaccgtggaaatctatcgacaaagctattggaaactttgggaacaaacaatcaatcgaacatgtgttatcgcaccacattgacaaacaagattactatgacgaaggcagtgggcaaaatccgcccagtggtggaggtggcggcagcaccggtggtggccatggatttggagaatcttacgatgaatgcccctctgggatcttacactagaccttcccctgattctacctccccttgacgtcatattcccgtatgtatcaatcattaccggtgatgaacttgctccgttggcacaggactatttccaattatcttcttcccgatgaactcaaatttttcctatctaactctcaccttttttattggagctacttcccctgataagctgaacgtagaataaagtatttcgatcttttttcgcttacaacaacttttcctcctctacccctaacttggtatccaatatcccccacccc

SEQ ID NO: 313 - DNA, 455 bp, Gossypium hirsutum
  Clone ID: GOSHI-09MAY01-C74973_1
cccacgcgtccgacttgagcaagcttttattgccagcggcagcgaggactcactggtctatatatggcggaggggcacaggggagcttatagagacattaccagctcattccggagctgttaattgtgtgagctggaatccagcaaaccctcacatgttggcatcagctagtgatgatcgaacgattcggatatggggcttgaataatctaagcactaaacggaaagaaccttgcagtaatggcatccattattgcaatggaggatactgagagattgaaatgctttggttctgcagtcattgatactctctgatataattggttgaatgtaaatacttttaccttgttgaaagcttgacattcatataaaaacaaggattgttaacaatgcagcaactctggtaataaatttgctattttctttttttaaaagagatatgcagaattcttgact

SEQ ID NO: 314 - DNA, 528 bp, Gossypium hirsutum
  Clone ID: GOSHI-09MAY01-C74913_1
ctgcaatttcacgttttggaagcagctgcactgcaatggctgcacccagttgcgagacaactggaaatgggataccaacaggagataaactcatattgaggggcttgaaatttcatggtttccatggggtaaagtctgaagaaaaaaaactgggtcagaagttcttggttgatgtagatgcctggatggatcttcggagcgccggtagatccgaccttttatccgataccattagctacactgatatttaccgtatagtgaaggaagttgtggaagggcaatctcgtgatcttttggaatcggtggctcaaatgattgcatcaaaaatctttacaaatcactctcaaatatgggctgttagagtgaaagctggtaagcctcatgttgctgttcacggttctcttgactaccttggcgttgagattataagatatagaagcattgatgcttctaattgaccatcatatatgtatatatagacacacacatgtatgtatgcttgcacatatgtatgtatgaatgagggta

SEQ ID NO: 315 - DNA, 648 bp, Gossypium hirsutum
  Clone ID: GOSHI-09MAY01-C74453_1
cggacgcgtgggcggacgcgtgggcacggttctctcttcacctctgcaaccctctttcatttttctcactgcctttttctttttctgtggtacgaccaggatcgttcatcatgtcgaatgatcaaaacaaacccatgactcagaagctgtacgagtcagttccatcatctcggctgacggccaagtttttaacagcaaccacactgagtgcaacgttgcttttcttgtcaggattaaccttgacgtggactgtgattgccctgattatggcgacgccagttatggtgttgtttagtccagtactagttccctctgccatagtcatcttcttggtgattactgggttcttgttttctggcgggtgtggcgtggcagccatcacggcgttatcgtggatatataattacgtgcaagggaagcacccactaggtgcggataagcttgattatgcaagggatatgcttgcaagtatgacgaggggtgtgacggagaaggctaaggagtatggccagtatgtgaagtataaggctcgggaagttgcacaaggggaacgatcttgaagttgaaccatagtaataattattagtttaagccttaaggcacggttgttgtcattgtttgatcaaatttgcatgcatgcatgcgtcg

SEQ ID NO: 316 - DNA, 1133 bp, Gossypium hirsutum
  Clone ID: GOSHI-09MAY01-C74423_1
gaaccttatcatgtcaatcgggattgctgttgaattctgtgttcatatagcaaatgctttcttggtcagtaatggggatagggatcaaagaatgaagaaggctcttagtactattggagcatctgtattcagtggaatcaccctcacgaagcttgtaggagtgattgtgcttttcttctcaagatcagaactttttgtggtttattactttcagatgtacttggcattggttcttgttggcttcttgcatgggcttgtgtttttaccagtggtgctgagtttgatgggtcctcccgcaggaaatattgcttagatacacttgaattgattggtagtgtttccagagagcagctctcatttctgcaagttggttaaaaaaaatcctgtatgcaatgataatatatatatacacacacaccacataattagttctgtaaggttaatatcttaatggataacttttttttttcttttctgggtcagagagttgtgatggtgttattataaatacatatatcaagcttttgcaattagggaaaaaatgtcttcttgatcatctctgaatcgctctatgctcagattcgtttgaaataatatctggcgtcattcatttttataatttgataccgtatgaaaatagagtatctcactaatacaggcctttacatattataacaaattatatatgggtcttgatgaagatacataacacgttttggtttatagaaaatatttttgactgtttcctttaagattcccttttttccaggtgttcagcagtgggagctaagattttggccgagtttggtatggcttgactttgcaccaattcagcgataaaaagaaaatatgaaatatcaatcttttatgagaaactgcccagaaacatagatggaactgctatgcgtggggaccatagatcggattaatcaaaagttatccgcaacaatttagtttgagggaatcgtctagttcagttcggttactgggtttaaggagtgatgttagatggaaagatccaagtcaatttcttttttcctttttatttattctaaaacatatctcttaaaatttgttgacaaatatgaaattggtaattgagtatagggaaatgcccacttcctaagcatttc

SEQ ID NO: 317 - DNA, 854 bp, Gossypium hirsutum
  Clone ID: GOSHI-09MAY01-C74793_1
attgctttcacctttgtggtttatccatctctaatccttgcatatatgggacaagctgcatatctttcgaagcctccattctcgaaaccgactaccggatcggattctacgtctcggtcccagagaaaataagatggcctgttctggttgtgcccgtctttgcagcagttgtgggaagtcaagccatcattactggaacattctctatcatcaaacaatgttctgcttggggttgtttccctaagatcaaaatcatccacacttcatccaaaatccatggccagatttacatcccacagatcaactggactttgatgctcttatgcttggctgtaaccattggttttcgagacaccaaacgcatggggaatgcctctggtttggcagttattacagttatgttggttacaacatgcttaatgtctctggttattgtgttatgctggcataaaagtgtcttgttagctgttttctttctgttcttctttggctccattgaagcactgtatttctcagcatctcttatcaagttccttgaaggggcttgggttcccatagcccttgctttaatattttcagtcataatgtacgtttggcactatggaacactaaagaaatacgagtttgatgttcagaataaggtctcaataaattggctccttgctctcggtccgactctgggtatcgttcgggttcgtggcatcgggcttatacatactgagcttgtttccgggatcccggctattttttctcactttgtcaccaaccttctagctttccaccaagtagttgtgtttctttgcatcaaatcagttccagtgccccatgttagtcccggggaacggtttctagtc

SEQ ID NO: 318 - DNA, 688 bp, Gossypium hirsutum
  Clone ID: GOSHI-09MAY01-C74113_1
cggacgcgtgggttggcatttttgaaagctttctgtctctgatcccaaaatcacttggggttttagaatggattgaatgtcggtgctacaactcataatttctcaagaactgtgctgaagtagctgaaagatctaagaaaggttttttttggtttaaactggactgatccgggatggcagagcggggtgtctgccggcaagttaaattcctaaattctcaaggagatagcactgccaaatcgttgcctggaaaaattgaggaagaatatgatgaagatgataaaaagcatgtgaaaactatgttgatttcatgcccagaagtacggaagagaaaatgcctttcctccaaccaactgagaaaagaaaaagctgcaagatgtgggaaacaaagcttaagtaatggtcctaacaagggcaagcaaaacaaacataaaaatactgtagagagatggtctgctgaaaggtataatctagctgaagaaagcatgttagagatcatgaaggctgaaggggctgtgtttgagaatccaatatctcggcctgctttgagaatggcagcccgtaaacttattggtgatactgggctattgggccatctgctgaagcacattgatggaaaggtggcacctggaggtactgataggtttcggcgttgttacaataccagtggagtgatggagtattggct

SEQ ID NO: 319 - DNA, 596 bp, Gossypium hirsutum
  Clone ID: LIB3825-015-Q1-K6-G10
aactttgctttcagttttacttttccctttctttttggcatttttgaaagctttctgtctctgatcccaaaatcacaaggaactgtgctgaagtagctgaaagatctaagaagggtttttttggtttaaactggactgatccgggatggcagagcggggtgtctgccgacaagttaaattcctgaactctcaaggagatagcactgccaaaccgttgcctggcaaaattgaggaagaatatgatgaagatgataaaaagcatgtgaaaactatgttgatttcatgcccagaagtacggaagagaaaatgcctttcctccaaccaactgagaaaagaaaaagctgcaagatgtgggaaacaaagcttaagtaatggtcctaacaagggcaagcaaaacaaacataaaaatactgtagagagatggtctgctgaaaggtataatctagctgaagaaagcatgttagagatcatgaaggctgaaggggctgtgtttgagaatccaatatctcggcctgctttgagaatggcagcccgtaaacttattggtgatactgggctattggaccatctgctgaagcacattgatggaaaggtgg

SEQ ID NO: 320 - DNA, 794 bp, Gossypium hirsutum
  Clone ID: GOSHI-09MAY01-C74333_1
ctttgttaacatgctgcatatgtattcgcatccactgttgcctaagatgcactacatccacccattgtctgtgattcagctcgatagcttgaggcaccaagctgtgcagatggtctcggtgaggctgagccgggccgagccaccattgaggaaggaagttgtggagtacatactggatgttgattcacatatgtggagcatgaggagaagtaaagcaaactttttccgaattatgggagttctaagtgggttgattgcagttggaaaatggtttgatcaaatctgcaattggagaaaccctattacaaccatgttgattcatatccttttcattatattggttctttaccctgagctaatactgcccacagtttttctctaccttttcctaattggaatctggaactaccgttggcggccactgcaccctcctcacatggatacacgtgtgtctcatgccgttgcagcccatccagatgaactagatgaagagtttgataccttccccacttcccgcccatctgatatcatcaggatgagatatgatcgtctcagaagtataggagggagagttcagactgtgattggtgatctggcaacacaaggggaaaggttacagtctctgctaagctggagggacccgagagcaaccaccttattcgtgacattctgtttgatcgccgccatagttctttatgttacaccattccaagttgtggctcttctcataagactttatgcactgaggcatcctaggttccgccacaaacttccgtcagtacctcttaactttt

SEQ ID NO: 321 - DNA, 1350 bp, Gossypium hirsutum
  Clone ID: GOSHI-09MAY01-C75963_1
gccgtttttccgatgggcggctcaccattgatttcatagctgaggcatttggtctgccatttattaatgcctatcttgattcagtggggaccaatttctcgcatggcataaactttgccaccgcagcatctacaatcagattacctattagtgttatccctaatggtggattcagtccattctatttggggttacagtgctcacagtttgagcaattcaaagtgagatctctctcgtccgggaaacaaggagggttgttggcaagtttaatgcccaaggaagagtatgtttctaaagctttatacacatttgacattggccaaaacgatcttggagaagggttcttttcaaacttgactgttcaagaagtcaatgcttctattcctgacataatcaacaagttctcagcaaatattaagaatatatacaatttaggagcaagattcttttgggttcacaacactggaccaatcggttgcttgccttatgttttggttgcatttgcctcagctgaaaaggaccctgctggttgtttaaagccttacaatgaagtggctcagtatttcaatctgaagctacaggaatcaatagctcaactcagaaatgggaatccccttcagctgcatttacacttatggaagccatcatattctgtgaagtattctctggttgctgaaccccaaaaacatgggtttgaacttccacttgtgacatgttgtggctatggaggtgagtacaactacagtgctgcagttctatgtggaggaacaattacggtgaatggtacagagatatttgtgggttcatgtgacaatccatctgcttgtgtggtttgtaatggaattcactttactgacgcatcttacattttcatttatgatctaattctatctggtttatataattcgtatctacatgtttatctaaatcttctttgcctcatatatctgttattaatctctactttttctgatttatcctctatctctactactatttattacttttactacatttcattttatgtatcatatatcttcttcttctgctcaatatcatctctatataaccatatttacaatatccatctatattactacttcctattattatctcatatcttatcatattacttatattctgtttttcatttcctactattattataccttcctatcttcttgtctcctctcatattataatttacatgcttctatttatatctaaccacttcacttcttcatacattatctactttcttctcaaatactctcctacttactcattgatctcttatcctcttatctcatctccgatcttattccatattcttctataatcctcacctcg

SEQ ID NO: 322 - DNA, 670 bp, Gossypium hirsutum
  Clone ID: GOSHI-09MAY01-C75493_1
gtttccattgaagcacagatctttgatgaatttcttaagcaatattttaagggaggaaggtggatttgagtacaaaaaggccattgtagattcaattgtgattctaatcagagatatcccggaagcaaaggagagtggattgcttcatttgtgtgagttcattgaagattgtgaattcacttatctttccacacagatactccatttcctggggattgaaggcccaaaaacctctgatccaagcaaatatatacgctacatttacaaccgtgtccatcttgagaatgccactgtccgggctggtgcagtgagcaccctagcaaaattcggcgctatggttgatgcactgaagccccgcgtatttgttctcttaagagcgctgtctttttgacaatgatgacgagggtcgtgacagggctaccctctatcttaatacacttggtggtgatggtgaagttgttgaaactggtgaagatgtaaaggagtttctttttggttcactaaatatccctttggttaacttggagaacagtttgaagaattatgaaccatcagaagaggcttttgacatcaactctgtgccaaaagaagtcaagactcagccacttgctgagaagaaagctccaggtaaaaagccaactggtcttggtgcgcctcctgctggccctcc

SEQ ID NO: 323 - DNA, 377 bp, Gossypium hirsutum
  Clone ID: GOSHI-09MAY01-C75403_1
ctttcttgaaagaactgtatattgaaggaaacgcattccggcctggcgtaaaccccattggtgcacacaaggtccttgaactttcggacgcagatttcttggtttagttaaaaactgtcaagaacacaagccttattactatcaaacctcatggccatggatttctagttatccaaactcagtaatatttgtactgtagatatgaactcagttctttattgtctttgtatgtggtgtttttaaggaaaaacagctcaaatctggaattaaagttggagaatgatctaataccttatattcatgaaatttttcaatttttgtagctattatttcgtaaccaagaaaattaatgaaaaaattatcattcttttagtaat

SEQ ID NO: 324 - DNA, 450 bp, Gossypium hirsutum
  Clone ID: GOSHI-09MAY01-C75743_2
cttcttcttcggccttcggttttcatttttcaaagctacaaactgcaaatcctcaataatcttccctcggccaagcacaggtacgctataatttcgactgcccattaggtcgtaacctaaatttccttactgggttttcgttttcaagatggggactggagatgaagtagtggaaatcgagagcttagagagaagtttgttaccggaatccgttaccggagaacaggagtccgaggcagtcgatgagccagttctttacgcggcgtcgtttggagagatggaagaagaattcgttaaataccaaacggctcaatgggttttatactcggtggttttagtgttagcttggggtattgggttgttcatgctcttatacattcctgtcagagatacatcctgcgtaaagatattcgatcccgaagagtttatctaactcccaattcaatcgtt

SEQ ID NO: 325 - DNA, 596 bp, Gossypium hirsutum
  unsure (1)..(596): unsure at all n locations
  Clone ID: AW187616.1
agctcttcttcttcggccttcggttttcatttttcaaagctacaaactgcaaatcctcaataatcttccctcggacaagcacagatggggactggagataaagtagtggaaatcgagagcttagagagaagtttgttaccggaatccgttaccggagaacaggattccgaggtagtcgatgagccggttctttacgcggcgtcttttggagagatggaagaagaattcgttaaataccaaacggctcaatgggttttatactcgttggttttagtgttagcttggggtattgggttgttcatgctcttatacattcctgttcgaagacacatcctccgtaaagatattcgatcccgaaagctttatctcactcccaattcaatcgtttacaaagttacaaggccagtgccaattccttgttttggggttttaaagaaagaaaagcatgttctattaccctcagttgcagatgttgtaattgaacaaggatatntgcagtccttatttggtgtttactcactcaaaattgaaaacgttggtctgaagagacctcctattgatgatttacaaatccaacgaatggttaacccgagtgc

SEQ ID NO: 326 - DNA, 775 bp, Gossypium hirsutum
  Clone ID: GOSHI-09MAY01-C75773_1
ggaaaccctagcaaaaccctccggaggagtgtgtgctctgcttctactttcaattttctttgtagtctgagtgtttgtctttcctctccatttgttatattgccatttccaagtggaagaggagtaaaagcgagagcgaaaatgggtctaggagaaagaggaggatgggataaaagcgagtccaggtactgcggagtggagactgaatttgaggatgacatgcctcgccttttgtcttacaatctctcctcttcgggctttgattttgttgtcgctcctttgatggatcctacttacagaccaagcttgttggaagcagagaatggtagctctcacgttctgccctttgctgggtcagacttagttttgagtccttcccagtggagtagtcatgttgttggaaaaatcagcacgtggattgacttagattcagaggatgagatctttcggatggattctgagactactttgaagcaagaaatagcatgggcctctcatctatctctgcaggcatgccttcttccttcacctaagcgagcttcatgcgctaattatgctagatgtgtgaatcagattctgcagggcctaagcaatatgcagctgtggctaaggattccactattaaaaactgatgaggattcactggatgtagattctgatgatctgagagactcttgggaactctggaattcatttcggctaatctgtgaacatcatagtcaactgtcacttgcccttgatattctgagtacgctaccttctgtgaactcaattg

SEQ ID NO: 327 - DNA, 628 bp, Gossypium hirsutum
  Clone ID: GOSHI-09MAY01-C75673_1
gcatgatctatccgatgcatcccccatttctaaatatctcgaatctttttataccctgaggaagccaatgtcatctacaataaatatactagctaatgtcctacagaaggtattcagtgcctcgtccaatcctgcaatggagaatctgcagcacacctttctcgggtatttgagacttggaggggtcttttcatatggagcatccgctatgctctgtggtttatgccctcctccattaagcttagcatttcatttcttttccattgcaatatatggcgtcggccgattgttacttccatttccttctcccagacgcttgtgggatggggctgaattcctttgggtggcatcaagtattcttctcccctacatgtactccgaaggaaccagacaaacgttcttccctctaactgtgccagcatattatagaactccccctgaaaataaggacaaaaaaaacttcatgcattaattagcagtatttgttggaacaattctatgttcataacaaaatctcatatatctgttacttgcattctttattaggctggataatcatttgtgttcgtgctatttatatgtgtgatgtttaaaatggtaaataaatgagttagcctttgcatgactg

SEQ ID NO: 328 - DNA, 887 bp, Gossypium hirsutum
  Clone ID: GOSHI-09MAY01-C75173_1
caccaatacaggtggtaattgtacctatttggaagaaggttgatgagaaaacaggagttctagatgctgcatcttctgttgcagaaactctgaaaaatgctggacttaaggttaaacttgatgacacagatcagagaacaccaggatggaagttcaatttctgggagatgaagggagtgcctctgaggattgaaattggtccccgtgatgtttcgagtgggagtgtggtcatatctagaagagatattcctgggaagcaagggaaagtttttggaatatcaatggaaccttcaatattggaagcttatgtcaaagacagattggatgagatccaatcatctcttcttcagagggcaatatctttccgggacagtaacaatagtggatgtgagctcttatgaagaactcaaagaagcaatatctttgggcaaatgggctaggggtccttggtctgctagtgatgcagatgagttacggataaaagaagaaacaggggcaacgattcgctgtttccccttcgaacagcctcaggggaccaaagcatgcttgatgacaggcaagcctgctgacgaagttgccatttttgcaaaatcttattaagacttgggtaaagtttattttcaagctcacaaactatctagttttgcagttatatgtcctgaattttgtccaggttttttataccctcttcctctcctatatgaaacacgtagctttgactacattcactgaaacagcacacatacctgtttatacatttttaaagctgtcatttggtcatgttcttgccttgctttggggttgatctaggacaacaatttatacatccggtttgatatgtagtgatatatttttttttgatgattaatatgtagtgatatttatgt

SEQ ID NO: 329 - DNA, 540 bp, Gossypium hirsutum
  Clone ID: GOSHI-09MAY01-C75113_1
gttcaagaaacccttatcgatcaatgggctctaccgagcatttaattcaacagaggagcaatggaatgaatgaaaatagtatggagcaagcaggtggccatccactggattatttaggggttcctgatgccagtatgatggtgatgggtgatgaaatgggaaggatgagcatggcacatcagaatgctgttgctgctttgcatgatgatcaattggcaatggggaaaccgtatttgaggtcatggaaccaacaaagatagtgggtgagctgatgcgatatcatcttgctgaattgcagacttcatgtgatgcttccttcttaaattatatatatttgggaagtagaagagagttgtaggttactatttgctattacaactctgcatatttgcaggagcggagtatacaatacaaggactctgagatgattaagatagggttttgtttttcttttgtacatacgtatgagatcctagtactatatatatatatactgctacttcattaaacaagtgataaattttgatttagatgggaagt

SEQ ID NO: 330 - DNA, 662 bp, Gossypium hirsutum
  Clone ID: GOSHI-09MAY01-C75063_1
ccaactcaagcctttcaaccgtcaactcgactctgctaatctccattaaagaacaatgtccatgcctcatacagtcgtcgaccctcctcccctccactactccaccacccttcctccgccaccggtttccaaaaagcagccttccaaattctctcgctccatcctcaaactcttcaaattcgtattcaagttcagacaaagttcgagtcattcggttttgtggttgaaacaaagatcgctcggggacctacttcgtagtttacgacaagacgggtgcactcacgaccatccccgaggtcccggagatcgattttggaggactttcgccggagattaactcgttggtagtcgagagaagtgaatcggaaagcttcactgcagcctccactgtcggtatttcatgtgcttaaaagaagctaaattatacagaaatattatcatatacatatatatgaataacgaggatgtgatcaaatagtttgtttatattttgatcatattttttaggtttattttttcctctttaatgttaccttaattagttgaagttttgtactttgatcctttcatgtctcagactctcagttctatgatcatcagctgaatttgtggttacaattaagccattttatgtactgtatggaagagtgattcactttgcg

SEQ ID NO: 331 - DNA, 586 bp, Gossypium hirsutum
  Clone ID: GOSHI-09MAY01-C75003_1
atgcagttagcctagttcgcagagggttgcgacggcacgatgaccccgagcaatgtgctagagaccttgtcatggaagccttacgccgcaacacgtttgataatttaaccgtcatcgtcatatgcttctccgaacctgattacagggaacaaccatctcctcggcaaagaagattgaggtgttgtagcctatctgcagaggctctgtgtagcttgaggagtgcaatgcgaattcgtgaccggtaaacacgagtctttaaataatactaattgttcaacctgggatattatatatactgtttctggctgcttcagttacaggtataaaaaaaaaagcagcttgaagttttgcaggggttggttttggtataatttttttttttttggggggggggggatgtacatagaggatggtggtgtaaagatcaaggatgtaataatttatgtgtgcttactgcttagctcaaagtcatttatggattcttttgctcaaaagtccaggtggctgaccattgttagttcattgatgttgattcgtgagatgtattatgtacatattgtcaataaagacccaaatcttcattgct

SEQ ID NO: 332 - DNA, 516 bp, Gossypium hirsutum
  Clone ID: GOSHI-09MAY01-C75353_1
gtctcaaccccttcttcctcgcaaagcagtaatggcgattccctttacggtttatcttctttgcctattcaatctcctggcatttgggacgttattttcttcagccaccctttgtgcagtccaaaaccattgcagtttcaccatatggcccgctgcgctctccggcaatggtgcttcacttggtaatggtggttttgaattgtcatctggttcatcagctcaattccaggctccacctggttggtctggccgcttctggggtcgaactggctgcaaattcgacaactccggctccggcaagtgcataaccggtgactgcgggggcatactaaattgcacctttcggtggtgtgccacccgtcaccctggtagagttcaccattgctggtggctctactgataataaagacttttatgatgttagtcttgtggatggttacaacgttgccttaggagtcaaggcagtaggtggttcaagggattgccaaaatgcagttgtgtcacggatcttaatgc

SEQ ID NO: 333 - DNA, 507 bp, Gossypium hirsutum
  Clone ID: GOSHI-09MAY01-C75223_1
ttttctttttcgcccacgcgtccgcccccgcctccgcggagctcttgttgtcaacgcctgatggcgatggcggctcgactggaaatcgttgttctaagactagaaaacttcctccaggtccaccaaggtggcctatagttggcaatcttcttcaattaagctcactcccacatagggacttagcttccttatgtgacaaatacggtccactagtgtacctccggctcggtaaggtagatgccatcaccacgaatgacccagatatcatacgtgaaatacttcttcgccaagacgatgtctttgcttctaggccacgaaccctagctgccgtccaccttgcctatgggtgtggtgtgtgttgccttggcttcccttaggcccgcattgcgaacctatgagaagcaatatgtttggagcatttactaaccacaaaaagcattgaatcattcgcgaaacaccgagccgatgaaactcaacaattggtgcgagatgtatcggcccagccga

SEQ ID NO: 334 - DNA, 621 bp, Gossypium hirsutum
  Clone ID: GOSHI-09MAY01-C76843_1
gtttctagttcagctctatttttttttttcgtttttctgtaatctcgtgataccttacaaaaccacactgttctccttccgatttttcattttttcttttatgggttctcaccggaaaatcgtacttgggtctcaccggccgccgagaaaaacaaagcaaatatagagtgaaacccgactatttttcctcatttctttcttgtgttccattttttcaagtgaaatcccaaaatggttgtaaattttagctttgtttttttagtttcggttctgatattgtgtttgggagtgacctcagagccagttcaagacaagcaagctctccttgcgttcctttcaaagaccaaacactcgaaccggatccaatggaactcatcaacttcagcctgcaattgggtcggcgtccaatgcgatgcgaaccgctcttttgtttatactcttaggctcccagctgtgggtctcgttggctcgattccgcctaacaccatcggtcggttaaaccaactccgagttttgagtctccgagctaacggtttattcggtgagatccctgccgacttctccaatttgactctcctccgtagcctttatttgcaagataacgcctttacaggcccgttc

SEQ ID NO: 335 - DNA, 282 bp, Gossypium hirsutum
  Clone ID: GOSHI-09MAY01-C76813_1
cggacgcgtgggcggacgcgtgggcggacgcgtgggtttggaaattcagaaaactggtgtaaaatagaacataacttagcagtttctttctcattgttgttgctcactgatttttctcatgtattttttagctattttagtattgttaactgagttgataatttttaagagtttattgatcatgaaatcacgtgtaatataattacttaatccgaggttagggttgttgaattttttatatttaaacattattttaattcaatgaaatagatttgcatttgc

SEQ ID NO: 336 - DNA, 1140 bp, Gossypium hirsutum
  Clone ID: GOSHI-09MAY01-C76653_1
cttaccggttatgcgtttctaaagcacagcatgttaaagtatatgaacttaagagaggatatttctgggctaagttcactaattatggtgcaactatgctctctgttattctccctgataaaactgggaaattggatgatgttgttttttgttatgacgtgggtaatgattacaagaatgatacaacctattttggagccattgtaggccgagtggctaatagaattggaggggctaagtttattttaaaatggtgtcacttataaaaccgatgctaatgatggaaaaaacacccttcatggtggaagcaagggattttctgatgttatatggactgtgaaaagttataaaaaacatagccatgtaacttttagctacgaaagttttgacggtgaagaaggttttcccggaaatctttcagtttcagtgacatatatgttgcttcataagaacaaactagctgtgaaaatgatggccaagccactaaacaaacccaccccagtgaatttagccttacacacctattggaacctcggtggccacaacagtggcgacatcatgtctcacacacttaagctatttggctctaagataacaccggtggactctgaactaatcccaacgggcgaaatcgttccagttcgaaaaaccccttatgatttccgccggcctcgcgagatcggcagcaagttcgaccaattaccccacggatacgacataaactacgtgctccataaatcgaggcggtcgagacacttgaggaaagttgctgtggttgtagaaagcaaatgtggaaggaaaatggagctatggaccaatatgccaggggtccagttttatacaagcaatatgttgaagaatgagaagggcaaaaatggaactgtgtatggaaaacatgcagggttttgccttgagactcaaggattccctgatgcagtgaatcacccaaattttccatctcagattgttaagcctcgagggatatataagcattttatggtttataggttcacagctcattaagagtatgaggattaaggtttaggtttattaattgattttatagtatgtttaaatttgtttatttgtttattattattttagagcagttgcgaataaaaaatattttttacattgatt

SEQ ID NO: 337 - DNA, 1035 bp, Gossypium hirsutum
  Clone ID: GOSHI-09MAY01-C76613_1
ttccagtaaattccgacgccccggctaccctccttcattttttttctcaaccttcacctccggcaccgatccacctctagtccgacaccaccgatcaacctccggtcctccacggctccacccatttcccccatttcccgtttcccttcttccacaaatccctaatcccttgcccgactgccctccttcctttttttctcaaccttcacctccggcaccaatccacctccggtccggaaccgatccacctccggtcctccacggctccacccatttccagaattagagatccggtttatctgaaactccaaccaaggtttcaccagcaacaccaagagtggctactaaactaggcagggcactggtcaaaacagagccgggttcaccctctcccatgcaaggtcctcgccattaggttgatcgatccccgcgattgtctcttaactcaaagttgaccattgattggagatcactaaaggctgctttggcgtctgaaatggtttcgatatctagaaatcgtaaacacggggttggtaagggatgggaacggcaggctaaattgaacttggtcgaggaggatttaatgatagcaaaggagcaaatgtcattgatccagaaagaaaaggcggaagcaattgatgaactgaaagaagcacagaaagcagctgaagaagcgaacaaaaagcttggagaggctttggttgcacaaaagcgggctgaagagagcttgaagattgagaaattcaggacagttgagttggagcaggcaggaattgaagatgctaaaaaaaaaggacatgaagactttctttcctttcttctttccatgagagttgagggaatatgaaagaccaaagaagtaggaagagttggaacttccaacttggaagagagggggttttctaaagtttattatcgagaaaactagtgttttaatcctgtaagaataaactcataattaattaaatagttagtgaattctaatctaatgtaaaaaataagtaatcttattttattttattgttcattatatac

SEQ ID NO: 338 - DNA, 605 bp, Gossypium hirsutum
  Clone ID: GOSHI-09MAY01-C76143_1
cgtagaaatacttgaaaatttcagaggcaacgatgatgctctataatcttctcgacggcgtcaaagaaattctgaagattcaaaagttccgaagaattgtttcatacactggattctattgctttgttgctgttttgagctacgcttatacaaccaacccaactagagctgggtattcgagggctgatcaattctatgcttcttatcctgctggaaccgagcttttaactgaccctgctaagttatataaagcggcattaggcaattgctttgaatcagaggaatggggtccgattgacttctgtatcatggctaaacccttcgatcgtcaggggaaatccccatatgcctatcattcgcaatacatggcccccctcctttctcatggtcaactaagatggaagtggctagaaggcttttaagtacgagataggatattccctgctagatgagcagaggaaattccctgctagatgagcagaagcgtattagtcccccccaagtgaaatggtccgaactatatttagcctttaagcccataatttgccctatatagcattgactttaatgttttctgatacgtgaatgtctctttctctcctcgt

SEQ ID NO: 339 - DNA, 497 bp, Gossypium hirsutum
  Clone ID: GOSHI-09MAY01-C76333_1
ctctctcgttgttttctgtataataataagattgagaagccgattaaaagacgttttgtgagattagagaatgagtagtgtagttaggaatcaaggaagctgcgttgccatccgctctctctctccttcctcttccattaaccgttgctctcacgcctctgcttcttcagatggtgcgacgtgtggaaggccagcttggattggtaagcgcctaacttgtgtttgtttcaagcgaaagggagtttatgaagggatctgctttaacatcacacccaaacaggaggaaaggttgaataggttgaggcaccgtatggaggggtacttcgatggttcccagccctgatcaccaggaagcctctaagagcaactatggtctgctacatacgctggaaaggaactccatggcttgatatccgatcagtggaaagaaatgggatggcagggaagggatccatctactgatttcagaggtgctggattcatttcattggagaacc

SEQ ID NO: 340 - DNA, 586 bp, Gossypium hirsutum
  unsure (1)..(586): unsure at all n locations
  Clone ID: LIB3825-030-Q6-K6-H12
gctnctgngccgtttaaaancgttttgccgagattagnagaatgagtagtgtagttaggaatcaaggaagctgcgttgccatccgctctctctctccttcctcttccattaaccgttgctctcacgcctctgcttcttcagatggtgcaacgtgtggaaggccagcttggattggtaagcgcctaactggggtttgtttcaagcgaaagggagtttatgaagggatctactttaacatcacacccaaacaggcaagtaccatgataatttttactcatcacctattttatcccgacattttttttaaagaacctctgcgttttcaacatattcgaatatgagtatagatccagactacgattttaaattcttcatataacgtaccttagatggttacattcacctctgagtttgggtaacatagttcatgctaatctagaacaaaaaaataagtttcaaaggctacgttgccattttttctttcttttctgttaggttcaataccgtagaactgaatacattacatgtttaaaccgattgagaaagaagcaatatctatacatgtattatattaagctaatttttc

SEQ ID NO: 341 - DNA, 601 bp, Gossypium hirsutum
  Clone ID: GOSHI-09MAY01-C76323_1
ggtcattattgcctttggttttcaatccagccatcatacagaagtaactaaatgagctttctcctgagaatgtcagaatcttctgggagtcaaagaaatttgagggactgactgacaaggttgagccatggtatggtactgcatattccattgagaaagttagctcctcaacaattcaggcatggatgtcctcagctcctaatgagaacttgcatctacctgcacctaatgtcttcataccaaaagacttatctattaagaatgcacaagaggaggtcaagtttcctgttttattgagaaagtcatcctattccaaattatggtacaagccagatacagtgttctctactccaaaggcatatgttaagatagacttcaactgtccccatgctggaaactctcccgaaactgaggttcttgcagatctttttgcacagtgattggtggattacttgaatgaatatgcttattatgctcgggttgctggtcttctttatggcataagccacacagatagtggtttcgaggtgacgttggttggttataatcataaactgaagatcttgctggaaactataatcgacaaaattgttaaatttga

SEQ ID NO: 342 - DNA, 501 bp, Gossypium hirsutum
  Clone ID: GOSHI-09MAY01-C76293_1
ctcaacacgaaattctgtcactacaacaactacaacctatatcagccacgtcatttctgcaagagctgacgtcattactggacaaaaggcggcatcctccgtaacgatcccgtcggcggtggctgccgcaaagccaagcgcaccacaaccaaagcttcgtcccaaaccaccgcagtcgccgcctccgcactgccgcctccggagcaacaacacggtgatcaacgtaaagcgaattctcattctagtagcgagagttcgagtcttactgccactaactctaacgttgcagtgccaaatcaaaacaactacagttctgccgctggcacggcggaggcgcgcacctctcattctaacttgataaatgtgagtgaaccgaagtcttacggaaaccctaataatttagggttagagccaggattgctagaaccaggatcagactgcgggatatttccggagattgggagtttaacgagcttgattacatcatcaaacaacgaaaac

SEQ ID NO: 343 - DNA, 1321 bp, Gossypium hirsutum
  Clone ID: GOSHI-09MAY01-C76203_1
ggcaagtccaggtagtcttcagagcgggctgtcgcgccaactctttgacaagtggtgttctgagaagaaaaattcttgtgttattcctggttatgtcgttgaagggactcctgcaaaaacgattattaatgaaccgaaggaagtgactctcatgaatggtctcatggctcctttgaacatgcaggttcattacatttcattctcggcccatgcagactatgcacaaacgagtacattcttgaaagagctcatgcctcccaacataattcttgttcacggagaagcaaacgagatgggaaggcttaaacagaagcttatcactgagttcactgatggcaacaccaaaatcattacccctaagaattgtcagtctgttgagatgtattttagctccgagaaaatggctaaaacaatcggaaggttggctgaaaagaccccagacgtaggtgaaactgttagtggtgttctggtaaagaaaggtttcacatatcagataatggctcccgatgatctccacatcttctcacagctttcaaccgcaaacatcactcagaggatcactatcccattcactggcgcctttggtgtgataaagcatcgactcgagcagatatacgagagtgtggaatcttcaacagatgaagagtctggggttccaacattgcgagtgcatgatagtgtgactgtgaagcaggattcagataggcacatctcattgcattggacatcggatcccataagtgacatggtgtcggattccatcgtggcattggttctgaacatcagccgggagatccctaaggtagtagtggaatctgaggccataaaaacggaagaagaaaacgggaagaaggcggaaaaggttattcatgcactcctggtttcactgtttggggatgtgaaattaggagaaaatggaaagcttatggtaagtgttgatgggaatgtggctcttcttgataaacagagtggggatgttgagagtgaaaatgaaggtctaaaggagagagtaaaaacagcttttcgacgaattcaaagtgcagtccccccaatccctctctcatcatcatagttccttttccccctgttttacttattcttcttttaaatgtgctcgactttgaggatgaattttggatttgccaattgcatgatgaagttatgttggttgcttattaccaagcggtaattccccgtttgtacagcttagcagttagcactgaagcatgtcgtcatcatcttttactctaatgttttgatattggtaagattcattgatttctgccattaatgtgaaacaaagggtaaatttattacaagt

SEQ ID NO: 344 - DNA, 914 bp, Gossypium hirsutum
  Clone ID: GOSHI-09MAY01-C77983_1
ctgtatttcagctgttattaacattacaccataaaaatctttctttcaattcgggttctgagttgggttcgggttatatccaggaaacatgtcaatggggccaggggatcaaagcatcaaaggtataccaactcatggtggacgctatgttcagtacaacgtttatggtaacctcttcgaagttccctcaacctacgctgcgccgccgcgccccatcggccctgcggcttatggtattgtctgtgctgctgggaattcagagacgcgggaggaggttgctatcaagaaaatcggtaatgcatttgacaataggattgacgccaaaaggacattgcgagagatcaagcttctttgtcacatggatcatgagaatgtgattgccatcaaagacatcatacggcctccgctgagggagaactttaatgatgtctacattgtttatgaactgatggacactgatcttcatcaaatcatacgatctgaccaacaattgacagatgatcattgtcggtactttctatatcagattttacgagggctcaagtatgtacattcagcaaatgtattgcatcgtgatttaaagcccagcaatttgcttctgaatgctaattgcgaccttaaaattggggattttgggcttgcaaggacgacatccgaaactgattttatgacagaatatgtagtcactcgttggtatcgagcgccagaattacttctaaattgttctgagtacactgctgcaattgatatttggtcggtaggttgcatacttggtgaaatgatgaccagcaacccctcttccctggaagagactatgtgcatcagttgaggcttatcacagagcttataggttcacctgatgattccaccttgggttccttcgaagtgacaatgccagaagatatgttagacac

SEQ ID NO: 345 - DNA, 578 bp, Gossypium hirsutum
  Clone ID: GOSHI-09MAY01-C77873_1
cccacgcgtccgtccaaaccccaatcagttcctttcccttttatctctcgtatacaatgctcggagctcaactttgctaccggacattctccactttctgggttttctcccataaatcaaatgctactacttatcccaccatccctgcattttctttcccgtcgattcgttcttcttcaatccgtttacatttcccggcgaaactccggccggtttcttgccactcgatccgtagtggtagcttcgatccccaattcaacgaagacgatgataaagatcttcagttcctggaagcttctcttctcgtttcagaaactgtttcgcactatcggatgttaaggcaaggaattacagaagaaattaaatggcaatcatcgaggagagaacagcatcctatgtcgagggctaaaattgcttctattggacaatcttttcttagtcgtttccctactccaactatttttctcaagatttcttgtgatggggatttcttgttacccattattgtaggggaatttgctggtgaaaaacttatagcttccttttggggagatgataatggggaatgtccagatcag

SEQ ID NO: 346 - DNA, 901 bp, Gossypium hirsutum
  Clone ID: GOSHI-09MAY01-C77863_1
ctccactgcctgcattaggggtcccatttgacattgaagaagtaagcggccctgttattcagtcaccaattcgctctgaggacgatttgaaggcattgcatccaattgacttggaaatgctacactttgttggagaatcacttaagattttgcgccaggaggttggaggtcatgcagcggtactaggttttgttggagcaccttggacgatcgccacatatatagtagagggaggtacaacccgaacttatacaaccataaagagtatgtgccatacagcaccgaatttattgaggactcttctttctcatttaacaaaggcaccctccgtccacattatttaccaagtggagtctggagcacattgcatacaaatatttgattcttggggtgggcaactaccacctgacatgtgggagcaatggtcaaagccttacataactgagattgtgagtgtagtacgaaataaatgccctaaaacacctcttgttctctacattaacggtaacggtggcctccttgaacgcatgaaaggaactggggttgatgtgattggacttgactggacagtggatatggctgatgcaaggaagcgtttgggtagcgatttcagtgtgcagggaaatgtcgaccctgcttacttgttttctccactttctgcagtgacaaaagaaattcaaagggtcgttaagtgtgcaggaccatgcggtcacattcttaacttgggtcatggagttctagttgggacacctgaagaagctgttgcacatttctttgacgtctcaaaaagcttgaactatgacggttcatcccaaaatcattcgatggaggaatctaaattgttagtttgagaacattatggttaagcaaaatcctttgatatttttctatgaattgacta

SEQ ID NO: 347 - DNA, 810 bp, Gossypium hirsutum
  Clone ID: GOSHI-09MAY01-C77563_1
cccacgcgtccgcccacgcgtccgcccacgcgtccgcttgtttgtttttgggggatttacagacgctcagaatctttatgacgatctctacatgcttgatgttgatactggcatttggaccaaggtgataactatgggtgatggcccttctgctcgattttctgttgctggggattgtttggatcccctgaagagcggtgttcttgtgtttattggtggctgcaataagacccttggggcattggatgacatgtactacttgcacacaggacttattgtacgagatgaaaggaagctagagaagttatcgttgagaaagcagctaaagcttaagtgtcaagaacaaaatcttagcaatcttgcacaagataaagctcttgttagaattgaagtcagcaatgacgtgaaccaacccattcctttatctagttatggccaaccaagaagagaaaattttccattaaaccaagtcttgcatcaaggaaagaagacatttcgagctaaggttactgagagcttcccacatggatatactattgagactattatagatgggaagccgcttagaggaatactttttgcaaacacacctagctctgtacatgtacacaatcataatcccagcagaaaaaggacttctgtggaagttgggggtactgtactaaacggtgattgcgacagtaaatcaagaagtgtgaggcaggattctggagatcataaacaagctgatgttcatgagaaggattatttattgcatgatacagaagttcctgctccaagtttgagggatccagcacagtctgatctatt

SEQ ID NO: 348 - DNA, 638 bp, Gossypium hirsutum
  Clone ID: GOSHI-09MAY01-C77483_1
cccacgcgtccgtgcatattatgcgaacacacacacatattcatgtctctaaaacaagccatggatttttcttcgatacaaaccatggaaccattgcctatggcccttcttttcgttatacctttccttctcttattacgcctcatctctcggctccgtcgaaaaccatttcctccaggacccaaagggttgccaattatcggcaacatgatgatgatggaccagttaactcaccgtggactcgccaagctcgctcaccaatacggcggcatatttcacctcaagatggggttcctacacatggtggccatttcaaaccccgagatggctcgccaggtccttcaggttcaggacaatatattctccaacaggccagccaccatagccattagttacctgacgtacgatagagccgatatggctttcgctcattacgggccgttctggaggcagatgaggaagctcagcgtcatgaagcttttcagtaggaaaagagccgagtcatgggagtcgatacgggacgaagtggactcgcttgtgaaagctgttgcagccaacacggggaaagccattaatatgggtgagttgatatttaaccttacgaagaacatcatttacagggcagcttttggttctat

SEQ ID NO: 349 - DNA, 674 bp, Gossypium hirsutum
  Clone ID: GOSHI-09MAY01-C77743_1
agtttgtttaaatgttgtttctctgatctattaacttttgccttctttgttgagttcaggtgtggaattagcattgtccttggagaagctgacaaacgagaagcttttgtgcctgcacaatgtaacactaattgtttatagccatacgccatgggtgtagtagatgagatgtgtgcgtctacaactaatctaatcgtcttaatttaacaggtcacggtgcaaaacaatgatgctcagatggccgatttcatcgaaagcgaatttttagctgagcaggtgagctcactttcattcttagtatccaaaaaagaaatctttcaaacacccacaatttctaattatctcaagttttcaggttgaagccattaagaagatatcagattatgtttctcaattaaggcgggttggaaaaggacatggtaagctttgcaagctatatgtatcatttgttttcataaaatcattgggttgataatgtttcagttactttgtaataaccgagtgcaattggcttgtaggcgtatggcacttcgatcaaatgctactccacgaaggggcgtgatgctgcccataatcaccatctaaatgctgcatctttctgttgttttagtgcttcacagatgttctactatatatacatatatgatgagggataggtagtggagaagaataaa

SEQ ID NO: 350 - DNA, 787 bp, Gossypium hirsutum
  Clone ID: GOSHI-09MAY01-C77603_1
tctccgatcatcttccttgtctctcaagctctccacttatataaatgattatgaaagttaggaggcgtttcaagcaggtagaagaagatagtgagggtgaagagggcaagaagaagaacaaccccatttctgcaaacttttgtaagagctcaacagttgttgttgggctgagaatccttacacaaatcccacagggaaaaaaatctgctgctctcgttaagcctccattgaaaattacccttcccacctctactaaccctcatcgtgctcatgagttgcaacctaatcaatattcttgctttctcaaatcatgttatctgtgcaacaagggaacttaagcctagatgaaagaagttttcatgtacaggggtgaccaagggttttgcagcatagagtgcaggggcaggcaaattgttttggatgaaatgagggaacttgaactgtcttctaaacaaatgataccatcttataggcactgtaatgccgtctctggccgacgacacatccgtctcctcaaataggatctccgccggagaaataaaacgcctcatcaaaaccaaaaccattgggcaataatctcattattcatcattaaattgatgattaattggtagtgatttcagcaaaaggtgcacttgagtttcgttattaggaggcttcttttctataaaaacgaagaacaaatttgatcatatataaggagtgtttttttttcttttcctttttcaaattttgagacgcaaccaaagtacaagtgatgccagctggaaacttttttatttattta

SEQ ID NO: 351 - DNA, 735 bp, Gossypium hirsutum
  Clone ID: GOSHI-09MAY01-C77333_1
atggaggtcgcaaccgcagccgcataaagctttgcgctccacgcgcgcatgttataaccgccaacctccgaacgaatcgcaaaccctacccgaaccctaacgtctcctccatcgacttctctccgagtttctctctccactaacttcctctctccctttcccaccgttggcagcgtctccggagatttctccgggttgaagctacgacccgactctctctacccggcttttctctgccggtccaagcccaaacgaggagttgccaccgtggttattccgttttcgaggggaagtgcatgggagcaacctccaccagacttagcatcgtttttgtacaagaatcggatagtttacttgggaatgtcgcttgttccttctgttacagagtggatactggctggatttctttaccttcaatatgaatatgagcagaagcctatttacttgtacataaactccactggaacaaccaaggtggcgagaagttgggttatgactaaactataggctgcatagattgaccataaatttactcattaaagctgactttacaaattttgctgttggatttgcttccaaatttgggctaaacacaactgcttgtttcttgtacgtattacactcaaaggttaaactctatgccaaacatatgggaaaatcaactgagcagattgaagaagatataaggcgcccatatattttaagcccagtgaagccagtgaatatggcatcata

SEQ ID NO: 352 - DNA, 670 bp, Gossypium hirsutum
  Clone ID: GOSHI-09MAY01-C77293_1
ggctgcgaaaagtgatcccttcacattttctttctagctactttctacaggttaagcgattagtttacactaaagcatgggatttttagatgaagatgggttgatttcaaaaactaggtccattgttttatccctctcaaatatcatttcaagatcacctatgttatctcccatgcaagtccatgaatgtcaatgtactgcccccatctataaacagtatctccacctaccaggtctcaaaaccctaatatatgaatataaaacccttcaattacagacaccaactctcatcatccattcctacaccatcccccagtcaccatcgcctccatcgttagattttttgtccttcagaactcactctgcatcctactctccttggtcctctgggatggacgatatgctggggactgaaagtggagtttacatgatccatagtgcgttgaaaatgataacgatagatcataaagccaaaggttctagtaaacaaggtaataagaggaagaaagggcgtccaagggtgggagaatatccacccccaattccattactagcaagaacggggaatttgccaagccacatgccttggattttagccagatattacagcaacgggaggctggttcttaaagaagagaaagtgaaacatcacgaatattttgaagcctac

SEQ ID NO: 353 - DNA, 454 bp, Gossypium hirsutum
  Clone ID: LIB3584-002-P1-K1-F4
aaataaatttgtgtaagctgcgaagaaagtgatcacttcagcattctttctacaggttaagggatgagtttacactgaagcatgggatttttagatgaagatgggttgatttcaaaaactaggtccatggttttatccctctcaaatatcatttcaaggtcacctacgttatctcccatgcaagtccatgagtgtcaatgtactgcctccatccataaacagtatctccacctaccaggtctcaaaaccctaatatatgaatataaaagccttcaattactgacaccaactctcatcatccattcctacaccatccctcagtcaccatcgcctccatcgttagattttatgtccttcagaactcactctgcatcctactcttcttggtcctatgggatggacgatatgctggggactgaaagtggagtttacatgatccatagtgcgttgaaaa

SEQ ID NO: 354 - DNA, 547 bp, Gossypium hirsutum
  Clone ID: GOSHI-09MAY01-C70963_1
cccacgcgtccgctaaaatctatcgtatttctaaaacacatttcctcttctttgcatctatagatgttttaatgagagtatatgggctgtacctttccataactgtatataatcctattgatgcgccatactagatttctcctaaatctgaatttatctgagaggctgtaatgacaatcttttttgtagtgcatctctggactcaagactgaaatggcccttttctaccgattcaaaaaacttctttggtcattggccatggtgggtttaacctctattggtacctcttcgatccaattgaacgggctagtctgattgtaccctcgagttgcaagggcgtgcgctgcttcatttgtctttcgaggggttatatcaaacgataaagcatcaccttctacaaccaaatcttgaaagcccatttcttcctcagatatgatggcttgaagacacgctttcgcttctatagtggtcggatcccctgttcttcgtagagggtaagtacatgctcccattacaagcccttcatggtttaatataatgattcccg

SEQ ID NO: 355 - DNA, 839 bp, Gossypium hirsutum
  Clone ID: GOSHI-09MAY01-C70833_1
aaaagggggtcgacgccaagggagaaaaagcatccaaactataaggaaatagatgatgacaatggggaatactctgaagcaagttctgatgagagaaaggttattctgtacatgatgaagatggagaaactggagaatttgaagatgatgaatttagtggtgctgttggggctccccctctaaataaggaccagtctgaagaagatgccccacttggtgatgatgggtatgaggatgcccaggcttcagaacacattagaaacaaccgcatacttgaagaaggtggttcttcaggatcatcattggacagtcgtaggccaacgcagatggtgtctcctgtttctcctcagaaatttggatctctctccgcattagatgctaggcctggttctgctgcaagaagactgcccgatgatctggaggaaggtgaaattgctggatcgggagattctcacatggaccaccagctatccgaaagttggattcatgatcgcgttgaaggcgaagacgaacaagttgtccaacccaagataaaacgaaagcgcagtattcgggttcgacctcgtcaaactgtggaaagagtagaggagaaatcggccagtgaagagcctcttgtccagcgtggaggttcatctctgttgtctttccagctggaccaaaaataccaatcacaactgaggactgatactgaaagaaaaccaacacgtgagcgcaatgctttcaagcatgatccgaatgattcgtcttccagaagtaggaggaacttaccgcctagacaaatagctaatacatcaaagttgcatgcatcagtgaagccctgtcgaatgaattctatgtct

SEQ ID NO: 356 - DNA, 884 bp, Gossypium hirsutum
  Clone ID: GOSHI-09MAY01-C70493_1
atttttcctgcaaaaccccaaaaggaactagtgctctcaagtttgggtttttaaagaaaaaaagtttggatttttaaagcgaaaccattgttatatgagagggattagtgtttgagatttgggtttttttattagtcggaaatgttaagatttgggacattttaaattttttttttctagtgaaccccttcaaggatatttttgtagatcgaagaagcagaggtgaagttttcaagtgctcgaaagagagtaaagtttcgaatttttctttatcaagatgaagtttatgaaactgggatccaagcctgattcatttcagactgatggtgatcatatcaggtatgttgcaaccgagttggcaactgacatagtcgttaatgttggggatgtgaaattctactgtcataagtttccattgttatcgaaaagtgcacgtttgcaaaagctggtcgcgacgtcgaatgacgagaacggtgatgaactacacattcaagacataccgggcggacctggagctttcgaaatatgtgctaagttctgttacggcatgacagtcacactcaacgcgtacaatgttgttgctgctcgatgtgctgcggagtaccttgagatgtacgaaactgttgagaaaggaaaccttatctataaaatcgacgttttcctcaattcgagtatattccggagctggaaagattccatcactgttcttcaatcaacaaaatctctactcccgtggtccgaggaattaaaggtggttagccgcagcctcgattctatagcttccaaggcttcaattgatacttccatggtggaatggtcatacacttataataggaaaaagctcccgtcggaaaatggaaacagtcgcaatggaatggtgtaag

SEQ ID NO: 357 - DNA, 726 bp, Gossypium hirsutum
  Clone ID: GOSHI-09MAY01-C70703_1
ctgaaactgagatagttattactaagacacagatgcttaccctgaaatgtgccgcgtgtgggtttgtttctgatgttgacatgagagataagcttacaactttcattcttaaaaacccacctgaggcggggacgtcttcaaaagacacgacggcaatgacgagggctgagaaggaaagactcacggagggtgaggccgctgatgaagagctcaagaagattaacaaagaggcaaaaaagaaaggttcctctaccactactacttcaaaggctactgctgccaaaggtgcagtaaccaagaagaaaagcaaacattctgatgaggatcactccccaactcacagccaggctgatgagaacgatagaggtggatgatgactgatgatgctcatgcgcacgggccatcgggttctgcactggaggctgctcaacagcgtatacaagagcagttgagtgctgttacagctgatatggtaatgctttctactgaagaagaaaagaagtcactgaagaagtcgccagagcgtgaggttaaggcacaagagaatggtggcactgcccatgagaaacttgttgatgagataaagaaatacctcaagaaggggtcatctgcagctcagcttaaatccttcctgggttcactctctggaacgtcccaagaaatcatggacgccctttttactgcactctttcataatggtgggaaggggtttgcgggagaagtaac

SEQ ID NO: 358 - DNA, 811 bp, Gossypium hirsutum
  Clone ID: GOSHI-09MAY01-C70183_1
caaactcaataacagatattttttggtatcgaacggttcaatggctgattcattgagtttgcctatagcctccattgctgccaattatgatcactcttccttgctttctcgaaactccgctttctcttcacgtttactgccttctaagtgcttctcttccggtaagaacaagttgaatttgtcgtctctgggtcaatactccttccactcgctccaccaccgagtcgccccgattcgtgctctcgattcagacgttcctcacccgcttcacaagggatcagtagattttaagagtaaaaggagctatgagcaatgggattcattgacatcaacgttttcaggagctgcaaatataccatttttattgcttcaattgcctcagatcatcctcaacgcacgcaatcttctggcaggaaataagactgcccttttggcagtaccatggctgggaatgttgactggtttacttggaaacctttcattgctttcttactttgccaagaaaaaggaaaaggaggctgctgtggtgcaaacactaggagtgctatcaacatatgtggtgattagtcagcttgcgatggcagaagctatgcctctccctcactttatggccacttcggttgttgtgggttctggactcattttaaatttgttgaattactacaatatacttaacagaagaatctggcaaatttgggaagattttattactggttggtggacttttctgtgcttccccagataattgtggtccacatttgtcccatacatacccaatagcatcttgccgggggcaatagcatttattcta

SEQ ID NO: 359 - DNA, 742 bp, Gossypium hirsutum
  Clone ID: GOSHI-09MAY01-C70023_2
cccacgcgtgcggttgctgcgaggcaagtaataagaaaaaggtcttgtctgggaccgagctcagagttcagattccaccaatactcccaccttccttagtctctccaactacttccccccctccgcccgcgccctccgccgggaattcacatttgacacctgcatttgcctctcccaattacggtatccatatgaaggattctcctcgggtcttcaatggatgcctgcccgttagggaaatggagatgtctgaggattatacatgcgtcatatctcacggtcctaatcccagaaccacccatatatttgacaactgcgttgtggagaactactgcagtgtattggataagaagcccaaaccagaaccagagaatttcctcagcttttgtcacacatgcaagaagaatcttcaacagaaaattgacatttacatttacagaggtgagaaagctttttgcagtcaagagtgccgacagcaagaaatgctcctggatggagacgagaattgagaatttcattactggctgaataaattattttggatttgcaaatcattgattccataaaaccaaaaatattcccagttctttattattttttttatcgtttttctttttttccctctccactgcagataagagataagagaggatgagatgatgtagagttaattagattaattctgtttttgagtaaattattcataatgattggcaatgggatttttaacctacatttttcc

SEQ ID NO: 360 - DNA, 1160 bp, Gossypium hirsutum
  Clone ID: GOSHI-09MAY01-C70023_1
aggctacagagatttagaaagcatttcaatttcccagagtatgcgtttctgaatcttgaaaaaataaaaaactataattaaaaaaaagaaaaaatgctttggtgtttttctttttctttttcgtgattagctcaagcaggccagcaattcatggtggtgtgagtgatattaatcatttccagttattagaaatttggcggggtctgatcctgatatccatctaataaaaagaggataggtaggtatgctgaggaataggtccagagcagtgaccagcaagcaaactttaatggctgatcacagctctcaagcatcccctgcccagaattgcactaaaccaaacccatctttcttcgattctccacgatttaaagctttcacttcaaaagcctttcccgacactgaatctctcaagagccctacttcgatccttgacaacaaacccttctttccttttggtaacccctttggcttggacaggaaacatatccaaatcctcaaaacccttctcgcctaataacacacacacctcacctgcaaactcagaaccaaaaggtattgctcttgctatagttgatacattccttaacaataaccaaactgaagataagagttgctgcgaggcaagtaataagaaaaaggtcttgtttgggaccgagctcagagttcagattccaccaatactcccaccttccttagtctctccaactacttctcccactgattttggaatcaagaccaggaattcacatttgacacctgcatttgcctctcccaattacggtatccatatgaaggattctcctcgggtcttcaatggatgcctgcccgttagggaaatggagatgtctgaggattatacatgcgtcatatctcacggtcctaatcccagaaccacccatatatttgacaactgcgttgtggagaactactgcagtgtattggataagaagcccaaaccagaaccagagaatttcctcagcttttgtcacacatgcaagaagaatcttcaacagaaaattgacatttacatttacaggttcagtttattttttgcctgataaaattttgattctattaggttggaagtcacttaaaatgcataatttgatttatatgcagaggtgagaaagctttttgcagtcaagagtgccgacagc

SEQ ID NO: 361 - DNA, 550 bp, Gossypium hirsutum
  unsure (1)..(550): unsure at all n locations
  Clone ID: LIB3543-030-Q1-K6-F11
gggggcgacaaaaaaacagattccaccaatactcccaccttccttagtctctccactacttctcccactgattttggaatcaagaccaggaattcacatttgacacctgcttttgcctctcccaattacggtatcgaggggagggggggtttncttctttcaatggatgcctgcccgttagggaaatggagatgtctgaggattatacatgcgtcatatctcacggtcctaatcccagaaccacccatatatttgacaactgcgttgtggagaactactgcagtgtattggataagaagcccaaaccagaaccagagaatttcctcagcttttgtcacacatgcaagaagaatcttcaacagaaaattgacatttacatttacagaggtgagaaagctttttgcagtcaagagtgccgacagcaagaaatgctcctggatggagacgagaattgagaatttcattactggctgaataaattattttggatttgcaaatcattgattccataaaaccaaaaatattccagttctttattattttttttatc

SEQ ID NO: 362 - DNA, 522 bp, Gossypium hirsutum
  Clone ID: GOSHI-09MAY01-C70303_1
cccacgcgtccgaacagatcctaaagcccctttcccctctcattcggccgaactctaatgtcatcgtgcaaacaccgatcctgggtttcatcggcgttaacgcctccacctccacctccgccatggtacttgacccgagttacggcaaaacgagaggacacttcctttggttcgatatccaagtcggaaaacggtctccgaagatcgaaaccgccggtaagtatctctgaaaactctcctttgcttgttttcaacgagaaatattaaaagcaaaataggaataggcagactatgaatcgaaatcaccttctagtattggttgcttttgtattcaatatgcgtttttttgtgcccgtaaaaaagaagaaccccttacaatcaaaaatcaaaaaggctttatagcccaaatcaaaatgaatattaaaaaggacatacaattttcttttttctgtcctatttgctgctgtcgctctcgtttgtttgcaggtacggagaaggccaactggcgtgcggtgctgcgta

SEQ ID NO: 363 - DNA, 552 bp, Gossypium hirsutum
  Clone ID: GOSHI-09MAY01-C70293_2
gggggattgcgtgttgatgcgaccggcggatcaatcaaaaccgcagtacgtgtcgagaatcgagcggatcgaggcggacgcacgtggtggaaacgtgaaggtgcacgtgaggtggtattaccggccggaggagtcgatcggagggaggagacagttccatggttctaaggagcttttcttgtccgatcattacgatgtgcaaagcgccgataccatcgaagcgaagtgtacggtccacagcttcaagagctataccaagcttgacgccgtcggaaacgacgacttcttctgtcgtttcgaatacaattccgccaccggtgctttcaaccccgatcgcgtcgccgtttactgcaaatgcgagatgccttacaatcccgacgaccttatggttcagtgcgaaggttgcagtgactggtttcaccctgcttgtatagaaatgacggcagaggaggcgaaatggctcgatcacttcttttgtgaaacttgtttatccgaagatccgaaaaagttgcagaattcccttgcctcttccgtagacttggatacaaaggt

SEQ ID NO: 364 - DNA, 677 bp, Gossypium hirsutum
  Clone ID: AI055705.1
cctttgtattgcatttctctgaaaataagtagcctttttattttgttcttccatggtgaaagccaaagctccaaggagaactctagactcttatgcagtcaaacacatcaacaaaatcattaaagcgggggattgcgtgttgatgcgaccggcggatcaatcaaaaccgcagtacgtgtcgagaatcgagcggatcgaggcggacgcacgttgtggaaacgtgaaagtgcacgtgaagtggtattaccggccggaagagtcgatcggagggagaagacagttccatggatctaaagagctttttttattcgatcattacgatgtgcaaagagccgataccatctgaaggaaatgtacggtacacagtttcaagaactcttcccagctttagcccttcgaaacgacgactttttttgtggcttgaaaataaattttcaccgggtgttttaaatcccaaagcgttgtcgcttacttgagatgcgacatgaccctttatccgacgaacttatggggcaaacgaaaagtgacgtatgggtgttaactcctgtttaaaaagacggcggagaaggctttaagggggtcaattattttttaaaaaagtctcttaagagggaaaaatgcgaaattttccggcttataaactgttaaagaggggctaaaaaaggtgggggtgaaat

SEQ ID NO: 365 - DNA, 1056 bp, Gossypium hirsutum
  Clone ID: GOSHI-09MAY01-C70283_1
cccacgcgtccggcgggtgattggcactgtccaaattgcacatgcaaattttgtggtaatggcagtgacattgctcaagaggataatttaattgattatgcaattctctcttgcagcctgtgcgagaaaaaataccacaaatcatgcatggaattgacagaggagcatcatattgattccaacagtttagttcttcctttttgtgggcagacatgccgagagctgtttgagcatttacagaagtatctaggggtcaaacatgagctagaagcaggattttcatggtctcttcttcaaagaacaaatgcagattctgatacaattgccaggggacttccacagagggtggaatgcaattctaaactagctgttgcactgaatgtgatggatgaatgctttttgcccattgttgacaggaggagtgggatcaacttaatcaataatgtcctttacaactgtggatcgaatttcaaccggctgaattatagtggcttctacactgctattctggagagaggtgatgaaataatttctgcagcatcaatcaggttccatggaactgagctagcagagatgccgttcattggcacacgtcacatctacaggcatcagggaatgttccgacggcttttctgtgctattgagtcggctctctgttctctcaaggttcacaaactagtcatccctgcaattgctgaacttacacatacatggactgctgttttcggtttcaccgcactagaagaggcagttaagcaagaaatgagggtccgtgaattgtgttgggtctttcctggtatagatatgctgcagaaaggttctattgaagctggaaaactgggggcccctgctgtgacaggtgctaaagtgtactgaaccgaccctgaggtggtaacggatctaacctggtttatcattgggaatgatctcaagatgtgaaggtgggtttgaatcttctagtcgataatgggaactgaggtgctgattcaatcccgatgtcaaagttctacaatgatcttgggaaccttgttctcaatgcttccagagggtaaacag

SEQ ID NO: 366 - DNA, 617 bp, Gossypium hirsutum
  Clone ID: GOSHI-09MAY01-C71953_1
agcagcaattgcaattgcagccgcagcagttgcagaatcagcagcagttacagcagctgcagctgcagcaattacaggaacagcaagaaactaccttgccactacaggctgttgtttcaccgtcacaagcagtctctccatcaacagtcggaatttcacaattgaaccagcaacagcagctggtccagcagcagactgccatgactcctcaagaaatgaatcaaaggactcctatgagtccacgactgagctcaggtgctatccatgcgctgagtgctgctaatccggaggcttgtccagctagccctcagttgagcttccagacccttggctcagttaacagcatcacaaattctcctacggagctaggcgtgagcaaaagcaactctgttggcaatacgtagcatgtttggaccactcttttcttaaaccatagtcgcgcaatatgtatatggtgtagagtgtctttgaagaatgaactgttcaatcaaaaatatagtatctagtaacagttcagtaatgtaaatgattgcccgttatataacaatttgtttaatatcactgtaagcaatggaaatggttttcatagatgaaacaataaatttcatgggtaattt

SEQ ID NO: 367 - DNA, 882 bp, Gossypium hirsutum
  Clone ID: GOSHI-09MAY01-C71903_1
cagagaggtccctcgctctgtttcaccccccccccccttcattttcactcacactttctatctaccatgtcggcaaaggaatgcggccaccatggcaaaggccacaataaattccgccgaaaactcctcttcggcattctgttcttcatcctgattgttctaatcacagtccttctcatttgggcaatccttcgtcccagcaagcccagattcattctccaggacaccaccgtctacggtttcaacgcctccgtccccaatttcctaacttccagtttccaagtcaccgtatcgtctcgaaaccccaatgacagaataggaatatactacgacaggctcgacctctacgccacctacaggaaccaacagatcacaccccggacctcactccctcccacttaccagggtcacaaggatgtcaacgtttggtcgcctttcataaacgggaacatgatacctatctccccggacttttccacgtctttaagttcggaacaggcttccgggtcggtttttcttaccattaagattgatgggcgggtgagatggaaagttggagctttcgtgtccgggagataccatctttacgttagatgtccggcaataattacttttggaagcaaatttaacggtgttattgtcgcacataacgctgttaagtttcagtttgtgactagatgcagcgtcagtgtctgaagtttggacagactgaggattgaggaagaagaaagaagtaaggacgtcaagtactattttgattttttcgatcttaatatctcgtctatcccttcgttttttgttttttgttttttgtttgtaagggaattgtacactttgctatacaataaatagtaaaaaagtagtagaaatttttattttctt

SEQ ID NO: 368 - DNA, 446 bp, Gossypium hirsutum
  Clone ID: LIB3585-003-P1-K1-H7
caacgcgtctacgtatgctttaacggatgcgtgtttcgacccagactcacacgtttgggggtaccatgtcggccaaggaatgcttccaccatggcaaaggccacaataaattccgccgaagactcctcttgggcattctgttgtttatcctgattgttctaatcacagttcttatcatttggtcaatcctacattccaccaagcccagatttattttacaggacaccaccgtctactgtgttaactccttagtccccaatttcctaacttccagtttacaagtaaccgtatcttttcgaaaccccaatgacagaataggaatatactactacaggatcgacctctacttcacctacaggaactaacagatcataccacgtaccttacttccttccacttaccatggtcataatgatgtaaacgtttggtcttcttatataaaccgt

SEQ ID NO: 369 - DNA, 631 bp, Gossypium hirsutum
  Clone ID: GOSHI-09MAY01-C71883_1
ccccgcgtccggataaaattagcctacaccaataacccgtacaccccaaagtgggctttggctttttttcttcgagttttcactctcaaaaacttcaccaaatccaaatggatactgtcaaccccttgcttgtttcatcagcttctggtttgaaaatggatgtgaatggaggtgaaatgaggaagaatcccacactgatttgtgctccattaatggcggattccattgataagatggtgactctcatggctaatgctaaagctacgactgctgatcttgtggaaattagattggatagtctcaagaatttcaacccttttgaagacctcaatgttttaatcaaacaaagccctttgcctacactcttcacttacagaccagtatgggaaggtggccagtatgatggtgatgagaaaaagagattagatgttcttcgattagccatggagttaggggctgattacattgatgttgagcttaaggttgctcatgaattcataaaatccattggtggaaagaagcctgaaaagatcaaagttatagtttcttctcacaattatcagagcactccatctgttgtggagctcggaaaccttgttgtgaaaatacatcaactggagccgatatagtg

SEQ ID NO: 370 - DNA, 647 bp, Gossypium hirsutum
  Clone ID: GOSHI-09MAY01-C71863_1
cccacgcgtccgcggacgcgtgggtcagaaactttttctctcgtcggccaaaaagatgttatacattattggccttggattgggggatgagagggacattactctaaaaggtttagatgcagtgaagaaatgtgagaaggtgtacatcgaggcctatacgtctcttctatccttcggtctttctacggatggcttatccactttggagaaattgtatgggaaaccgattatacttgcggatagagaaatggttgaagaaaaagtagataatattctgttagaggctcgtggatccgatgttgcttgccgtgttgttggtgatcctttcggagccacaacacacactgatcttgttgttcgagcaaagacaatgagggttgatgtcaaggtagtgcataatgcgtccgtgatgaatgcaatcggaatttgtggattgcagctatatcgttatggggagacagtttcgataccattctttaccgaaacatggaggcctgattgcttttaccagaaaattgaatggaaccgcaatcttggattgcacacactctgccttttagatattcgtgtaaaggaaccaacattggaatcattgtgcatgggaagaaagcattatgaaccaccaatgttcatgacgataaacactg

SEQ ID NO: 371 - DNA, 614 bp, Gossypium hirsutum
  Clone ID: GOSHI-09MAY01-C71443_1
cttttccccaaaaattttcctttacctgctgatctgggctgctttatttcctcaccaaatcaagctcagtctgggcttcttgaccatcttccttccggagcaagttcattgtagttcaacatttccctcaccagtgggaacattgttaggggccatgacgggggcattgataggacaagaggcggggagtgggttcgttcgaggggctgcggttggggcaatatctggagcagttttctcgatggaagtcttcgaatcttctctccttctttggcaatccgatgaatccgggatcggatgtttactctacttgattgatgtgattacaagccttctaagtgggagacttgttcgtgaacgaatcggtccggctatgctgagtgcagtccagagtcagatgggtgctgctgagcccgcaacaacattcgcggaggtccacaacatcttccacaccggtagggctaaagggttggccagaacatttgggtgaaaaaatcccgaagatgataatcacaaacggtaacaatgtgaatgcttccggggagaaagtttcatgctcagtttgccttcaggactttcagcttggagaaacagtgaggaacttgccacagtgc

SEQ ID NO: 372 - DNA, 818 bp, Gossypium hirsutum
  Clone ID: GOSHI-09MAY01-C71473_1
ttggtcttcgcacaatttgaatttctcttccggaacaaaatagtaattggaaacatcaaggtcttagagctcaagcaatgagtaccactacacaaggaggctttgctgcctccggccgtattgggaatggaaaaacgagcccgatcaccttcttgtgcttgttcatggcatcttagctagccctagtgattggacatatgcagaggccgagttgaaaaggcggctcggaaggaactttttgatttatgccagttcgtgtaattcgcatactaaaacctttgccggggtcgatggagccgggaagcgtttagcggaagaggttcttcaagttgtaaagaagagggaaagtctgaaacggatttcgtttttagctcattctctcgggggcttatttgcaagatacgcagtcgctgctctttactcggaatgtgactcgagtggtacccagtctaataatgtaaccgattcttcggatggaaatttacaaacttcaaccccttcgacacaaggtatgattgctggactagagccggtcagttttattaccttggcaacgccacatctcggggtccgagggagaaaacagcttccttttctattaggacttccgatattagagaaactcgccccaccgattgctccgtttgttgttggtcgaactggttagcaactgtgtctcaccgatggcaaaccgagcagaccagcactctttttaaggatggcatctgattgtgaagggggaaaatttctatctgcccttggtgcatttcggaatcgcactgtgtatgccaatgtatcttacgatcatatggtccgta

SEQ ID NO: 373 - DNA, 949 bp, Gossypium hirsutum
  Clone ID: GOSHI-09MAY01-C71773_3
ctcatttttcacaccgatgtcgtcccttctgagcgtgggaagtgggattatcatccttggggtgcccacatcgatgaaaatggtaatatattcgctagaggctcccaggatatgaagtgcgtgggcatgcagtatatggaggctgttcgtaggttgaaggcttctgggtttcagccaaaacggtcactttacttgtcgtttgtccctgatgaagagattggtggccatgacggtcttgagaagttggctcaatccgatgttttcaagaatatgaatgttgatattgtgcttgatgaagggttggcttcacccaatgagaattccgccgcgtgcgcggccgcgtgggcgcccgcgtggctggtgataaaggctactggagctcctggacatggggcgaagctttacgacaacagtgcaattgagaaccttttcaagagcattgagagtatcaggaggttcagggcttcgcagcttgatttggtcaaagccggtttgaagggggaaggagaagtcatttcggttaacatggcctttctgaaggctggcacgccttctcccacatttaagcaaaagggttctacgcaagattaccggggaaggccactcataactgctactgacaggtcgaatccatggtgggctttgttggtagaagctatcaagaaagctaatggaaagattgggaagccagagatttttcccgctgctacagattctctttattttcggcaacagggcctgcgagctattggtttttcacctatggctaacactcctgttttgcttcatgaccataatgagttccctactatcttgatgaagctacaggatggggtttggaagtatctgagcttaagaaacaactgcaggaagccaagtctaatggcatcactattagggccttggttgtaataaatccaggcaacccaacaggacagggtattatgga

SEQ ID NO: 374 - DNA, 483 bp, Gossypium hirsutum
  Clone ID: GOSHI-09MAY01-C71773_2
atttcggttaacatggcctttctggaggctggcacgccttctcccacaggttttgttatgaatttgcagccgtctgaagcagaagctggttttgatattcgaataccaccaacagttaatgcagaattcttgtgagaaacggatagctgaggaatgggcacctgcttctcgaaacatgtcatttgagggtattatggagagtgtggaaaaaaggggaggttacatggaggttactgggtttggtgctgatgtgagggagcatatatacaaattagcatctgtgaatgtgtgttctaacatcactggtcaaattcttgctagtcttggaatgagtccacctaaggttatatcttttgccatttaaagccagttatctgtttttattcaaatgacattggatgtatgacataggactaaatagattttgagctttgacaagctgcttataagcatggtttcttttggaggaacacattttggggg

SEQ ID NO: 375 - DNA, 648 bp, Gossypium hirsutum
  Clone ID: GOSHI-09MAY01-C71773_1
ggcacgccttctcccacaggttttgttatgaatttgcagccgtctgaagcagaagctggttttgatattcgaataccaccaacagttaatgcagaattcttggagaaacggatagctgaggaatgggcacctgcttctcgaaacatgtcatttgagtttaagcaaaagggttctacgcaagattaccggggaaggccactcataactgctactgacaggtcgaatccatggtgggctttgttggtacaagctatcaagaaagctaatggaaagattgggaagccagagatttttcccgctgctacagattctctttattttcggcaacagggcctgcgagctattggtttttcacctatggctaacactcctgttttgcttcatgaccataatgagtttctaaaccaagctgagtacttgaaaggaatcgacgtatacgactccattattaaagcatatacatcatatatcccacctgcaaagagatagcctttcgagagacgagttgtacaacggttagcacggttgggtaccttcttcatcgattgataactcttacttcttcttgctgcctcgaagtataccataaagggagtggaagtaatgttatcctaaaaatgtatcaatacagtggaagcagttcatcac

SEQ ID NO: 376 - DNA, 466 bp, Gossypium hirsutum
  Clone ID: LIB3582-053-P1-K1-C5
acagcgagaaggatatacacttggtgtggttttgagtcggtctcgaaagggtattatggagagtgtggaaaaaggggaggttacatggaggttactgggtttggtgctgatgtgagggagcatatatacaaattagcatctgtgaatctgtgttctaacatcactggtcaaattcttggtggggttgtcatgagtccacctaaggttggagacaaatcatacgagtcatacattgctgaaagagatggaatcctctcatctttagcacggcgggcaaagacactggaagatgctttcaacaagttggaaggtataacatgcaacaaggcagaaggtgcaatgtatcttttccccagaattaatctgcctaaaaaggcaatcaaagctgctgaagaagtgaaaacagcaccagatttattctactgccgtcggctcctcaatgaaaccggaatccgttttgttcctg

SEQ ID NO: 377 - DNA, 694 bp, Gossypium hirsutum
  Clone ID: GOSHI-09MAY01-C71713_1
gtattttttcctgtatttgattctgtttgaggtgttttctttctccaaccgagtatcaaaatctactaatgcttttttcgtgcatgtgctccaatgcagtttgtcactatgccttttttttttttgtcattacaatatttgggaggtgaaagggtgatgataggagaatgttcttaacactgctccaagcaagttttggccactatgcttttctttttgctaatttgggttaatttgctaggaactcaatgcaaccttttcaaagcccctcaaagagttgctatcagcagaggctgaggttgatgatgcggctcttatatcaattgacagcaagggaattgacattagggtccgtcaaggtgcacagttcaacgtacagaggttatcatttgaagaagggcagggtgttgagacattggaggaagccaaagtagctttatggaaagtaataaagaaaggccaagtgcaaaatctaaagagatagaagaagctgcaactttctggcccttccggggagcataaaggcaagacgatgcgaatctcagccatcactgaatgtaatactactatagagaaacgttatacaaggtttgttttcctgccgcaagtaatttcttaactagtaattttctgatttctagtgtatcgaatattttcttttatatgtttttctacaaggatcggtttactattt

SEQ ID NO: 378 - DNA, 559 bp, Gossypium hirsutum
  unsure (1)..(559): unsure at all n locations
  Clone ID: LIB3825-022-Q1-N6-A1
aaatagtaaaccgatccttgtagaaaaacatataaaagaaaatttcgatacactagaaatcagaaaattactagttaagaaattacttgcggcaggaaaaacaaaccttgtataacgtttctctatagtagtattacattcactgatggctgagattcgcatggtcttgcctttatgctccccggaaggccagaaagttgcagcttcttctatctccttagatttgcacttagcctttctttattactttccataaagctactttggcttcctccaatgtctctacaccctgcccttcttcaaatgataacctctgtacgttgaactgaaaagaatgtaacatggctacatataaatctgacatgaatcctgaacctcctccgaaacccgagctgtgcaccttgacggaccctaatgtcaattcccttgctgtcaattgatataagagctgcatcgtcaacctcagcctctgctgatagcaactctttgaggggctttgaaaagttacattgagttcctttagattttgttcacctncatcaacagcaatcttatcagg

SEQ ID NO: 379 - DNA, 1211 bp, Gossypium hirsutum
  Clone ID: GOSHI-09MAY01-C71683_1
gctttcgccccgcgtccggctttctttgcgtgggggtcttcaatttcttcccaacttttttgtctcaaagttctgtcaatcaatttctttccatttttctctgcttttgtctgctaatacgagagcaaggcagcaagcagctgcaaattttcaaggtgtgaaggaaagttccagatagcaaagaggaatgatctgatgaccaaatcgtttatgaactatgttgacctcaagaaagaggcaatgaaagatcttgaagctggtccagactatgatctcgaaatgtcttccactacaaacaccatggaccaaaaccttggcctgttccttgaagaagctgagaaagtgaagcaaggaatggcagtaatccgagaactcttgggcaagctccaagaatccaatgaagaaagcaagtcacttcacaaaccagagtccttgaaagctttgcggaacaaaatcaacaacgacattgtcacagtgcaaaagaaagcaaggaccatcaaggctcagcttgaagaaatggaccgtgccaatgcagctaataagcgcctctcggggtacaaagaaggcatccttaaattacaggaccaggattgcagtcaccaatggcttgcgtaacaaactgaaggagctgatgatggattttcaaggtttaaggcaaaaaatgatggctgagtataaggaaactgtggggagaagttattttaccgtgactggagaaaacccagatgaggaaacaatcgagaaaatcatttctgatggcagtggcggtgaggggttcttaacaagggcggttcaagaacatgggcgagggaaggtgttggagacggtagttgagattcaagataggcatgatgctgctaaagagatcgaaaagagcttgctagagttgcaccaagtgtttttggacatggcggtgatggtggaggcacaaggggaacaaatggatgatattgaacaccatgtgatgaatgccagccattatgtgaaagatggttctaaagagctcaataatgcgaaaaggtaccaaaggagtagcaggaaatggatgtgtattgggatcattcttttgttgttgattgttcttgtgattattatcccaattgctactagctttagtagttcttgaattgtatgtttttgcagagttcttttattgttgagattcttgaaattcaatatgaaaagtaatgacagttattgcttattgattt

SEQ ID NO: 380 - DNA, 639 bp, Gossypium hirsutum
  Clone ID: LIB3828-016-Q1-K6-H11
tttccattttcatcttcaatttcttcccacttttttgtctcaaagttctgtcaatcaatttctttccatttttctcttcttttgtctgctcatacgagagcaaggcagcaaacagctgcaaattttcaaggtatggtttgcaaacacccatttcatatcacttcatttttttgtattaaattttgataaaagagaagctaaacccccttttcttggttgatttttaagaaaacccagttcaaaatgttgggaaaatttcttttgaattagaatgaatttgcagtgaattcgatttaaaattgactgcaaagaaaatctatttctcccttgttttgggttcattttgatgaagatgataacccattccatgttttttaccttattgttgggaattcatttttttcctccattgattgattcttaaggtgtgaaggaaagttccagatagcaaagatgaatgatctgatgaccaaatcgtttatgaactatgttgacctcaagaaagaggcaatgaaagatcttgaagctggtccagactatgatctcgaaatgtcttccactacaaacaccatggaccaaaaccttggcctgttccttgaagaagctgagaaagtgaagcaaggaatggcagtaatccga

SEQ ID NO: 381 - DNA, 317 bp, Gossypium hirsutum
  Clone ID: LIB3582-052-P1-K1-B6
cccacgcgtccgcccacagcatacggcgagtggagggtgtacacctcaacaaacacctatgcaagatcttgaacctgctccagactatgatctcgaaatgtgttccactacaaacaccatggaccaaaaccttggcctgttccttgaagaagctgagaaagtgaagcaaggaatggggggggggcgagaactcttgggcaagctccaagaatccaatgaagaaagcaagtcacttcacaaaccggagtccttgaaagcttcgcggaacaaaatcaacaacgacattgtcacaatgcaaaagaaagcaaggaccatca

SEQ ID NO: 382 - DNA, 672 bp, Gossypium hirsutum
  unsure (1)..(672): unsure at all n locations
  Clone ID: LIB3582-056-P1-K1-B5
ctttttatttctttttangggggaagaaagaaagggataactttcccctacatagtttccttttctacaaaactaaaattcttgaaagctcccagttttacaaacagcaccaaacgttcgaagaaagaaacaattggtgattagttgagagaaaatgggtgacaatctatttgaagggttaccacctccatctcatcaccagcaactacaaggaaaagaaaatgaagaagaagaggggaaagaaggcaatcaaattagtttctctttgaagacaagtagtagcagcaataacaaggaagcttctccaaaaccagttcttaaaagtgctcttaagagacctaagcctactgaatctaaccctgaagctgctgtacaagaaaagcgcttgagatttaagatgacaacagatgcctcagagacacaagttattgaggcaatgcagaagattgcgtcacatatcaagaaccccaccaagttttctaaggcttcaaagcttgccatacagttgatacaggctggaagtgtgaagggggggactagtgaacatttttttgctgtattggaggctgcaatgtcatccacaacttcttgtactgatccttcagtacgaggtgattatcattcactgttctcagcagcacaagatgcagctgagtgcctaaacaagagcag

SEQ ID NO: 383 - DNA, 571 bp, Gossypium hirsutum
  Clone ID: LIB3585-064-P1-K2-D3
cccacgcgtccgcccacgcgtccgatcaccagcaactacatggaaaagaaaatgaagaagaagaggggagggaaggcaatcaaattagtttctctttgaagacaagtagtagcagcaataacaaggaagcttctccaaaaccagttcttaaaagtgctcttaagagacctaagcctactgaatctaaccctgaagctgctgtacaagaaaagcgcttgagatttaagatgacaacagatgcctcagagacacaagttattgaggcaatgcagaagattgcgtcacatatcaagaaccccaccaagttttctaaggcttcaaagcttgccatacagttgatacaggctggaagtgtgaagggggggactagtgaacatttttttgctgtattggaggctgcaatgtcatccacaacttcttgtactgatccttcagtacgagtgcctaaacaagaggcagaagaaccaactgactgtatggacatttaaggcggtgatggcaaatgactttctaactgatgacaggcttgtgtttttcaaaacaacttagtaattaaaaagatgcaatttgt

SEQ ID NO: 384 - DNA, 620 bp, Gossypium hirsutum
  Clone ID: GOSHI-09MAY01-C71363_1
tcggacgcgtgggttcgaaagtagttcgtttaaaggtcgatttttactgccctgactgctaactgttgtttctcagatttctctccgtttgttctaatccgcgacttgatctccttctccaaatcttcaaaggtattgaaatggcagaatcaaagacattgagaaagcctattttcaccaaggtggaccaacttcgcccggggactagtggtcatactcttacgatcaaggttgtcaatacaaagatggtatttcagaagggtcgtcctgatggtcctcaagttcgtcaaattcggattgctgaaagcttggtcggagacgagacaggaatgattatctttacagcaagaaatgaacaagttgacttcatgaaagaaggtgctaccctaactcttcgaaatgcaaaaattgacatgtttaaggggtcgatgaggcttgcagtggacaagtggggtcgtgttgaggtcgctgaacccgatagtttcaaggtgaaggaagataacaatctgtctttgattgaatatgagctgattaatattgttgaagaatgacctttgaccaccaacccactccggatggtgttcgcattgcttttgaagaagaaatctgctctggtaaac

SEQ ID NO: 385 - DNA, 953 bp, Gossypium hirsutum
  Clone ID: GOSHI-09MAY01-C72993_1
cgtaaaaaaatggaaggactcggtgtttcaaagttcgaagaggaagacttaattcttaagttggagagtgcttggaggaacgtgtcaaggaaaggtcttcgcaccctacagatacccctcagttcacagccagtttgcagtcgtttgagaacatccggagcaaaaatggggcgggaataggaagtgcagcctcctttagtgatgatgaagacacagcgcaaatattaagctccgccaatagaggccggaaagggtcttcggcagcttctcgatcatcacgtgatgcttctgaacttggtaaaagttccactagaggaaggggtagaggtaggggcagaggctctagtggcttaaagcagacaactcttgatgctactttggggtttcgccgttctcaaagatctacctcggttaaggttcaaagtattgctgatgatgaggagaacgttgactctgcttcaagtgaagaacatgaaattaatgaggttgaaagcagttcggaaaacaaaaatgatgaaattactaaaggtaggggacgcaaaagagctgcaccaaggggaagaggtagaggcactacatctaagcggggaaagaaatctgataactcttcagttcatagtgtgttcatgaacaagcttgatgatgatgacgacgacgacgatgctgaagagattgctcggagatttaataaacctcaacctcgggtaacaaaaagttatggtgctttgagaaggtaagtgttgtcacgatttagtgccccccatcagcatcttggcatcaacctatatatgattctgaggaagagcaactccatgtggcagcagaccttggtcgagaatgtactgatctgatttgtacatttcgtttccgatgcaagaaatttactgtcaacttagtaagagttgtttactgttttgcatataatcaaagctggtaaagacgtttctagtgcg

SEQ ID NO: 386 - DNA, 653 bp, Gossypium hirsutum
  Clone ID: GOSHI-09MAY01-C72443_1
tcaggaactcaactgatcttttccgaagctttgggtttgacacacggccggtgctaattggtcttattatatttcagcatactgtaataccactccaacaccttgtaagctttggtctcaatcttgtaagcagatcatttgaatttcaggctgatgcctttgctaagaagcttgggtatggatctgctttacgtgccggtctagtgaagctacaggaagaaaatctgtcggctatgaatacagatccgtggtactcagcttatcactattctcatcctcctcttgttgaaagattggcggcaattgatgcagctgacaaaaaggaagagtgatagggatgtcataatattaagaactgggtttgaattatttcatttcattgtaatatttttgtttgatgatctgcatttgagttgcatggcgtcctcacgttgtcaaatgtcactagttcaggcacacttattagtcagaaagctagttaaaatggaaggaactaagcagaaaagagggaagaatagactagacaaatgatcggagaaacatcgaatgcaatgaaactttgattaaatatgttccgtccttttactgcactccttttattttgcctctattttcaaggtaaggaaaaaaacccccaaaaataagttttgagt

SEQ ID NO: 387 - DNA, 525 bp, Gossypium hirsutum
  Clone ID: GOSHI-09MAY01-C72633_2
ttgtttgaatgaacagagaagatcacaagaagaccgaccacgattcccacttctccgaatggaagcttctcatttgtcctcatgactggaaaaatgggaaaggaggagcagtgaccagataccggtttgaaaatcttccgaaaagttcaggtccaggaatctatgagcttgcggtgtgtaaactgccgagtagggaccgccgtggcaagcttgaacctgattcggtggtttatgttggggaggctgaaaatataagagcaagactccaacaatatggccgtgatggtactcatctctgtcgaaaaaatggatttggtgaaaaaggatgtcctttgtttgataaaatttttgcaaggggttgctctattatctacagatgggctcgtatgaaaagtaaggcagcagctcaaagaactgaagctcaacttcttgaaaaattcgattatgcatggaataaaggttcttatggtgcacgtcgccacaatgatatccttccgaaactagataaacatgtttccaacaaaa

SEQ ID NO: 388 - DNA, 668 bp, Gossypium hirsutum
  Clone ID: GOSHI-09MAY01-C72633_1
agtagggaccgccatggcaagcttgaacctgatttggtggtttatgttggggcggctgaaaatattagagcaagactccaacaatatggccgtgatggtactcatctctgtagaaaagataaaggatgtcctttgtttgatatttttgcaagaggttgctctattgtctacagatgggttcctagggaaaacaaggcagatgctctgagaaccgaagctcagcttctcggtacttatgattatccatggaataaaggctcgaacggtatacgtcgtcacgatgatatccttcaaaaactagataagcatgcatcaaatcctagggggttaaatcaaaagcaagtaggcatcaaaatcaaagcaagcaagctagcttcggacgacagtgagttcggcaaatacaaaaatggagagaacctcaactttctgcctcaagttttcaacttcagcagatcccggcctcggttagtttcgaatcacggtggctccgacaagaacgaaaccttctcttgtggggtggttttagacgatggttcgatttgtaaaaggccaccggttgacggaagaaaacgatgcgctgaacacaagggaaagaaaactacaggggcttccacgagttcgagtatgaaatcacaaccgcataaagaggattattccgaaatcgagca

SEQ ID NO: 389 - DNA, 254 bp, Gossypium hirsutum
  Clone ID: GOSHI-09MAY01-C72143_1
tttagaaaaaagaatctactgcggctccaaatggcccggccgtcattagccaccaggaggaccctaaccttggctctcaagtccaccagggtggctcagtctcgagccttgcagacattctcgctccccgagcttccggacgactatggcgcactcgagcccgccatcagtggagagatcatgcagctccatcaccagaagcatcaccaaacttacatcactaactataacaaggctttggagcagctccatga

SEQ ID NO: 390 - DNA, 205 bp, Gossypium hirsutum
  Clone ID: LIB3493-030-P1-M1-E5
ctttataaaaaaagaatctactgcttctccaagttcccttcaatcggggccgaccacaaaaccctaaccttggctctcaactccaccaggctggctcagtctcgagccttgcagaccttctcgctccccgatcttacttactactatcgcgcactcaagcccgacatcattgtagagatcatccagctccatcaccagaagcctc

SEQ ID NO: 391 - DNA, 566 bp, Gossypium hirsutum
  Clone ID: GOSHI-09MAY01-C72123_1
gaatgaatgttttgttattaagattaaagttagagttataatatccaatttagaaaatggaaataagtgagaaatcggctgaactaaagaatcaagcgagtcttttatagatagaaaaacaataaatttctccatcacagaagacagaaatggaagacggcgaacagagagagtggggtgcaaaggcgtggacctacctcagctcagtccgctctctatcaccgttaatccagtgcatcactaactttgtctccatggatctaacggccaacactctcttatccgcaggtgcctctcctgccatgctccattctcccaacgaatccccagatttcacccctcaagtcaacgctctctacatcaacgtaggaactctctccgacaactggttaccggctatggaactcgccgcccagttggcttctcaagttgaataaaccctgggtcctcgaccctgtcgctgccggtgcctcccgttttcggttgaaggcgtgttttggatcttatctcgcttaagcctaccgttatcagaggcaacgctcccgaaatcattgcttggctaaagc

SEQ ID NO: 392 - DNA, 381 bp, Gossypium hirsutum
  Clone ID: LIB3493-054-P1-M1-G11
cgacaagctatttagatgtctgggattagggttagggctggaagggaatgagatgaaggaggctatgggtggcgacaacatggtttaccttcttaagatcaactactatccgcagtgccctcaggcggacctggcgctcggcgtgcctgctcacaccgacatgtctgccatcaccattattggtgcctaatgatgtccagggcctccaagcttgtaaagatgaccattggtatgacgttgaatacattcctaatgcactcattgttcacattggagaccaaatcgagattgtgagcaacggaaaatacaagagtgtgcttcatagggccaaagtgaataaagagaagacaagaatttcatggccagtgtttgtggagccac

SEQ ID NO: 393 - DNA, 326 bp, Gossypium hirsutum
  Clone ID: LIB3493-054-P1-M1-G6
gtggctatgcatggcgacaacattgtttaccttcttaagatcaactactatccgcagtgcggtgaaacattcttatggctttacttttttgataaacttttcttgggggtggttgaacgtgtggcttcttcatgggttgacaaagtcttctatgcttgtaagggttgacctatcgatatgacgtcagagtacattcctaatgcacttattgttcacattggagaccaaatcgagattgtgagcaacggaaaatacaagagtgtgcttcatagggccaaagtgaacttaagagaatactagaatttcatgggcagtgtttgtggagc

SEQ ID NO: 394 - DNA, 610 bp, Gossypium hirsutum
  Clone ID: GOSHI-09MAY01-C73993_1
caatgcaatgcatagtgtttttctcattcgctcatgcttttgaagcttgccatctcaaccgcacccgcagcagccaccatctttaaagctgttcttagcaaaggagtttcactaaacatggcgcacaaacttgttcaagtgactttgtgtttgtgggtttttacaagcttacttctcccctctcccactgctgccctataccgggtcagtttgaagaaacaaagattgaatcttaatagatttaaggctgctagaattgcaatgaatggatggggtatgcttcataactatggaagttcagatggagaagtaatacctctgaaaaactacatggatgcccaatattatggagtgatagccattggctcacctccacaaaacttcaccgtcttatttgacactggcagttccaatctgtgggttccttcttccaagtgctacttctctattgcttgctatttccattcaaagtacaagtctagccggtcaagtacatacacaaagattggaaaaccttgtgaaataaattatgggtctcgatcaatatctggcttcttcagtcaagacaatgttgaagttgggggtgttgtcgtcagggatcaagttttcg

SEQ ID NO: 395 - DNA, 578 bp, Gossypium hirsutum
  Clone ID: LIB3825-011-Q1-N6-C10
aggagaatctcaaatttatttatatataaatataattgcaaagttaatttttttttcctttaacctcgaatgaatgaatctcaaactacttttttttccgttaacctcaaatgaatgaatctcaaacttcaaaataaaaattctgaaaatttatactagttatccaaaccttttgttgtaaagctataatttgtaaagcagcttatcatccaggacaccagttctaaatgcatcatgagaccaataatcagaagctacaatttcagttgggcaagcaaccaagactagcttcatatcatgcctctagacaggatacatgctttggcttccccggtcccgctgtcccatcaactcaaatattgccccatccaagctattataggtaaaacaatatctgggaccttctatgtcagcaacaacaccctaccgggaatccatctcccatcacaatatcttgttttctactttttcatgagcgccaaatgttattgaagacagaaaaccatttcatgagtctcgacagaacaacaccaaccattccatttgttcccctgcctaaggcaaaggtttctcaacca

SEQ ID NO: 396 - DNA, 262 bp, Gossypium hirsutum
  Clone ID: LIB3582-020-P1-K1-F9
gctagtcttggttgcttgcgcaactgaaattgtagcttctgattattgctctcattatgcgtttagaactggagtcctggatgataagcttctttacaaattatagctttacaacaaaacgtttggataactagtataaattttcagaggaagtatggttcgaatcttattttgaagtttgagattcattcattcgaggttaaaggaaaaaaaaaagaacactgcaattatatttatatataaataaatttgagattctcct

SEQ ID NO: 397 - DNA, 643 bp, Gossypium hirsutum
  Clone ID: GOSHI-09MAY01-C73193_1
gcgttcgggctattgcaagggtcagaagatcgatgaaggtttccagctttttcggggcaggcagtttcagggttgtgaaccgaatgctagaacctacaacacacttatacaagcactttgccgagtagggagggtgaggacggcaaaaaagatgttcgatgagatggatgtttgtggtactcaatctccgacatcattcacatatactataatgctggatggactctgcaaaaatggtcatgtcgatgaagcaatagctctttttcgttccctcgaaggtaccaaatatgaatcaagcattgagctatacagtatacttatttatggaaggtgcagaacaggaagaatggaagaagcaaggaatatgttcaatgaaatgtcacgaaaagggtttgtccccgacgttgtaacatataacattttgatcgatggtctttgcaagaaagggatgatactcgaggccaataaattgatcgtagaaatggaagaaaaaggttgcttacctaattccatttcctttaacatcatcattcaaggttttcttcgagaaaataacatccccgaagccatgaatcttttcaaagaaatgcgtaggaggaacttcgcaccaaatgaagctgtcacttcattgttactaaacctt

SEQ ID NO: 398 - DNA, 527 bp, Gossypium hirsutum
  Clone ID: GOSHI-09MAY01-C73183_1
tattcagacacggtgctgaagcattccatctataaagccctcctgcccttttcaccagcaaactaagtagtcatgaatattagtgaacaagaacaggacatcgtcatcgtcggcggtggtatttctggcttggccaccgcccttgctcttcgcaggaaaggaataaagagcatggtgttagagagatcggaaacgctgcgagccgccggcgttggcatcattatgcaaccgaatgggtggcgtgcacttgatcagttgggtgttgccgccaagcttcggcagacttgcactgaaattccatcgggagtatttatatcagttgctgagggcaagtgtcgtgaatcagaattacctcttgggaaaggggaattacgttgtttgaaacggatggagctgatgaaggcactagcggaggaattgcctgtggaaagtgtgtatttgggatgccgagcgggctctatcctacttgaccctcttacttccaaatccctttttcaacttcacgatggcactttaataaaagcaat

SEQ ID NO: 399 - DNA, 612 bp, Gossypium hirsutum
  Clone ID: GOSHI-09MAY01-C73083_1
ctccagtgagacttgtcgagtaaaagaacaatcccggaagatatggctcaggtgggtcctcctctcttttgcacactgggcacaacgtgttattcaccagtttgcggattctcaaattatacaaaaccgacacataatccttggccactctccacaagtggactccaatcttacttggcaccttaatgacccaaagtcttttgtagaacttagctagaggattttgttgtatattggaaacttctattgtattgctccatttgtatccattttttgctgtatatacccctgtattatcccccctccaaactaaggcatcttgtgactcgctgttcgccagtggaattgcgataattctctgcgcttggtcttccccaaataaagatcggatttcctcttgtgtccagctccccggatccatgcatcgttccatatattgacaccctggccattcccaattctccagccaattctctcttccagtagtcattgggctccccagatgctacgctaggtaaacgaagggtaagaacctattcttgcactcagaaactccccttgcgggaagtactttgctttcattactcatgcaaataaacaatctggttgcgt

SEQ ID NO: 400 - DNA, 1014 bp, Gossypium hirsutum
  Clone ID: GOSHI-09MAY01-C73053_1
aatgccttcaagaatttgatggaagagggctaaacttagtcttgttgggtgccggaaagggttccgtccccatggatttctcctactcatttacctttacagctttggttctgctcctctccctaatctccctcaccttcttcactgcgaaattgaaacaaaaacagacaaagaacaagtaccaccccgttgccggcacgattattaacctgctactcaactttaatagattgcatcattatatggctgatcttgcagccaagtatcggacctacaggctgctttctccttacaggagtgagattcatacctcggaacctgccaacgttgaatatatactcaaaaccaacttcgataattatggcaagggtgagtataatcacagcctgctaagggattttcttggtgaggggattttcacagtggatggggataaatggcgtcaacagaggaaggcatcaagctatgaattctcaacaaaggtgttgagagatttcagcagtgttgtctttcggaaaaatgtggcacgacttgccaatatagtgtcggaggcagctaattccaatgagacaatggatatgcaagacttgtttatgaaatcgactttggattcaatattcaaagttgcatttggggttgaactagatagcatgtgtggatccaatgaagaaggcaaggagttcgcagctgctttcgatgattcaagtgctttaactctttatcgatatgttgatcccttctggaagatcaagagatattttaacatcggatcggaagctgcattaaagagaaatataaaagtggttgataatcttgtgtataagctgatccataacaagattgagcaactacgcgaatccaaggacgattcggctgtaataaaaaaggaagacattttaactagattcctcgaagtgactgacactgaccccaaatacttgcgagatataattcttaacttcataattgctggcaaagacacaacagcagcctctctgtcgtggtttatataca

SEQ ID NO: 401 - DNA, 1274 bp, Gossypium hirsutum
  Clone ID: GOSHI-09MAY01-C73033_1
gaaaatttctgagcttcctttttggggtattttggttgacttttttctgattctttttaggttttctacacttttccttagatttgaatttaaactggttttattctaaaaggcttcaaaaggaggggtatttacattgaaagactgaatgatctaatggagaccaagggtgggaaaaagactaagtccaatagtagtagtaaatcctttttctatgaagctcctttaggttacagcattgaagacgttcgacctcacggtggaatcaagaagttccgatctgctgcttattccaactgcgtccgaaagccatcatgagatttgcgagattcatagatagtcccaaagcctcaacctcactgcaattatatctagtttgtttgtttacttgcttgcttccttattctctagttcttccttctttgtatgcttgtttattttaatccaagatggccttccctgtctctgcaatcggatatgaaggctatgaaaaaagacttgagatttcgttttttgaccctggtttttctgttgatcctcgagggatgggcctccgttccttatccaaagcacaattggatgaaatcctaaaaccggctgaatgcacgattgtttcttcactttcaaacaatcatgtcgattcatatgttctttctgaatcaagcctctttgtctacccatacaaaatcatcataaagacttgtggcactacgaaattgctcttttcaatccctgctattctgaaactggccaacagcctttcactttctgtacagtctgttaggtacagtcgtgggagcttcatatttcctggggcacaaccatttccacaccgtaacttctgtgaggaagtagcaatcctcgatcgcttttttcttaagcttggttctcatagaaaggcttatattatgggtggttctgataaaacaaagaaatggcatgtttattcagcttctgcacgaacgagtagtcattcaaatcctgtgtatactttagaaatgtgcatgaccggtttggacaggaagaaagcctctatcttttacaaaactcatgcaagttcagcagcttcaatgaccgagcattcaggtatccgaaagattcttccacactcgcaaatatgcgatttcgagttcgacccttgcggttactccatgaattcgattgaaaagggtgcaatctcaacaatccatgtcaccccagaagatggtttcagttatgctagtttcgaggcatctggttatgattttgaaactctgaattcgaatcaactgatc

SEQ ID NO: 402 - DNA, 819 bp, Gossypium hirsutum
  Clone ID: GOSHI-09MAY01-C73383_1
gtcgatgatggtggtgtcggtagtgatgttgataagtacggcggatgagacgcccaatactcctattaaattatggatctgtgcttatgctttgcatgcttgcttcatgttgttttagtgtggttggaatacaggcgaaggaacagtaggagaatatctgttacggatgaggagagaggagaagcagtttctggggatgttagtgatagtgaagatgaagaagacagcggtctttttggttcaaatgaatcaagtataactaaacgatgcgaaacagtgaataccatggcatcatttctttggtggatagttggcttctattgggtagtttctggtggtgatatccttctgcagaatgccccgcgggggtactggttggctgtggtttttctggcatttgatgtgttctttgcaatcttttgtgttgttttggcgtgtttgattgggattgctctcttctgctgcttgccgtgcatcattgcaattctttatgctattacggagcaggaaggtgcatcggaagcagatcttagtatccttccaaaacatagatttcagattataaacaaccgtgagaagcctagtttgggagctggaaaaatgatccccatagaaacaagcagtggatacttggcaaatgagcgcatactcttagctgacgatgcagaatgttgtatatgtctaagctcatacgaagatggcgtggatcttcatgctctcccttgcaaccatcattttcattcaacgtgtattgtgaaatggcttaagatgaatgcaacttgtcctctctgtaagtacaatattttgaagggaaatgag

SEQ ID NO: 403 - DNA, 525 bp, Gossypium hirsutum
  unsure (1)..(525): unsure at all n locations
  Clone ID: LIB3493-051-P1-M1-D4
gcgcccacgcgtgcgctcgacttggtgaaggtgaatcatggacaaagaatattttttaaccaaagtcttgtcctgttggtcaagttttatacgaagagtagtgttttgtgttctttgagtcggtccgatccccacgcacatcgcggtgattatggacgaaaatcgaagatacgccaaaagaaaactattagaagaaggggctggccacgatgcgggcgctatggcgctgttgaaattgatcatttattgctatgaactcggagtgaaatacattaccgcttatgctttttccatcgataattttcgaagaaagccaagtgaagtgcaaaaaataatggatttgttgaaggaatgtatgacggtgttggccaagattacgaagcatcatccgatcaaagttaattttgctggaaacctcgagcttttgaatgcagaacttatggatgaagcttgtaaactcatgggagcaaccgcccagtattccaaatttcgtgtcactatttgngtatgctattggtgcactga

SEQ ID NO: 404 - DNA, 467 bp, Gossypium hirsutum
  Clone ID: uC-gsflmaxxa067f06b1
acgaccacgcgtccgaatttgactgagggggaaagattaatatgtaactcacagatttggcctgctggtgaagttttatacgaagagtagtgatttgtgttgtttgagtaggttcgatcctcacgcacatcgcggagattatggacggaaatcgaagatacgccaaaagaaaactattagaagaaggggctggacacgatgcgggcgctatggcgctgttgaaattgagcatttattgctatgaactcggagtgaaatacattaccgcttatgctttttccatcgataattttcgaagaaagccaagtgaagtgcaaaaaataatggatttgttgaaggaatgtatgactgtgttggccaagattgcgaagcatcatccgatcaaagttaatttcgctggaaaccatcagcttttgaatgcagaacttaaggatgaagcttgtcaactcatgggagcaaccgtcgag

SEQ ID NO: 405 - DNA, 1225 bp, Gossypium hirsutum
  Clone ID: GOSHI-09MAY01-C73323_1
ctagtcttgtcttcttccctattgcccgccatttaaattagcagcctctcaatacaaaagcttcctatcatatcatgttcttcttctcctctcaaaagctttctgtatttccagccaaaacttctcatttttatcactgaattatacgtatacatatacatatatagagatttgaaggttcatcaatggagagcacggactcttcgattggctcgcagcagcctaacctaccaccagggttcaggttccaccctacagatgaggaactagtggttcactatctcaagaaaaaggctagctcagctcctttgcctgttgcgatcattgctgaggttgatttatacaagtttgatccatgggagttaccagcaaaggcgacatttggtgagcaagaatggtatttttttaagtcccagagaccgaaagtatccgaacggagttcggccaaacagggcggcgacttcgggttattggaaagctaccggaaccgataagccggtattaacatccggtgggactcaaaaggttggtgtgaagaaagcactggttttctatggagggaagccacctaaagggattaaaactaggtggattatgcacgaatataggctcgctgctaataagaataacaacaagccccctgggtatgactttagcaacaagaaaaactcattaaggctcgatgattgggtgctatgtcgaatctacaagtaaaaacaacacacatagacctttggatcaggataaagatgactccatagatgacatgcttggttcaatacaaccttcaatatcaattggtaaccaacataataaccccaagtttcaatttgcatcaaagggtactgctacaagttttggcacactgcttgaaaaccatgaacatagcttgtttgatggaatgatggggaataatagtgatgaagggatcaacaatagttcaatgtctcaatctatggttaatccactcaaaaggaatctcccatcactgttttggaccgatgaaacgtcaacagagccacaagcaaacaagaaatttcatggggatagcaatgatggaagcatggaaaagatggatgggaatggttctgttaccactctgcttagccagctacgacaaagtccttcattacaacaacaacaacaagaagaaacaatgatggggtcaatgggagatgggatttataggcctccatttcaacttccaggactccattggtactct

SEQ ID NO: 406 - DNA, 889 bp, Gossypium hirsutum
  Clone ID: GOSHI-09MAY01-C73293_1
attaaccatctagcacacaattgtgcgctttctgttcttaccccctttttttctgtttttgtttctgtttgtttggggaagggtcaaaaaaagaacactgtttgatgtctgtttggctgttccaaagttgcagttaatatggcgttagatgataacaaagacaagcaagaagctgaggataacaaggcaactcgtcctgaagagagtgatgatgataatgaagacgacaatgctattccattaggtccacagtgctctctcaaagaacagcttgaaaaagacaaggatgacgagagcttaaggaaatggaaagaacagcttcttggaagtgtggatattaacaacattggagagacactcgatccagaagtgaagttccttagcgtgtcgatcgtgtcggcggacaggcaggacatggttcttccgatccctgaagatgggaagccgcatggcttatggtttacactgaaagaaggtagtcaatatcgcttgaagttcacctttcaagtcagcaacaacattgtatctggtctcaggtacactaatactgtatggaaaacaggtgttaaggtttatagcacaaaagatatgattggaacttttagtcctcagctagagccttatacgcatgaaatgccagaagaaacagccccttctggttttatggctagaggatcatatactgcaaaatcaaaatttcttgacgatgatcaaaaatgtcacttggagatcaactacacatttgacatccgtaaagactgggcttagctctagcaccttcattcacatcaatgttcttatcgtattatatacatttttttttattcactattaaagtttatccctttgagacatttttaacttctactttttcatgaaatgaagtgag

SEQ ID NO: 407 - DNA, 857 bp, Gossypium hirsutum
  Clone ID: GOSHI-09MAY01-C73233_1
gaaggttgacccttattcttaaagtagcctcttttcatgttcttgacactgcaaaaacttgggtttgctctgaaagctctaattgtagtagttcttacttaatttagggttttagggttctcacttctcttattgttcttagttttttttttctttttgtaattctttttgcctttgggattaaaagtttaaagcttgaaatggatggagaggagttgacagagcaggagactgctctttatgataggcaaattagggtttggggtgctgatgctcaaagaagactaagcaaatctcacatgctagtctgtggaatgaaaggaactgttgctgagttttgcaagaaacattgtactggcaaggagttggtaagtgtgacatttggtggatgatcggatcgttactcgatgaagtctttatctgtgaaattttttgatatttgcctcatgaaaatcactacaacgggaaaactctggccgaggtttgctgtgattctttgaaagaattcaaccacatggttcatgttgctgtggaaacaggcgatatatcaacatttggtgtcgagttctttgaaaagtttgatgctgtgatcatcagttgttgctctcttggaaaaaagaaattgatcaatcaaaagtgtcggaaattatcaaagcgtgtagcattttatacagttgagtgtagaggctcttgtggcgaaatgttcgtcgatttacaggactataaatattcaaagaaaaagctcgaggaaaccattgaatgccagatagaataccctagctttgaggaagccatttcggtaccttggagagcacttccgaggagagtgtcaaagcttttactttgctatgagagtg

SEQ ID NO: 408 - DNA, 553 bp, Gossypium hirsutum
  Clone ID: uC-gsflnu33B013a03b1
accgccgcggaataattgggtggaccaacgcgtcctttctattcgtacgatgactcgtgcgactaataattatgcctgtcatgaacggggaggagctgacagagcatgagacgtgctctctatgatcggcaaattagggtttggggtgctgatgctcaaagaagattgagcaaatctcatatactagtttatggaatgaaagggtctgttgctgagttttgcaagaacattgtactggcaggagttggtagtgtgacattagtggatgaccgtgaagtcaccgaggaagctttgtctgcaaatttcttgatacttcctgatgaaaatctgtaccatgggaaaactctcgctgaggtctgctgtgattctttgaaagaattcaaccctatggttcatgtttctgtagaaaaaggtgacatatcaacctttggtgttgaattctttggaaagttcgatgccatggttatcagctgctgctctcttgcgaaaaaaaaattgatcaatcagaagtgccggaagttatcaaagcgtgtagctttttatacagttgact

SEQ ID NO: 409 - DNA, 764 bp, Gossypium hirsutum
  Clone ID: GOSHI-09MAY01-C68973_1
ttttcgttttcttctcctaggctttcaaatcttctcttcagttctggattttcaatccaattaaagtatttaattactttttagagcaaataaaaaaaccctaaattcacaacgaaatttgaaaaagaacaagcaattgaaaattacaaaaatatgtcgagattcagagatcggactgaagatttcaaagacgctgtacggcaatctgcaatttcatcaggtttcaacgagtctaaattagcagcaattatggcgtctttcataatccataaaccacggcaaaggacgccctttcttaaatctgcactcaaaacgttggagagtatcggagctttggatcagttcttgttaaagcaccgtaaagattacgtggatcgtcaccgaacaactgagcaagaaagggacagcattgaacatgaagttactgcttttgttaaagcttgcaaagaacaaattgatgttctcaaaaattgtataaatgatgaagaggcaagctcgaaggggtggcttgggattagggattcctcgaatgctgatacgatagcgcacaaacatggagtgggtactaattttgagtgagaaacttcattccgtcacggcacagtttgatcagatgagagctgttcgtttccaagaagctatcaatagagcaattgccaagaagaaaactttagagaggtgtggactcaattctataaatacctctaaaccattgaacttggaacacagagagacctatgagaatcaacctgaaactcttagac

SEQ ID NO: 410 - DNA, 484 bp, Gossypium hirsutum
  Clone ID: GOSHI-09MAY01-C68963_1
ttcacgcgtccacagagctctctccttctaggccttacatttcgtttggcgttctactatttccagcgtctctttgcggctgagtggtcttttgaattctttggtggaaacttttgaacaaaatcgaagttacagagacttaacgattaaaagagaaagaatggaaacacaaaagagccaggccgagaaacaagcgacgatggcttcatgtagaaagaaaaagaatgaagaagccaccttccttgaagacttgaaggatcacatcgatgagtttggtaatgcatcaatggatgagcataaaacttgctttaagaagaccatccaaaagatgtttggaatgtcaaaatttgtagctgaaaggaatgctgaatcaaaggaaacaacagtatcaaaataaagtatgttcatctttaatagcatgatatgtagtagcatgatttggtttacactatatttaaaacatagccttcggtactttttgatc

SEQ ID NO: 411 - DNA, 954 bp, Gossypium hirsutum
  Clone ID: GOSHI-09MAY01-C68483_1
ggggcacaacacctgttgatatccatgggaagcctattgcagatctttcaaagactgggggatggagtgccgccttatttatgtttggaaatgagatggccgaacgaatggcttattttggcctatcggtgaacatggtggcctttatgttctatgttatgcatagacccttttcaagttcttcaaatgcagttaacaatttcctggggatatctcaagtatcctctgtccttggtggttttctagccgatgcttatctcggtcgatattggacaatagccattttcactactagtttccttccgggtttgatagggataactttatgtgcatccatgaaaatttttgtgccaaatcaagatcaatgcgatcaactgtccctgcttttgggtagttgcgagcctgcaaaaccatggcagatgctttacctctatgttgtcctttatttaactgctttcggagccgcgggtataaggccctgcgtctcgtcttttggggctgatcagtttgatgaaagaagtaaagattacaagaccctcctggataggtttttcaacttcttttacctctgtgttactattggggcaattgtggcattcactctggtagtctacatccaaataaagcgtggatggggagctgccttcggttcattagctatagctatgggagtgtccaacatgttgttctttgctggtactcctttatacaggcataggttgcctggaggcagccccctaacccgagttgctcaggtccttgttgccgccttcaaaaaacaacatgtcccttttactaaaaccgagttataggcctctacgagctccctggaagacattctgctataaagggcagtggaaagatacctcatactgacgatttcagatgcttggataaggcagctctccaattgaaagaagacgggggcaatccaattccctggaggctctgcat

SEQ ID NO: 412 - DNA, 732 bp, Gossypium hirsutum
  Clone ID: GOSHI-09MAY01-C68403_1
tttagaaaccctaaaaacgctccgattcccagaaaaccgaaatgaaaagggaccaatcgcacttaatatttcaataatacgtggagtttttatgtaacaacagcttagcaaaatttaaaaaagaaaaatccccccttctgtctcgatccaggatcagaatttccagtttgtattgatagggttttgagagttaagaatggggattcaaactatgggatcccaaagcaatggacaacagtctcttttacagccatctccattggtgaggcagaattcatggcatagtcttactcttaatgaagttgaaaaccaattagggaacttggggaagcctttaggtagtattaaccttgatgagcttcttgataatgtatggagtaccgagttgaatccgccgttagggatgaataattccgaaagcatttcgtcatcttcttcatctcttcatcgtcaagctagcttaaccttggctagagctttgagtggtaagacggtagatcaagtgtggagtgagatacaacaaggtcaaaagaggaggaacggtgaggggatgaaggatcaagaaagagaagcaaagcttggcgaaaccacattggaggatttttggtcaagcagggctttttgttgctgaaacatcgttggatcctacaatggaatttgataatacccgtcagcaaagtttgccacaccaattcagattgcacctaccccatctattggacattatcggat

SEQ ID NO: 413 - DNA, 330 bp, Gossypium hirsutum
  Clone ID: LIB3189-047-P1-K1-E1
gcgcacaaaagaaaccctaaagacgctccgattcccagaaaaccgaaatgaaaagggaccaatcgcacttgatagttcaataatacgtggaggtgtttatgtaacaacagcttagcaaaatttaaaaaagaaaaattcccccttctgtctcgatccaggatcagaatttccaggtaataacataagaattttcatgggtatttatttgttttaattttaattgattactactagtatttttttttttcgaatttttaacagttaacctgattgcttcaacagtaaatttcgattcatcatctttaattttcttttttcttcttgattaat

SEQ ID NO: 414 - DNA, 1280 bp, Gossypium hirsutum
  Clone ID: GOSHI-09MAY01-C68143_1
aaaaagagaaaataggaggagtaatatggttggggatgaagagtaccacttacatcatatattttatttacatcaaatttcccataaccttcatatctactcttgtttcctctctctctttcacttgcctttgcttcttttgtttgtgttttaaggaagacaaatcttcctcttttgcttttccactgattttcgtggtgaagtgcgccactatgacttccggatttgaaccctcgccgtccaaagacatgccagcggcggaggaggaagaagacgattggaggagttcgtcctcccccatgacctcctcttcgatcgggaggaacagtgatgctgacgtgtctggaagatcatcggacggcgacgatgaaaatgaggttcaaagctcttataatggtggtttaaacatgatggattccctccaacaggttttgcctatgaggttcgttcatcatcatctcctctctcactaaatggctcagatcggtgtcaaaactagggatagtttgctataatttcgatttgagtccctctaatcctcctattattaatactgtgagatctaccgctttaagcggactctgataactaaacaaattaggttttagtaaagtaaaattaaattacaaattcccttctttttagtcgacccagcgtcttttttgaacaggagaggcatctcgccgggcggcaagggcaaatcaaggtctttcacaagcttagccgatgcttctacagcttcaacgattaaagacatagcaaagcctgaaaacgcttacaccaggaggagaagaaatctattggcaatcaaccacatatgggacaaaaacaggaacaatggaggacccattaggcccatcagctcaagcaaaagcacattggctctagctgttgcaatgagtagctctgaaagtatgtctagtatcagtgaagactctacttcaacttcaagccctcggcttcctccattatacccacaaaccagatcatcttgcaataatgataataccaccccatcatcgccgccgtgccggaatctctctaattggcggtctttctcgctggctgatgtgagggaatatggtactgttataggaagcactaatccacactgcgcttcatttcataatgaaaaccaactcttgagaaagggactttgacaataatctgttgttttagtgtacacgtagcttgatgtatatgctttcagggggatttaggtttcctttcgtcaaatgtgtggttttctttacccgatgtaaaaaggaaaatgttggcgc

SEQ ID NO: 415 - DNA, 685 bp, Gossypium hirsutum
  Clone ID: GOSHI-09MAY01-C68013_1
atcaaatcgcagactggttgtttgttttccaaattgcactaaattcccaaaactgcaaatttcatttcaaaacccttaaaggttcaattcctactcttcttttttatgaacgttggagcttgcaaaacatttttctcggtttccagtttgagcgcacaggagaatgttgttcggtcatgctgatggtctatctgaacaacggtcaccaagggaccagctactcgctgatcctgaatcgctggaagatgatttcaaattagacagttctgaaacgatattgtacgctgcttcttttgaagaactcgccagagataatcttcagtatgacaccatcatatgggtttctatatcgttattgctggttttggcttggggtgttggcatcatcatgttgctctacctgccctttagaagatatgtgcttcagaaggacatttcatcacgcaagctttatgtcacacctagtgaaatagtttacgaggtttcgagaccctctttcatacccttttggggcacaataacaattgaaaagcatgtacctctttccaaggtgattgatattataattgaacaagggtggttgcaatcagtgtacggtatccatacctttagagttgaaagcatagcccatggaaaagctgcacctgttgacgaactacaggttcaaggggttgcaaaccctgcc

SEQ ID NO: 416 - DNA, 660 bp, Gossypium hirsutum
  Clone ID: GOSHI-09MAY01-C69573_1
ggatcagtatggcagccgatttattcagcaaaagcttgaaaccgctaccacggaagagaaaaatatggtttatgaggagatcatgcctcaagctcttgctttgatgactgatgtctttggtaattatgtcattcaaaagttttttgaacatggacttccagctcagagaagagaacttgctgacaagctttttggccatgttttaacactaagtcttcaaatgtatggttgtcgggtgatccagaaggctatagaagttgttgatacggatcagaagattaaaatggttcaagagcttgatggtagtgtgatgcgttgtgtacgtgatcagaatggcaaccatgtcatccagaagtgcatcgaatgtgttcctgaggagcacattcaatttatagttacaacgttttttgatcaagttgtgaccctttccgctcatccatatgggtgccgagtgatacagaggatactggagcactgcagggacccaaaaacacagagcaaggttatggacgagattctaggatctgttagcatgttggcccaagaccagtatggcaattacgttgttcagcatgtactggagcatggaaagcctcatgagcgctcaattataattaaggagttagctggaaagattgtccagatgagtcaaacagaagt

SEQ ID NO: 417 - DNA, 685 bp, Gossypium hirsutum
  Clone ID: GOSHI-09MAY01-C69653_1
cttaatttcattacttcactttcttcttcttcttcttctcctatctctctccttggctgggaactggcacaaaacgcaggccgatgagtcgtttggcccccttatcagaagagcccataagcgaagaccactctgcaaactgctcgaagaaaggcctgtcatggaaaaactggctcaaaactcatctctcccttgtctttaacaagaagtctgaccttgaaatcctcttaagcgttttgggttgccctcttttccctgtttccgccctttccgaaccacccatcaatgaggtctcatcttcagctcaatacattatacaacattttacagcagcaacaggatgccggcaatcggaaggaacagtgaagaacatttttgtgaccgggaaagtaacaatggcaatggtagatgagctgggtgccacagtaggctcggtggctggagctgccggagttgcgcaaaaaggctgttttgttatgtggcaaatggtacctaataaatggctaatagaattggttgtgggtggtcacaaggttatagcatgtagtgatggcaatgtggcttggcggcgcacgccttggctaggagcacatgcagccaaaggtggtgttcgtcctctacgccgagctcttcagggactggaccctatggcaatatcagctgtattttcctcagcccagtacat

SEQ ID NO: 418 - DNA, 602 bp, Gossypium hirsutum
  Clone ID: GOSHI-09MAY01-C69123_1
gtcggtgctggtgttgccggtgctgctcttgcctattctcttggaaaggatggacgtcgagtgcgagtgatagaaagagacttaaatgcacctaatagaattgctggggaaggtttaatgccaggaggctacctcaagttaattgaattaggcctcggagattgtgtagatgagattgatgctcaacaaattttaggttatactttatacaaggatgggaaggatgcccccatatcttttcctttggaaaagtttcaatcgcatgtgtctgcaaaaaactttcataatggtcgtttcgttcaaaggttgcggaagaaagctgcatctcttcataatgtaagtttagaacaagggacagtaacatctctacttgaagaaaatggcattattaaaggagtacactataaagataaaagtggtcaaatgctaacagcttctgctcctcttacccgtgtctgcgacggttgtttttcaaatttgagacgttctctctgcaatcccaaggttgatataccctcttattttgttggttttcttctaacgaattgtaaacttccaaatgaaaaatacggagctattatattagcagatccttcacctat

SEQ ID NO: 419 - DNA, 401 bp, Gossypium hirsutum
  Clone ID: LIB3189-042-P1-K1-G11
atagcctctcttttggggtttgttttcttgtactgcaattccctaatcagatttaggggacagaggaagctaaacagagcagcttcaatggagtttccaaagaaaaacagtgtaaacaaaactggaagtgagggtgttggcactgcggatattatcatagtcggcgccggtgttgccggtgctgctcttgcctattctcttggaaaggatggacgtcgagtacgagcgatagaaagggacttaaatgcgcctaatagaatggcctgtgaaagtctaataccagggggctacttaaagttaattgaattaagcgttgagggtaaacaagaaaaatcatggatttaaatagtagatgtaatataatggtataatggtatttctttaataaaatacttaattta

SEQ ID NO: 420 - DNA, 612 bp, Gossypium hirsutum
  Clone ID: GOSHI-09MAY01-C69323_1
tttctttctctgccaaaacagagccaatctcctctcaacccttccttaacgctgccgccggcgtcggtggcgtcgccgctgccatcctcaaatccggtttcaacagcggcaatggaagcgccaaagtttgtatgggaaggcgcaattcctcttcaaatccatctccacgaatcccaagtcaccactcttcctcctcctcctcctgctctgatcttagctccacggatcgggtatctgccgctgttagcgcctttgattaagccctattttagcagcacacttcctcctggtgttgataccatttggttcgattacaatggcctccctctcagatggtacataccgactggagttctttttgatcttctgtgccctgagcctgaaaggccttggaacatcactgtccattttagaggatatcccggaagtgtattgataccttgtgaaggtgaagattctgtgaagtggagctttataaactcattgaaagaggcagcatatataatgaatggaaattgcaagaatgttatgaacatgtctcagtctgatcagctggagctttggcattctgtcatgaatggtaatttggaagcctaccagcgggtctcatct

SEQ ID NO: 421 - DNA, 356 bp, Gossypium hirsutum
  Clone ID: GOSHI-09MAY01-C69253_1
gatgagaggcccctctctgagtcccaaagagccccgcctctcgcgctgctgcttccgccgctgaagaaacaagcagaagagggttccaaaggaacaaggttttcagagatgttgagaaggctctccatgttcctcttcggtacaggaactggaattgcaagatttctactttgaaagttctgctggttacaattttggtgggatctctcatcactctccttcgctctcctgcagtttacatttcagatcgtccatccaatcttgtatctcgcaggcctggttttgtagacagatggattagagacagtggtgccgcagatccacgttatttatcaatgttggatgtaaattgggat

SEQ ID NO: 422 - DNA, 975 bp, Gossypium hirsutum
  Clone ID: GOSHI-09MAY01-C69203_1
ccccgcgtccggcgaggggtttgggttgatggggaaggaacaagagacttgcagcttgccgttttgcagcaggtgcgagagttgagagctgaaattgggttgttagaagggaggattggcaagattcctcatcagttactgggttcagtatctagggagctgtttgagattttgagtaaagttggaagtttgggtgaagagggtccaaagtcgattggagttgctgtctgacaagcctcattctgatgacctgttggtaggggagaatgatttggcgcactgggctgatgaccaccatgatcggatatacggggatggcaaggatgctgaactgattgaagatgatgatgacagttttggaaggacgcttggggatgttgttccttgggaccaaatgcggacggattgtaggagtccgaagggtctgatgagcgagccttgtaagacggataagtggttgaaatgccccgatttcgacgagaagagcattcttgactgcgaggatactaaactaaccaagcccatgagacacgatgatggcatagggacagatgtaggtctcgttggccttcaggttgatagtttctaccaagataaccctaaatggtatgattctccttgtgaactaaattcaaccacggattgtggtgatggtggatttaaacatggagagattgtgtagaatcttgaagagccaggttaaccccctctaacataatcatcaatttatattgttcctttgtcccgtatccccgccagcactggattgtacattaattataccgaagtttggagcttatgacatgctttaaagtgtcttctgtggtgtgtggttcctgtcaaatatataaccatttaagggcttactgcacatactatatattttaacttttggttaaccaggttatgaacatccatgatttttagctgggttcctcttaaaatgaacctaattaactgaactgtggtcatccc

SEQ ID NO: 423 - DNA, 387 bp, Gossypium hirsutum
  Clone ID: LIB3189-017-P1-K1-G11
caggagttgagagcggatattgggttgtttgtgtgtaggattgacaagattccccatcagttgttaggttcggtatctagggagctgtttgatattttgagtaaagttagaagtttgggtgaagagggtccaaattcgatggagttgctttctgacaagccttattcagatgacctgttgtttggggagaatgttttagctcactggtgtgatcaccatgatcggatatacggtgatggcaaggatgcattattgattgaagatgttgaagacagttttggaaggactcttgtgatagttgtttttgtcaccctattcctccaatatttattttatcaatttatttttttatcattcatttttaataacttttttttttaattattt

SEQ ID NO: 424 - DNA, 455 bp, Gossypium hirsutum
  Clone ID: GOSHI-09MAY01-C64823_1
gctggaacgacccgcaggtagccgtgtccggaatcgaccggactgcgacccacacaaaaccaccttccctgtctatacggcgcacgttagcgtcttccagcagcgaaccatcgcaagccttctctatggccgcttcctatcgaccgccgccaccgtcagctattgatctcgacctcaccgtcgtctcagccaagcatctaaagaacgtcaactggcgaaacggcgatctcaaaccctacgctgtcttctgggtcgatccagaccgccgtctctcgacccgttcggacgatgccggatcgacccgaccggtatggaacgagcgtttcacccttccccttccctcccctctacacgacgtcgttttaaccctcgagatttttcactccaagccatcggaaacaccgaagccgttagtcgccactctccgtgtcgaactcaaagaattacccgacccg

SEQ ID NO: 425 - DNA, 860 bp, Gossypium hirsutum
  Clone ID: GOSHI-09MAY01-C64653_2
tttgtagatcaagtggaaaaagaaagcagaacaagaaaatggcaaatgcagacccaagccagaaggttgactacgttttcaaagtagtgttgatcggtgattcaggtgtgggtaagtctcaaattcttgctcgttttgctagaaacgacttcagcttagattccaagtctaccatcggagttgagtttcagactagaaccctcctcattgagcacaagagtgttaaggctcagatctgggacactgctggtcaagaacgatacagggctgttacgagtgcatactataggggggctgccggggcaatgctggtttatgatgtaacgaaacgccagaccttcaatcacatcgcacgctggctagaagagttgcgtggtcatgctgacaagaacattgttataatgctggttgggaacaaaagtgacctcgaaaagcagcgggatgtctcaacagaggatgccaccgaatttgctcaaaaggaaggactatttttcttggagacctcagctcttgcagcgaaaaatgttgagaccgcattcttaacagtgcttactgagatcttcaacatagtgaacaagaaaaacctagttgccggtgagaatcaagggaacggcaatggcaatcccacgtcactagcaggcaagaaaatcatcatttccaggtccagctcaggaaaattcaggcaaagagcaacatgtgttgtagatcatgatgcaattggatttatcacctaatgtcagtttctttctttcacatttttatctgcttgtatatttacattgctatagcttgcaagggcagctaattaattgaatgtttttgagattgaggaatgatatgaaaccaaaattttgaagctt

SEQ ID NO: 426 - DNA, 1059 bp, Gossypium hirsutum
  Clone ID: GOSHI-09MAY01-C64653_1
caataatctaaaactcaacgttaccaactgtgtccttcggctcttagctatatttcaggccgaaacaaaacaaaacaaaaccaaatcaagtgaaataaacaagacttagaagtagaattagaagggaaaatggctagtggaggagggtatggggacccaagccagaagattgactacgttttcaaagtagtcttgattggtgactctgccgtcggtaagtctcagattcttgctcggttttccagaaatgagtttagtttagattccaaggccaccattggagttgagtttcagactagaactcttgttattgaacacaagagtgtcaaggctcagatctgggacactgctggtcaagaacgatacagagctgttacgagtgcatactataggggtgctgttggagcaatgctggtgtatgacataacaaaacgtcagaccttcgatcacattccacgttggctggaagagttgcgtggccatgccgacaagaacattgttattatcctgctcgggaacaaaagtgaccttgaaaaccaacgagaagttccaaccgaggatgccaaagaatttgctcaaaaggaaggactatttttcttggagacctcggctcttgaagcaactaatgtggagactgccttcatgactgtgcttacggagatcttcaacatcgtgaacaagaagaacctggttgctgatgagaatcaggggaatggcaaccccgcgtctctagcaggcaagaagatagtcattccaggtccagcgcaagaaattccagcaaagagcaacatgtgctgtaggtcatgatttaattggatttgtctcctattgtcaggttttttattttaccttcttaatatcaaattttgaagggtgtggtatatctgtttgtatattatacattgcattagtttaatctgcaaggggcagctaattaattacatgttctgagatggggaatagaaaacctaaatttaaagctgacttgcagattgcttcgatgtatttttctgaagttataagatctatcaaattatcctgctgaaaaaaaaaaaaaaa

SEQ ID NO: 427 - DNA, 701 bp, Gossypium hirsutum
  Clone ID: GOSHI-09MAY01-C64603_1
cttagctttctttttagttttcctttaacttttgtaatatccttttagccttccgggatactctgtgaaccctgctcatcttctcccccagaattggtatcagagggggtggtgtaaccattttttggggaaataatatcatagtgttcattggatgtatagttagattgaggaatgaaatctgtggacgatagtgtttcaagactttacccactgtgataatttttatttttatttttttttgcattttcaccttcttgatgcagaccatttcttttatttttattctatttttttatttatcatcttttttatatttttaatattttcttttcttctttttttctcttttcttcctactatttttctttctttttcttctcttattttttttatatttctttttattttttcttttattcattatctttcatattcttttcccttttcttatttaatttttatttctcttatcttatctattttatcttttttcattatttctttcttttttttttctcttttattttactcttattttctttatatctttttatttttttttctatattttcctattatcttttcatttctattttttctcaactctctttctatttttttcttctttttctccttttttttactttacttactttatttatatttttatcttttctctcctctccttcttttcttta

SEQ ID NO: 428 - DNA, 420 bp, Gossypium hirsutum
  Clone ID: LIB3272-007-P1-K1-H3
cttagctttctttttagttttcctttaacttttgtaatatccttttagccttccgctcatactctttgtaaccctgctcatcttctcccccagaattggtatcagaggtgttggtgtaacgatttcttggagaaataatatcatagtgttcattgtatgtatagttagattgaggaatgaaatctgtggacgttagtgtctcaagacttgacccacggtgatgaatattcagttgaatatcttcttgcataagtcactttcttgatgggagacaatggtttcaaaagagatgcaacaatagtggggacaatgggttagagcttccattttcatcaatggagagtggagccatgatcgtctttaatgtaaagctgttaaattctttgttaactgcttcgttttttttttcaatgggcatgt

SEQ ID NO: 429 - DNA, 582 bp, Gossypium hirsutum
  Clone ID: GOSHI-09MAY01-C64123_1
cccacgcgtccgctttagatgcatgaatgaaactaacaacatctgagctcatcttgaatatgctttgaggtagtaagaaggcctaaaaatggatcatagagacaggcagtctattgaacatcaaaagaaagatcctcaacaacacccccacccatgttttactaatttcacaactcaccatcagcagcagaaatgggaagatccttccctattagattacagcaccaggattgaacctcctttccaggcattcaacccaaactgtcaaaccaaatcttcatttccgtgtaaccccaataaccaaatcaaggtccctgaccctattatgaatgagttgcttcaagccagcaaagtccaagattgggatccaagtgcaatgctaaacaatctgtcattcctggagcagaagatccatcagcttcagggtctggtgcattccatcattgggagagggggtcaagttttggggcaaccagatgaacttgtagatcagcaacagcagctcatcactgctgctctcacttcgattataagtcagttgatatctactgctggtagtctcttccatctgttaagcaccat

SEQ ID NO: 430 - DNA, 620 bp, Gossypium hirsutum
  Clone ID: GOSHI-09MAY01-C64073_1
gcgttcgcaaaccagctgactattatgcgccatggcgcgcactatacccctcctcctctcctctctccttctccaccacccgccataaactccacggccaccggcggcaaccagcacccaatgctggtttctgttttattagccctttttctcccatgcgctggcatgagtgctgttttcattgtgtatatctgtcttttatggtacgccacgaatcaccgggctgataattcagggtcgttatcggttaagcaggctggtgagaaagggttgtccgtttcggagcttgagaagctgcccaaagttaccgggaaggatcttgtgttggggactgagtgtgcggtttgtctcgatgagatagaggcagagcaatcggctagaatggttcccggttgtaatcacggctttcatttacaatgtgctgatacttggctttcaaagaactcggtctgtcctgtttgtagggccaagcttgagcctaagttgttcgatccacctggtgatgataacccttgctaaagctttgaattttcctttaaaaaattagaaaaaaggtctagtttttaggagtataaaattcagtgttgttggtgtttgtatgaaatgaagttttcctagga

SEQ ID NO: 431 - DNA, 313 bp, Gossypium hirsutum
  Clone ID: LIB3582-011-P1-K1-H9
gtaaaggaaaattcaaagctctaacactgcctatcatcaccaagcggatcggacaactcacgctcaagcttggacctacaaacacgacacaccgcgtagtctcaaagccaaacatcaccacactgttaatgaaacccgtgattacaaccggcaaccattctacccgattgctctgcctactatctcatcgagacaaaccgcacactcagtccacaacacaagatccttgccggaaaccttcggcaactgttcaaactaagctaccaacaacaattctttatacatcagcaacagaagtctcacacgccattca

SEQ ID NO: 432 - DNA, 603 bp, Gossypium hirsutum
  Clone ID: GOSHI-09MAY01-C65993_1
gagattttgattccttcttaaccactcctgggtccacaactgtatccttggttccaagggaaaatactcacaacatcaattgaaacacctctgcttttgttgtttccaatcttaggtggttctcaatcttcctattcaaaggtacaatttttttctccaaaagatacatttaagttttagtcgtgcagattagaatggatcaccaggggcatggacagcccccggcaatggggatcataggtggtggagcccaaatgccgtacggcactaacccgtatccaaaccaagtgactggggccccgaattcaggatcggttggaggcattcaaccgagcagccagccaacaggagctcaacttgcacaacaccaacttgcttatcagcaaattcaccagcagcagcaacagcaacttcagcaacaacttcagacattttgggcaaatcagtatcaagaagttgagaaagtttcggatttcaagaaccatagtcttcctttggccaggatcaagaagatcatgaaagcagatgaagacgtgcgaatgatatcagctgaagcccctgtcattttcgccagggcatgtgagatgtttattcttgaattga

SEQ ID NO: 433 - DNA, 682 bp, Gossypium hirsutum
  Clone ID: GOSHI-09MAY01-C65883_1
cccaaacactccatctctctctctctctctctctccatatatatatatataagactgtttgaacaagttctgaacattgtaggctgattaaagacagctacatccctctttttgtgtctgccggttttgagtctctgttctggcatttttacaaacaccctgtaaacgaaaatggcgcttccctatacccatcactatgacctttcgttctttgctctcaatttaaagaaatttggctcttcgcatttgcaacccttttgttgtttacggtgcaattccagcgtttcatcttcaccattcacggagaagcactcgttgcagaggtaccaaagggaccagtgggtctacaacaacaataaccagcagcggccgtctctcagctgcgatgatgaagccgcgtcttgctccgtcccggctgatagcgactccataaggttaaatgacatcgctttgcagctgccggagctcaggaagttgctccaagttttgaaacataagagagaaagctgtggcggccaagtacccaaaaatggactgggggatgttttcctggtggggacgggacctggagatcccgatctcttgacgttaaaagctgtcaaagtcatacaaaaagctgatcttttgttgtacgataggttggtttctaatgctgtattggacttggttggccccgatgcca

SEQ ID NO: 434 - DNA, 871 bp, Gossypium hirsutum
  Clone ID: GOSHI-09MAY01-C65833_1
cttggttcaccgaatttgaatagatctggagaacgaacagggcgtttgccgcgtcgaccgagggagctctccggagccggtgatggcggcgtcgccggagcatcgtgatgattcctcctcctcctctcccgtagatgttccggtcaaaaaagagctagaaatatgcgtcgatgctaaacagatagatagtggcggaggctcccgggaagccgccagtggcgacaattcccgcgccggagttgattttgcattgaataacggtgctgctgagccttatagcattgttcaccgaagcttttctgaagttggagcattgcgtgtgggcacttcaaacattgaaaagttggattcaagccagcctaaattggtaaaatcaaaaactgaggcacccagacatcggagcatacttgctgaagatgcagcacagatttttgacaataagatgtctgcccaaaagaagcttcaattgttgaacagaatagctaccgtgaaagatgatgggactgtggagttcgaagtgccagtaatgttgatccccatgttctttcttgtggattaagagattaacatattgaagttgctgaagaagaatccctgaagcagatattctcttgtttccacactgcgcattttgatacctattatttggccaccttgagacattcacccttttttgtccttggcgacccctcccccaatttggtcctccgttaatatggcaccccttccatttccaaagattgtttctcttgcgggcccaattcttttccttaggtgtagatatcaaatttcttgccgggtttttggtttaaatattagggcttttgcctccaaaccctctcaaatttccttttcccccaaattcattttt

SEQ ID NO: 435 - DNA, 711 bp, Gossypium hirsutum
  Clone ID: GOSHI-09MAY01-C65743_1
cccacgcgtccgcccacgcgtccggtgaattcggtcaacaaaataagttaactcaaacccttcaaaatttcaaaacaaaatcctgaaaatctcaacttccaatctttcagtttctaaatttattgtcttccccgttttctttatgaaattaaacctctcagaaaatgcaatctcttgaaagcatcacagaatccccatttcctcaaaaccctaacaattcatcatcatcatcatcttcttcgaatgggttgtatggatggctcgttgaatgtcatggattttggcataacttagcacttattatcccttctctcctctttgttctgtttctgggttttcaagctaaaaaaaactttcaaaagctctctcatggaaggtcttatatcatgatttcttattacggttgcctttggctcgttagcttgctcaaccttgtttggtgtttcgttcaggcctgggaatgcactcctggaaaggaaatggcatggaatatcttatcattgttcacaacttctgggatgctattcctggaagttagcttgttggcatttctactgcaaggaaatcatgctagtgggttgcaagctttgacacggacatttgttatttcagggcttattgttggtttggacttccctctcgctattaccatgatgggcctgtcatgacactcgaaatcactagaaaatggctgtgtgtcacactatgctc

SEQ ID NO: 436 - DNA, 584 bp, Gossypium hirsutum
  Clone ID: GOSHI-09MAY01-C65163_1
ggcttcgacatctgatgggaaaaatggaggcgatccgttgagaattgttggcgtcggggcaggtgcttggggtagtgttttcactgctttgctgcaagacagttatggtcacctgagagataaggttttgataagaatatggaggagacctggaaagatagttgataaggccacagcggaacacttattcgaagtgatcaattcgagggaggatgtgttgaggagactgattaggcggtgtgcttacttgaagtatgttgaggcaagattaggcgataggactctgtatgcagatgagattttgaaagatggtttctgcttgaatatgattgacactcctctttgccctttaaaggttgttactaacttgcaagaagctgtttgggatgctgatattgtaattaatggcttgccatcaaccgaaactcgcgtggtgtttgaggaaattagaaggtattggaaagaaagaataacagtgcccataatcatatctctggcaaagggtatagaagctgagttggagcctgaacctcgcataataactcctaccctgatgatcagtcgagcaactggaatccccattg

SEQ ID NO: 437 - DNA, 831 bp, Gossypium hirsutum
  Clone ID: GOSHI-09MAY01-C65023_1
aaaaaagaaagaaaaaagaaaaatacatagatatatatataaaaaaaataagcaaacaggatcataaactaaaaaatagatgcctaatagcaaagaaaaatgcgagcagtgggggtagtggtgtgactgaaagtaaaaaggtgcaaaatccaatgatttcagaagggaaaataagaagtttccgggaatcaagggtcaatatcatgtgacctcaccgataagagtcgaaagctactccaagaaacagcactgtgttccagtttgggggcgccaccagaattgatctgctcactcagttgcaatgacaatatttagaggtggcattggcagatttagtggtggagttagagctgcagttttcttcttgtggatcgttatcttgttcttttcccagttaggtttgcattttgctgttcataataataacagtaataaagacgccagtaccagcagtggtagtcatcagtcattcacgtttcatcccccaaggaaagccttgtctttggacactgcttcttttcatgctccctcaagcctatctcagtttactgtgaacgaagatgatccagacactatatatgaagatgatatgagagtagttcatacaggtcctaatcctcttcataacttgggaagcttagctttttttctttatttgtattgttattgatattagggtgaatgagagagtattgactttagccttttcagtaatgtttaaatgagggttttatagggcattgcagctttagcaatggtctacacatgatgagaaaaaaggaaagacgacggaaaggctcttgttaatgctcttgtctcttctgtacctgc

SEQ ID NO: 438 - DNA, 381 bp, Gossypium hirsutum
  Clone ID: LIB3272-013-P1-K1-D3
cggacgcgtgggttctcatactaagtttctactcgatttccgagatttagagaactaacaaaaaaccacttccttttaggattatcccatttggttttttatgatcctctcttttagagtcgaaagctactccaagaaacagcactgtgttccagtttgggggcgccaccagaattgatctgctcactcagttgcaatgacaatatttagaggtggcattggcagatttagtggtggagttagagctgcagttttcttcttgtggatcgttatcttgttcttttcccagttaggtttgcattttgctgttcataataataacagtaataaagacgccagtaccagcagtggtagtcatcagtcattcacgtttcatccccc

SEQ ID NO: 439 - DNA, 434 bp, Gossypium hirsutum
  Clone ID: GOSHI-09MAY01-C65323_1
ttcttcatcagtttttttttgtcaattttttcttgaactcatagtaaaaaaaacccataaattttccttccaagagtatcaattatttttggtttctgggtatagcttataattcaaattattaaccttttattttttaaagacaatgattttgccattgttgaaattgtatgacaaaggaactagtgttgttaaaagctattacttttggattttccagatttttaatacttataggattgaaacttaagaaccaaatttcattattttcttgtttcatttccttaaaagttataagcgattgtgtagttagataaagaaatttaagtaacattgagataatgggaggggccatcatttgccaccaggtttttcgttttcatcctactgatgaagaattgattggatattacctcaaaagaaaaacttaaggg

SEQ ID NO: 440 - DNA, 454 bp, Gossypium hirsutum
  Clone ID: GOSHI-09MAY01-C66913_1
gattgattactcaatcataaaaatcgatcaaagttagcagccgatggagaggctgaatctgaaacacaagctcggcgataaatggatttcaaccctagccagcatatggatccagtgcaccagcggttcactctacaccttctccatctattccccaattctcaaatccacccaacgctatgatcagtcaaccctcgacacggtttccgtcttcaaagacatcggtgccaactgcggcgtcctttccggtttcctctacactttcgccactccatctaaccgccgcaacgcttattttggtggaccctgcttggtcctcgcggctggtgctatccaatgctttatgggctacttcctcatctgggcttccgcggttggattgatccctcgcccttccggtgtagggatgtgcttcttcgtgcttttggcagcgcatgctcagactttcttaata

SEQ ID NO: 441 - DNA, 672 bp, Gossypium hirsutum
  Clone ID: GOSHI-09MAY01-C66893_1
ttaaagagctcgctttgagtaccgcgtcaagctacgtccgactcagtgtccgagtcaacgattcctcatccttagctgaatctgatcctgaacaatgcaagagggcagcagcgagcaggaatttaacagtataagagcttcaattgcgatattgaattcaaatttagatcaacagaatcaaaggaagattagcgttctcaatgaattacaaaatttacaagagaaaattcgaaaggaaggtgctgaatccaaagtgaaaaaattcgtttcccttttggagaatttaaagttactagaaagacaagaatctgaaattcggtgtgattttgatgcaaaacgttcttcactggaagctgaggttagtgatttggaggaaaaaatagcagctggatctgacagcaagatgctttctcgtggtttagatggttctttaaatgaatcattgctgaagcttaatatacaaagagggaacttgcagctagactgagggcaatagtatcaataaagcgtcagctggatgatgcaccctcccagtcagaactcatccattatgagcgccggttgtcagagctgaacgctcatattcaggaaaaacttcaccaactcggaaattctatgcaacctataatgctctcttggagattaaagagtggatactaaggacattccttg

SEQ ID NO: 442 - DNA, 507 bp, Gossypium hirsutum
  Clone ID: GOSHI-09MAY01-C66763_1
gttgacccctgggcgtgcaaaaccggaatcgaaattaaaggggcagcaaaaaaaaccactgccatagcagttttgcaggatttcggggattccaacacaagcacaaattttgggtcttcagagaagaacagaaagatcaacaatggaggtggaattggaagagatgcttgatgatctgttgtctctaaggcaatctgtgtctgatccttctcttcatgcttcaattgacaagctgcaattgcgtgttgatcgtcttactcatcttgctaaggctgtacctgttcgacggtcaaaagtcaaggatatgagtgctgaggtggttgatagcaatccctatagtaggctcatggcacttcaaagaatgggtatcgtggagaactatgaaagggatccgggagttctcagttgccgtagttggtattggtggtgttggcagtgttgcagctgagatgctgacaaggtgcggcattggtcgacttttgttgtatgattatgataaagtggagt

SEQ ID NO: 443 - DNA, 457 bp, Gossypium hirsutum
  Clone ID: GOSHI-09MAY01-C66673_1
agaaaacccttttctaagggcatctctctctctctctctctctcttttactggtaggccactcacatggctctatcactatttcaaaactccatagctgaataataataaaacggcttggaagaaaagccatgggaagacctccttgctgtgataaagttggtatcaagaaaggtccatggacccctgaggaagatatcatacttgtctcttacatccaacaacatggtccagggaattggagatcagtacccactaatactgggttattgagatgcagcaaaagttgcaggcttcgatggactaattatctgagaacaggcatcaagcgagggaacttcactcctcatgaagaaggcatgataattcacttgcaagctttattgggtaacaaatgggcagcaattgcttcatacctaccacaaaggacagataatgatataaagaactactggaac

SEQ ID NO: 444 - DNA, 925 bp, Gossypium hirsutum
  Clone ID: GOSHI-09MAY01-C66053_1
ggggtgcgcttattgaaggacccagaatcggaaggtttgatcgggccggtagggcggtggctttgcgtggtcatagtgcgacgcttgttgttcttggtactttcatgctttggttcggttggtatgggttcaaccccggttcgtttaacaaaatctcgagtttttacacttccggtaactattatggtcagtggggggcggtgggaagaacggcggtgaccaccactttagccggatgtacagcggcgttgactaccctttttggtaaaaggatgttgaccggccattggaacgtcaccgatgtttgcaacggcttactcggtggcttcgccgccatcacatcaggctgctcggtggttgaaccatgggccgctatcatctgcggctgcgtcgccgctctagtcttaatcggatgcaacaaactagccgagaaagtcaagtacgacgaccccttggaggctgcccaattgcacggtggatgcggcgcttggggtgtcattttcacaggtttgttcgcgtctgaaaagctcgtgaaacaagtttaccccggcaggccagccaagtacgggctgttcatgggcggcggagggaagctgttcgcggcgcagatcatccagattctggtgtatcgtcgggtgggtgagtgccacaatgggaaccctgttctatttccttcacaaattcgggcttttaagaatctcagtcgaagatgaaatggctggcatggacttaaccaggcatgggggacttgcttatgtttatcatgatgaagatgaatcccaaaaaaatggcattcaaatgaggaaaattgaaagcttcccaactcctccttcagtctaaattttttttttattaaatccaaacttgttcagaatattttatcatattggatagattatatttttatatacatatgaattccctg

SEQ ID NO: 445 - DNA, 865 bp, Gossypium hirsutum
  Clone ID: GOSHI-09MAY01-C66203_1
ccacttttgcccggtcttttgttattattgatcctcctcttttcactctcttcttcgctaatatcctctctcgtggagttcggggggcatattaattacttcaccctcccctgcttgtcctttcttcttccatcattcctcatttttctgctttggaaatcttctaggcttgtagctaagctaagctaaactaaacttcgaagacatggatcttcttcactcctttagctcattagctcttattctgtatctcattgtcttaactctgaactctaaaggtgcattaggtgcttctttcacatttgtcaatcgatgtgggtacacggtgtggcctgggatattagcaaatgcaggcagtcctacactcgacagcactgggttcgagctaccaaaggactcgtctcgttcatttcaagccccaactggctggtcgggtcgtttttggggtcgaacgggctgcacatttgacggatccgggtctggtacgtgcgtaacgggcgactgcgggtcgggtcagatggaatgtaacggactcggagctgctccgcccgtgactctggctgagttcactctgggaccgggtgggcaagatttttacgacgtcagccttgttgtggctcctttatccccatgatcgttgaaggcagtggtgggtcaggtttttgtgcttcgcggggtgtccatctgacttgaaccgtcaatgcccgtcgggctccgggttggagacggtgacgcttgccagagcgcgtgtgaggctttcgggagtcccgagtcttgttgctgtggcgcgtttcgtccacctgcctcatgtttgccttccgtttattctgagatgttcatggccgcttgtcccgggtcttactgc

SEQ ID NO: 446 - DNA, 654 bp, Gossypium hirsutum
  Clone ID: GOSHI-09MAY01-C67893_1
acaaacttttcctggtccaaaatgccacagctctcagccgcttgccaatggctcccctaactttcactcaccaaaatcttcttcactctactccgaaactcacgacctcaaagccataccttaaacccaaaagaaccaaaaccaaactctctatccaaacaattagagagtctccacaagcttcttttactgatcaatttgttctccaattagctgactcattagaagactctctcccttcttcttcttcttcttctttgccacttcaaaagcttagagacaactcctctgaaacccttctttcaactcaatggccctctcggaaagacgagtcttttcgcttcacagatacgtcttttatcaagaattcagatataaacccaatttctcacccaccaaattcccttgatttgttggaggtttcgagagatacccagtttgaaagtttcaactttgttgatgggtttcttgtggattcttcttttagttcatcaaatttgcctgatggggtatatgtaggtagcttgtcaaagttatcttcagagggaattctcaaaagggtatgtgaacttttaggtgattttgaatggggtgatttattttggtctgttaatggattgggggcacctgatttgatggttgtttatgtgcctg

SEQ ID NO: 447 - DNA, 476 bp, Gossypium hirsutum
  Clone ID: GOSHI-09MAY01-C67543_1
ctctttcgtccggctcattcaggcatttccgcagacactttctcaaaagaaacgtttcttttacactaacatggctagaccgcaacaacgatatcgaggtgtccgacaaaggcattggggttcttgggtttctgaaattcgccatcctcttttgaaaactagaatttggctgggaacatttgaaacggcagaagacgcggctcgtgcctatgatgaagctgcaaggcttatgtgtggacccaggactagaactaacttcccttacgatcccaatgcacctcagtcatcatcatccaagctgctctcagcaactttgacagctaaactacataaatgctacttggcttcacttcaaatgaccaaacaacaatcagtgcaggagccaaaaagagagccaccgactccacatatcatcaccaacaatggcattgcagatagaggtagtgggacgggagttcgcctgctggagaagagac

SEQ ID NO: 448 - DNA, 584 bp, Gossypium hirsutum
  Clone ID: GOSHI-09MAY01-C67493_1
ccgtccgctcccctcctttctcaattttctccttcgaactccaacccactgctcctctctttgaaaattcaactcttctttttcttccccaaaaagccccactcactgagtcacttctcactctcaaaccccgtaaaaaagaaagttcaatttcccagaaaatgtctttctccacccggcagaggcgagcgacggtgtcggatcttccttcatcgtcgtcgccaccacaaccgtcgaagcctgaatcatacacgaaagtggataagccaggacgatcatcatcggacggcgtcggcgaagaccgcggattggggtggttcacggggttgtttgctttgggaatgctacggtatatgagcgccacatcaaatataatacacgactgcgatgaagtctttaattattgggagcctcttcattatcttctctataaatccggcttccaaacttgggagtatagttccgagtttgcgctccgatcatatttgtacattattttccatgagttagtgggccgacctgcttcctggctgtttgctgaagaaaaatgagagttttctatgcggtgagactctttcttggtt

SEQ ID NO: 449 - DNA, 385 bp, Gossypium hirsutum
  Clone ID: uC-gsflmaxxa095e11b1
cccattcgtccgctccccccttctcaattttctccttgaactccaacccactgctccactctttgaaaattcaactcttcttttcttccccaaaaagccccactcactgagtcacttctcactctcaaaccccgtaaaaaagcaatttcccagaaaatgtctttctccacccggcagaggcgagcgacggtgtcggatcttccttcatcgtcgtctccaccactacctgcgaagcctgaatcatacacgaaagtggatcagccaggacgatcatcatcgtacggcttatttctaaaccccttattgttttactttcttttctcttctaccatactctccatctttttctccctcctatcctttctacctttttttttctctttct

SEQ ID NO: 450 - DNA, 613 bp, Gossypium hirsutum
  Clone ID: GOSHI-09MAY01-C67483_1
cttcagtcgaccgatcccaaagagtagaaccattggcaggaccttctctaaccctaccaatcactaccttacatctcttaccaaacgcacctcttttctcttccaatcctcctcccctttctccgcgttcctccagctccggtgacggccgaggccgtggccgcggccgtgagggcgcctccccttctggtgcgttcggtggtttcactccagcccttggaaaacctgattcagaggacacgaagcgtgactcggctgaatcacaagctgttggatcaggccatggccgtggaagaggaatacccttatcgtctgaaccaattatcccttctttctcttcttttgtttcccaaaatgggtctggtcgaggccgagtcaccaatgagtcagttcggccgatacctccgcctccgcctccgccgcctccgagggaagcaaagcagccgatctttgttatgaagcaggatgagattgaaactgatttgtctgccaagctacctgctgagtcggttcagtcgagtgagcgaactttttcacctaggacaccctcagtcgcgtcattatcgggtgctgggcggggcaagcccgtgaaacaaccagggcctgtcttgca

SEQ ID NO: 451 - DNA, 563 bp, Gossypium hirsutum
  unsure (1)..(563): unsure at all n locations
  Clone ID: LIB3543-038-Q1-K1-E8
ttcactgtngaaaagngcttggcngaagtgcaggatccttgtctcgctctgtcatctctgccgcgagggctccttcactccgctcccctccaccgctaccccggctacgtccctcggtttcctctgctcctcgcctccagtcccgccgcctctcttatgctccttccagaaatttgggagaattgggatgtgtccaatcgttcttgcctctgcatagcatggttcctacggcttgtctcacgtcacacctgactgttaacgtgcgggcttgttgcgagctgtctcacggtaccttctgccgtacttgtcaggatcgctagtagtctctttgtacttgaaaggccatggatgagcacagcagagtgcaattggatgtcgaagattagtttgttaccgtggggaaccagaggcttaagtcgtctgattagaaaaatctcaataaaaaaaagacgttttctatttacgatactgtaaggaagatacctgtaattctcttatatgatcaccttgttaagcacatttagatttttgctccaattgatcatcaattcctttggtttgtg

SEQ ID NO: 452 - DNA, 401 bp, Gossypium hirsutum
  Clone ID: LIB3272-048-P1-K1-D8
aaacgcttcgatcttcactgtgaaaatggcttggcgaagtgcaggatccttgtctcgctctgtcatctctgccgcgagggctccttcactccgctcccctccaccgctaccccggctacgtccctcggtttcctctgctcctcgcctccagtcccgccgcctctcttatgctccttccagaaatttgggagaattgggatgtgtccaatcgttcttgcctctgcatagcatggttcctacggcttgtctcacgtcacacctgactgttaacgtgcgggcttgttgcgagctgtctcacggtacttgaaaggccatggatgagcacagcagagtgcaattggatgtcgaagataagtttgttacccgggggaaccagaggcttaagtcgtctgattagaaaa

SEQ ID NO: 453 - DNA, 643 bp, Gossypium hirsutum
  Clone ID: GOSHI-09MAY01-C67133_1
ctttccaataaaaaactccccaaatataacataagcttatcatattactaatcattaaagatattccaacgaaaaccagaaaaaaaaatgtcttggaaattctttggctctcactctctcccgctcttcttcctcttcttcttttattcctttcctttaatctcaactcaacacaatgatgatccaacatttaaaaccatgcatgatttctctgggtacccagttgatgaatcatcacacacttttacaccatcaaattcaatctcactttcagttgatattcaagctctgcaaaaacagattgatgagctatcaactttctcggacacacctgccccatcagtaactaggattctctacactgagaatgatgtattggctccgcaggtacggccaaaaatttattgggactcgctgggctttccgttacagaggatgttgtcgggaacattttcggtcggtgggatggctatgaaccagagcttactgcagtggcaacaggttctcacatcgatgcttttccgtactccgggaagtattgatgggtcgtccggtgtttaagggcccattagaaagcctttattgcactaaagcggtccgggttcaaacctaaaaggtcattggagataattttattcacttc

SEQ ID NO: 454 - DNA, 641 bp, Gossypium hirsutum
  Clone ID: GOSHI-09MAY01-C67213_1
tccacgcgtccgggcaatccctatccctttcctgtccttccattctaagtaatacattctatacaagtcgtcggccgccgcaaactagctgaaacgaagatggagcttggcttggaaactatggcggcggcaatcggcgtatcggtgccggtacttcggttccttttgtgtttcgtggcgaccattccggtgagttttctgtggcgatttgttccgggtacactacctaaacacgtctactcagctttttcaggtctcgtgctttcttatttgtcgtttgggatctcttccaatctgcttttcttggtgcccatgctcttgggttatgctgcaatgcttctttatcggcccaagtgcgggattatcacatttttcttgagtttcggttatttgattggctgccatgtatattacatgagtggggatgcatggaaggaaggaggcattgatgccactggagcattgatggtgttgacactgaaagtgatttcatctgcaataaattacaatgatgggttggtgaaagaggaagacttacccgaggctcagaagaaaataggttggttaagttgccttcattgattgaatatttcgggtactgcctctgctgtggcagtcactttgctggtccagtttttgag

SEQ ID NO: 455 - DNA, 543 bp, Gossypium hirsutum
  Clone ID: GOSHI-09MAY01-C60573_1
aaaggcttatcatagtgtttttgtttctggtgctttgatattttgcaggaaaatggatgatcagaaaacataaaggacatcaaggttttgccttctcctatccctgaaggttgggttttggataccaagttcaaagaggatggtactgaagtcaagtgctacttatgtccagccactgaacaacaattctacacatatgaagatcttatgcgttgtgtgaggtatgccaaagctgccaaggtttccatctacagtccctattttgaggcaaacatgaagcatgaaggctataaaaggttgaagaaagaaggccaaagctagtattgattttagagaggaacacgaagatgaagatagaaatatgagccagcttgagtgaaatctgtggcaaaatgttgtgtgtaattaacaaacgttgatgaattgtgtgtctattttgcaatgtttgggtcagtttgaatttccgattatcatatgtaatgagtgctaatgatcaaagtttggttttggtttccttctttgataaaaaaaccttatgttttt

SEQ ID NO: 456 - DNA, 468 bp, Gossypium hirsutum
  Clone ID: uC-gsronu33B015g02b1
cccactcgttcggtttcccactgttgtctgactttccaaaaaacctaactgaaaaacaaaaacaaaaattcgaaactaaagactcaaattgaaatcaaagagagaagctaagctaaagattgcgaattgctctttcggaagttttcaagcttatggtgtccgtgaaccccaacccagctcaaggtttttacttcttcgatccgatgaatatgggtcttcctggtgttaattcagccccgcctgccaataaggtggcgccgccgcttcatgttccacctcctcctgccacctccggtgctggtaatactacagtgtatccggaggatcccagtaagaaaatccgaaagccttacactattaccaagtctagagagagctggactgagcaggagcacgagaagtttctcgaagctcttcaattatttgatcgtgattggaaaaagattgaagcttttgtcgggtcaaaga

SEQ ID NO: 457 - DNA, 377 bp, Gossypium hirsutum
  Clone ID: LIB3196-015-P1-M1-H5
gacccatccatccacgcacgcgtacgactctatctacaagatgcgcgaattgctgcttcggtaattttcaagcttatggtttccgtgaaccccaacccggctcaaggtttttacttcttcgatccgatgaatatgggtcttcctggtgttaattcggccccgcctgccaatacggtggcgccgccgcttcaggttccacctactcctgccacctccggtgctggtaatactacagtgtatccggaggatcccagtaagaaaatccggaagccttacactattaccaagtctagagagagctggactgagcaggagcacgagaagtttctcgaagctcttcaattatttgatcgtgattggaaaaagattgaaacttt

SEQ ID NO: 458 - DNA, 1150 bp, Gossypium hirsutum
  Clone ID: GOSHI-09MAY01-C60743_1
cttgtgaatgttagcaaagcaggggagaatattgttataaatgctgtggatcagactgaaactattcaagaaaatgggacatctttgttaaaagttgatccaaatggaaaaccaaataaaaaaagagctgctcctgatccagaccttgctacgacaagaagcacgaatgatactggtcacggagagaatgttgatggagttctcgtcaatgatgatccgagtgagcctaccatggctgagaaacttgcaagtttaaatttaatagaaaatggaaaaaatgaaaccaatgaaaaccaagaaagaaaagaaccctctactcatggtaagcctcccatcgcggattcagttatggttctgcttaagcaggcactccgtgctgacgatcatgcacttctgttagattgcttatacactcaagatgagaaggttattgcaaattcagtctcccaattaaatccatctgatgttctcaagcttttacaatctcttgtatctataactcaatcaaggggtgcagtattggcatgtgcgcttccttggataaaaagtttacttcttcatcacgctagtggaattatgtcccaggaatcctctcttcttgctctgaactctttgtatcagcttattgaatctagagtctcaacttttgaatcagctcttcaaatatcaagttgcttagacttcctttatgcaggggttgttgaggatgagtttgttgagaatgctgcaattccagtaatatttgaggacacggatgaaagtgatgaagaggaaccggaagatgcaatggaaactgatgatcaagagaacgaagatggggaagcacttgatgaagcatctgatggggaagcacacgtactcgtaggagaggaagatttgatgccaactttcaggtactgttgctataaccgggattctttgatggaagttgttcctttctcgaacaaataccgaaaatcccattgtccttttcaattttagtatctctccagaatttgcaattttcatcatatttgcaggaatgtaatagtaaaactttctctaaaccctttttttggtactatttatgagcatgtattgttctttaacatgatttcatttgcataagaaaagtgacatcttaagagctttgagagcttggatttgcttc

SEQ ID NO: 459 - DNA, 639 bp, Gossypium hirsutum
  Clone ID: GOSHI-09MAY01-C60713_1
ctttttacttccctctttttctttgggtatgtgggtctttttctgattctctcccagagccgtccgaaaaaaagaagaggaaagccaaaactccaaactttctattttgcttttttattatatttttttttggttcaattcagtttcgccatttcctttgcatgtagatgctctttggttagtccctatcgccgctacttggactcactttccgctgctatctttttttcggctttctcatggctaataacaccaacgaggcccccgccgccgatgatttcctcgagcaaatcctcggcctccctaactttgcgccctccgaaacgggcttagctggatccgacgctggattggctgcaaccgctgctggagctggagctccaatgtttttgcagctcagctccggtgatggcgccgctcatatcggtggaatcggcggcggtggaggcggtgcgtttcatgggcaggttttccccttgggcttgagcttggagcaagggaaaggcgggtttttgaaacccgaggaagcttcccgtagtgggaagcggtttcggaacgggtcgttgatgaccgggcttcttctgtaaaaaatgttttccatggccaacctatgcaagcaactgtttctgcagcaccaca

SEQ ID NO: 460 - DNA, 378 bp, Gossypium hirsutum
  Clone ID: GOSHI-09MAY01-C60053_1
atgtcatttcattggcgtttgagtcagcaaagaagtcaagatggccaaagttccggacatgtttgaagacctgaagaactgttacagtgaaaatgaagaagacagttcctccattgaccatctgtctctgaatcagaaatccttctatgatgtaagctatggcccactccatgaaggctgcatggatcagtctgtgtccctgagtatctctgaaatctctaaaacatccaagctgaccttcaagcagagcatggtggtagtatcaaccaatgggaaggttctgaagaagagacggttgagtttaagccagtccatcactgataataacctggaggccatcgccaacgactcagaggaagaaatcatcaagcccaggtc

SEQ ID NO: 461 - DNA, 385 bp, Gossypium hirsutum
  Clone ID: GOSHI-09MAY01-C61553_1
atctgggcaagagggccagacactggctcaaccagctaacttaacagcacaaataactaccacgtatcagctcaacccaccagcctcttgctctgcatgtacagataccatgtatggagggctctgggctagatgcttgggaatccagagaggaaacatcaacagttcttccccatggcgcacagtctacacgaggctttttcctttggcatctggaccacacctcctctgagggctaataatgcagcctgtggtccaggcaacaccttgccattctatcaagaaaaggctcactgtgcccatgctgcagtggctagaaagattggctagcagcagttcccaaccagtagcaattttctttctcaggggacctttgtcaatatct

SEQ ID NO: 462 - DNA, 904 bp, Gossypium hirsutum
  Clone ID: GOSHI-09MAY01-C61433_2
cccacgcgtccgaacggcccatttcatttgccattagccacttgccggcgatatattctcggagattgcccttttttccctctttcctttttgcggcaacatgacgacgtcgtcgagccttcctgctgtacagctccccacttcttcgctcggacctaccgataactttactgctcgctaccactaactttactaacgaccggacactatctctttcatctcaaatatgttattggctattttgatattgcactaattaattgtatgtgggcttttttattcccagtaaaaaaccaaagcaatgagcttctgttgtttttcccttcaatatatctttctttttttttttcagtttgaatttatcatttatgcatgtcgatttttttaacatatattttgcaacttcttaccttttttttttaaaatttttaggatgattattgttagtatgttattgaaatttgatttgattggtccctttattacttttttggggtaatttggaaattgaagaaattttctttatcttgaagaaaattgaaaattttttgcccactttccagcctatgatgttattttctgtctattttcaacacgactgcagcttgtgcaagtttggtgtgaaatgtagctatgcagaagcaggaatcagtgatgactcaagatcagctacaatagatgttgtggctgatgtcagaaacgaacggattgtagtcttaggaggaagcggctttgttggttctgcaatatgcaaggctgcggtatccaagggcataaaggttataagcctaagcaggtcagggcgtcctacttactcgggctcatgggtggatcaggttaattgggtaccagagatgttttctatgcaaactgggatgaagtacttgttggggctacagctgtg

SEQ ID NO: 463 - DNA, 695 bp, Gossypium hirsutum
  Clone ID: GOSHI-09MAY01-C61433_1
cccacgcgttcgcccacgcgtgcgcccacgcgttcgcccacgcgttcgcccacgcgttcgacggcccatttcatttgccattagccacttgccggcaatatattctcggagattgcccttgtttccctctttcctgtttgcggcaacatgaggacgtcgtttcgagccttccctgttgttacagttccccctcttccttctctcggccccaccgcttcctttcctgctcgcttcccctcacttcctcaacgccgcttgtgcaagtttggtgtgaaatgtagctatgcagaagcaggaatcagtgatgactcaagatcagctacaatagatgttgtggctgatgtcagaaacgaacggattgtagtcttaggaggaagcggctttgttggttctgcaatatgcaaggctgcggtatccaagggcatagaggttataagcctaagcaggtcagggcgtcctacttactcgggctcatgggtggatcaggttaattgggtaccaggagatgttttctatgcaaactgggatgaagtacttgttggagctacagctgtggtttcaacccttggaggttttggcagtgaggagcagatgaaaagaattaatggcgaggctaatgttgtggctgtaaatgctgcaaaggattttgggattccaaagtttatcttaatctcagtgcatgattacaacctacc

SEQ ID NO: 464 - DNA, 492 bp, Gossypium hirsutum
  Clone ID: GOSHI-09MAY01-C61793_1
atgcgcaggctcgaagctgcgcaggcgcagggcccgcccctgggaccctcggggccaggcggtttggcccctcatcgcccgggcgtcggggcgggagaagaccagaagaagggaggccctccaggacccaagtttcttcaccatggggatgtggtccattggtgcaggagccctgggggctgctgccttggcattgctgcttgccaacacagacgtgtttctgtccaagccccagaaagcagccctgggagtacctggaggatatagacctgaaaacactggagaaggaaccaaggactttgaaagcaaaggagctatgggaaaaaaatggagctgtgattatggccgtgcggaggccaggctttcctctgtcgagaggaagctgcggatctgtcttccctgaaaagcatgttggaccagctgggcgtccccctctatgcagtggtaaaggagcacatcaggaccgaagtggaggatttccagccttatttc

SEQ ID NO: 465 - DNA, 378 bp, Gossypium hirsutum
  Clone ID: GOSHI-09MAY01-C61733_1
cccacgcgtccgcccacgcgtccgcccacgcgtccgcccacgcgtccggagaaggaagggtaaaaaggaaatgcactgcttggaatattttggcatcgggacagactacacagtactttcggaggggctgtttaagagtttcttactgattgttagtttgattgaagctatatagacaatgtttaggactgcatgtttgactcgcaattagagttggttttggtgtacgaaacgaagaagaagaaacgagttgtgaaaagtcttcgtttgaatgtaccaggctgtttctacctgcaattcaattagaataattttatgattatagggtcataaacaattaactatcatgaatcgcattttccactaattaaaatttag

SEQ ID NO: 466 - DNA, 1147 bp, Gossypium hirsutum
  Clone ID: GOSHI-09MAY01-C61603_1
cccacgcgtccgcccacgcgtccgcccacgcgtccgcccacgcgtccgcccacgcgtccgcccacgcgtccgggctcaagcaactttcacagccgaagatcaaaagattgagtcttttaggttactaagtggccacaaaatccctgcaattgggttaggcacttggagatccggttcacaagccgataactccgtcaagaccgccattgttgagggtggttatagacatatagatacagcttgggaatacggtgttcaagaaagtgttggccatggagtcaaagcagcaatacatgcaggagtagaaagaagggatattttcattacatccaagctatggtgcaccgagttgagtccagaacgtgttcgacctgctttattgaacaccctcgaagaactccaacttgaataccttgatctttacctgatacattggccatttaggctagcagatggagcaagcagaccacctaaaccaggtgacgtacaagaaatggacatggaaggtgtttggagagaaatggagaggcttgtagaagacaagctggttagagatattggtgtgtgtaattttacactgaagaagatgaacaagttgcttggttttgctgaaactatgccatctgtttgtcaaatggaaatgcatcctggttggagaaatgataagatgttggaagcttgtaaacagaatggcatccatgtcactgcatattcaccacttggttcacaagaaggtggtagggacctaatccatgatgaaacagtggatagaatagcaaagaagctgaacaaaacaccaggacaagtgctggtaaaatgggcaatacaaaggggaaccagtgtcatacccaaatcaaacaacactgataggatcaaagaaaacattgaggtgtttgggtgggaattgccacaagaggattttcaagctctttgtaacatccctgatcagaagagagtgttgcatggagaacaattgtttgtgaacaagaatgcagggcctttaagaagtgtggctgatgtatgggatcatgaagattagcaacaatacaaccccactccacaatgctgaggttctcatcaatgaacacgacgatgaggatgaggatggttccctgtgtgtttgtagtgatgatgatatgtaaccaaa

SEQ ID NO: 467 - DNA, 520 bp, Gossypium hirsutum
  Clone ID: GOSHI-09MAY01-C61123_1
ctgctatcagttgcaatggtggcggcgacagttggcctgagaggcttatctttatgtaccttatcgcttcccatcctccgtagtgcgaagattaagctgcccattcactcatttccaacgagtcgaagcctaaaacctctgttttcccctttcaatcctaccattctcaggggttttccctcgttttgtgcgtctccggacgtcaacgtggaggccaccgccacagctccgccggctacggaggcggaaaattctcagtcggcggacgatataaagaacgcagccaacctcctcgacataagggttggccgaataatcaaagcgtggagacatgaagaagccgattctctatacgtggaagaagtggatgtaggcgagcctgaacccagaatcatctgcagcgggcttgttaaatacatgcctttagatcttcttcaggatgcgaaagtggttgttcttgctaatctgaagccgaggaacatgcgaggtgtgaagtcttgtggaatgctaatggctgctt

SEQ ID NO: 468 - DNA, 427 bp, Gossypium hirsutum
  Clone ID: uC-gsflnu33B145f09b1
tgttctctctctctattctctttggcttatctatcgctttgatttcgcatacttgctgtgcatcgattagacagaaatcgagtcggaggacaaagaggtgcaggagagatgtcgccaggagctgcaaaaagctgccatgcaatgggaggtgatgcaccttgttaaccacggcatctgacaggagctcatgggtcgccgtcgcaacgccgccgactacggaggcggaaaattttcagagggcggacgatataaagaacgcagccaacctcctggacataagggatggtcgaataatcaaagcgtggagacatgaaaaagctgattctctatacttggaagaagtggatgtaggcgagccttaacccagaattatctgcgcgggcttgttaaatacatgcctttagatcttcttcaggatgcgaaagtg

SEQ ID NO: 469 - DNA, 572 bp, Gossypium hirsutum
  Clone ID: GOSHI-09MAY01-C61003_1
atgaaatattcacatttctgttatttcttgtttttaagctctgaattattccagttttctgtcctgcatgctttcaacagtgtgcttttacagaggcagtttatcacagtgaatgtccctgccccacactccatatggtcctgttgtcctgaaaatacactccaggtagcacagacttgttattttgcctggctggttacacacatgctgtcttgctttgctgctcagccgcctccctctgaggccaacttaggccaacctacctgggactccatctgaagtcagacgccagagaaactgagtggcgaccacgggtctgcttttctctctgatcctaggggacttgttgacatgggagtatctgttcccacatggaaggatgtgggttgctctctcatctctgaatagatgtaatgtatgacaagtctagtggccatggtttaaaatgttgctgtgaggattctccatgctgtataagaagaatgactttcttcagattataatcgttattaaagctgtttgtaccctttacttaaaaactattaacagtttttcatgttgcactggtcatt

SEQ ID NO: 470 - DNA, 415 bp, Gossypium hirsutum
  Clone ID: GOSHI-09MAY01-C61253_1
atgcagtcgttcggctcaaaaacgaccaggctaactactcactcaacacagatgacccgctcatcttcaagtccaccctggacactgattaccagatgaccaaacgggacatgggctttactgaagaggagttctaagaggctgaacatcaatgcggccaaatctagtttcctcccagaagatgacaagagggagctactcgacctgctctataaagcctatgggatgccacctccagcctctgcagggcagcacctctgaggacaacacccctccaagcctttgccctgtggagtcaccccaattctgtggcgctgagcaacatttttacatttattccttccaagaagaccatgatctcaatcgtcagttactgatgcttctgaagcctgtgtgtccatttctgcacacacct

SEQ ID NO: 471 - DNA, 492 bp, Gossypium hirsutum
  Clone ID: GOSHI-09MAY01-C62453_1
atctcctagatggctggcaaaaatgggaatgttggtagattttgaagcctctctgcaagtggggcggggctttgatacagatatttctgttgaagttaatgaaatcaagagagctgtagcatcatcaagcaggagaacaacaattcgatttgcagatctcaagcgaaaaagatattggtatcccttgacgatagggattgggttactggtgcttcagcaactaagtggcatcaacggtgttttattctattccagcaatatcttcgcaagtgctggggttgcgtctagtgatgttgcgacatttggggttggggccattcaggtcattgcaactggggtgactacatggttggtggacaaaactggccgcagacttcttcttatggtatcctcggctggaatgacactgagtctgctaattgttgcagttgccttttatgttgagggcatcgtcgctaaagattctgacttatatggcataatgtgaatact

SEQ ID NO: 472 - DNA, 564 bp, Gossypium hirsutum
  Clone ID: LIB3828-025-Q6-K6-F1
ttctatttgtacatcttattgatgttgttatcttcttaagaatttgaggggaatcgtattaattgtttaattacacaagcttaacaaaaaatgaattaccccttcccatctcaaggctcttattccataaccctcatcatgcattattgtcataatttggtgtatgttcttaaggttgcaacagctttaggtatcgtttatttatttttgccttctgtttcactaatttgatggtgctataaaactttttaggggttgcgtctagtgatgttgcgacatttggggttggggccattcaggtcattgcaactggggtgactacatggttggtggacaaaactggccgcagacttcttcttatggtatcctcggctggaatgacactgagtctgctaattgttgcagttgccttttatgttgagggcatcgtcgctaaagattctgacttatatggcataatgggaatactgtcattggtcggtcttgtggcatttgtgattgccttctcactgggaattggagcaattccatgggttataatgtccgagatacttccagtaaata

SEQ ID NO: 473 - DNA, 385 bp, Gossypium hirsutum
  Clone ID: GOSHI-09MAY01-C62733_1
ataccagacaagctccagcagctggcccttcacatccagacttgcctgagaggacccacccctgggtgtccggtggtcagtcgccccaggatggggactacagtcagagcagccttggtcttggcctatttggccattgcttctgctgcctctgagggaggcttcaaggctacagggcagaggcagctgaggccagagcactttcaagaagttggctacgcagctcccccctccccacccctatcccgaagcctcctcatggatcaccctgacagctctcagcatggccctccctttgagggacagagtcaagtgcagcctcctccctctcaggaggccacccctatccaacaggaagagctgatgcctgcccaactgcctgctg

SEQ ID NO: 474 - DNA, 746 bp, Gossypium hirsutum
  Clone ID: GOSHI-09MAY01-C62163_2
gatcttttgaaggagacaacatacgatgactcaagtgtggagaggagaaccgtcaggcaatttctcagttagaagtgcctataaactattacaggaggctaattcgggtcctagtaataattttatacagaccgagattaaagatttttacaggaaaatatggaatttacatcttccttcgaaagttaaaattacaatatgaagaatctcctggaattatatctctattttaactaatctcaagcataaaaaagtggttgtggaaattcattgtccccgatgtcgtaactctgaggaagacaacaattaaattttccaatattgtcctacaataattgaagtatggatgaatttaaatcatcctgggcagttaataatgtcattcaaagcaagtgggagtggcttatctgggtttttagtcaggggactagccaacagtgtcgtctcttttgctgcggactatggtcaatcttaaaaatagacagaggccacaaactgaaaggagaacgagggtgacaatttattttgatgcagcctttgacaagcgatcttccaaatctattttgggactggtaatacgagatgtggggggcgagatcttggcatcaaagacggttattcacaccgaagtaccatatctgctgggtgctgttctaagctatgttcgtcgcgaaatggagaaacggcggcggagacaaccagactgataagaataaagaaggcttcatggaaattgatagcagaag

SEQ ID NO: 475 - DNA, 609 bp, Gossypium hirsutum
  Clone ID: GOSHI-09MAY01-C62163_1
ggactatggtcaatctggacacatagaaatcggttaatctatgaaagaaaatgtatgatgggtatggatatttcgaaacaaatctatagctatatttctgagttgaatggcttagaggagaaaaaactcaccttaaaaatagacagaggccacaaactgaaaggagaacgagggtgacaatttattttgatgcagcctttgacaagcgatcttccaaatctattttgggactggtaatacgagatgtggggggcgagatcttggcatcaaagacggttattcacaccgaagtaccatatctgtttgcggtgaaggcacatgcaggattataagccattcggttaggaatttcaatgggttttagcattctggaaatagtgcgggattcaagaatggtaataaagaaatgccaaactacagatctcgacaaatcagttattggggcactcatcagagatattcacagtaaaaaggttcatttctacgaaattggttttcattttattcctaaagcagagaatgaatatgcccatattcttgcgcaagaagcattgagaaagggaggatgacattacctgctgggtgctgttctaagctatgtccgtcgct

SEQ ID NO: 476 - DNA, 667 bp, Gossypium hirsutum
  Clone ID: GOSHI-09MAY01-C62013_1
cattttaaagagtttgggagtcctcgattatcgttactgagaggagatccaacgagagttctaactttatagcctgtaatcctgcataagcttttgctgcaaacggagatggaacgcttgtgttcaaaacagtcttcgttgctaggagtgcccccatctggccccaaacaaccaagcccgatgccgatttgaaatttcttttgtcaaaagctgcgtcaatctgaatcatcgccctggtatttgcaccttgttggctgtggcttctgttcgtgtttaagatgaaccacaatctgcggcagaacattcggcactgtttagaagtactcctcttaaagatccaggacattgtcgaaaaacatgagtgctatcttctttcccatttctgcagcgaggacataatacattattagttgctcgtttatgctttaggtttactagggtagggatatagtttcatgatattctccatattgtaattgtaattgtaatttttaaaggtagctgtagaatctagagctttttgtagaattcctttatattgttattaggacccaacctagcatcttgtaatagttttaggcacatttgactgagaattcgccagatggttctcctttccacacttgaaaaccatcatgagctgtttgatttgcaaattttttgagct

SEQ ID NO: 477 - DNA, 646 bp, Gossypium hirsutum
  Clone ID: GOSHI-09MAY01-C62353_1
gccttcatcaaaaccatcagaagggaagcgattcattctctcatctctcactttcatcttcttcctctgtgcattagcttccatcaacgaaatcagattcgagagcttgtttaagcttggaagatgtgctctttccaacgcccctctgcctctcaactcatcttcagaaatgtccacacttgcacccaattcctcattccgatgacattcggattctgatcggaatcctcacacttcccgatcagtaccatcgccgccatttccttcgtctcatatatggtacgcagactccggtgggggcacaagtggacgtgaagttcgtgttttgtaacctcacaaaagaagaccagaaggtattggttgcacttgagataatgcgatacgatgatatcataatcctcaactgtaaagaaaatatgaacaagggcaagacttacacattcttttcgagcttgccggagatatttaactcctcggataggcattaccctccttaccattacgtgatgaaaggagacgatgatacatacttgaggttagacaagttggtggagtcactaaggccattaccaagagaagacttgtattacgggtacgtaatcccatgccccagcatggacccttttgttcattacatgtctgggat

SEQ ID NO: 478 - DNA, 527 bp, Gossypium hirsutum
  Clone ID: GOSHI-09MAY01-C62303_1
acaatctgtacattacccaattgtccctctcgcaattctcaagtggactgcacagtctctctctcatatcctatctcttcgtcttgacaaaaatagtaattttttgctctctttatccctccctttctttgcatgtccccagcgtttcatgtaggtgaaagtagagtactaaacaaatttctttttaaaaattggtgggaaggattaaacggtaatttccggatgttctggcgggaatcccatcggccctcgaatctctccgttctctgtagcattcaaccttcaaatagactaaaaaacagaggctatctcggtgccatgattgtttgtttgttaattgaataagcaaagcatgccaattgctgtctttcctaagcctttctacttcaaagcatggcaacacgaatccgccgcctcactaccagaagatcaccacctaagcttctttttctcgccctcttgatgcttacgccagtttgcgtgattggcttatataactatggccagaagatatcctactttttccg

SEQ ID NO: 479 - DNA, 678 bp, Gossypium hirsutum
  Clone ID: GOSHI-09MAY01-C63473_1
gtttgtgtcttttcttggaggcatgtaatgggagtgcttgctcgccaggttggttgttcagttgccgcttttgatcggcctggttggggattgacttctaggcctagccggaaggactgggagggaaaagagttgcccaatccgtacaagcttgaaactcaggttgacttgcttctttccttttgctctgagatggggttttcttcagtagtgcttgttggccatgatgatggaggcctgcttgctttgaaggctgcacaaaaagtccaaacttcaatgaattcgttcaatattacaatcaaagcagtggttttgctaaacgttagcttgtctggggaagttgttcccgcctttgcaaggatactcttgcgcacttcacttgggaagaagcacttggttcgtccgcttctgcgaacagaaatcacacaagtggtgaatagacgtgcatggtatgatgcaaccaagttaacaacggaagttttgagcctctacaaggccccactttgtgcagaaggttgggatgaagcacttcatgagataagcaggttgtcatctgaaacaatcctttcaccacaaaatgcaacatcactgctaaaagctattgaagagatgccagtattagtcattgctggtgctgaagatgcccatatttctcttaaatcttgccaggccttggct

SEQ ID NO: 480 - DNA, 608 bp, Gossypium hirsutum
  Clone ID: GOSHI-09MAY01-C63193_1
aaaatatcaggcatatgttctctcattgctgaagactttcctatggtagaccaggcgccagtacgtaaaggtggaagtggaaaatcggctgcccgtctgaagtgcccaaaaaatactttgatttctaatgtgaaatttgctagcttcggaaatcctacaggaaagtgtgggtcttacagcatgggggagtgccatgatcctaactcaacattggcagtcgaaaaggtctgcctaggtaagaatgagtgtgccatagaactaacagaagagaacttcgataagggcttgtgtcctggtactactaagagacttgcaattgaagcagtttgcagctaaagttaccccggtatatgttccgacacaaatgttttggctgcttcctgaagaagaaaacggaagaaaagagcattttgctccgttttctttcgggcacgagctgtgtcttatttcctcaacatgatgcccctaattttatttttcttttgctcaggtactttttgtcctttgaggtgtttgcgacaattcaagagcatagatagacttagctcttaatacgtggaatattcgtttttgcttttaaatatatcgatattggtcaagcatttggc

SEQ ID NO: 481 - DNA, 509 bp, Gossypium hirsutum
  Clone ID: GOSHI-09MAY01-C63213_1
cggacgcgtgggaaaaaaggtgtttcctggtactttgcccttttcccttcagaatcccttcgttttttttttctcatccgtctcttagtctctgaaaatttcctatttattgaaaaaggagaagaatgtcgggatctgagacgggaatgatggcgagtagagagccctacagcttgggcatgcaacagaagagtccggtggcgtcacaaccggtgatacagaacatgcgtttagcctttaggtctgacggaacagctgtgtacaagcccatcacttccgcctcactcacatatcagccagcttccggcgatggtggggccgaggggtccgctggtggacctgcggtcactcaagaacaagggcaagctctgaacatgagcatgagcatggggagcgaacccttgaagaggaagagagggaggcccaggaagtatgggccggaaagtaccatgccgttgtctcttataccagctacttcctctgtcagggtaacccaatctaatagtgga

SEQ ID NO: 482 - DNA, 752 bp, Gossypium hirsutum
  Clone ID: GOSHI-09MAY01-C18993_1
ctcgctccctctctctctctcttgcatttttattttcttaccaaagcattcaaggtactgtagagaagcagccctggtcattgctgacaatctcgcctaggattcagcaaagctgctgttttaggaaaggtctcttcctccttgtaatctgtctggtctgaaaatggggaggcactcttgctgttacaagcagaagctaaggaaaggtctttggtctcccgaagaagatgagaagctcttgaggcatattaccaagtacggccatggttgctggagctctgtccctaaacaagctggtctgcagaggtgtggaaagagctgcaggttaaggtggattaattatttaaggcctgatttaaagagaggtacattctctcaagaagaagaaaacctcataattgaacttcatgcagggtgggggaataggtggtcccaaattgcggcacaattgccaggaagaaccgacaatgaaattaaaaacctatggaactcttgcttaaagaagaagcttaggcagcgaggcattgaccctgtcactcacaagcccctctcagaggttgaacatggtgaagacaagagtcaaccacgcaccaacagcaaggatatggcttcaagtgaattgaacatcaacaccaacaatcctaaacctggaacatcaccagttactccacgaggttaccaactggaaatggaaggctctcccacctacaagacagtgaacagcagcgataacaatggcaataccaccacca

SEQ ID NO: 483 - DNA, 444 bp, Gossypium hirsutum
  Clone ID: GOSHI-09MAY01-C18853_1
cagagtcctctagtttctggtaagtgatgatggccattcttttctccctccatggcctcatttagagcttgcctctcaaccagaaggagaggaacctgttgttcaactttcatatttaatccttcataaaattcttggatttcaaggtagagaggttggcattcatgagtatccataattgcagaatctagacactctaggcacagcctccgaccatcatcaagtgatatatattttacatctacaggctccattctttcgcaactacaacagcgaggagtgccatcacgctcatgagaggggcagtacttttgcatccagtagggatgtgccctgtactcaattagaccagctggatttgtcggtataaatttcctgcaaacatcacattttggatgatgctgctctttatagcaggatttatgaaaaggactattccctgaa

SEQ ID NO: 484 - DNA, 294 bp, Gossypium hirsutum
  Clone ID: LIB3083-113-Q1-L1-B6
gaaatttataccgacaaatccagctggtctaattgagtacagggcacatccctactgtatgcaaaagtgctggccctataatgagcgctatcgcactcctaagctgccgtagaagcgaaagaatggaccctgttgatgtaaaagaaatatcatttgatgaaagtccaaggctgttcctacagtgtcaagactctgcatttattgatactcatcaatgacaacctggttaccgatagaatgaaaaatcatatcaagtgacaaagctgaaaagtgtgctacaagtacctctccatt

SEQ ID NO: 485 - DNA, 1656 bp, Gossypium hirsutum
  Clone ID: GOSHI-09MAY01-C18823_1
gaaatcaagaggattgccattatgcctttctggtatgtattttcacactgatggcccataacaaaggaccacattttgtatctcgaatatatacaacaaactttccattaccttgatataaatacaaccagtaccaacctacaggcaagcttattcttgcctctgcactgacatgaagaacaagaaataaacatccaagtttcttacttacaacgtcaagttcagcctctagcttgcttcagtagacatgatctcaagctctgcccaccaaagaggagaaagtgtggggattgcattatcaggagtgattgcagtaatctctctcaatcttgcactgactcctctcatatccggtctgtgtccaggctcagggtcgatgcaagattttatgacctccccgatcaggtcaaattggtccttgtcgaaagagtttagagtaggatcgaccatctctacgagggcttgctcccttctcaaatagtctgatgccatgtcctcagatgaaccattatccaccaagtaaggcatcctacccgttactatttcaaataataatacgccaaaggtatatacgttactttctaggcttgccattgtggtatccgaaaggtttattccgtctccttccctgtctgatgcagtcaactcattccagaaacacggatctgagattttggctgcataatcttctgttagactgacagctgaggacgacaggttgttatggggtacgggtgggtttagctggtgcatgtgctcgaggcagtaagccatgcccattataattctcaacctcatagcccagtccaaatgctcagattctttaatgtgtaaatgctcaaagagagtgccatttggagcatattcaaaaaccaacatcctagtgaaaggattatcttcctcacaatatccaagaagattaacaaaatttttgtggttgacctttgataatgtgtcaatcttcttcctgaattgtgtttctaaattcttcgaccaatctttggtagattcaactggaacagagaccacagctatttcaactccattagacagtgtccctttgtacaccgtcccaatcattgtagaaccaattacattgctgaaatcttcgcaggctgcttcaagctccgatcgcttcagctttggtacaccagttacaaatgctttctgaagttgtccacttagccctgtggcccaaggtttcacagtagataccttgtaagttttcaaaagataggcaatgattattaatattagaagaaatgtaccaccccctatgcttccgactagtattgctgcttcatgacttgacttagagtcaggaatagaaggattgcttcccgacggtgatggagcagaagtattaggtactgtatcatttccagaaggtttagaagcaggagcagagggaggtcgtggaacaggagcgccctgagttatgtactatttgtggatggttcagaagatgcaggatgagttggagctctagatgtacgaggagatggaggcatactataatttaaagggggtgcttttggtgactttgcagaagtgtttgccgtttcttgcagcaatctccttagcactgcaccttcagatcggtcactgttctggattgttagggagagatcgttgctgagtccagatggaagcgat

SEQ ID NO: 486 - DNA, 422 bp, Gossypium hirsutum
  Clone ID: LIB3493-014-P1-M1-A9
cggacgcgtggggtcccctgttactcatccagtgggcaactgtgtaaagcgggtggttgagtcgttacgacattgcatgcactaaacggcacacacttcagcaaagtcaccaaattcaccctgtttaaattatagtttgcctccatctactcgtacatgtagagctccaactcatcctgcatgttgtgaaccatccacaaatagtacatatctaatggtagctgctgtcacacgacctccatctgatcttgcttctaaaccttctggaaatgatacattacctaatacttctgctccatcaccatcgggaagcaatccttctattcctgactctaagtcaagtcatcaagcagcaatactagtcggaagcatagggggtggtacatttcttctaatattaataatcattgcctattttttga

SEQ ID NO: 487 - DNA, 1278 bp, Gossypium hirsutum
  Clone ID: GOSHI-09MAY01-C18543_1
cccacgcgtccgtgaaaacattcccaacctctttaagagaatggggggtggcatatacactcttccaagccatttatctcctggtgctagagacttgattcctcgtatgcttgtagttgatccaatgaaaagaatgaccattcctgagatccgtcagcacccatggtttcaagcacatcttcctagatatttagctgttcccccaccggatacaatgcaacaagcaagaaagattgatgaggagattcttcaggaagttgtcagaatgggatttgaaaggaaccatctggttgaatctcttcgcaatagaattcagaatgagggaactgttgcttactacttactattggacaatcggttccgcgtctccagtggctatcttggagctgagtttcaagaaactatggctcctgccctcccccgcgtactcccgactgaaccgacatctccagctgttggacaccgccttctaggatttgctgattatcaagcaatgggtttaagaggccttgagaggaaatgggctcttggacttcagtctcgagcccatcctcgtgaaattatgactgaagttctcaaagctctgcaagaactcaatgtctgttggaagaagatagggcattacaacatgaagtgcaggtggctgcctagcattcctggtcttaatgaaggcatgcttaacaataatcactattttggtgatgaatcaaccattgtggaaaatgatggtgttaccaaattgccgaatgttgtcaaattcgaagtgcagctttacaaaactcgcgaggagaagtatctgctggatcttcaagggttcagggacctcagtttctcttcttggatctttgtgccgcattccgggcacagcttcgggtcctctaaaataagcaggctgtatttctaaggacccttactccatgaatctcctatgatgcatgtgaataacaacattctatgtatataactgttcctttttccgtctttttttttttcggtgaccctctattttagatgggttaactgtggagaggccagtcctcaaacactaggattggccaaggcaatattactatattagtcctgcttctgacaaagtttgccttcaattataagtagggtttccacaatgttatggaacctaaagggagtttttatgaattatgatagaattcaccttggtcttttggaaggttatatcttctcattcatgtttgaatatatatcaaacacgggtgttagatatgggtattcaacagtatcagaattgatggaaatctg

SEQ ID NO: 488 - DNA, 592 bp, Gossypium hirsutum
  Clone ID: GOSHI-09MAY01-C18573_1
tgccaaaccgtcacggctcctctcgatcgaattaagcttcttatgcagacgcatggggtgagagctgggcaagagagtgcaaaaaagctattggtttcattgaggcgattgcattgattgggaaggaagaagggattaaagcgttccggtgcggcaaccttcctcaggtgataagaatcataccttacagtgctgtccaactctttgcatatgaaacttacaagaaacttttcaagggaaaagacggcgagttatccgttgttggaagacttgctgctggagcttgtgctggcatgacatctacttttataacatatccgttagatgtcctcagactacgcttagctgtggaaccagggtaccggaaaatgtctgaggttgctttgaacatgttgcgagaggaaggttttgcatccttttattatggtcttggaccttctctcattggcatagctccatatattgctgtgaacttttgcatatttgacctcgtgaagagggctttgccagaaaaatatcgtcagaagactcaagcatctctactaacagctgtagtgtcagctcttgctgctactgtcacttgctatccttt

SEQ ID NO: 489 - DNA, 1168 bp, Gossypium hirsutum
  Clone ID: GOSHI-09MAY01-C18513_1
tctaaagcacactttcctttctctgtttcaacatttcctactctattaatcctaaccagcttgcttacacacacacacatatcggtcccgtgggcgggcgcgtgggtggaagtttaagaagatgagtgcttcaaagttcattaaatgtgttacagttggagatggagctgttggaaaaacatgtatgctcatttgttacaccagcaacaagttccccactgattatataccaacagtgtttgacaatttcagtgccaatgtggctgtagatgggagcattgttaatttgggtttatgggacactgcaggtcaagaggattatagcagattaaggccattgagttaccgaggtgcagacatatttgtcttagctttctcattaattagcagagcaagctatgaaaatgttctcaagaagtggatgccagaactacgtcgttttgcaccaaatgttcccgttgtcctggttggaacaaagctagatctccgggaagatagagcttatcttgctgatcaattggggtctaatattataacatctgctcagggagaggaactgaggaaacaaattggtgcagcagcttatatcgaatgcagctccaagactcagcagaatgtcaaagccgttttcgatactgccatcaaggttgttcttcagcccccaaggaggaaggatgtgacgaggaagaaacggcgccggagatctggctgctccatcgcgagcataatctgtggaggatttgatgcttaaatttggcaactgatgaaagatggatttcgttgttgaatagtattgcttcccgacagcaaatttcagaactggttttaatgttttctgttttggttgactcaatgacatgttgatggagagacaaactgaactgactggaagaatgatagagggaattgttcattctctcatgtatttattgctttcttgaactctggtctttgtgtgtgttgtggtggaatattaactttgtgcgatttagggaatccatcagcttaggatctcatttgcccttactctcatgctgaaaattatttacttgacctacgttgctgttttttgtactccagaaaaaatgcaatggtgcaaccaatatagtatcacttgacactttgaaacattagtttatatagtgagtttgaagagactacgttgaat

SEQ ID NO: 490 - DNA, 420 bp, Gossypium hirsutum
  Clone ID: LIB3197-058-Q1-M1-D3
gcaacacatccccctttcgactacagtatcagagacgattacttctctcataagcctttgccatttttaatatatatatttctctttgggaaactacaactacagctatttcatcttctaaagcacactttcctttctctgtttcaacatttcctactctattaatcttacccaccttgcttacacacacacatatattgttgcttaggtgaaggaagtagttggaagtttaagaagatgagtgcttcaaagttcattaaatgtgttacagttggagatggagctgttggaaaaacatgtatgctcatttgttacaccagcaacaagttccccactgattatataccaacagtgtttgacaatttcagtgccaatgtggctgtagatgggagcattggtaaattgggtttatgggacact

SEQ ID NO: 491 - DNA, 554 bp, Gossypium hirsutum
  Clone ID: GOSHI-09MAY01-C18793_1
cccacgcgtccggcaacagcctccatttcttgcaaatcccgaagagctatttctttcctttcttttaatttgtgaattaaaattaagtaagcggaagattagttgatattatttatcatcatcatcatcatcatcctccatattaaattatacaggatgggtcaccattcttgctgcaatcaacaaaaggttaagcgaggcctttggtcccctgaggaagatgaaaagctcattaggttcatcaccactcatggatatggatgttggagtgaagtccctgagaaagctggtcttcagagatgtgggaaaagttgtaggctgagatggattaattatttaaggcctgatataagaagaggaaggtttacacctgaggaagagaagttgatcattagcctccatggggttgtaggcaacaggtgggctcatatagcaagtcacttgcctggaagaacagataatgagattaaaaactactggaattcatggatcaagaagaagatacgaaagactttagttccccccacgcaaggtacagctttccattactgagc

SEQ ID NO: 492 - DNA, 297 bp, Gossypium hirsutum
  Clone ID: LIB3083-005-Q1-L1-H7
ctggtcttcaaagatgtggcaaaagttgtcgcttgagatggattaattatatgaggcctgatatcaaaagaaggagatctacttctgaggaagagaagttgattattagccttcatggcgttgtagggaacagatgggctcacattgcaaggcacttgcctggaaagacggacaatgaaataaagaactactggaactcatgtatcaagactaagatctgaaagccttcagcacctccaacaagcactgatcctgcaccaagtactactgagcattctcagataaattatggttcaa

SEQ ID NO: 493 - DNA, 849 bp, Gossypium hirsutum
  Clone ID: GOSHI-09MAY01-C18683_1
gctttcgattctccctcactctcacgcttgggtggggggggtgccctaaaaccagcaagcaaaaccctagcaacaatggcagccatgctgcaaccgcaaatcattcttttaaaagaagggaccgatacgtcccagggcaaggcgcagctagtgagcaacataaactcttgcaccgccgtcggtgagggggggagaacaaccttgggtcccaggggtatggacaagctcattcacgacgacaaggggaacgtcaccatttccaacgacggggctaccatcatgaagcttctcgatattttccatcccgccgcaaagatcctcgtcgatatcgccaagtctcaggactccgaggttggtgatggaactacaactgttgtactactagcaggagagtttttaaaagaggctaagccttttgttgaggatggagtccaccctcaaaatcttattcgcagctatcgaactgcttgctatttggctattgagaagatcaaagaactagctgttagtatagaggggaaaagtctagaagagaagaaaagcttattagctaaatgtgctgctacaacactctcttcaaaactcattggtggagaaaaggagttctttgcatcaatggttgtggatgctgttatcgctattggcagtgaagataggttgaatatgattgggattaagaaggttcctggtggtaacatgaagggattcctttttggttaatggtgttgcctttaaaaagacattttcatatgctggttttgagcagcagccaaagaagtttacgaatcccagaatacttctgttaaacatcgagttggaactgaaatctgagaaagaaaatgctgagat

SEQ ID NO: 494 - DNA, 604 bp, Gossypium hirsutum
  Clone ID: GOSHI-09MAY01-C18653_1
tcgaccacgcgtccgatggcgaagggttttgcttaaggtaagtggagaagcactagcgggagatcactcgcaaaatattgacccaaaggttacgacagctattgctagggacgtttcatcagtgacacccctgggcatgtgaggttgcaattgtggctggtgggggtaatatttttcgcggatcctctcgggcaggatgtagtggacttgaccgttcatctgctgattacatcggaatgttagcaactgtaatgaatgctatatttcttcaagcaacaatggagagtatcggcatcccaacacgtgtccagactgcatttcgtatgtcagaggttgcagaaccatatatacgtagaagggcagtgaggcatttggagaaagggaggggtcgtcatttttgcagctggaactggtaatccattcttcaccactgatactgctgcagcccttcgttgtgcagaaatcaagccggaagttgtgctgaaggcaacaaatgttgatggggtttatgatgacgatcctaggcataatccaaatgcccagcttcatgatacactgacatatcatgaggtgacttaaaagatctctggtgatggacatgacc

SEQ ID NO: 495 - DNA, 538 bp, Gossypium hirsutum
  unsure (1)..(538): unsure at all n locations
  Clone ID: LIB3582-053-P1-K1-B5
cccacgcgtccgcccacgcgtccgggaggcgtgcggccagcgtccggaaaaagaaaaagcagtgggaggtgatattggtggtgagatagcagcggagacaaggaagaagaggaagaagaagggaaggccctctcttttagaacttcaaaaacgctctctcaaacaacaaagacttggggaggcgcagcaaccgcaattgcttcttcaaaatacccctaattcttctatcagttcgaaacgccgatccactcgccgccacccaaatctcaacggtgggtccccagtttccggatcgactttcggaggagacgacgacgacgacgatgaccgcctgcagaagaagcacaaaccattgcttggcttcaaatcttctcgtactgatcagcattatccgattccttcgggactcaattcggcctcctatgggtccgattgggatgcggatggtgacgatcccgacccgtcactcaagcgtcacaagcataccaccgncaagcctggatctgatcaaatgggagaaaagttatcgaaagtgacg

SEQ ID NO: 496 - DNA, 376 bp, Gossypium hirsutum
  Clone ID: LIB3197-053-Q1-M1-C12
aaaaaaaaaaaaaaaaaaaaagggaaaaggaaaaagcaatgggaggtggaggtggtggtggtggtggtggtgagatagcagcggagacaaggaagaagaggaagaagggaaggccctctctcttagaacttcaaaaacgctctctcaaacaacaacaactgcaggagccgcagcaaccgcaattgcttcctcagaaaacccctaattcttctatcttttcgaaccgccgatccactcgccgccacccaaatctcaacggtgggtccccagtttccggatcgatttccggaggagaagacgacgacgacgacgaccgcctacagaagaagcataaaccattgcttggcttcaattcttctcgtactgatcagtatta

SEQ ID NO: 497 - DNA, 535 bp, Gossypium hirsutum
  Clone ID: GOSHI-09MAY01-C18053_1
caaaaacaaaataaaaataaaaataaaacaaaagggagactccctttctctgctaggccgacggcctcccaagacctccgtcgcgccaccaacgtgttcggcgaccggtgccggaaagtggtcccgttagcccctgtttcacggtatccttgaaagccaaagctctctcaacccacgggagtcgaaaacaaaggaggtccacgaccgcttggacccgattcgggcgacggaggagagatcctccgacggcgcaaccacggccacccggtgtcagacgaggccgacggctgtggtcagaagcgtgcatgagtgagcctggcagcatgcggcgcttggaggcttgggggcaagcagcagctagggttctctgttgctgaaattttttaatttcctgggctagggtttaggtttgttgtgtttaatgtaactggactgattattttttgttaatttgggctgtttcgggttctattgggccccgtgcagtcctcttctctctagaaaacataatttggaataaaataaaacttaatat

SEQ ID NO: 498 - DNA, 407 bp, Gossypium hirsutum
  Clone ID: LIB3148-032-Q1-K1-C12
tcttgatgtgccttcgttaaaaatacaacttttagatcttggcttttatagccctattacaactgttcattctcatttttttcgttttttgctctttatttctttgtattcttctgttgcttgcattcattcttctctgcaggtgtcagacgaggccgacggctgtggtcagaagcgtgcatgagtgagcctggcagcatgcggcgcttggaggcttgggggcaagcagcagctagggttctctgttgctgaaattttttaatttcctgggctagggtttaggtttgttgtgtttaatgtaactggactgattattttttggtaatttgggctgtttcgggttctattgggccccgtgcagtcctcttctctctagaaaacaatatttggaataaaataaaacttaa

SEQ ID NO: 499 - DNA, 1056 bp, Gossypium hirsutum
  Clone ID: GOSHI-09MAY01-C18393_1
aaatagatcgaatccgcctcctccttatttaccaagagagaagaaatttcgaaggctttgaaaaaaaaaaaatatcgaacgaagaagaatttgttaagcgatcgatctgtggattacgatggaagtgcctgtctcatgggatgctctacgcaaacaggcaaggaaactcgaagctcagttggatgagcaaatgaattcatatcgtaagttggtctccagtaaggcttcgataaaaaatgacttggaagagaatggtattgaatctggtatcgaccgactactaaaacagctacaagaagtaaatatgaaaatgcaagactgggtctcatctggtggatctgaaatggtttctcataccttgactaggcatcaggaaattcttcaagatctcactcaggagttctatcgtcttcgctctagccttagagctaaacaagaacacgcttctctactggaggattttagggaatttgatcggactagattagacttggaagaaggtgttggttccacagaacaggctctacttaaggagcatgcggccatcagtcgaaatacaggacatatggataatgttatttcacaagctcaagcaactcttggtgcacttgtccttcaacgttctacttttggggggattaattcaaagctcagcaatgttagcagccgcctaccaacggtaaatcagattctgtctgcaataaagaggaaaaagtctatggataccatcattctctctctggttgcatctgtatgcacatttcttatcttcatctactggttgagcaagtgacaatgtatgtatgcatgtatgttatgttgctggccaatgattggtgaaacaggatccattcgaggtgtatggtgctaagaagggttgttatcttatgttgtgtaagttgatattgacatttctagtgggcactgcatcttgccttcactatgagtttcccagtataggtaaatttcaacattcacatatgctttattatttcgttttttgggtatcatccatattaaacgagtaaagctacaaataaaagagtgtttcatttc

SEQ ID NO: 500 - DNA, 637 bp, Gossypium hirsutum
  Clone ID: GOSHI-09MAY01-C18303_1
cgaaatctcagagagagagagagagagatgggtagtttgggtaacagtgcaaactccaaagcggtacatgaagctggcgaagatgattatgatcaccacaagcacctttctcctactcatcagcagctcgatgctggtgctctctttgttcttaaatccaaaggatcatggctgcactgtggttaccacttgaccacatcaattgttgcaccaccgcttctcagcctcccatttgcattcaccttcctcggatgggctgccggaattataagtttggtggtcggagctttggtcactttctattcttacaacttgctatctctagtccttgaacaccatgctcaattgggtcgccgacatcttcgcttcagagacatggctaatgacatcttggggccaagatggggtcggtactatgttgggccaattcaattcatggtctgctatggtgctgtaattgcttgcactcttctgggaggacaatgtatgaaggcaatttacttgctatcacaaccaaatgggagtatgaagctttacgaattcgttattatatttgggctcttgatgctggttttagcacaaatcccatcttttcactcactaaggcatattaatttgatatccttggttctatgcc

SEQ ID NO: 501 - DNA, 492 bp, Gossypium hirsutum
  Clone ID: GOSHI-09MAY01-C18253_1
cccacgcgtccgcccacgcgtccggagaaaaagagagagaaaccctagaagtttgaatgtgtggagacaatatgatcctgaggactccaccacccaagaagcaaagagccgaacccatacttcacgagagtccgtctccgcaagtagcttccgagggacgtctcgtcatctatgaggacaatcctctggcggcgcctccgccggagtcgcctcaccagccctctgatcacctcctctgcacttatcaatgccgtcagatggttaaagcagattttatagatgccttgagcaatgcggagaagcaaattcgtgattatcagtccaaactagagattttaaatgaaaacctttctaaagccgaagcggaaaggaaaaagtttagggatcaattcctttatgcagaacaagagctagctgctgcaaaaggacgtgaacagatgctgcatgaccagctcttgaaggaagtcaatgattcacaggaaagattcaaaa

SEQ ID NO: 502 - DNA, 772 bp, Gossypium hirsutum
  Clone ID: GOSHI-09MAY01-C18243_1
caatactaaacgtacgtcaatgatcattccactattattagtgtccaaagagttgtataaaaaccagatgcatggatgcatgaacttaagacattggcttatagaaaattttgcatgccaacatttggacagtttaagataaggtagaattgaaacctgtgccaatacttaatagctcatccaatacagactagggctcacgttggctgaagcttttgcattgatttcacgataaaaacagcacaatttctggctcagaaacttggtccacgaaggggaggaatggattgtgaggaagtttcgctttttgctttctacaagtcctggtaggatttaatcacccaatttaaatggttcctagaacagttaagaccataaggaatctgaatcaaaacatgatttcttcttcccccacaagccttttgtacccccgttcatacgtgtgaacatggagctgagatgaaccttctccctcagtacctgtgacaatcataacatggaatttcaagagcatgaaaaaaataaacgttattgtcatgttttcactcaactaatgtaaatataattatataaagatagaaggtttccaatggggctagcaaactcttcaagaatacaaggcttctatgtaggagtaaggataaaaagataatcctagaaaaggtcagtgaaaagaaaaagggtgaaaaatgctaaaataatcaccaagaagagaatttttatcattggcataataccaaaaactacgcggacgcgtgggcggacgcgtggg

SEQ ID NO: 503 - DNA, 911 bp, Gossypium hirsutum
  Clone ID: GOSHI-09MAY01-C18263_1
gaagaatcaccctatgtggtgcatctaacgcacctaaccacacccgagtctatttatcatctccgccttggatttgcctctttcgcctctaaaccatacacaccacaacttggcacatgtggctcctttggcctgtcacactgtgttccatgatgcttacctggatatattgttccacttttgttgtcgaaagcaatcggtttcataatatcagactacagacctgggctatacccaagtacaacatacagtaccgctcgaaatcgcaaaaacaatccaccaataacttgattgaagaagccatattagaggcagaggaaaaaggtgttagagtgttgagtctaggcctcatgaaccaggctgaagagctgaacatgtatggtggggtgtgcatacaaaaacatccccagcttaaagtgaagttggtacatgggagtagcttggcagttgcagttgtgttaaatagcatacccaagggaactacacaagtagtccttagaggcaagctgactaaagttgcttgtgctcttgcctttacgctatgccaaaagcgcattcaagtctctgtattacgtgaggatgaatatgaaaagcttgataaattacttggcaccaagtctgagggtaaattggttctctcaaaaagttacacttgtaagacatggttagttggagatggattgagtgaagtagaacaaaggaaagcaagcaaaggaactctatttattcccttctcgcaattcccaccaaagaagttgcggacggactgcttctatcataccacaccggccatgcaaactccgttggcccttgagaatgtggattcttgcgagaactggttgccgaggagggtgatgagcgtatggcgtatagctgggttagtacatgcactggaaagatgggaggaacat

SEQ ID NO: 504 - DNA, 313 bp, Gossypium hirsutum
  Clone ID: LIB3083-094-Q1-L1-A9
acagccattgctttttggcctgtccactggtaatgatgctacggattttgttcacttttgtgcaaaggcatcgttatatatcaactcacctgactatccaatcacatcgaccgtcgaatacaaacatcaccaatactgattgaaaaaccatattagaagcagaggaaaaaggtgttagagtgttgagtctaggcctcatgaaccaggctgaagagcttaacatgtatggtggggtgtttatacaaaaacatccccagcttaaagtgaaattggtagatgggagtagcttggcagttgcagttgtgttaaatag

SEQ ID NO: 505 - DNA, 958 bp, Gossypium hirsutum
  Clone ID: GOSHI-09MAY01-C18213_1
cttggattttggttgaatattcagcatgatgcattttatgcagcacacaacttgagcatgagaagctttgtactttctgtatctagaaatgcaaaagttactgttgactatatctcgtcaccggaggtagctttcttgcgaaacattgctccaattttccgaagaagttcaacaaaggttgtcttccgatttctaggaccgaaggatgtggaaccttcaaccaatcagacctatgattctctcttaacaaatctcacatttatcaagacatttgcctctggaatcattgtaccaaagtcttatatatggcctgtagatggagctctttacttgcaaccttctacctctattgtcttggatgctcacaaagaagggctagaagtttttgcgtcagacttttataatgatgttccattcagcttcaattactcatatgacccagtagctgagtaccttcagtttgttgacaatggtaaattctctgttgatggggttttaaccgacttcccaataactccagcagcagctatagattgttttgctcacataggaaaaaatgcttcaaaacaagcggaccttttggtcatatcaaataatggagcaagtggagactatcctggttgtactgacatggcatatacaaaagctattcaagatgggtgtagatgttcttgactgttcctgttccaatgacaaaggatggaatacctatttgcttgggctctataaatcttatacagagcaccgacattgtcccgacaaggctttagccatcttacaaaaactgtgccaaaattatccaagcagtggaatatttaccacaacctgttggagtgatataaaagttgaaaccgtatatcaaccacagcacagtcaaatgttccaatcaaagtcaaatgccgactactaagttttgattttagctgcaaccactactttttatggctaatactaaaat

SEQ ID NO: 506 - DNA, 434 bp, Gossypium hirsutum
  Clone ID: LIB3197-054-Q1-M1-C10
cgagaatctgcccatgattgtcattggtacccgtgatgcatgcttgaccgagcggcgttcaaccattcaccaacttcatgccagatggtctcttaacatatctcacatttatcaagacattcgcctctggaatcattgtaccaaaatcttatatatggcctgtatatggagctctttacttgcaaccttctacctctattgtcttggatgctcacaaagaaaggctataacatattgcgtcggacttttataacgatgttccatacagcctcctgcactaatatgaacaagaagctatttttcgtcacagtgtttatataccaaagatctgtgtgtatgtggtgatagacctacttctaattactccagcagcagctatagattgttttgctcacatacgaaaaaatgcttcataacaagcggaccttttggtc

SEQ ID NO: 507 - DNA, 677 bp, Gossypium hirsutum
  Clone ID: GOSHI-09MAY01-C19983_1
ccagatttatcagaatataatatggaagttccactatcatatattaccggttccattggagttcctctggaagtagatgaggtcacaagtctattaaaacgaatgcaattgcatgctgaaaaagctgaatcggatgaagctaagatcagtgtgtctgtacctccaaccagaagtgacattcttcatccatgtgatgttatggaggatgttgcaattgcttatggctataataatattccaaagagaacgctttcttctttgaagccccttcccttgaatcagctcagtgatcttattagatatgagattgcgatgaatggttttactgaggtgttgacatggattttatgttctaagaaagagaattttgagatgttaaaccggaaggatgataaatccactgcagtgatcattggaaaccctcgctcttctgattttgaggtggtccgcacaagtctcatgcctggcatgctgaagactgttggacataacaaagaccatccaaagcccatcaagatttatgaagtgggtgatgtagtacttttggatgagaagaaagatgttggtgcatcaaaccgccgcctacttggtgcattatattgtggtgctaactctggttttgcgttgattcatagcctggtggacagaatcatggaagttatggggaatccttttaa

SEQ ID NO: 508 - DNA, 960 bp, Gossypium hirsutum
  Clone ID: GOSHI-09MAY01-C19943_1
cccggcaacacaaaaaatggctccacccgaaagcagggaaaacctttccatcgataacggaatgcgatggattgaagtacgaatcgatcgccgccgatctggatggcacgcttttaatctcacgaagctctttcccctacttcatgcttattgccgtcgaagcgggaagcctccttcgaggtcttatccttcttctttctctgcctctggtcatcatatcttatctcttcatttccgaagctattggtattcaaatcctcattttcatctccttcgctggactcaagatccgcgacatcgagctggtatctcgcgctgttcttcccagattctatgctgcaaatgtaaggaaggaaagtttcgaggtatttgacagatgcaagaggaaagtagtggtaacggcgaatccgacgttcatggtggagccgtttgtgaaggattttctcggcggagataatgttttaggcacagaggttgaagtgaaccctaaaacacagaaggcgacgggatttgtgaagaatcccggggttttagtagggaagtttaagagattagccattttgaaggagtttggtgatgaatcgcctgatcttggaatcggagaccgtgaatctgatcatgatttcatgtcaatttgcaaggaggggtacatggtgcaccctagcaaatcagcatcaccagtaccgcttgatcgcctaaagagccgcattatcttccacgatggtcgctttgtccaacgtccggatccactcaatgcctggctaacctacctttggctgccatttggcttcatcctatccattattcgtgtctacttcaatctacctttacccgagcgtatcgtacgctacacttacgagatgctcggcattcacctcgtgatccgcggaaagcgacctcccccaccatctccgggaccccaggcaacctctacgtctgcaatcaccgcacagctcttga

SEQ ID NO: 509 - DNA, 860 bp, Gossypium hirsutum
  Clone ID: GOSHI-09MAY01-C19833_1
gaaatacaaaaacaaagaaaaaaaaggggggagaaaagagagaagctgttcactttagcacaattttcgtctcttcatcaatggtgatttcggtggagctttacgcaaacccaatattcacccaaccaaatattctttcttttatttttatttttctttttcttttgatagagaaatgaaaggaaagaccgagtaaatttttttctcttctaaactcctttcgattccaaattagtttttttttcttttcattttttgggtttttgagggaaaaatgccagaaatttttacttgaaactggatcgaacttggttataaagtctttcctttataaatctttgcaaaatttccggtttattttccttttgtactccaagaaccgggaaaaattcatggggaacatcggaagtagcggagtaagtggccggagaaggcacggaagcaggcgaaatcatcctccgccaccacatccacctcctccagctcagcctcaacctgaaatctccgccaaccgttacgtctttgccgccgcaacgccttacccgccacaatacccgaataccaacccgccccagtactaccagtacccaaggtactacccccaccagccgcctgtgcctttgccgcttgcggcgccttacgatcatcatcaccatcatcgaggtggaccccacatagagcccgccaattgcagtacatatgcttgtggaccgatgatgcctccaccggcgacgtatatagagcatcaaaaggcggttactataaaaaatgacgtaaattcgaagaaggaaactttgaaattcgaagctgatgatctgaatcctgggaagttctaggtttctttgacgtctgatgctact

SEQ ID NO: 510 - DNA, 827 bp, Gossypium hirsutum
  Clone ID: GOSHI-09MAY01-C19583_2
ttgttctgatagccctgcgtttcattaagcttgcattactggtagccgaataagattgagatgacgactatacgccgattttgctgcaatgatcttcttcgtttcgcatctgtcaatctcgaccacttaacggaaacctttaacatgtcattttacatgacatatttagctcgatggcccgattactttcatgtagctgaaggccccggcaatcgaataatgggttacattatggggaaagttgaggggcaaggtgagtcttggcatggccatgtaacggcagtcactgtagcgccagaatatcgtaggcagcagctggctaagaaactgatgaaccttttggaagatatcagtgataagatagacaaggcatattttgtggatctgtttgtgagagcttctaatacaccagctattaagatgtatgagaagcttggatatgtaatatacagaagggtgctacgctattattccggagaggaagatgggctagatatgaggaaagcattatctagagatgttgaaaagaaatcaatcataccccttaaacggccagtgacacctgacgaattggagtatgattagatccgcttcctatggaacggctccctgctattttttattgtgttgcttcagaacattttcatgtttttgcagagatgggatatcagagagctttaggtatgccaaacatgtggacaagaaaatgttcttagtaatgaacacatttaatgttttcagtgtggttgtgacctttatctttcattgtaccttggatttgtataactcttggattatgcctttatacaatgttatccttctttaaa

SEQ ID NO: 511 - DNA, 687 bp, Gossypium hirsutum
  Clone ID: GOSHI-09MAY01-C19583_1
agccgccctgcgtttcattaagcttcaattttctgaccggcgatccgtgacagagagatgacgacgatacgccggttttgctgcaacgaccttcttcgttttgcttccgtcaatctcgaccatttaaccgaaacctttaatatgtcattctacatgacgtatttagctcgatggcccgattattttcaagtagctgaaggccctggcaatcgagtgatgggttacattatgggaaaagttgaggggcaaggtgagtcttggcacggccacgtaacagcagtcaccattgcacccgaatatcgcaggcagcagcttgctaagaaactgatgaaccttcttgaagaaatcagtgataagattgacaaggcatattttgtggatctttttgtgagggcttctaatacaccagctataaagatgtatgaaaagctcggatacgttatatacagaagggtactacgttattattccggggaggaagatgggttagatatgaggaaagcattatcgagagatgtccaaaagaaatcaatgatcccccctaaacggccggttagacctgatgaattggagtatgattccatttagatcctctttctcttactgtttactatgctcctgtctttaacttgggaagcaaaataggtgggttgttctaatgtggtagatggctcatctgtcacgtgt

SEQ ID NO: 512 - DNA, 677 bp, Gossypium hirsutum
  Clone ID: GOSHI-09MAY01-C19483_1
ccccctatcttcaagtttcctaaacaaaaaaaggggtggggtttcccaaaaattttcaaaaggctcaacaacaaccaaaaaaaaaaaggcaaccaaaaaaaaatcgaagggtgggagaggttggaacaccgagattattggataattcagggttttccacagaaaacctttggccaccgccttacaaaggttttcttttcgaaagggcaaaatcttaaagtgggaagggagatcttctcccagggacaagaaaattaaaagaggggcttaaaaatagttaaggatgggagttccagcagaaaagtccagttgaggaaatccacttggaagagaatgatgagtatgctccggtggttaagatgtgggatgacccgaccgggagcgaaccaacatcattttagatagttgcatcatgtcttattattctttgttaatacattaacggctgtgagggtagttttcaactttggtaatagcaagtctgtggtatttcagtttacctatagcctataggatcagaggtaaacaacaacacttgaaattaattaccatgtataaatcaattatctaaactacaatgaacttccaatcttgtctcaaaattgtgtgatcatggactgggacatatgcttaatttaagccctgaaatgcagtgttcgatagatacagttattttt

SEQ ID NO: 513 - DNA, 842 bp, Gossypium hirsutum
  Clone ID: GOSHI-09MAY01-C19453_1
tttttagctacctttccctatattcagatctcaaaagtgtgaggtggcggcagcatcaacagctaccttcttgtcgttccaaagccaggggaatgcacttccacaaacaaggccttcggccgtaaggtttagcccccgatattcacttgtgagtttcagtggcctcaaggaggtgacatctgtgaactgtgaaacggagtcctccttcatcagcaaggaaagcagtacaactcttagaggctcttttgcgctgaaagcacggaaagcaaaccgggcgtctcgttatggcttacagctggtggcatcgtacaaggtggctatacttggagctgcaggagggataggtcagccattggcacttctaatcaagatgtctccgctagtttcggcactgaacctctacgatatagcgaatgtgaagggagttgctgctgatctcagtcactgcaatactccttctcaagttctggatttcaccggtgcttcggaattaggagattgtttgaaaggtgcaaatgtagtggttattcctgccggagttccccgaaagcctggtatgactcgtgatgatctcttcaacatcaacgccaacattgtgatgagcttggttgaggctgttgctgataactgtcccgatgccttcattcatattattagcaatccagttaactccaccgtaccaatcgctgctgaagttctgaaacagaaaggtgtttacaatcccaaaaaactttttggtgttaccacatttgatggtgttcgagctaacacattccttgctcagaagaaaaaccctcaactcatcgatgtggattgttccgtcatttggggacacgctggta

SEQ ID NO: 514 - DNA, 767 bp, Gossypium hirsutum
  Clone ID: GOSHI-09MAY01-C19433_1
aacaacaaagaaactgaaacacatcggaaaaagagaaaacatgggttggatcggagacaccgtagactccatcaaatcaatccagatccgccagctcctcacccaggtcgtcagccttggtatgattgttacgtctgccctcataatatggaagggattgatgtgtgtcactggcagtgagtctcctgttgtcgttgttctttcaggaagtatggaacctggcttcaagaggggggatattttgttcttacacatgagtaaagatccaattcgagctggagagattgttgtttttaatattgatggccgtgaaatcccaattgtccatcgtgtaattaaggtccatgaaaggcaagatactggagaagttgatgtcctcaccaaaggagacaacaattatggggatgacaggcttttatatgctcaaggtcagcaatatcttcaaaggcaccatatcatgggcagagctgttgggttcttgccgtatgttggttgggtcactataatcatgactgaaaagccaattatcaagtatattcttattggagcattggggttgttggttataacttccaaagattgacagacagttgaagcaaatcgaatgtgcagccaaatccgaaggagatccatctaaagaattgtcaattgcttcttctatcctctcctttgtattggtcattcctaacttttgtatacttagaaagcgccaccgttttattattttaggcagttaaaaaaaaagatagttaagcagggtcaaaaac

SEQ ID NO: 515 - DNA, 402 bp, Gossypium hirsutum
  Clone ID: LIB3135-060-Q1-K1-B4
atcggaaaaagagaaaacatgggttggatcggagacaccgtagactccatcaaatcaatccagatgcgccagctcctcacccaggtcgtcagccttggtatgattgttacgtctgccctcataatatggaagggattgatgtgtgtcactggcagtgagtctcctgttgtcgttgttctttcaggaagtatggaacctggcttcaagaggggggatattttgttcttacacatgagtaaagatccaattcgagctggagagattgttgtttttaatattgatggccgtgaaatcccttgtcaaacttgtgatctgcagcaatcccgatgattcagctatccatcaagcttcatcgcaagttagagcatcgtgtaattaacgtccatgaaaggcaagatactg

SEQ ID NO: 516 - DNA, 689 bp, Gossypium hirsutum
  Clone ID: GOSHI-09MAY01-C19703_1
cccagcgtccgcaaaaacttgaataatctaaaacaaaatcgaacactttttggtagattctttccaggtagcggcggtgtattcggtacacactcaaaaattaattttaactccagcccagaaagagtaggtgaaagtcgaaaattttggtgccttgttcgaagtttattggtccagggtctcctataaataccaaaagccgaattaaaaagcctatttttttctcgtacatatcactttgcttcccttaagttaagcgcggtctctcttcatctttcagatctcaaaggcctagacgctgcttcctgtttcaaagcgtgagatggcgacaacatcagcagctacattctcgatcggatcgactgtctcctttggaagaagggggagtccacctcctctaacaaaaccttctgctgcaaggtgcacctcacagaattcacttgcaagtttcagtggcctcaaggcagcaacatccctgaactgtgattctgagtcctccttccttggcaaagaaagcagtgcagctcttaagggctctttcgcacggaaagcacatgatgccaaaccagagttctcaccatggcttacagcttcaagcatcttacaaagtggcaatacttggagctgctggagggattggtcagccactggcacttctaatcaagatgtccccgctaatttcagccctg

SEQ ID NO: 517 - DNA, 380 bp, Gossypium hirsutum
  Clone ID: LIB3196-047-P1-M1-E2
cttaagccaagcgtgcgctatctccatgtctctgtctcccccccatttcagatctcaaaggcctagacgctgtttcctgtttcaaagcgtgagatggcgacaacatcagcagctacattctcgatcggatcaactgtctcctttggaagaagggggagtccacttctgctaacaaaaccttctgctgcagggtgctcctcacagaattcacttgcaagtttcagtggccttaaggcagcaacatacgtgaactgtgattctgaatcctccttccttggcaaggaaagcagtgcaactcttagggtctctttcacgcggaaagcacagaagccaaaccagagttctaaccatggcttacagcttcaagcatcttacaaagt

SEQ ID NO: 518 - DNA, 945 bp, Gossypium hirsutum
  Clone ID: GOSHI-09MAY01-C19653_1
atggtctcagggaggcccctgagttgtaaataaataaaaaagttatacaaagggctaattgtataatgaacgaatacacatgccccggccggcaagtaaccacggtataaaataaactgggaagaactcatctaattgtataatttacaaaaggaaaaaaagaaagcaagagtacagatcccttttgcacaatggacaagaaccatgactaacaagccacttatctatgcaagggagggggaacatgtggtggcactgcggcaagctcctaactgtttctcccagctgaaagtcctgaagacaaactgagcaggaaactttctccccggaagcatccgcattgttattgtttgtgattatgatctttgggattttttcaaccaaatctccagccaatccttttaaaccaccagtgtcgaagatgttctgaacctcctcaaaaggtgtttcagaagctcccatctgactttggactgcactcagcatcgccggaccaattcgttctcggacaagcctcccacttagaaggcttgcaatgacatcaatcaaatacaacaagcatccgatcccggattcatctgattgccaaagaacaagagaagattcgaaaacttcgattgaaaaaacagctccagatatagccccaactgcggcgcctcgaacgaacccactctcggtctcttgtcctatcaaagcccccgtcatggcacctaacagggtgcccactaatgcaaagaagaaggttaagatcgcagagaaaatgttgccaataatggcggaaaaggcgaaattgcaaaaatctttaagcttttcaaggaaatccccaaagaaggaaggtggaggcctcgaaaaacgaatttggtattcatgaaattccattctttttctctcttttttttttttcacttcccttggatttgggtgattgttggaaaatgagaccgg

SEQ ID NO: 519 - DNA, 935 bp, Gossypium hirsutum
  Clone ID: GOSHI-09MAY01-C19643_1
ggctcttggacgtgtgttcagggccacccttgatctccttgttgcatacaagatcaagttgcagaagctgcaaaggaggaagaggctgaagatgatgatggtatggatggttttgagtctgatgatgacgacgacgacgatgctgatggttctgacaaggaaatgggagttgatgcagaggagggcgatgaagcggatagcatcaggcttcaaaaattagctgcacaggctaaggctttccatgaaaatgatgatgatgacgatgatgactactccgatgatgattttagtgatgatgaggagttacagtctccaattgatgaagtggacccttttgttttctttgtggatacagtcaaagttttgcaagtatcggatcctatgaggttccagaaccttacacagacactggattttcattatcaagctcttgcgaacggtgttgctcagcatgctgaacagaggagagcagagattggaaaggagaaaatggagaaggcatctgctgccactgttgcatcatgagttgagttttggattaaaatttgagtttcattcatttagaagtggtttgatgaaagtctcatttcatttacagcattcattggttcatatggtcgtagagttgattgaacctcataaggttgaggttcaagtgcacatagtttgtgattttggtttggtgagactggcagattcttgggcagaagatgcccgtctcaaccactttcttgttcatttcttttcaccagccgctcttttccattatttcttcacgttttgtcaatttattggttaaggttttcccagatttgttgtttctgggaggccgatcttctttcagggagtgtcaattgcgtagtatatcagatggcttttctttttcattcttctttttgatggtattggtcaactggtagtctaccccccccccc

SEQ ID NO: 520 - DNA, 861 bp, Gossypium hirsutum
  Clone ID: GOSHI-09MAY01-C19673_1
tgcattttgatatgaaggacattcaggtgcctgaatacaaggaaataatacagaaaaagcttagctctattacatctgaacttgaggacctacgtgtggctgcacaaagtaaggatgaatcgttgcaagcagaacggacctaagtggaagagctaacacgcatggaagaaaccctcaagaagactttgcaagagaaagaatccctattatatttgcttgaaggtgcaggagatgtggatcatggagctagtgcaaactctgaaattgtgcaagttgaacctgtgataaaccagtgggctgtaccagggaactccacggcttcccaagttcgtagtttgcgtaaagtcaataatgatcaagttgctattcatatagattcagatgatgttagtaatagtaggttagaagatgaagatgaagataaagttcatggtttcaaatcacttaccacatcaagaattgttccaaggtttacaagaccagtatctgacatgatagatggcttatgggtttcttgtgatcgggcactcatgcgacaacctgccttacggcttgccattatgatctattgggctatattgcattcactgttagcagcttttgtattttgacgagccaaacctggtagcggccatttctctgatggttatctactcgtttgtgtcgaaaggagtggcaaccatgactgcgtacttggtccatagtcattttattattatcattattcttttatttttcctttgtaaaacatggtccattaattgattatttcgataaaccaggcaactttgatttgccctttttatttgtatgcatctcaggttgctcggttatgtcgttgaataagagaatctttttgtt

SEQ ID NO: 521 - DNA, 393 bp, Gossypium hirsutum
  Clone ID: LIB3083-021-Q1-L1-G10
gagtaaagtggaggagttgacacgcagagaataagctcgcaagaagactttgcatgagaaggagtcccaattaaatttgcttgaaggtgtcggagatgtgggtcaggcagctggtttgatctccgaaatcgtggaggttgaacctgtgtgtttgtgtagataaacaagcgggcaatagcagggacctctacagcatcccaagttcgtagtttgcgtaaagtcaatactgatcaagttgctattcctattgatgcggatgatggcaacaatagtaggttagaagatgaagatgaagataaagttcatggtttcaaatcacttaccacatcaagagttgttccaaggtttacgagaccaataaccgatatgatagatggcttatgggtttcttgt

SEQ ID NO: 522 - DNA, 338 bp, Gossypium hirsutum
  Clone ID: LIB3147-045-Q1-K1-B5
atttgcttctaaattagactgttatttttaacaaataatgatgatttaaagttgataggtattggactcttaccagttcacaagttaagcttttgcataatcaacagcacaagaaatatgtgtatatatattgagtagtttattttgctgagtgtttgtgtagataaacaagcgggcaatagcagggacctctacagcatcccaagttcgtagtttgcgtaaagtcaatactgatcaagttgctattcctattgatgcggatgattgcaacaatagttggttagaagatgaagattgattataagttcatggtttcaaatcacttaccacatcaagag

SEQ ID NO: 523 - DNA, 437 bp, Gossypium hirsutum
  Clone ID: GOSHI-09MAY01-C19613_1
tttcacgagaaaacttctaaaaacatgaaactcacctcaggttcaatcgttatcatcaaccttttggcattacaatacttgcctgttctttgtctctcacaagattttgatttcttctactttgttctacagtggcctggatcatactgcgacacgaaacaaagatgttgttacccgaagacgggaaagccttccgcggattttgggatccatggactttggcctaattacaacgatggtggctacccttccaactgtgaccccaacagtcgtttcgacaaatctgagatttcaagcctgattgggagtctggaaaaggaatggcccactctttcatgtcctagcaacgatggagttaagttctggactcatgaatggctaaaacatgggacttgctcagaatctgaacttggccaacgtgaatactttgaagctgc

SEQ ID NO: 524 - DNA, 740 bp, Gossypium hirsutum
  Clone ID: GOSHI-09MAY01-C19603_3
ctttagagtctgactgagaaagcaattccgattcctcttttgggtttgttgtggttccattcatcgccttcgcctaactttttctccttcaatttctcaggtaacacatatttgctcaattattatttttcctttttgagggctcttccgattcaattctcaacagttagggtcttgtacagaatctattcatttactttcagttttgatctaagtattaaaggttttagggttcggcgggttaatctatcttgttggggtgaagatgtgggctgcttcatgccttgcatcgtgctgtgcggcgtgcgcctgcgatgcgtgccgcacggtggtttcggggataagccggaggtctgcaaggatagcctattgtggactatttgccctttctctgtttgtttcgtggatcctacgtgaggttgccgcccctctcatggagcagctgccttggatcaatcaatttcacaaaacacccaacagggaatggtttgaaacagatgcggtgctgagggtcagcttgggaaattttctctttttcactatcctatcatttttaatgattggtgttaaaaatcagagagatcctcctgatggtttgcaccctggtggatggatgatgaaaattgctggctggtgcacttagatattatatggctttgttcctatgtgtgataactcttatggatgtatctctgtctggttgatctcttatataaatgcttatttcgagatattctccg

SEQ ID NO: 525 - DNA, 1604 bp, Gossypium hirsutum
  Clone ID: GOSHI-09MAY01-C19603_2
attttaggctttagagtctgactgagaaagcaattccgattcctcttttgggtttgttgtgtttcgaatcatcgtcttcgcctaactttttctccttcaatttttcagatgtgggctgcttcatgccttgcatcgtgctgtgcggcgtgcgcctgcgatgcgtgccgcacggtggtttcggggataagccggaggtctgcaaggatggcctattgtggactatttgccctttctctgtttgtttcgtggatcctccgtgaggttgccgcccctctcatggagcagctgccttggatcaatcattttcacaaaacacccaacagggaatggtttgaaacagatgcggtgctgagggtcagcttgggaaattttctctttttcactatcctatcatttttaatgattggtgttaaaaatcagagggatcctcgtgatggtttgcaccatggtagatggatgatgaaaattgtctgctggttcattttagttattttgatgttttttgttcctaatgagattatcagcttttatgagacgatatcaaagttcggctcaggactgtttcttttgattcaagttgtgcttttacttgactttgttcatgggtggaatgacaaatgggttggatacgatgagcaattctggtatgttgctctgtttattgtttcacttgtttgctatttggcgacatttggcttttcgggacttctctttcactggttcactccatctggacaggattgtggactcaataccttccttatcgtgatgaccttgattcttgtcattttgtttgccatagttgcactgcatcctgcagttggtagtagcattttaccagcatcagttatatcactgtattgcatgtacctctgctacagtgggcttgcaagtgaaccaagagattatgaatgcaatggtctccacaagcattctaaagcaatttctactggcactgtgactgttggcctgcttaccactatcctttctgttgtctattctgctgttcgagctgggtcttctacaactctactatccccaccaagttcacctcgtgcaggtggtggaaagccattacttccattggacaaggctgatgaggagaagaagaataaggcagtgacgtactcgtacgccttcttccacatcattttttctctggcaagtatgtactcagcaatgcttttgacgggatggtctacctcagttggggagagcgggaagttggtagatgtagggtggccatctgtgtggatacggattctaacagcctgggtaattgcagctctctatatgtggtctctccttgctcctattctcttcccagacagggacttctaagtctctctaaaacaaagttgtcggatatctttgcaataaatttgctctgtatatgtatgtttgtatgtgtgtgggtgatctgagatggatttgcagtcaacaaattgatgttggatatttattgttgcagtaaagttactgtatgtctgatggtctgtgacagattggattacattccccactgagatactaagaaccttcttgattgtattatctttgtgtaattattgcaagtttaataagaaaaggcatgatattcattt

SEQ ID NO: 526 - DNA, 1322 bp, Gossypium hirsutum
  Clone ID: GOSHI-09MAY01-C19603_1
cgatcattgggtaaggctttgaagctttcgatagagcttgcgatggtaatacgatggtatgaacctctgacacatcagcgatttcattttggcccatgtactaattggttgttctctattcctcctacggcttgtggttaattgatcccaccatatcatcgtgtaattcgaaaactctattgcggccaacttaacctttttggcttcagagttattgtagcactcaaacaccaattctatcttttacgcccactagagataagcctccggatctgatcagccttgaaatggtggaattgaaagcttgatctttttaaggtcgtcgtcaatctgtccacattctctttagccatgatttcttattcctctccgtcgatcacttaggttggacctttggtcattctcggcatcactagggccatacaactcgtcttcgttgattcttgccggcttaggtttcattggagactttggggcgccctctccgattgggctctctcctcgacttaatctagcctttcttggataggctcaagttttcgatcaaacaggcgttctgcttcgcgcaatagggcttagatatttaaattcggtactcctcctctggccgctacatttcgaattggttgtcgttgggggtcttttcgccatatttcattcaggagttctagacatagaaaaagaaaaacctcacaacaaaacctcacgttcaaaagatagaatagatgacactcactctcgtgtttacactcgttaaaaggctttttttctctctaatgtgctcacaaactcgtgcctttttccactcttttcttctctcgtgacttcataggagactctctttagacttaatcatattctaaaggtcagtttcaaatggtttgcaaaggtattgatttttagatgtagggtggccatctgtgtgggtacggattctaacagcctgggtgactcccgcgcgcccgccctcgcctccccttgctcctattctcttcccagacagggacttctaagtctctctaaaacaaagttgtcggatatctttgcaataaatttgctctgtatatgtatgtttgtatgtgtgtgggtgatctgagatggatttgcagtcaacaaattgatgttggatatttattgttgcagtaaagttactgtatgtctgatggtctgtgacagattggattacattccccactgagatactaagaaccttcttgattgtattatctttgtgtaattattgcaagtttaataagaaaaggcatgatattcatttagtatctcgattttttatcatttaaatttataattaaaattaataa

SEQ ID NO: 527 - DNA, 456 bp, Gossypium hirsutum
  Clone ID: uC-gsflnu33B088c10b1
tgctgcttcatgccttgcatcgtgctgtgcggcgtgcgcctgcgatgcgtgccgcacggtggtttcggggataagccggaggtctgcaaggatggcctattgtggactatttgccctttctatgtttgtttcgtgtatacttcttgaggttgatttcctaattatatattattctactttgtatcaattattttcattatttacacaaaatagtattagttttttaacatatttttttatttattgtaattatatacaatttttttattatttttaccatttttattataatataataattttattttttatttatttatatttttatataatttttatattatttctttttaattattctatattttttatatttttttttatttttcaatataataataaattttttttttccttttttattctattattatatatataacatatttatttttt

SEQ ID NO: 528 - DNA, 575 bp, Gossypium hirsutum
  Clone ID: LIB3825-003-Q1-K6-A3
cggccgcgtgggcggccgcgtgggctagtttgacttcatctgaaacttaaatcttacatttgcagagacgatatcaaagttcggctcaggactgtttcttttgattcaagttgtgcttttacttgactttgttcatgggtggaatgacaaatgggttggatacgatgagcaattttggtatgttgctctgtttattgtttcacttgtttgctatttggcgacatttggcttttcgggacttctctttcactggttcactccatctggacaggattgtggactcaataccttccttatcgtgatgaccttgattcttgtcattttgtttgccatagttgcactgcatcctgcagttggtagtagcattttaccagcatcagttatatcactgtattgcatgtacctctgctacagtgggcttgcaagtgaaccaagagattatgaatgcaatggtctccacaagcattctaaagcaatttctactggcactgtgactgttggcctgcttaccactatcctttctgttgtctattctgctgttcgagctgggtcttctacaactctactatccccac

SEQ ID NO: 529 - DNA, 307 bp, Gossypium hirsutum
  unsure (1)..(307): unsure at all n locations
  Clone ID: LIB3189-039-P1-K1-D7
atttttctctctaaacatcaaatcttttgaaaaagaatagtctggtttgattcttgaggggaagcttaaaccatgaagctggtgtttttagttcttgcaataacccaatggttcatttctcgagtctagtgcttttgtaagtaggggggttttctaacagcctgggtaattgcagctctctatatgtggtctctccttgctcctattctcttcccagacagggncnnttaannactcntaaaccaaagttgtccgatatctttgcaataaaattgctctgtatatgtatgtttgtatgtgtgtgggt

SEQ ID NO: 530 - DNA, 555 bp, Gossypium hirsutum
  Clone ID: GOSHI-09MAY01-C19633_1
ggtggataagactacctttcatggcaaagaggggcgaggctaccaaggaaggtcttggattgcacctcctaaggatgcaaaagcaacgaatgatcattgttatataccaaagagattagtacacacttggagtgggcacacaaaaggtgtttcagctagtcggttcttccccgaatatgggcacttaattctctctgcagggatggatactaaagtgaagatatgggatgtgtttaattcaggaaagtgtatgaggacatacatgggtcattctaaggcagtaagagatatttcattttgtaatgatggcactaaatttttgactgctggatatgacaagaacatcaagtactgggatactgaaaacccggcaggttatttctactttctcaactgggaaggttccgtatgtagttaagcttaaccctgatgaagataagcagaatattcttttagcgggtatgagtgataagaagattgttcagtgggatattaataccggacatattacacaagagtatgatcagcatttgtgggcagtgaataccattacat

SEQ ID NO: 531 - DNA, 451 bp, Gossypium hirsutum
  Clone ID: LIB3083-011-Q1-L1-A12
ggttagctttcatatcatgactctggtgtacctgataatggagcaaacatcataggacgtgtactccttaagaacattaatgtaagatggagaatgcatgctgggttggactggcacaaaactagaaagagtaacatgtgttccaataatattcttggaagggatagaactgtatgtctagagcttgcagtatctgggttggaatttcaatatgacatattcacacctgccggattctttgttacctaacttgtttgtttatgttaattttttctattttatcatctattttgtaattattcttttatttttttttgtttcttttttttctatattttttctttcttttccttcttattttttttcttttttttattttgtatttatttatttttatcatttatttcttttatttttttttatttatttttaatcattttatttttttatt

SEQ ID NO: 532 - DNA, 364 bp, Gossypium hirsutum
  Clone ID: LIB3083-068-Q1-L1-B12
caataatattcttggaaaggatagaactgtatgtctagagcttgcagtatctgggttggaatttcaatatgacatattcacacctggtggagtatctgtgtccaaactttctctttcagtccatgagtttcatctctatgacaagagcacagatgcaccttggaaactggtgctaagatactacgattcaaaagatcatcctagggaatcctcttcaaaggcattcaaactggacctagaggctgtaagaccagatccttctacacctcttgaggaataccggttacgcattgcccttcttcctatccggttacagcttcattaaagccaacttggttttcttatcagcttttttggtgaaaaa

SEQ ID NO: 533 - DNA, 694 bp, Gossypium hirsutum
  Clone ID: GOSHI-09MAY01-C19053_1
gagaaatctgggagtgatgttgtgaagttggggcgaaaggacttccctcgatcggaagggatgactgttacagatgcacggcataaggaggaagaagaggaagaaagtaagaatggggatgaagataataagcctgaggtaaccgaagatgaaggaaatggggaagtcggtgggatgcatgagcatgataatgagatacccgaggagggaactgagcgtgaagaacataggaatgacgataacgaagagactatggaaaatgaaaacaaaggaaatgaggagactcgtgaaggcgataatgaagagaaagagaacatcaaggatagtcgagaaaaggaaaataaagggattggggaagagagcaatgagacggagaagagtgaaggtgagatagagaatgcaggtagctcggatgatcgggttcgtgatggaattgatgggaataatgaagaagcgagagaagaacattacaagggggatgatgcttcaagtgaagtagtccatgatacccaaaatgagacgagtggttcagaaaattccaacgacgctgagcagttggaaaacaaagataagaatgaccgggaggacgaaacaaatagcagtgaagcggccaatgtcggtcatgaagagtcgaatgtgcaagaaaatggaacagctggaaacaatcaataaagcagtaatgtgagtaacgaag

SEQ ID NO: 534 - DNA, 474 bp, Gossypium hirsutum
  Clone ID: GOSHI-09MAY01-C19063_1
tcatttttttttcttttggatttttttaaaaaaccgcttgtatattttccaggtcggctattttcctacgaaaaagggagcaatttatttcactgcgagaattcaatgatacaacattctaattacaggacataaattagataaacgggaaactagcaaacacccttcacaaaggagccctcagctaacctcacctcacctctctctctctctctctaattagatccatctcgccgacatcgacaagacaaatcccggctcaagacaatccataatgaactgccccggcattcctgtgcgctgctacagcgacggctgcagcaccaactgcaccgaactgggactgtgcctggagaagtttagcatctatgggtaaccttcgctcggtcttggcctgagttctgtaataggggttgctgttcatatcgaatgcagttcctggggacggttttgccaccatgcttaaactggtgt

SEQ ID NO: 535 - DNA, 886 bp, Gossypium hirsutum
  Clone ID: GOSHI-09MAY01-C19013_1
atctcagtcgaatcgggaaaacccaccatttacacacctttttgctgtccatttctcttccaccaaaccaataaccagacccagagaaaagatggccagcaaatccgagggtaaggaacctgtgaacgaacaagtggttgcgaatatgtacggagctatgagatccgaactaaatcaaatttattctaagatcactgagttggagatggaagtgagcgagcattcgctagttataaatgccattcagccacttgaccagtcgaggcggtgctaccggatgattggaggtgtccttgtcgagagaaccatcaaagaggttctccctgctgtgcaacgaaacaaagaagggctcgaggaagtaattgctcgtcttaacgagaccctggagaagaaaaagaaggaaattgctgatttcgagacaaaatacaaaattaggatcaaaaagtccgatgatgactcgaaagatgaaagcaacaagaaggaaggctccgctcaaggagtccttgtcggccctgcaagttcgagtcagtaataggtatattccttcctatttccttccttatatgctcgaacttgctttttataaaccctaaatcgtaccattgtagaactttgttcagttattgctaagattttatcaggttttagagaatcgtatgttttgttcgattggggtttatattttctaacaaattctatcgaaatgtgtgactgtgtttcgattttttgccttgcggattggatttctttgcaaataggtaaactcaagaactaagaccatgaaattatatgtttaagaaaaaaatgatgaatgatttgaacattgcactttcgagtaaaaaaaaaaaaaagggagaaaatagtgagcttctaattcaatacaccg

SEQ ID NO: 536 - DNA, 758 bp, Gossypium hirsutum
  Clone ID: GOSHI-09MAY01-C19373_1
tttttcgcgtccgcccacgcgtccgcccacgcgtggggctcacttaaaggcaatggaagtggccaaagaatcaggtgctttgttgtcatatgatccaaaccttcggctgccactttggccttcagccgatgaggccaggaaacagatattatccatctgggataaggccgatattatcaaggtcagcgatgttgagctagagttcctcaccggtagcaacaaaatcgacgatgaaactgctatgaaactttggcgccccaacttgacactactcttgatcaccctcggtgaaaagggtagcatgtattataccaagtacttccatgggtcagtggatgcattccatgtgaatacagtggatacaactggcgccggggactcttttgttggtgctttactatgcaagatcgtggaagacccaaccatacttgagaatgaatcgaaattgagggaggtactgaaattcgcaaatgcatgtggagccataaccacaaccaagaagggagcaatcccagcccttccaaccgaggctgaagtccttgccttaatcaatggagcttaggattattagcagcaaacttcaataatctatgctcatctttttctttttttaatttcttacatttcagagagagggttttgaaaggtatcgattttttcttcccctcttttgatttcctttttccctcgtttttcctccatccctccctgtgtagtgttgttaggctttgtgctttcaaggggagtaggaataaaaa

SEQ ID NO: 537 - DNA, 386 bp, Gossypium hirsutum
  unsure (1)..(386): unsure at all n locations
  Clone ID: LIB3145-006-Q1-K1-D1
aatgaatcgaaattgagggaggtactgaaattcgcaaatgcatgtggagccataaccacaaccaagaagggagcaatcccagcccttccaaccgaggctgaagtccttgccttaatcaatggagcttaggattattagcagcanacttcaataatctatgctcatctttttttttttttggattctctttttttaatttcttacattttcagagagagggttttgaaaagtatcaattttttctttccactcttttgttttcctttttcacctcgtttttcctccatcccctccctgtgtaatattgntaggctttgtgctttcaaagaggagtaggaataaaaataaaccttttttttttttctttnnnaaaaaaangggggggg

SEQ ID NO: 538 - DNA, 547 bp, Gossypium hirsutum
  Clone ID: GOSHI-09MAY01-C19313_1
ttggattcgatttgcttcctcttagacatatatacccgtactcttttaatcttatttcatttcgttgatataaccgagagaaatcctccgattacgccattgtcacgcttttcttcactttctgtttcaactacgagcttctttgttggtgacttaatggcgatccgaagagctatgtctggtcgcatcatggatcggacggccgtcgttggtgcgcgatacatgtcatcgtggtggcgtagcgttcaacccgctcccaaggatcctattcttggtgttacggaggcttttttggccgatcaaagtcccgataaagttaatgttggagtcggtgcttaccgtgatgataatggaaagccagttgttttggaatgtgttagagaagccgagcgaaggattgctgggaatttgaacatggaatatcttcctatgggaggaagcgtgaagatggtggaagaaacactgaagttggcctatggtgagaattctgagttgataaaagaaaaaaggatagcagcaggtcaagctctgtctgggactggtgcat

SEQ ID NO: 539 - DNA, 1441 bp, Gossypium hirsutum
  Clone ID: GOSHI-09MAY01-C14853_1
atggatttagcatggatgggggcttggaagttaaaaaaatagagagagtaactaatcatgatgtaaaagcagtcgagtacttcttgaaacagaaatgccaatcacagccagaaattgccaaggtccttgaatttttccattttgcttgcacatccgaggacataaacaaccttgcccatgcattgatgttgaaagaagcaatgaccaaagtcatgtttccaaccatggataaattggtcgaggcaatatgtaagctggctaaggctaatgcaagcgtttctatgctttctcgcacgcatggccagccagcttcacctacaaccttgggaaaggagatggccattttttctgttaggctaagcagagaaaggcaagaaatttctcaagtcgagatgatgggaaaatttgctggtgcagttggaaactacaatgcccatattgttgcatatcctactgttaattggcctcaaatcgcagaacagtttgtgacttctcttggattaaagtttaacccctatgttactcagattgagacccacgattatatggcaaaactttattatgcaattatccggtttaataatatattgattgactttgacagagatatatggggctacatatctgtaggatactttaagcagataaccaaggcaggtgagattggttcatcaacaatgcctcataaagtaaaccctattgattttgaaaacagtgaaggtaatcttggtaaggctaatgaagacctaacttacctgagcatgaagttgcctatttcccgttggcagcgagatttaactgattcgacagtcttgaggaacatggggggaggacttggtcattcccttcttgcttacaaaagtgcgctgcaaggaataggaaagctccaggtcaatgaagctcggttaagcgaagacttgaaccaggcatgggaggtacttgcggagccaattcagactgtcatgcgtagatatggtgttccagagccttacgagaagctgaaggagcttactagggggagagcagttaccaaagaaagtataagggaatttattgaaggcttggaattacccgaagaagctaagactcatcttttgaagttaacgccacattcctacgtgggtgcagccgttgaattagccaagactgtggattcagctgtgaacgtgataaacggttctgaggtcttggaaaacatgtcgttgaaagaattagccaagaaacctagtcatattgttgccccatatgagactggttaagtattaagatgataaatgtggtagctattctttgaaaaaaacaaattcagagagggtacaaggtgagacaaatccctactgctggaagtgattatcatgtcatgttcatatggggtcatgaactctgagctgagatttttgtaagcaatcttaataatgaaaattaacttgaaattgctgtc

SEQ ID NO: 540 - DNA, 463 bp, Gossypium hirsutum
  Clone ID: GOSHI-09MAY01-C14863_1
cccacgcgtacggttttatttgcaacagtaaaatcccaattgaaaactttaaagaatccacgcgccactatctctgatctcactctccgcccatggcgaccattccgatgacaaattctcaatccaccgctggcagtggaccccaatcacaacccccaataaccaaccctgctttccgtacattcctctcacgactgacgtcttcgatccgtcagggattctcccagcgtcggccatggtacgaactcatcgatcggactgccatggcccgtcccgacaatttaacggatgcttattctcggatccgtaaaaacttttcctatttcaaagtaaattacattactctacttgcacttgtactcgctttctcgcttttgtctcatccattttccctcctcggcctcctcggcctcctcgccgcttggctcttcttatacttgttccgaccgtcggatcaacctct

SEQ ID NO: 541 - DNA, 557 bp, Gossypium hirsutum
  Clone ID: GOSHI-09MAY01-C14813_1
ccaaggagcctgttgaagagatatgacagttgggatggtggacagcaaagctcggagaaggttaaggaaagtgtttcgaagaaacatgatgctgcgatgagacgagaacgagcccttgcttatgcctatggctatcagcagctacagccacagcaacaactcatgcaaccgcaccccaatggcaaagatgttggagtccaccttaatgatcgcgagaaggcacaatggggttggaactggctcgagcattggatgtcatcgcaaccgtacgacgctcgtcaactaggccatcaagaaggttcttacatgacactgccgaccaccaccgcaaccactaccgttaccgataacatgtctgagaaaactgttgaaatggatgttgtgacagcaatggattcaagctcatactcaaccctgcagcaggctcaatcagggtcaaggaatgtacctagctacatggccccaacccaatctgccaaagccaaggttcggagcccaggacctatgattatgcaccagcaacgtgtaccacatgcaccccaatggaacccatcaac

SEQ ID NO: 542 - DNA, 1251 bp, Gossypium hirsutum
  Clone ID: GOSHI-09MAY01-C14583_1
ttccaatgtttgttcagctgcttagctctgctagtgatgatgttcgcgagcaggctgtatgggctttgggtaatgttgctggagattcaccaagttgtaaagatctagttcttggtaatggtgcacttatgccattgttggctcagttaaatgagcgctctaaattatccatgctgaggaatgctacttggacattatctaatttctgccgtggcaagccgccgacaccatttgagcaggtgaagcctgctttaccagttctacgggaacttatttacttaaatgatgaagaagttctcacggatgcttgctgggcactatcttatctttcagatggcccaaatgacaaaatccagctgtcattgaagctggggtctgcccacgactggtggaacttcttggtcatccatcgcccacgcgtccgcccccgcctccgcccacgcggccgaacattgtcactggtgatgacaatcagactcagtttgtgattgacaacaaggtgctccctcatctctatcaacttcttgtacaaaatcacaaaaaaagtatcaagaaagaagcctgctggacaatctccaatataacagctgggaataaagctcaaatacaggcagttattgaggccaatattattcttcctcttgtacaccttcttcaacttgcggagtttgacattaagaaggaggctgcatgggccatctcgaatgccacctctggaggatctcatgagcagattcaattccttgtgagccaaggttgcattaagccactctgtgacctactaatctgtccagatccacgaattgtgacggtgtgcctggaggggcttgagaacattctgaaggttggtgaggctgataaggaaatgggaatgaacggtggaatcaatctatatgcacaaatgatagatgagtgcgatgggttggataaaattgaaaacctgcaaactcatgacaaccatgagatatacgagaaggctgtgaagatcttggagagatactgggctgaagaggaggaagatgaacagaatatccaagatggtgggaatgaaaatcagcaaggctttaattttggagtgaaccacagccaagtgttccacctggtggcttcaaatttggttgaagtgtttttactttgggattggggccataattttgtaggtctactacattggtcgcaatgaaatttttaaaaaactgtttttatgtttttgcaatttggtgggtgggtgccaagggttccaggttttgg

SEQ ID NO: 543 - DNA, 603 bp, Gossypium hirsutum
  unsure (1)..(603): unsure at all n locations
  Clone ID: AI730479.1
gcacacacgggttgttattgaacatggtgctgttccaatgtttgttcagctgcttagctctgctattgatgatgttcgcgagcaggctgtatgggctttgggtaatgttgctggagattcaccaagttgtagagatctagttcttggtaatggtgcacttatgccattgttggctcagttaaatgagcgctctaaattatccatgctgaggaatgctacttggacattatctaatttctgccgtggcaagccaccgacaccatttgagcaggtgaagcctgctttaccagttctacgggaacttatttacttaaatgatgaagaagttctcacagatgcttgctgggcactatcttatctttcagatggcccaaatgacaaaatccangctgtcattgaagctggggtctgcccacgactggtggaacttcttggtcatccatcgccgacagttcttatacctgctcttcgcactgtgggaaacattgtcactggtgatgacaatcaaactcagtttgtgattgacaacaaggtgctccctcatctctatcaacttcttgtacaaaatcacaaaaaaagtatcaagaaagaagcctgctggat

SEQ ID NO: 544 - DNA, 553 bp, Gossypium hirsutum
  Clone ID: GOSHI-09MAY01-C14453_2
gaagagtttaggttgaaaggaaagttgtatgtataggggatgaagttgcaaaaaaaagaaaaaccatagtcatctaaagcccttacaatggtagcaacaagcaacacttgcttcatgttgctagcttgcttctagtttgtgggctttttttctttttattattgttattattctctcttattttttttttagtatattctcatgaacattttacatgtactttatcatcatttagccattcataatcaattctcccttgcttcattcataccttttacattgtaaatgctgatggagattttgcttcttcaatgtaaaaaaaaaaaaaaagaaactaaaaaaaaaaaaacactaattgaagcataatataaaacatagaatggattgctatataaagaacttatctttgtcattaaattaaactcaaccactgagattttgcattctggccttaccttaatctaactgatgactccgtatattttcaaaagcatatcgcttgtggtgggtggattggttggttgaagtgtaattacctcttaacgttatacgt

SEQ ID NO: 545 - DNA, 436 bp, Gossypium hirsutum
  Clone ID: LIB3148-029-Q1-K1-E1
gggattataggtgaagaggtgaaatttagataagatcatataactgctcagaattcagcctgtgacctgttggttggtttgggaagaagaatgatactatagctcataattgaatcacataaaagtgtttgtaaatataaatgtcattttgtttaagatgtttgagctaaccaatttaaaacactaattggagctttatatgagcattgcatggtttgctttataagtacttatctttgtcattaattaaactcaaccactgtgattttgcattctggccttaccttaatctactgatgactccgtatattttcaaaagcatatcgcttgtaattttgattggttggttgtagtgtaattactcttaaggttatacgttctctaaagacttcgggtaccttggaaatgttttaatgtgtgttttctgacgagtttt

SEQ ID NO: 546 - DNA, 573 bp, Gossypium hirsutum
  Clone ID: GOSHI-09MAY01-C14433_1
cccacgcgtccgaaaaaatcagagagcttctttgctctctctcccttccctcttctcttaacctcccccatggccggccatgggctcatcggtggtcgtccgcgcccacaccctgaactgctgtcagtatcgggcgaaacaaatcctcttatcctcctccgaacggggccgaagacaaagccttcacaatccaccgcgacagaggagaaaaggggaggccttttggttcgtcgttcccttccacggcctttggctgaaccccctaggggttcaacgaccttcgagtcggagagggacaccagagtaccccctaacggtggatcggaggtacgctgtattacccctttgatgattatttcttatattctttcgtaatggaaaaaaaggaaaccataatagaaatcaaacaaaaatattcaccttttaaaaatctgttcttttgattagtcttgtttttttttttgtaagtgtccgtaatacaatctttttgaggcttcttatagccgaatatatataaaaaattaatctatatttgctactgttcctctgctctctgcgggtctcctttttttg

SEQ ID NO: 547 - DNA, 433 bp, Gossypium hirsutum
  Clone ID: LIB3189-036-P1-K1-B5
cggacgcgtgggcggacgcgtgggttttagaaaaaaatcagagagcttctttgctctctctcccttccctcttctcttaacctcccccatggccggccatgggctcatcggtggtcgtccgcgcccacaccctgaactgctgtcagtatcgggcgaaacaaatcctcttatcctcctccgaacggggccgaagacaaagccttcacaatccaccgcgacagaggagaaaaggggaggccttttggttcgtcgttcccttccacggcctttggctgaaccccctaggggttcaacgaccttcgagtcggagagggacaccagagtaccccctaacggtggatcggaggtctatggagggtcaacgggggtgaaaaccggccattttggtgcaaggaagcagccatcgggcgttctgcgtgcccagggcgcacat

SEQ ID NO: 548 - DNA, 822 bp, Gossypium hirsutum
  Clone ID: GOSHI-09MAY01-C14763_1
cttcctcaatcttcttcttcctttttgttttctgtgtttttttttttagtccccaaatggattctccctttccgttcaaatggcaacccctcccctttcatcccctacttatctcaccaccaatttaggcgtcggctacgccatcgtcgtcgccctcggcttcctcctcctcctctccactctcctcctcgcttcctacatttgcttccgctcttcctcaccccttccacctcgtgccatttccccaaaccccatttcaacacccaccgccgccaactccgacggtatcgtcctccccaggattgttttcatcggcgaagaagaccatgaaaacgacgaggaaaacgtcgtcgtctttgggcttgatcgtgccgtcataaactcttaccccaagttccggttcagcaaaaaggaggtgtctacggcggtggaggtgacgggttctagtgctgggaacaccatttgttcgatatgtttgtgtgagtatagagaatcagagatgttgaggatgatgcctgaatgtaggcattgttttcatgtaacttgtattgatgcttggctgaaacttaatgggtcttgtcctgtttgtcggaactcaccgcttccgacaccgatttctacgcctttgtcggaagttgtacctttgtctcagtacgatgctgatcggaggtggtggtgacttttggcttttgggttaccatctttttcattttttttttcttcaatttttttcctgtgtggaaatttggttttttgtcatggatgcttttttttggctcaatgaatggtgatttggtataaaaataaaaaaacataaacaca

SEQ ID NO: 549 - DNA, 500 bp, Gossypium hirsutum
  Clone ID: GOSHI-09MAY01-C14703_1
tcggttctcgatcagctccctaatgaaatgcatggggggagaattagagatgagaaaactactggccattatgataaggatgttggatctaatgttattaatggaaatggaacagaagcaggtcaaataattacaactgttgttggtggtcgaggcgggcatccaaaacagacaatctcgtatatggctgagcgtgtggttgggactggttcatttggtgtcgtctttcaggctaaatgcatggagagaggtgaacctgttgctataaagaaggttctgcaggataaaagatacaagaatagggagctgcagattatgcatctacttgatcatcctaatacagtccaattgaagcactatttcttttcaaccaccgaaaagaatgagctctatcttaaccttgttctggaatttgtacctgaaacagttttccgagtttcataacactattgtagaatgaatcgccatatgccctttttttatgtacagctgtatacata

SEQ ID NO: 550 - DNA, 630 bp, Gossypium hirsutum
  Clone ID: GOSHI-09MAY01-C14733_2
cacggggggtagttctctctccatttttctccacttcgaagctttttactttctcagctgaggaaagaaaaaaaaagatttctctcagatcttcaagagaaaacaattatctccgtttatctgaagtagaataaggataagaagatgggaacattggggaaagcaatctacacggttggattctggatccgagaaaccggccaagccctcgatcgccttggatgtcgcctccaaggcaattactacttccaagaacagctgtcgaggcatcggacgttgatgaacgtattcgacaaagctccaattgttgatagagatgcctttgttgcacctagcgcttctgtcatcggcgatgttcaggttggacggagttcttctatctggtatggctgtgttttgagaggtgatgtcaatagcatcagtatcgggtctggaacaaatatccaagataactcccttgttcatgttgcaaaatctaacttaagcgggaaggttttaccaacgattattggaagtaatgttactgtcggtcatagtgctgtttacacggatgtactgttgaggatgaagcatccgttggtattggggctaccctattagatggtagttatgttgagaagcatgccattg

SEQ ID NO: 551 - DNA, 1340 bp, Gossypium hirsutum
  Clone ID: GOSHI-09MAY01-C14733_1
ctgtttttttttctccatttttctccagttccaaagcttcactttcgcagctgctatttttttttttgtgggggtcacaccctcaaatctattttctccatcaacctgaagtagaagatgggaacattgggtaaagcaatctacaccgttggattctggatcagagaaaccggccaaactctcgatcgccttggctgccgcctccagggcaactactacttccaagaacaactgtcgaggcatcggacgctgatgaacgtattcgacaaagctcctgttgttgatagggatgccttcgtggcacctagcgcttctgtcatcggtgatgttcaggtcggacgaggttcttctatatggtatggatgtgttttgagaggtgatgttaacagcatcagcatcgggtctggaacaaatatccaagataactcccttgttcatgtcgcaaaatctaacttgagtgggaaggttttaccaactattatcggaagtaatgttacagtgggtcatagtgctgttttacatggatgtactgttgaggatgaagcgttcgttggtatgggggctaccctattagatggagtttatgttgagaagcatgccatggttgctgccggagctcttgtgaggcagaacactaggatcccatgtggagaggtttggggaggtaacccggccaagttcctaaggaagctaacggaagaagagatggccttcatttcccagtcagccataaattattccaatttagctcaagttcatgctgcagaaaatggaaagagcttcgatgaaattgaatttgagaagatgctgcggaagaaatttgctcgtcgggatgaggaatacgattcaatgctcggtgttgttcgcgagacacctcccgagcttatccttcccgataatgttctccccaataaagtccccaaaaccgcttaggcgttgatactcaataatgcctttctaggttaactctcttgagattcaatgttcccggatattttgttatgatctgcggatatacagagaatggctgctttttcagttccaataattttggggtacggcctcgctgagatcttaaaagttgaatcatggtgccgactccggcattttggctacgcctagcgtctcctcgtagttgctaaactggcaaagacaaactggatgtgcaactcatctaaggtagtcttgtgtggtagtaattgagtaaatgaatttgcttctttatatatatacatatatgttttactggcaataaaattttaaaaagaaaaaccaatgtgctgagtatgatgcatgcaagttcataatgaatgtttaattcctttcaacagttttgaacc

SEQ ID NO: 552 - DNA, 413 bp, Gossypium hirsutum
  unsure (1)..(413): unsure at all n locations
  Clone ID: LIB3145-018-Q1-K1-C1
ggatattttgttatgatctgcggatatacagagaatggctgctttttcagttccaataattttggggtacggcctcgctgagatcttaaaagttgaatcatggtgccgacattttggctacgcctagcgtctcctcgtagttgctaaactggcaaagacaaactggatgtgcaactcatctaaggtagtcttgtgtggtagtaacagagcatatgaatttgcttctttatatatatatatatatatatgttttactggcaataaaattttaaaaagaaaaaccccnnttaaaaaaaaaaatataaaaaataataaaaaaaaaaaaaaaaaaaaaaaaataaaaaaatataaattttatttaaataaaaaatttaaaaattttttaaaaaaaataaaaaaaaaaaaaagggggg

SEQ ID NO: 553 - DNA, 556 bp, Gossypium hirsutum
  Clone ID: GOSHI-09MAY01-C14693_2
gtcgacatatttctttgctgctttactaactaaaaagaaaaacctttctttgtttaacgcttaagattcctttaacaacaatggctccctcaatgtctactctaatggttgttctcgtcgctggatgcgctctcatgggttccgccattgccgccgacgctccggctccgagccccacctctggtgccagctctatctcgccgccatttgtctctgtttccgtcgccgctgccgctatggctctgcttttcggatctagacttcggatctgaatgatgctatctctggtgttcagatgatgctctgtttttcttttatatatgtattttttttctttttgatttgattttgaatttggtttgcaattttagtagctgtggtagtggatctagggagtgattatattatatataatttatcagagagagggagacagagaggtagttattttatttgttgcacagattattgatggctgatgttttggatttggattattttctggattattatggattgatggtatagcgagaaaaaaaaaaaaaaaaaaaaaaaa

SEQ ID NO: 554 - DNA, 637 bp, Gossypium hirsutum
  Clone ID: GOSHI-09MAY01-C14693_1
cggacgcgtccgcccacgcgtccgcatatttctttgcttctttactaactaaaaaggaaaaacattctttgtttaacgcttaagattcctttaacaacaatggctgcctcaatgtctactctaatggttgttctcgtcgctgtatgcgctctcatgggttccgccattgccgccgacgctccggctccgagccccacctctggtgccggctctatctctccttcatttgtctctgtttccgtcgccgccgccgctgtggctctgcttttcggatctagacttcggatctgaatgatgctatctctggtgttcagatgatgctctgtttttcttttatatatgtatttttttctttttgatttgattttgaatttggtttggaattttagtagctgtggtagtggatctagggagtgattatattatatatataaatatataaatttatgagagagagagaggtagttattttatttgttgcacagattattgatggctgatgttttggatttggattattttctgtattattatggattgatgttatagcgagacattttattatttatatatattttcaatattgtttctttaaaaaaaaaaaaccaaacaatagacaaagaagggccgctaaacg

SEQ ID NO: 555 - DNA, 825 bp, Gossypium hirsutum
  Clone ID: GOSHI-09MAY01-C14683_1
ctttttttctttaatttttggttgttgaatggaatttttttgttggttacccaaaacaatacagaattaacatttactaaaaccccaaaaagaaaaaatggcgacggtgctctcgcttcacaatcgaggaatattgacggctgtgaacagtggagcatcgagtctatcgttcgttggatccggattcatcgtgctttgttactccctcttcaaggaacttcgcaagttctccttcaagctcgtcttctacctttctctctctgacatgctttgcagtttctttaacatggtcggggacccgtcaaaaggtttcttttgttatgctcagggctacaccacgcatttcttctgtgtcgcttccttcctctggacaacaactattgcttttactcttcatcgaactgttgttagacacaaaactgatgttgaagatttggaggctatctttcacttgtatgtttggggaacttcgctggttatgactgtcatacgttctattggtaatgaccacacgcatttgggagcatggtgttgggcacaaacaggtcgcactggaaaggcagttcatttcataacgttttatgtcccactatggggtgcaattctttacaatggttttacatactttcaagtgatacgcatgctgtataatgccacccgtattgcagttggcatgtcagatcgtgcataccagtttgattcaaggacagacacgaaggctttgaaccgtggggttactatccactgatcctgattggatcatgggcattcggcacaatcaatcgcatccacgattttattgagcctggccacaagatcttttgg

SEQ ID NO: 556 - DNA, 460 bp, Gossypium hirsutum
  Clone ID: GOSHI-09MAY01-C14633_1
cccacgcgtccgtttctttggaaactcggcttctttaagctattaccaataatggagtgccagatatccttattccagctcctcatcagcttcctcctgtttttgtttatggtaatcacaagtgtaaggagatcaaaagctaagaatttaactcaaaagttgattccagggccatggaaattaccattgataggaaatctgcaccagctcgccgcttctggtctaccccatcgcaccttacgtgacttggctacgaaacatggtggcttcatgcatctgcaactcggtcaagtttccaccgtggtcgtttcttctccagaaatggctgaagagattatgaaaacacatgatatcgtctttgctaataggccttttcccggtgtggccaagatgacaacttatgagtgcactgatattgtctttgcaccatatggaacctattggagaaatctgcggaaaa

SEQ ID NO: 557 - DNA, 708 bp, Gossypium hirsutum
  Clone ID: GOSHI-09MAY01-C14133_1
acaaacacttgttttgggagagttgtagtttcataaaagggaaagtgaaaggaaaaccaggaggaaaagagaaagttttctagtgatcatcatcatcttcttcttcttcttcttctttagataagattcataaggccatgaaccgaggtgtgttgcagagctcaccggtgcagcaactgatggccggaaaccctaactggtggaacatcaacaccatgcgcccaccaactcatcatcaccaacaagcggcggcggtggcggcagcaccttctcctttcttgcatcctcctcccactactttcttctctcacacacccacttcttcttcttcgtcttcttcatcttcttcacttcccgttccttcttggcatgataataaccaggagcttcctgagtcatggaatcaacttctcttgggtggattggcaggagaagaagaaaaggggggtgatataggacagttataagcgttacaccaagcctgaaaggctaattctgtagtggatgtgaaacaagaaaactctgcacgcagctatgcgtctggacatgcaagcgaagattgtcatcatcacccgtcgaataaaccagcttggtttcaccggatgccgttagctgctacatcacctaagtccagcgtgacatgcttcagcagtaccatgttggatttttcctgaaccaaagctgagcatgggaggcaaccacagccag

SEQ ID NO: 558 - DNA, 1069 bp, Gossypium hirsutum
  Clone ID: GOSHI-09MAY01-C14123_1
ggaaaaacaaataaccatgtctaccgctcaatcttgtccacttcccacagtttctctctctaaatacctggaagaagagggccagaataaaaatgcagaaagccagctcctcaaatcctcattaccagctgaaaatgattgccatactcaagctgaagattcagtttctgatgttcccaaatacctgctagaattgggtctcaccccagaatgcaagcagcttatatcctcactgccagccgagaaaggttgggttgccaatctcctccatcaatatcaggggttttggcacaccactcgccagttacaagcagtgcttacttgccaaaaccactttcaagctcaggagacagatatcctccttgttaccactccaaaatcaggaacaacatggttaaaggctattgtttttgccttgatgaaccgagtcaagtatcccaacactgataacaatcaccctttgctctcagagaaccctcacattcttgttccatttttggagtatgggctttacattgatagtcaggttcctaacttcaccacttttacatctccacggctattcggaactcatttaccccttgtttcattgccagaatcggcaaagaactcatcttgcaagcttgtttatttatgtaggaacccaaaggatactttcgtatcgctttggcacttcacgaacaagctgagaaccaaggatatgggaagcaactctcttgaagagaccttcgataagtttaccacaggcgtgagtttgtatggaccgttttgggaccatgttttatggtattggaaacaaagcttggaaaaccctgaaagagtcttgtttttgaaatacgaggaaatgaaagagcagcccacacttcagctgatgaagctagctcagttcctcggatgcccattttccaatgaagaagagactagatgtgcggtggatggtatacaaaaactatgcagctttgagaatttgaccaacttggacgttaacaatacccggaagttggcatcgggtgaggattacaaggcatttttcacacaacgtgaaattggagatcctaacaatcattca

SEQ ID NO: 559 - DNA, 669 bp, Gossypium hirsutum
  Clone ID: GOSHI-09MAY01-C14083_1
cccacgcgtccgcattaccaaatcaaagccaaaactagtggttgttgaacttaaaacactgttctgttctccccctttcctcttggtgtccggtttcagttccatctatttgtccatggatcttacacctcagcaacttatccagttcaacggctccgacccatccaagcccatctacgttgcaatcaatggtcgcatctacgatgtcaccgccggcaaatccttctacggtcctggtggtgcctacgccatgttcgccggcaaagatgccagcagagctcttgcaaagatgagcaagaacgaagaagatgtctgtcccaaccttgacggcctctctgaaaaggagatggatgtccttaacgattgggtcaagaaatttgaagctaagtaccctgttgtcggccgcgttgtctcttgaaaatttgcacctttcctctatgttgggtgtaatttgtttcgtttttaagtgtctttagactctggttattacttatctatcaattgtgtttggtgttttgcttagctcagagcaatttctaggttaaataaatgggtgaaaattaataaattgagatacttatgggcttgcgttgtgttggtatctcgttgttgtttatgttagagaagtttcatcatcaatggagaaattcattttaattgggtgaaaac

SEQ ID NO: 560 - DNA, 419 bp, Gossypium hirsutum
  Clone ID: LIB3189-024-P1-K1-H6
ggtccggaacggcagggccgggccgacccatcgcgtccggctagatcgcgagcgtgggtctatttgtccatggatcttacacctcagcaacttatccgatggaacggctccgacccatccaagcccatctacgttgcaatcaatggtcgcatctacgatgtcaccgccggcaaatccttctacggtcctggtggtgcctactccatgttcgccggcaaagatgccagcagagctcttgcaaagatgagcaagaacgaagaagatgtctgtcccaacattgacggcctctctgaaaaggagatggatgtccttaacgattgggtcaagaaatttgaagctaaataccctgttgtcggcccgcgtgtctcctgaaaatttgcacctttcctctatgttgggtgtaatttggttcggtttta

SEQ ID NO: 561 - DNA, 592 bp, Gossypium hirsutum
  Clone ID: GOSHI-09MAY01-C14053_1
cttgtgttgatagcagctcgaaattaccataaaagctacttacaaagaaatacagtccgttttaagtttgagccatctgcaggatgcttccaagtatatgaagaagttgcaaaaaggttcaaagttcaaaacgggacattccaactgaactatttagatgatgaaggggaatgggtaatgttggttagcgactcggatttacacgagtgtctggaaataatggagtatgtcggaactcgaagcgttaagtttcaagttcgagatgtaccttgtactatgggcagttctagcagtagcaattgtttcttatcccgtaactcatagcagatatgctgatgctcctcggctatcaatcatcagtctttcatagtagttttttgaactcgatcaggcttctgcattcacgcattgcttcatttgatttcccatcacacatgaaaggataagaagatgtgagcatagattatatttattaagttgtatagggttgtatatgttaggagggagcaatagaaataggatcatagttatagtttatgttagacaaaactttttatttaagtatcaatatccgacccttgtatgttgtatt

SEQ ID NO: 562 - DNA, 349 bp, Gossypium hirsutum
  Clone ID: LIB3189-024-P1-K1-D12
ggaagccaaaatttctagaatgaaaacttgtgttgatagcagctcgaaaattaccataaaagggacttacaaagaaaatacagtccgttttaagtttgagccatctgcaggatgcttccaagtatatgaagaagttgcaaaaaggttcaaaggtcaaaacgggacattccaactgaactatttagatgatgtaggggaatgggcattgttggttttcgtcttatttttattctagtgttttgttaaattttttattatatttattttatttcttcgtgttatattctttttttcttttagatctatgtatttttattgatttggggaattacattttatttatgtttaa

SEQ ID NO: 563 - DNA, 238 bp, Gossypium hirsutum
  Clone ID: LIB3189-030-P1-K1-A11
ggaagccaaaaattctagaatgaaaacttgtgttgatagcaggtagaaaattaccataaaagctacttacaaagaaaatacagtccgttttaagtttgagccatctgcaggatgctgccaagtatatgaagaaggtgctagcaggagcaatgttcaaatcggtacatgccaactgaactgtttagaaggaagccgcgaaatgggagacagtaattgggattgatcttggtacaactta

SEQ ID NO: 564 - DNA, 1038 bp, Gossypium hirsutum
  Clone ID: GOSHI-09MAY01-C14393_1
agcttcatctttttttcgatgatgaattacttggattgaattcaagctgtcgtacctctcagaacttaggttaagaagtcggcctttttttttcccgcaaatcttgatgaaggttttgcgataaagctaagacccctgtggagtttgcttttgtaagcagcgaaaaggagctgcccttgtcgagggttgtttttaggggattaagaaatggatgagaatatgaagcaactccagcaaagcttgattgagcttgaaactgaagctgaacatttactattagccaggcaccagctggttgaaaatgataaagtgagaaatgggaacagggaagcacttactgcactgaggaagagggctcggacaacaaaaactagtgtcccatctccctttgagtcgatgatgaagaatattgggaaccctgtatcaagacctttggtaaaagaggtttgtgctacttgtggcaatcatgactcaaatgagcagacatggatgatgttcccaggaactgatgtttttgccaagataccatttcatgctgctcacagtattttggagacagatcaagcacggctggaccatgaagctcagaaacttcaaagctatgttaaggagaaatccttttttatatcagaaaaaggtgtcctcgctgacaagatcagtcctggtgtgcttagatccttagtagcgttaaaagataaaccatgatttgttagatatgcctgatgtgaggaagcaatcaaacaaataggaaagtacttctatcgaagtgaacattgcacttttcagaggggctggcaatgaagttggtttggatcgtctttgagcagaaatgtctgtagaaaaaggagcgtggacgaaatttaccaatcactgctgattttgttgatggcattgtgaacattggttttatcaaatatgaacatcatatctttgaatctaactcgaggataaacacctggtgctagaccatattgtaagaaccctttcaccttactaaattgactttctatttgaaagcattaatagattcactttaac

SEQ ID NO: 565 - DNA, 1077 bp, Gossypium hirsutum
  Clone ID: GOSHI-09MAY01-C14353_2
aagcttttgttcattgaaagagactgctgattacagagaaaaaaaaagaggggaaacatgagtttcagggatgattctgaagatgggagggacgtacggaagccatttctgcataccggaagctggtatcgaatgggttccaggacgggatccagtatgctgggctcatctcaagttattcgtgatagttccatctctgttgtagcttgcgttttgattgttgctttgggtcctatccaattcggtttcactaatggctactcttctcctacacaatctgcaatcatcaaggaacttgggttaactgtatcagagtattctgtatttggttctttatcaaatgtgggtgccatgattggagcagtagttagtggtcagatggcagagtatatagggcgaaaagggtctttgatgattgctgctattcctaatataattggatggcttgctatatcttttgcaaatgacgtatcttcccggttcgtcccagcgttgctggaaggtttcggtgtgggaataatctcttacacggtgcctgtgtatatagctgagatagcacccgaaaacttgagaggcagcttgggttctgtgaatcagttgtctgttacaactggaacaatggtagcctatttgctgggactttttgtggggtggaggatacttgcaattttaggaggtgttgcttgtacaattttgattccaggtctatttttcattccagaatctcctagatggctggcaaaaatgggaatgaccgaagatttcgaagcttctcttcaagttcttaggggtttcgataccgatatttctatcgaagtcaatgaaatcaagaggtctgtagcatcaacaaatagaagaacaacgatccggttcgcagaactcaaaaaaaaggagatattggtttccattgatggttggaattgggcttcttatgttgcaacaacttagtggcattaatggtgttatattctattccgctaccatattcgaaactgctggaattaaatcaggcaatatagctacctttggagttggcttcattcaggtcattgctactgctttaaccacatggttggt

SEQ ID NO: 566 - DNA, 990 bp, Gossypium hirsutum
  Clone ID: GOSHI-09MAY01-C14353_1
ctctaactcaagacctaaaaactagcagaggggtccttgatttttgtgtctgggtgatcaccaagtgtttgttttgttgtctaagtcactgttggtatagagaagaggaagatgagtttcagggatgatgctgaagatggaagaggggatctaaggaagccattcctacatactggaagctggtatcgtatgggttctaggatggggtctagtatgttaggatcctctcaagctcttcgtgataaatccatctcggttgtagcttgtgttttgattgttgctttgggtcccatccaatttggtttcacttctggttactcttctccgacacaatccgcaatcatcgaggatcttggactaacagtctcagagttttctctatttggttctttatcaaatgtgggtgccatggttggagcaatagccagtggtcagatagccgaatgtattggaccgaaagggtctttaatgactgctgcaattccctaatataattggatggcttgctatatcttttgcaagagattcctcttttctttacatgggaaggctgttgcaaggttctcgtgtcggcataatctcttatacggtgcctgtatatatagctgagatagcacctcagaatttgaggggcagcttgggttcagcgaatcagctatctgtcactctcggaataatgctggcctatctacttcgactttttgttgagtgccggatactcgccgttttaggaatacttccttgtacaattttgatacctgctctatttttcattccagaatctcctcgatggctggcaaaactgggtatgacagaagatttcgaaacttctttgcaagttctcaggtgctccgatgctgatatttctattgaagtgaatgaaatcaacagatctgtctcatcaaccactagcaagaactacgattcggtttgcacatctcaagaaagagatattggtctccattgatggttggaattcgctcacttatg

SEQ ID NO: 567 - DNA, 582 bp, Gossypium hirsutum
  unsure (1)..(582): unsure at all n locations
  Clone ID: LIB3583-046-P1-K1-C2
ctaaagnaactagcagaggggtccttcatttttatgtctgggtgatcaccaagtgattgttttattgtctaagtcactgttcgtatagagaagaggaagatgagttttagggatgatgctgaagaaggaagaggggatctaaggaagccatttctacatactggaagctggtatcgtatgggttctaggatggggtctagtatgttaggatcctctcaagctcttcgtgataactccatctctgttgtagcttgcgttttgattgttgctttgggtcctatccaatttggtttcacttctggttactcttctcctacacaatccgcaatcatcgaggatcttggactaacagtctcagaggattcatcttttctttacatgggaaggttgttggaaggtttcggtgttggaataatctcttacacggtgcctgtatatatagctgagatagcacctcagaatttgaggggcagcttgggttcagtgaatcagctatctgtcactctcggaataatgctggcctatctactcggactttttgttgagtgggagatacttgcagttttaggaatacttccttgt

SEQ ID NO: 568 - DNA, 322 bp, Gossypium hirsutum
  Clone ID: LIB3189-034-P1-K1-G8
cccacgcgtccgtgtttttttagtctggttactcttctccgacacaatccgcaatcatcgaggatcttggactaacagtctcagagtctttaatgattgctgcaattcctaatataattggatggcttgctatatcttttgcaagagattcatcttttctttacatgggaaggttgttggaaggttttggtgtcggaataatctcttatacggtgcctgtatatatagctgagatagcacctcagaatttgaggggcagcttgcgttcagtgaatcagctatctgtcactctcggaataatgctggcctatctacttggact

SEQ ID NO: 569 - DNA, 923 bp, Gossypium hirsutum
  Clone ID: GOSHI-09MAY01-C14343_1
cccacgcgttcgtccacgcgtccgcttttcttcactgccggtttagcctttcggaggttcatcagaaatggacggttctcaccttttcatcactttttcttcgttttgttcttatctagaggcgttgacttgaagtcgtcgtttgtttttttgaatctttgttccattccctaagcaagttttttgaaagattcaatcaattgttttgaatcgaaagtagtgtgtagtacaaatttcgggtaatcaagtagagaggcagctttattcttgtaatctagtttgatggtgaaaagaaagcagcagcctcctccagaaatggagggtactggcggcgctgaagcggcggtggaggctgagaccggaatccaaccccaacgaaggtgtaccaaatctctgaaaacgcgagctcagatggataaacataacgagagctgtaaacgatatcgactgaaaattaaaatgaggcgtgaggagaaggaacaagagatcccaaagttgaaggatgaacaccagaagacgaaaatggagctagaggaatacaagtctaaaattggggttatggggaatgagatccacctacttatgagaaagcttgaggcccaggggcaaaggcttacttctttggaaaaggtggtagaatggtttgcgttgcagaccaatgtgcaaggcggtcaagttttagcaactacgggagctgttttacgaagtgtgaatgaattagtgagttcgggagagacaggtgcgacatactttcaaccttccatggctggttttcttcatcatacatgctttggactacaacattacggttcggctgctgttgctgtgtttgcaaatcataacttgcgcttggggtttgattcctttattaatcttgtagactgtattgattttgtgattttttattatttttttctttttta

SEQ ID NO: 570 - DNA, 560 bp, Gossypium hirsutum
  Clone ID: AW186959.1
tcttcaccgtcggtttagcctttcggaggttcatcagaaatggacggttctcaccttttcatcactttttcttcgttttgttcttatctagaggcgttgacttgaattcgtcgtttgtttttttgaatctttgttccattccctaagcaagttttttgaaagattcaatcaattgttttgaatccaaagtagtgtgtagtacaaatttcgggtaatcaagtagagaagcagctttattcttgtaatctagtttgaaggtgaaaaaaaaacaacaacctcctccaaaaatggaaggttatgggggggcttaaaccggcggtgaaggtgaaaacggaattctacccccaccaaggttttccaaatctcttaaaacgcgagctccgatggataaaccttacaaaagctgttgacgaagtccactgaagatgtggatgaggggtggagagaagggagaggagattccccggtttaaaggatgaacgcccgaaggaggaagatggagctgggaggaattcgagtcttaaattgggggttgtgggaaatgaaatcggggcggttgt

SEQ ID NO: 571 - DNA, 587 bp, Gossypium hirsutum
  Clone ID: GOSHI-09MAY01-C15993_1
agatgtctttccctttttctcatgaatgcaacgtggtgcatacgctgaaaaaaacccaatctttggatagtaacaataaataaaagggggagaagctgcctcctccatggcttcagctccttccaagctctatgcagatgatgttagccttgtggtagttttgctggacactaacccatttttctggagctcctcctcactctctttctctcagtttctctcccatgttcttgcgtttttgaatgcgatattgactctgaatcagctaaaccaagtcgtggttattgctactggatataattcctgtgactatgtctttgattcgtcttcagatttgaaccggagttttgagaatgggagaatgcctgttatgtgctccagtttgttgcagaagttggaagaatttcttattaaagatgagcagttgagcaaggaggaacctgaaggaaagattaagtcttcccttttctcggggtcattgtcaatggctctttgttatatacagagagtgtttcgttcaggagccctccatccacatcctcgaatcttatgcttgcagggatcaccagatggacctgaacaatatg

SEQ ID NO: 572 - DNA, 329 bp, Gossypium hirsutum
  Clone ID: LIB3197-017-P1-M1-H4
cggacgcgtgggcgcagtttatgcagacccgacgcttacaatcaacagcttgaaggagagaatttcactcaggtcagctgtcgttccctttttctcatgaatccaactcgctgcattcgctgattattagagaaaaaaaacccaatcttttgatagtaacaataaataaaagtaggagaagctgcctcctccatggcttcagctccttccaagctctatgcacatgatgttagccttgtggtagttttgctggaactaacccattttctggagctcctcctcactctctttttctcagtttctctcccatgttcttgcggttttgaatg

SEQ ID NO: 573 - DNA, 209 bp, Gossypium hirsutum
  Clone ID: LIB3189-021-P1-K1-D5
gggagaatgcctgttatgtgctccagtttgttgctgaagttggaggaatttcttattacagatgagcagttgatcaaggaggaacctgtaggaaagatttagccttcccttttctcggagtcattgtcaatgtgctctttgttatttacttattgtgtttattttttgttctccttatttccattactttaatcttattatttgtagtt

SEQ ID NO: 574 - DNA, 641 bp, Gossypium hirsutum
  Clone ID: GOSHI-09MAY01-C15953_2
tccttgcgtccggtattctttattattcttcgtcttctgaaaaattttctttgaaattccagcttttgactacaatgtcaggaaggggaaagggaggtaaggggctcggaaagggaggagccaagaggcataggaaggtcttaagggacaacattcagggcattaccaagcctgcgattcgccgtctggctcgtaggggaggtgtgaaaagaatcagcggtttgatctacgaagaaacccgaggcgtattgaagatcttcttggagaacgtgattcgtgatgccgtgacatacactgaacacgccagaaggaagaccgttaccgccatggatgttgtttatgccttgaaaaggcaaggcaggactctctatggttttggaggttaagcttagtacactattgtattttaggcattgcagtattatgcttattatggtagaatcatggatcttggctatagatccactgcgttaatgtaattgcttcagttcgttgctgatgttactgtgattcttaatatttgaaatgctctcaaaggatttgtatcaaaaaaaaaaaaaaaaaaaaaaaaaaaaaaaaataataaaattaaaaaataaataaaaataaataaaaaaaaaaaaaataaataaatttataag

SEQ ID NO: 575 - DNA, 580 bp, Gossypium hirsutum
  Clone ID: GOSHI-09MAY01-C15953_1
ttattgcttgtaattcatttcgttgtaaatttgtttccgtagtaatcatcaaatctttcgaagatgtcaggcagaggcaagggtggcaaggggctcggcaaaggaggtgccaagaggcataggaaggttttaagagacaacatccagggcattactaagcctgccattcgccgtttggctcgtcgaggaggtgtcaagaggatcagtggcttgatctatgaagaaactaggggagtattgaagattttcttggagaatgtgattcgtgatgctgtgacttataccgagcacgccaggaggaagaccgttaccgccatggatgttgtttatgccttgaaaaggcagggcaggactctctatggttttggtggttaagtttaggatcattcttaagttcttaactgtaatgcctttagatcttgactctagatctatatcgttatgtacttgtttgtgtactcgagtgatgttataatgatttgtaaccttaagattgatcgaataattttcatttgcaaagctttctttgggcaaaaataaaacatataaaaaaaaaaaaacaaaaaaaaaaaaaataaaa

SEQ ID NO: 576 - DNA, 354 bp, Gossypium hirsutum
  Clone ID: LIB3149-008-Q1-K1-B8
ggctagatctatgaagaatccaacggtgatttgaagattttctatggagaatgtgatgcgtgatgctcgtgacttataccgagcacgccacgaggaagaccgctaccgctatggatgatgtttatgccttgaaaaggcagggcaggactctctatggatttggaggttaagtttaggatcaagtcttaagaacgtaactgtaatgcctttagacctcgacttgagatctataacgtgctgaacatgttgtggtactctgagtgatgtgttaacgatttgcaaacctaaaaatgatcgcttaattcacatactgcaaagctttctttgggcaaaaaaaaaaaacaaagggcggcc

SEQ ID NO: 577 - DNA, 328 bp, Gossypium hirsutum
  Clone ID: LIB3197-016-P1-M1-E10
gaaagctgcgcacgcgggcacgtaccggaactccattgtcgtcccaaacctccctttttattcttcgtcttctgaaaaaatttctttgaaagggcagcttttgactacaatgggaggaaagtgaaagggaggtaaggggctcggaaagggaggagccaagaggcatatgaaggtcttaagggacaacattcatggcattaccaatcttgcaattcgccgtctggctcgtaggggaggtgtgaaaagaattatgcggtttaatttatcaataaacccgttgcgtattgattaaattttttttataacaaaatttcgttgatgccgtgac

SEQ ID NO: 578 - DNA, 616 bp, Gossypium hirsutum
  Clone ID: GOSHI-09MAY01-C15913_2
cgaggatggtgaacctaatacagagatcataagaaagttggtcgagacaatcgatgagaacggtgacggtcgtctttcaccttccgaattgaaagcattgattataggaatcagatttgaagagatagacttcgacatggatgacgctgtgatgaaagtaatggcagattttgatacctccctcgactcttatattcaagaagaagagtttgtaagaggaatcacaaagtggattaatgaagcaaagcaaactgggggtgcttatctcgaacctaacgccggaacgtttaagtttattgaccaatttcaccagcaaaccaagagagaacatgctttgttggggtcagaggaacaaagtgatgaggttgttgaacatgttgaaaacccaaggtggatctccttcaaagcagtactaatgctactactaggcaccttgattgcagctgcatttgctgatccactcgtagatgctgtcgataacttttcaaccgcaacaagtattccatcgttcttcatctcatttattgcattgccattggctacgaactctagtgaagccgtatcagccattatcttcgctacccgcaaaaagcagagaactgcatcattaacattt

SEQ ID NO: 579 - DNA, 931 bp, Gossypium hirsutum
  Clone ID: GOSHI-09MAY01-C15913_1
gtccgccaagccgtccgtcaatctttccggaaaacttaactgttttgcctaatcacgaacctaacgggggaccggtaaatttatttgacccacgcctccgccaaaccaagagagaacatgctttgttggggtcagaggaacaaagtgatgaggttgttgaacatgttgaaaacccaaggtggatctccttcagagcagtactgatgctcctagtaggcaccttgattgcagctgcatttgctgatccactcgtacatgctgtcgataacttttcaaccgcaacaagtattccatcgttcttcatctcatttattgcattgccattggctacgaactctagtgaagccgtatcagccattatcttcgctacccgcaaaaagcagagaactgcatcattaacattttccgagctttacggagcagtaaccatgaataacgttctctgcctgtcggttttcttggcactcgtttacgtccggggattgacatgggacttctcatccgaagtgctggtgattctcattgtttgcattgtgatgggcgcgttcgctagtttccgaactactttccctctttggacatgttcaatcgcttacatcctttatcctttctccttggcgctcgtttatgttctcgattatgtcttcggctggtcgtaggttcaatgaatagagatggtagtttaggagggtaaagccatttgtttgtgagccttcatggtttttcccaatgtatgaacttgtcaaactctttttcccttagacattggttttcagagaagactattccggatttgttgttatggtgtttgtaatttggagcatatatacctcagtttatattagctccatttatgtcagttttctgttttcttttttaagcaacaataataaaaaaatatttatttttgtgaaaaaaaaaaaaaaaaaaa

SEQ ID NO: 580 - DNA, 274 bp, Gossypium hirsutum
  unsure (1)..(274): unsure at all n locations
  Clone ID: LIB3197-015-P1-M1-G9
gcaaactgggggtgctttgcttcatnnatccggtttntgattccttggacaaagtggattaatgaagcaaagcacactgggggtgctgatctcgaacctaacgccggaacgtctaaaccgattcaccaaggcgaccacccaaccaagatagaacatgctatgatagcgtcacatgaacatagtgatgacgtgtgtgaacatgttgaaaacccaaagtggatctccttcaaagcagtactgatgctcctagtaggcaccttgattgcagttgcat

SEQ ID NO: 581 - DNA, 573 bp, Gossypium hirsutum
  Clone ID: GOSHI-09MAY01-C15903_1
ccttgctaaggaaatgctccaatttatcttcacttatccacaccgttccagctttgcaattgccaaagaaaactatggaacagcctcttctctcagaagagaaaagaagtgaaattgatgagaacgagaggctgagctcgtatcagtatgttggcagaacagggtcggtgattccaacggcttcgttggcgggtacggatgttagcatcgaagagattcgatcagccacttctttttctactccttacccgccatccattcatgctcctttgatcagctcccctgagccccttcctaatgagccagctattcctcaccaaagtccttacgcagcagattatggcgcatactccaatgattttcagaggcaattattggatgaggtagagataagagagttgctcatcgatcatatcggtcatcgatgttgttgggggagtcgccctgctcgtacctggaagattcatgctgttgaggattgcaatgtttatgtgggaactcttgaaactttcttagaagaaagggaagtgataagagaaacagaaccttaccttggtggtaaaattgatggaa

SEQ ID NO: 582 - DNA, 641 bp, Gossypium hirsutum
  Clone ID: GOSHI-09MAY01-C15863_2
attaaaccaaagaaaaaaagaaaagaattcgaccaaaacatatccatcgcgagggttttcgagttaaccttggtcgtcttttctatcaaattaacaagtaaattccaaatgggaagcaccgccgtcgagaagacagcagaagagcttcagcgagagattgatgagcttcatcgccagcaacgcgagattacagagaggctgagagatcctcgaggactccgaagaggaggactgtcaggcatcggtcctcgtaacttcgccgccaatggttctcgtcagcgtggctttcttcgacctgcggataggattgatggagaagatcaacctccggctaagaggcgattgtcatcagctgttgtcaaggttgaagatggagagattgttgatgatgaagtagcaaaggctgcccctccatttttgtatagctttcttgtatgttgtaccttagtctttctttccattgttttgtttttgcattcttttctctccagtgttgatgtatatacatgaatcagtgcatcagagttcgcttaggaggaattggtagctgaattctttgtttctccattgtggagattagagggtttataaaacccaagctgcggattgtaggttgtttttgtaacagtaatgtttcatag

SEQ ID NO: 583 - DNA, 585 bp, Gossypium hirsutum
  Clone ID: GOSHI-09MAY01-C15863_1
taaccttggtcgtcttttctatcaaattaacaagtagaattccaaatgggaagcaccgccgtcgagaagccagcgggaagagcttcagcgagagattgatgagcttcatcgccagcaacgcgagattacagagaggctgagagatcctcgaggactccgaagaggaggactgtcaggcatcggtcctcgtaacttcgccgccaatggttctcgccagcgtggctttcttcgacatgcggataggattgatggagaagatcaacctccggctaagaggcgattgtcatcagctgttgtcaaggttgaagatggagagattgttgatgatgaagtagcaaaggatgccagtgacatggctgtcgaaggatctggtgcagtacatgagagtgatagaaagctttcgactcagcagcaaagtggttggtctagaagggatgtaaatcaaacaccactgaagaaggatgccgaagttccggttgctgagcatgttccaaggattttgcccaaggatgaggacccaagcttgattaataggaataaaagaatgttgggtcaacttttagggactttggagagattcaggaa

SEQ ID NO: 584 - DNA, 579 bp, Gossypium hirsutum
  Clone ID: GOSHI-09MAY01-C15583_1
ttatctctcattgaaaaaattgactaaaaagcttcaatttttttttcttagttttgcttctgtttctctttgaattcccaaatgggtttgtgggaagcttttctcaattggcttcgaagcctgtttttcaagcaggaaatggagctatctttgatcggacttcagaacgcgggaaaaacctcactagtaaatgttgttgcaactggtggatatagcgaagatatgatccctacggtcggattcaacatgaggaaagtgacaaaaggaaatgttacgataaagttatgggatctcggaggtcaacctaggtttcgtaccatgtgggaacgatactgccgtgcggtttcggcaattgtttacgtggtggatgccgctgatcccgataacttgagcatctcaagaagtgagcttcatgatttgttgagtaaaccctcacttactggtatccctctcctgctgttaggcatcaaaatcgacaagccagaagctttgtcaaaacacgctttaactgaagatatgggactcaagtcaattacagatatagaaatatgctgcttcatgatatcatgcaagaactcc

SEQ ID NO: 585 - DNA, 537 bp, Gossypium hirsutum
  Clone ID: LIB3543-019-Q1-K1-C10
ggaaaagccaggggctttgtgagatctctggctctctcttcctgtttttctcttcgaaaatttactaaagaaggcttttttttttgtgatctcttctaatgggtttattggaagcttttctcaattggcttcgaagcctgtttttcaagcaggaaatggagctatctttgataggacttcagaatgctggaaaaacctcactagtaaatgttgttgcaactggtggatatagtgaagatatgatcccaacggttggattcaacatgaggaaagtgactaaaggaaacgttacaataaagttatgggatcttggaggtcagcctaggtttcgcagtatgtgggaacgatattgccgttcagtttctgcaattgtttatgtggtggatgcggctgatccagataacttgagcatctcaagaagtgagcttcatgatttgctgagcaagccctcacttaatggcatccctcttctggtgctaggcaacaagattgacaagcctgaatctctgtcaaaacaggcattgactgaagaaatgg

SEQ ID NO: 586 - DNA, 428 bp, Gossypium hirsutum
  Clone ID: LIB3145-025-Q1-K1-B9
cccacgcgtccgggtggatatagtgaagatatgatcccaacggtgagtcatcttgtctaagaggatctgtatttgcatcttcacttttttttttcttctttttaaatttgtgaattggtatgatattactttccaaggctttttttttttctgtcatagaagtaaggtaattaaggcctactggcttacattcaggttggattcaacatgaggaaagtgactaaaggaaacgttacaataaagttatgggatcttggaggtcagcctaggtttcgcagtatgtgggaacgatattgccgttcagtttctgcaattgtgtaagaactaagaagcttcttctttattttcagacttgttattttcagtaactcccttctaattgctttaacaattttagggcctgaaaaagtttgccttttatgcaagaa

SEQ ID NO: 587 - DNA, 627 bp, Gossypium hirsutum
  Clone ID: GOSHI-09MAY01-C15553_1
attgctaacatttcgttgggtatggtttgggatgtcaactaagtagaagaaaacatcagaaagtgggaaaaaaaatgggaattgtggcaggcataggggttttgttgccattcccattttactacttgttatggacatatccacagtcatgggtgaacctttgtgggaaaggaagggacccatcaaaggtgatggcccttgtctcccatttcatcaagctaattcagttcgtttctctcttttccgttccttccttctcttggcctccccctctttacttttggcccctctttgccttcggtcagttcctcaacttcagggtgtatcaattgcttggtgaatctggcacttattacggtgtacgctttggaaagaatattccatgggtaagggaattcccttttgggttcattaaagatccacagtatgttgggagcatcatgagtcttgtagcttgtctatcttgggtaccgtttcaatatattctctttggtcgttgggctatctattatgatccacatcgaatcaactggatgtgacacacgtgcaggcctttatctaaagtggagttgcagtcgcttttactatttctgaaaacgtttatgtgacattggctcctttgtgtgg

SEQ ID NO: 588 - DNA, 497 bp, Gossypium hirsutum
  unsure (1)..(497): unsure at all n locations
  Clone ID: LIB3493-013-P1-M1-B10
gcgtgcagagagaaaatgaccaagagtttccgagatcatcacgaggaagacgagaagtcaggtgaaaaggccaagaggaaggctcatagggccattcccatgatactacctgatgtggacatatgcacagtctagggtggaccttagtgggaatggaaggtgcacaaccaaggagctgggnntagtntgaaccatgtagagctaagtcagttcgagacatgggggggggtttggtggtgntatnggtcgtacactatttacttttggcccctctttgccttcggtcagttcctcaacttcagggtgtatcaatcgcttggtgaatctggaacttattacggtgtacgctttggaaagaatattccatgggtaaggnnattcccttttggggtcattaaaggtccactnnttgttgggagcatnttgagtctcggagcatgtctatcttgggtaccgcttcaatattttctcctttggtcgtggggctatctatttat

SEQ ID NO: 589 - DNA, 1032 bp, Gossypium hirsutum
  Clone ID: GOSHI-09MAY01-C15563_1
aacttaatatatcttcagctccattttcagaacattgaagatctaaacattttttcttctttctgagttgaatccaaagatgggtttttgtttctgggtttgttttatttgtttgttaaacttctacagcttgagttttgtaagttcacaagctgatgcaagtgctgaagggactgttttcattgatggaaaagctccgattggtagaatagatgatgatttcatttgtgctactttggattggtggcctcctgagaaatgtgattatgggacatgcagttggggccttgctgggcttctcaatctggatcttaataaaaacttattcttgaatgccgttaaagctttttcaccattgaagattaggttgggcggcacattacaggacaaagtcatatatgacactgatgacaatcaactaccctgcacttcatttgtcaaaaacacttctgagatgtttggttttacacaaggatgtttgccaatgaatagatgggatgaccttaattccttctttcaaaaagcaggagctaaggttatttttggattaaatgcacttgctggtcgaactatagcccctgatggttcagccgtaggtgcttggaactacaccaatgccgaatcttttatgcaatacactgttgacaagaactataccattcacggttgggagttaggaaatgaattgtgcggaagcggggtcggaactcgtgtctctgcagaccagtatgcggctgacacagcagctctgcaaagtatagtgcagaagatataccagaatgttgatttgaagccgttaattatcacaccgggagggttctatgactcggattggttcacggaatatattgataagacaaacaagtccctcgatgttgtcactcaccacatatacaaccttggaccaggagttgatgaccatcttgttggaaagattctcgatccatccgttcttgagggcgtgtccggaacattcagtggccttcataacatcatcaagaattctacaacttcagcatctaacttggttgg

SEQ ID NO: 590 - DNA, 448 bp, Gossypium hirsutum
  Clone ID: LIB3197-006-P1-M1-D8
ggaagatctgagctgaaaacatttggcggagaaatgacagcttaggaggtgtcaatgaaaggaaattgtgttaacgtaagaggaggagaaagctgttcttctggttacagtaagtcaatggatgctaggaagaccatggaagggcaaaatggtcattccactcatcaagctgccatcagagaccctgaaacagcgctgtatacggagctatggcatgcatgtgcgggaccgctggtgaccgtccctcgcgaaggagagagcgtgttctactttcctcaaggtcacatagaacaggttgaggcgtctactaatcaggttccagaccagcatatgccagtgtataatcttccatccaagatcctttgtcgggtgattaacgttcaactaaaggctgaaccagataccgatgaggtttttgcacaagtgactctacttcctgaacctactc

SEQ ID NO: 591 - DNA, 411 bp, Gossypium hirsutum
  Clone ID: LIB3148-011-Q1-K1-B7
gatttctgaagtggttctttccacttcctctctttttctttttctgggtttgcttattattaacatcaaagtttgtggtgaatcaagttgaggcgtctactaatcaggttctagactagcatatgccagtgtataatcttccatccaagatcctttgtcgggtgattaacgttcaactaaaggtaacttgcacatttttcttattgcaatttgaatgggtttcttttgtctatagggtttagttttgctaacgaaactaatatccttttgctgttaaccatttaggctgaaccagataccaatgaggtttttgcacaagtgactcttacttcctgaacctactgtaagctttggtctctactttttttctttgtaataatcagaatttaatgagaagttgaatttctcatg

SEQ ID NO: 592 - DNA, 873 bp, Gossypium hirsutum
  Clone ID: GOSHI-09MAY01-C15423_1
ctcactctctttttttaatctcttcccttcatttctttcaccatttccattgatttttttaacagtggcagcaacttccttaaccctctcaagattcctctcaccggccgccgccatttcattatccagcaccaccaagctttcctctaaatcccttcctttaaagttctcctccgtttcttccctttccttcaacctccaccgccgccgcgtttcaaaacccatttccttttccaccaaaacaacccaaatctccgccgctatctccgtcggagataagcttcctgacgcaacactttcctacttcgattccgatggtgaactccaaaccacgacgatctcttcccttaccgccggcaaaaaaagccgtcatcttcgctgtccccggtgcttttacccccacttgttcccagaaacacctccctgggttcgttgagaaatctggggaactcaaagccaaaggggttaacaccatcgcctgtgtttcggtgaacgatgcgtttgtgatgcgagcttggaaggaaaatctaggtatcaaagatgaagtccttttgttatcggatggtaatggggaattcactaagaaaattgggtgtgaattggatttgcccgataaccctgttggccttggtgttcgttctagaaggtatcgctctcttgcctgaagatggtgtcgttaagctctcttaatttagaagaaggtggtgctttccttctcagtggagctgaagatattctcaaagcctgtgattttcgagagattaatacacctcggccacctcttttgtttggctagtttttagttcacttttgtaataaaattgcccaaaatctgagcactctcttatgaatgaatgatatatttcccctttg

SEQ ID NO: 593 - DNA, 447 bp, Gossypium hirsutum
  unsure (1)..(447): unsure at all n locations
  Clone ID: LIB3583-031-Q6-K7-F7
cgtccgcaatcccggtcngccccgcgtccgcttcccttcatttctttcaccatttccattgatttttttaacaatggcagcaacttccttaaccctctcaagattcctctcaccggccgccgccatttcattatccagcaccaccaagctttcctctaaatcccttcctttaaagttctactacggttgttagctatgctaaaaggagaggggggggggggcggaacaagacaagtgtgaagacaggagtgaaacggagttgaaggaggagtagnagtgtgatggagaagattttnagaggagatannaggattgttganaanattgggaataggaagaaggaagggtgtgtntatattgcgaanaaaggtggtgggaaaaataggagaaagagagggaaagtggaatgagaaggaagagagggagtgttaaataagttgtaaatgg

SEQ ID NO: 594 - DNA, 943 bp, Gossypium hirsutum
  Clone ID: GOSHI-09MAY01-C15783_1
taaaaactgtccattgtttttgattttctctcacagatccatccttcccgcccctgggaaatacaaaggacttcgctgctattctcaatttcaatttttatcctaaaacgcttagaaaaaaaaaaacaactaaaaagatggcgaggagaccggacgaggaatacgattacttgtttaaggtagtactaatcggcgattctggcgttggaaaatctaatttgctttctcgatttactcggaacgagttttgcttagaatctaaatctaccatcggcgtcgaattcgccacccgcactctccaagttgaagggaggactgtgaaagctcagatatgggacactgctggtcaggaacggtacagagcaataaccagtgcttactatagaggtgctcttggagctcttctggtgtacgatgttaccaagccaacgacttttgaaaatgtgagccgatggctgaaagaactcagggaccatgcagattctaacattgtaattatgatgattgggaacaagactgatctgaagcatctccgagcagttgccacagaggatggtcaaagctatgccgagaaagaaggcctttcatttattcagacatctgcactagaagcaataaatgttgagaaggctttccagaccattctctctgaaatataccgcaaaattagtaagacgtcaccttcttcagatgagcccccccccccttgttttaaggaagggaggcccttggctgttggagggggggaagccaacaccaagaaggcttgctgctcatcatcttgaacatgatccattttaattcctttcttttgtgtaatcaatgtgttgtattgtcaagacattcttgttgtttctattacgttattttgtatcattacaaacatttgaattattcatgttcttgtgttgttgcaagttattgattattttgacatggctgt

SEQ ID NO: 595 - DNA, 673 bp, Gossypium hirsutum
  Clone ID: GOSHI-09MAY01-C15753_1
gataaagcttgcacagcgcatgacttataacttctgcgctggagtttgtgcatcgagcattcataaatgggacaagcttagtgttggtaatgttggcgaaaatgtcagggtgatgacccggaagaatataaatgatcctggtgagccacacggggttgtgttgagtgctgctacttctgtttggatgccagtaactcaagaacggctgtttgatttcttgcgggatgaacggatgcgaagcgagtgggacattttgtccaatggtgggccaatgcaagagatggtgcatgttgccaagggaatgggtcatggtaactgtgtctctctccttcgtggcagcgccattaatgcaaatgagaacaacatgctaattttacaagaaacatggagtgatgcctctggtgcattagtagtttacgcacctgttgacatatcatcaatgagtgtggtgatgaatggtggggattcagcatatgtggcactcttgccatccggatttgcaattcttcctggtatttcaccaagttatcacggtgggcgaagcgagtccaatggagcactggtgaaacctgaaattgatgtgaagcatagtcaggggatgcctactttctgttggctttcagattttggtcaataacgttcctactgctaaactaacaagtgagtcggagga

SEQ ID NO: 596 - DNA, 918 bp, Gossypium hirsutum
  Clone ID: GOSHI-09MAY01-C15743_1
gtgtttttatccgagctatgattatgctcattgcatcgtggactctcttgaaaatatcacacattcactgtgtacacttgaatttgagaccaggcgtgcttcttactattggctgctacatgtattggacctttaccagccatatgtgtgggaatactcacgactgaatgttacaaacactgtgatgtctaaacggaagttaaactacattgtgacaaacaaatatgttgatggttgggatgatccccgtctcatgacattagctggtttacgacgtaggggtgtgacttcaactgcaataaattcttttgttcgaggaattggaatcactagaagtgattgtagcatgattcgtttggatcgcctcgagtatcacataagagaagaattaaacaagacagctcctcgtgtattggttgtgctgcatcctcttaaggttgtcataaccaacctcgaatctggttctgttttggatcttgatgcaaagaaatggcctgatgctcgaacagatgacacatctgccttttacaaggtgcccttttcaaatgttgtatatattgagcgctcagatttccgcatgaaagattctaaagattactatgggttggctcctggcaagtcagcactgctaagatatgcattccctataaagtgtacagatgtaatattggcagatgataaagaaactgtgcttgagattcgagctgaatacgatccttccaaaaaaagcaagccgaagggggttctccactgggttgctgaaccgtccccgggttctgatccattgaagattgaagtccgattgtttgacaaactctttaattctgagaatcctgctgaacttgataattggctcactgatctcagcccgaattccaaagtggtggtacctaatgcatatgcagtgccatcacttgg

SEQ ID NO: 597 - DNA, 590 bp, Gossypium hirsutum
  Clone ID: GOSHI-09MAY01-C15773_1
cccacgcgtccgggaaaacaaagccatttttagtggtttcgctctctctccctctctctagagaagaggcattccctttgtcggagtgcgcttctgctgagtgtttctttcgttttcttttgttttaagttttggagtaaagagtgtttcaagcttcttagtcctattggctgcttaacgacctaagctagccccgccggatatagttatcaggtgctcatcataaaaaatgactgtcacgccaggaatttccatcaacgatgggaaccttgtggttcatgggaagaccatcctcactggaatgcctgacaacattgttttgaccccaggatccggtgtcgggcttgttgctggtgcttttataggtgctactgcttcggatagcaaaagccttcatgtctttccaataggtgttttagagggcctccggtttatgtgctgtttccgtttcaaactatggtggatgactcagagaatgggaacatgcgggaaagatgtccctttggagactcaattcatgctcgtagagagcatggaagaagatgatcctaatgccccaacgatctacactgttttcctccctctccttg

SEQ ID NO: 598 - DNA, 402 bp, Gossypium hirsutum
  Clone ID: LIB3585-044-P1-K1-H9
cccacgcgtccgcccacgcgtccgcggacgcgtgggttggagtaaagagtgttgcagagcgtgttagtcatattggctgcttaacgacccaaggtagcctcgccggatataggtgctcatcataaaaaatgactgtcacgccaggaatttccatcaacgatgggaaccttgtggttcatgggaagaccatcctcactggaatgcctgataacatagttttgaccccaggatccggtgtcgggctttgtgctggtgcttttataggtgctactgcttctgattgcaaaagccgttatgtctttccaataggtgttttaaagggcctcctgtttatgtgctttttccgtttcaaactcatggtggatgactcataaaatgggaacattctggaaagatgtccct

SEQ ID NO: 599 - DNA, 445 bp, Gossypium hirsutum
  Clone ID: GOSHI-09MAY01-C15763_4
gcaaaggagatccatcactgacccagcaccagcagcgtcaatggctagacgggcctcacgactcgctccgatctttgtcatcccaggtttctcatcgcaaatccccactcagtcccctccattcacgggcgttctcggcggctccggcgcctcaaccggcggttttcgtagacaagaacacccgcgttatttgccaaggcataaccggaaagaatggcactttccacaccgagcaagccatcgaatatggcactaacatgggggggggagttacaccgaagaagggcggcacagagcacttatgacttcctgttttcaactcagtagctgaagcaaaagctgaaaccaaggccaatgcttctgtcatatatgttcctcccccttttgctgcggcggctatcatggaggccatggaagctgagctggaacttgttgtttgtatcac

SEQ ID NO: 600 - DNA, 454 bp, Gossypium hirsutum
  Clone ID: GOSHI-09MAY01-C15763_3
tccgcccacccgtccgcagaagaagatgctgctgcactaataaaggaaagtgggactgaaaagcccattgttgccttcattgctggacttactgctcctccaggacggcgtatgggtcatgcaggagctatagtatcagggggcaagggtactgcacaggacaaaatcaagactctaagggaagctggagtgacagttgctgaatctcctgcaaagattggtgtagcaatgcatgatgttttcaagcaaagaggcctcctgaattaacacccttttttttttcctagaaaaaggaaaactttttttcctgaataagtttcaggtggacatttttcatataattccattggtcttcttttgtccaaaattatttttatactaaaaaatgagggaaaaatcttataccttagtcaatgaaaccagatttggcttaaacaagacgggcaatactttt

SEQ ID NO: 601 - DNA, 1397 bp, Gossypium hirsutum
  Clone ID: GOSHI-09MAY01-C15763_1
ccccgcgtccgggagactgcatttttttggtatctgcagcgaaagaggcaaggggagatccgatactgaatcaacagcaacagcaatggctagacaagcttcacgacttattcagtctttgtcttccaggatttctcctcacaaacctcaactatccccgctcactccctcttcctcttcttctccgcttttgactcagtcacgctctttctcggcggctccggcgcctcaaccggcggttttcgtagacaagaacactcgtgtcatttgccaagggatcactggaaagaatggcactttccacactgaacaagccatagaatatggcactaagatggttggtggagtaacacccaagaagggtggcacagagcacttagggcttcctgttttcaactctgttgctgaagcaaaggctgaaaccaaggctaatgcttctgtcatttatgttcctccgcctttcgcagccgctgctatcatggaggctatggaagctgaattggatcttgttgtttgtatcacggaaggaattcctcaacatgacatggttcgtgtgaaggctgcccttaaccagcaatcaaaaaccaggttgattggtccaaactgccctggcatcattaaacctggggaatgcaagattggaattatgcctggatacattcacaaaccaggtcgtgtaggaattgtttctcgatcaggcaccttaacatatgaagcagttttccaaacaactgcagtaggtctggggcaatcaacctgtgtaggaattggtggggatccctttaatgggaccaacttcgttgattgtgtgacaaaattccttgctgatcctcagacagaaggcatcattctgattggtgagatagggggcactgcagaagaagatgccgctgcactgataaaggaaagtgggactgaaaagcctattgttgctttcattgctggactcactgctcctccaggacggcgtatgggtcatgctggagctatagtatcagggggcaagggcacggcacaggacaaaataaagactctaagagaagctggagtgacagttgttgaatcacctgcaaagattggtgttgcaatgcatgaggttttcaagcaaagaggtctccttaattagtgtgtgtgtgattttccctagaaaaagaaaagcaaaacaatatttcctggattagtttcaggtgacaaacttgttcgaaatgctttcattgtttttgtgaaaaatcaattttatactgaaatgagggaaaaacccaaccaaagaaaagcaacagtttgatggttgggtcgatgcaaaattaataaacctgagaaggttgagacttttgatgaagggagaaagttcattttcacgcaattattgaaccaataaaatctagagttaatagacg

SEQ ID NO: 602 - DNA, 500 bp, Gossypium hirsutum
  Clone ID: LIB3585-036-P1-K1-B6
gtggttttcctataaaattttttctattcagaaaagaatgtgttagaaagaaagtttacaagtgatcagtttgattggataatagttgaaaaatatgaatataattaaacctgtgaatgtttgctagatacttaacgtcctagtattcagtaggtttatatacagggtaacagctgtgggattggaacaccatggtactcaagaagttaagactattttccatatgctgatgttgtagtgtactctcttttagtaagttgtcaataagcatatttttcattttatcttgtaggttttccaaacaactgcagtaggtctggggcaatcaacctgtgtaggaattggtggggatccctttaatggaaccaacttcgttgattgtgtgacaaaattccttgctgatcctcaaacagaaggcatcattctgattggtgagatagggggcactgcagaaaaaaatgccgctgcactgataaaagaaagtgggactgaaaagccta

SEQ ID NO: 603 - DNA, 1198 bp, Gossypium hirsutum
  Clone ID: GOSHI-09MAY01-C15653_1
taaatttaaaactctttaatccatgtttaatatatttgttggtgtccaggacactttccctgttttacaagatttaacactgacgacgagtgatatgatgaaggggatatgtgatggacaactctcattgtgtttcccaaacctcgaacttcttaacctccaattctttcctgagacatccactactcttccatattccttcattcgctcactaccaaaccttcagaagcttgttataaacaatgcttccatttctgaattagtccggtctgaaggactcttccacaatgaaatagatacatcagcgttctctcagttaaaggaattaagcttgtctcaacttccagagctaacgttaaagactttagagccttttttgttgtctttcaaaaattttagtggaagtttcaagatgccatggattcatcaatctaatggcatgggtcgggccctcccccctcccgccccagcaaagagcctgacgctactagaaagcctgagcatagatgattgtgagatgatacaagaaatcatagcatgtgagggtgaagaaatacaaggcaacattgttttccccaaactgaagtatttgaaactaagttgtctgccaagtctagcaagcttttccttggcgcatcacttgttggagttcccagtcttggaaaccgtgaaggtgaaaaagtgccccaaaatgaagaatttctgtcaaggagagttaagcacaccaaggctggaaccagcgaacttaacaggagatgaggacggtgaactgcagtgggaaggcgatcttaacactagcataaaacatatgttcgatgaaatgaatgttcaaaattctcaagcggtcgaggttactgatcagttggggtccgtgtgagacaagctcagtttcatttcaattcaaaccaaatggttgagttgctctattggagtatgggggcgtccactttcctttattcagtttttgcaaatccactattgaactgttgcatttcacattataacctaagtgttgattttgaagtgcatcatgtttggcactgggaattacaaacatgaaaactttttgtagtaaggttgaccccagttttatggatgcatttcagccacattatactttttgctggtatttttgtatcagcttgggggattagacgatttaactaagattgctactcattttgggtgtgcttgtttc

SEQ ID NO: 604 - DNA, 357 bp, Gossypium hirsutum
  Clone ID: LIB3197-010-P1-M1-F2
tttccctgttttacaagaattaacactgaagacgaatgatatgataaaggggatatgtgatggacaactctcattgcagtgtttcccaaacctcaaacttcttaacctccaattctttcctgagacatctactactcttccatattccttcattcagtcactaccaaagcttgagaagcttgttataaacaatgcctccatttctgaaatagtccggtttgaaggactcatcaacgaggaaaggcacacatgggcatgctatcagttagaggccttaaagttgtctcaacttccagagctaacattaaagactttagagccatttttgttgtctgtcaaaaatctattaagtatgga

SEQ ID NO: 605 - DNA, 766 bp, Gossypium hirsutum
  Clone ID: GOSHI-09MAY01-C15643_1
ggatttgcatcttttgtttcccattcccatccgcatcccttttataactcacctgccatttctccttttcctcaacattccaatcttcttttctgggtgtattttgctttgttgaattcatcatatcttcttcactaatcatggctatggctgcttccgagactaaattccatgttcttgctgttgatgataccctgattgatagaaagctcattgaaaagcttctcaagacttcttcttatcaagttactgcagtggattctggaaccaaggcattggagtttcttggattgaacaacaatgatcatcaagatgttgaagtgaacctgatcatcacagattactgtatgccagggatgacaggctatgatctcttacgaaaaatcaaagaatcttcatcattcaaagacataccagttgtcatcatgtcttcggacaatatcccatcaagaatcaacagatgccttgaaggtggagctggagagttctttttgaagccagttcaattatcagatgtaaacaagcttaggcctcatttgatgaaaagaacgcaaacaaatgtaaacaagagaaaggcgatggatgaaattgtgtccctgatagaacgagggccagataccatgaactggaagtgaattgaatcaccaaatcatcaatatttctgattattatagatcatcaatagggaaagaaatctggactctctcttgcttaccaaatcatgttaggaaagagaagagctatgtaatcacctaggaagaattac

SEQ ID NO: 606 - DNA, 433 bp, Gossypium hirsutum
  Clone ID: GOSHI-09MAY01-C15673_2
attttaattctttgttcttcatttccccccctcggccccaactaaaataatcaaaacccattgtatctttctccttggttcactctgcagatcctcccccattcattcaaacaccaaatcaaaagttcattttgttccttttctcattgtcactctccacatcaatacttcccccaatttttttttctaaaaacaatgtttcgaattcaactgttggtttcggttttgctttgttgcttcaccttttggttccacatttcatttgggtacttgataacgtgctcggggatagttccgatgaggtaccgcaacgataaggtatcgataacggatttcggcggcgtcggtgatggaaagacactcaatacgaaagctttccgggaagctatataccggattcaacatctgagaaaggagaggggggaccttgctt

SEQ ID NO: 607 - DNA, 1182 bp, Gossypium hirsutum
  Clone ID: GOSHI-09MAY01-C15673_1
caactaaaataatcaaaacccattgtatctttctccttgtttcactctgcagatcctcccccgttcattcattttgttccttttctcattgtcactctccacatcaatacttcccccaaatttttttttctaaaaacaatgtttcgaattcaaccgttggtttcggttttgctttgttgcttcaccttttggttccacatttcatttgggtacttgataacgtgctcggggatagttccgatgaggtaccggaacgataaggtatcgataacggatttcggcggcgtcggtgacggaaagacactcaatacaaaggctttccgggaagctatataccggattcaacatctgagaaggagaggtgggaccttgctttatgtgcctcctggggtgtacttaacggagagctttaatcttactagtcatatgactctttatttggctagaggcgccgtcatcaaagccactcaggacacatggaaatggccattggttgctcctttaccatcttatggaaggggaagggaacgccctggaggaagatacatgagcttcattcatggagatggattacgagatgtggtgatcagcggtgagaatggcacaattgatggtcaagggggtatctggtggaacatgtggagacaaggaaatctccagtttacaagaccaaatcttgttgaatttatgaattccagaggcattattatttccaatgtgatttttaaaaattcacctttttggaacattcaccctgtttattgcagcaatgttgttattcgatatgttaccatcctggctccgaccgactcgccgaacaccgatgggatcgatccagattcaagctccaatgtttgcatagaagactcgttcatttcaaccggagatgatcttgttgctgtaaaaagtggatgggacgaatacgggattgcttacggacgtcccagctctcacatcaccatccgacgtgtaacagggtcatccccatttgccggtatcgcagtgggaagcgaaacctccggcggagtggagcacgtcttggccgagaacatagttatttacaactccggtatcggtgttaacatcaagaccaacattggcaggggagggttcataaagaacatcacagtatctcaagtgttcatggagaacgtaagaaccggtatcaaaatcactggcgac

SEQ ID NO: 608 - DNA, 507 bp, Gossypium hirsutum
  Clone ID: GOSHI-09MAY01-C15163_1
cccgtttcaattcctctgctagggttttaagccccccattttgctcagtcatgcgaccaccgcgccaccaccgtgtttggtggccggtgatacaccgaaatgagtcgctcggccttgttccaagaggagctcgaaggcctggccttctttgagtcagaaggaaacgaggaaaatggatccccacccctttgtagtcccgacgacagaggggagacctccggcgacgcaacagcgaacgattcaggtggtgtcagatgcgcgtgaggcctgcgattggtggtgtacgcggtggccatttggtgaagagtggcggcagacaaggtaggggttagggttgctgaaacattttgcgtagttgggctattagggttagtttaggtaatgggctaacaggattttggtttgggcttgtttaataattgggttatttgtaaattaactgtttatattttttgaactctttttggtattttgggtctattgacttgggccaaaattgggcatttc

SEQ ID NO: 609 - DNA, 946 bp, Gossypium hirsutum
  Clone ID: GOSHI-09MAY01-C15103_1
cccacgcgtccgttcttcttcactcaaaaagaacaatagatcagtgttaaaacttaaaagccttgggttttcctcttctccaccatgttttgacttgaacaagttttttttacatttttctgtcttgttcccacgtctcagaattgaaaacccagtttgagttttgagttcatttgctaaatttttgatctgggttttgaatctactggtttttgaaaatggctctaagttcagttgtggtcaccatggagaagcctaataagttctctttagtggaaatcaatggctcagattcaactctgctactcgagaaacaaaaagcagtgagtcccaaacagttcacatggttccttttcctcaaagctaacagagtttttgcttgtctttcatggctgccaatggctttgaaaaccacgtttttatcggtcaagaaacgcattgcattatctgatgtgagtgacgaagaagccaaaagcagaagattgtatagattcatcaaagtctttctttttatctctatatttgctttggttttagaaatctttgctcatttgaagaaatggaatttgaacatgattcaaccatgggaggttcaaggtcctctcccattggtgttttatgacttggttgtcatttagagtttgattatgttgctccattggtgctaaccatgtccaaattctgcattgttctcttcttgattcagtctcttgatcgccttattctttgtttgggttgtttctggattaaatataagaacttgaaaccaagaatcaatggagatgcttatgatattgaagatggctcaagttttcctatggttctagtgcagatcccaatgtgcaatgaaagagaggtattcgcacaatcaattgcagctgcttgtcagcttgattggcctaaagaccggattctaattcaagtcctagatgattcatatgatggt

SEQ ID NO: 610 - DNA, 596 bp, Gossypium hirsutum
  Clone ID: GOSHI-09MAY01-C15043_1
atcgactttcgttctttccgttcatcttgtcaccgtcagcggcggaaccgttgtaatccaagctagcaattagcaatctgtgctcttgcaaagagaatggaattagcggatcgagcagttgggtttctcttatctattaccagtctatcaatattcacgtattatacgttttgggtcatcatcctgccatttgtggacagtgataacttcatccacaattattttctaccccaggaatatgccatactgatccctgtgtgtgccggtgtggtgctcctttgcctcctctgtatttttattgggttcgtgctgctcaaatccaagaagaagaaggcttgaagcttgatgctactttatcatctctgcttaaaacatgccttgggtatagctttgcttgttttcttccatatatttttgcttcgagtttaagttttgagatgagaatttgtgtttaggccatcataatttgttaaagactgttgcatttgaggacaactttctttgatttttctgtctaatatacaactgctacagagaacccagtgtatttttctttctttctgaaatggctaaagcctgaagtctttcagttttcc

SEQ ID NO: 611 - DNA, 782 bp, Gossypium hirsutum
  Clone ID: GOSHI-09MAY01-C15063_1
atccggatcccaaactcccaattcccaaagctcaaaatcaaaaaacctaaatcagatctaacagtttttttgtcaaaatttcccgcaaaagatatggctctagaatgggtagtgctaggctacaccgccggcgctgaagccatcatgttgctcctcctcacagttccaggcctcgacggactccgcaagggcttgatcgccgtcacacgtaacctcctcaagcccttcatgtcggtggttcctttctgcctcttcctcctcatggatatatactggaaatacgagatgcgtccaacctgtgacgccgatacctgtaccccttccgaatatctccgtcaccagaaatccatcatgaagagccagcgcaacgcgcttctcatcgctgccgctcttattttgtactggcttctttactctgttactaaccttgttgttaagatcgagcagttgaatcagcgagttgagaggcttaagaatcgcgattgagataagtgctgcgaattttagatctgttgtatttgggctacttctttttcttttctttttaataatctttttgtttgaatttcatctctgatgtgtttggatgatttgagagatttatcttgaaagaattatatgttgttattattggatctctgttattcaatttcgatttgattaaaaaaaagttggggtttggttcaaaaaaaaaaaaaaaaaaaaaaaaaaaaaaaaaaaaaaaaaaaaataaaaaaaaaaaaaaaaaaaaaaaaaaaaaaaaaaaaaaaaaaaaaaataaa

SEQ ID NO: 612 - DNA, 438 bp, Gossypium hirsutum
  unsure (1)..(438): unsure at all n locations
  Clone ID: LIB3148-018-Q1-K1-F6
ncgttctagatctgttgtatttgggctacttctttttcttttctttttaataatctttttgtttgaagtcggctctgatgtgtgtggatgatttgagagatttatcttgaaagaattatatgttgttattattggatctctgttattcaatttcgatttgattaaaaaaaagttggggtttgtttcaaaaaaaaaaaaaaaggtcggtctttttctttctttttccgtaccctgtgggctatacttttttcgtgctatctttttccttttcttcttatattttctttttcattttttcttttttttttttttttcttttttctctttttttcttttcttttttttcatctttttcattttgtttttcttttttagtttctttttctttctttttctttctcctattttttttttttcttttcttttctttattttttt

SEQ ID NO: 613 - DNA, 750 bp, Gossypium hirsutum
  Clone ID: GOSHI-09MAY01-C15033_1
gctgctgttactctcctaactctccaactgttgtttccacttcctctcttccagatctgaatcgcaaaagggaattttcagttgaaaaagatgggtcgcggagttagcagtggcggtgggcagagctcattaggttatttgtttggtagcggagaagctcctaaaccagggacaaacaactcccaagctgctcccgctgaagcaccagctgtctccaaacctgcccctgctcctgaaccagtagatatttccaagcaaattccggctggtattaacagtatttccgcaaacaattacatgcgtgctgatggtcagaatactggcaatttccttacggatcgaccttccaccaaggttcattctgcccctggaggcggatcttctctggactacctatttggtggacctggaggtagtaaatgagattgtgccttaataacatctttgataagggagagtattgtttgtggatttgggggaagcagtaaagctgtggatgaaatgctgttcttataatctttgaacatagaagcaatgaaaacatgcctgtctcttgtggtgtaatattgcaggtcttgtggtggttgttttgttgattcaatcaaatgagttctccagattaggtgcacaaacatctaattctgcagagctgggttaaaaagaacattgttatatttttcatgttatgcatagttttgtcgtttttccttactctacccactcttttattcaatttggctcactcttttc

SEQ ID NO: 614 - DNA, 567 bp, Gossypium hirsutum
  Clone ID: uC-gsronu33B005d04b1
ccctctcgtccgtctgaatcgcaaaagggaatttgcagttgtaaaagatgggtcgcggagttagcagtggcggtgggcagagctcattaggttatttgtttggtagcggagaagctcctaaaccagggacaaacatctcccaagctgctccagctgaagcaccagctgtctccaaacctggccctgctcctgaaccagtagatatttccaagcaaattcctgctggtattaacagtatttccgcaaacaattacatgcgtgccgatggtcagaatactggcaatttccttacggatcgacccttcaccaaggtttattctgcccctggagggcggttttttttttgacttcccattttgtggaccttgaggtagttaatgagattgtgcccttattaccctttattacatcttttttaagggagaggttttgttgttggttttgtggaaagcgtctatctgtgtgttttgaatttttttctttatttttttttcctcttttttttttccctttccttttttttatttttttttcctcttttttttgtttttttcttttcttttttca

SEQ ID NO: 615 - DNA, 366 bp, Gossypium hirsutum
  Clone ID: uC-gsflnu33B006b04b1
taccagctgtctccaaacctggccctgctcctgaaccagtagatatttccaagcaaattcctgctggtattaacagtatttccgcaaacaattacatgcgtgccgatggtcagaatactggcaatttccttacggatcgaccttccaccaaggttcattctgcccctggaggcggatcttctctggactacctatttggtggacctggaggtagtaaatgagattgtgccttaataacatgtaataacatctttgataagggagagtattgttggagcattcttattgctttccctaaatacacacttttctcttactgcgcctttgaatgtctgcacttgactgggcttaaagaccacctaatgt

SEQ ID NO: 616 - DNA, 878 bp, Gossypium hirsutum
  Clone ID: GOSHI-09MAY01-C15393_1
atattccttgaaagaaaataaaataatctgagattaaaaaaaaaaactgaagaagcttacggcctttctggtggtagtacagttgaaagacactttcctcttctctagcttcccaaaccttttttctgatcctcagtctttgggtttcttttatcctttgacttctccccatctttttgatgattcgctctgttgttgttggttttggacattgatttatagtaatcatcatatctattgttcatcttcctctgttagatatggaggctatcaagaagcaggctaccaagctcagagagcaagttgccaagcaacagcaagcagtacttaggcatcttgggcattttagcaatgaagacgttactgttgatgaagctgatcttcaatgtcatcaaaagcttcaagacctgtacagttctacaaaggcagctaagcatttgcagcggaacatcgtccgtggcatagaaggttttattgcaacaagctcaaagctgatagaaatatctaggaagttggctgatgattgttgcaagtatggagttgaaaatcaaaatactggttcttctcttgcaaaagccgctcttcactttggcaattcacataaatcaatagaagatgaaagagagaccttgcttgggatccttggtgagcaggtttctgagccactacgggcattaattacaggagctcctctagaagatgctcggcacttgacccaccgatatgatagattctgccaagaggttgaagctcaggcagcagatgttttgaggcgtagatcaaaaaccagggaagctgatatatctgcagaaagctacatgaagcttaaacaagcagaagcaagattggctgaccttaaatcctcaatgatggttcta

SEQ ID NO: 617 - DNA, 603 bp, Gossypium hirsutum
  Clone ID: GOSHI-09MAY01-C15363_2
ttttatttatctcactcgttctagtctcttcctagctaaaaccagcccaaaatcccatagaccggccaccggaaccgccgtctaccgctgttctccgccttggggcgcccctagcagaaatctttatcccaatccatctaggggatcccgtttccttctcttttcacattacctagataaattttccccaaacaaaaaccctaagaagccctcgatctagattgaaaatttggtactgccacctcctcaagtctacgtttccttttggaaatcatctcctagctgctaaaccttcttggcttttctggtttgggattttttattacgggattttctttgatcgaggttgggattgaaaattgctggctgaagtataattattttttgttgttgttggaaattgcttgccgtcgattctgtaggtattaacagcaactatgtcagggaattctagttgcagtgtctacataggtaatttggatgagagggtaagcgacagagttctgtacgatattcttatccaagcaggaagagtagtagacctgtacatccctcgagataaggaaaccgataagcccaaaggatttgcctttgttgaatacg

SEQ ID NO: 618 - DNA, 870 bp, Gossypium hirsutum
  Clone ID: GOSHI-09MAY01-C15363_1
gtttcgtttttctatttctatttatctcactcgttctagtcccgtcctagctaaaaccagcccaaaatcccctaaaccggccaccggaaccgccgtctaccgctgttctccgtcttggggcgcccctagcagaaatttttatcccaatccatcaaggggatcctgtttccttctcttttcacattacctagataaattttccccaaacaaaaaccctaagaagccatcgatctagattgaaaaattggtactgccacttcctcaagtctacgtttccttttggaaatcatctcctagctgctaaaccttcttggattttctggtttgggattttctttgatcgaggttgggattgaaaattactggctgaagtttattttttttttttggtggtggcgtcggaaattgcttgccgttgattctgtaggtattaacagcaactatgtcagggaattctagttgcagtgtctacataggtaatttggatgagatggtaagcgacagagttctgtacgatattcttatccaagcgggaagagtattagacctgtacatccctcgagataaggaaaccgataagcccaaaggatttgcctttgttgaatacgaaaccgaggacgttgctgattatgctgtcaggcccttttctggccttgttactctttataaccgaaccttgaaatttgcgatctccgggcaagacaagtcttctcaaaaccctgccaatgcagccatgcctgctacaaattcatcctacaaatcaaggcattaccatggagtagttaaccacatggaaacctctcagcagccgaagaagtcttcaaccccttctaggattccggattatcctgcgcgttacagccaagcgcc

SEQ ID NO: 619 - DNA, 999 bp, Gossypium hirsutum
  Clone ID: GOSHI-09MAY01-C15253_1
tgtttcatggatgcttaacaaccggaggtgtgagtaataatatgttgatgaggcttgttacacatccggaaatacagcataagatatactcagagataatcatggcaaagaaaggtttggaggacaaagctcaacctgttgtagagaagatgcctttattgttggcaactatctatgagtctgctcgtgttatgccagccggacctttgctacagaggtgttctctgaaacacgatttgaggcttaagtctggtgtaattgtgccggctggagcaatacttgtcgtacctatgcagttggtgcagaccgatgattctagttggggaaatgatgctggcaaatttaatccatatcgttttctgtctaagacagaaaagacatccgcttcaccaaacatggatgcgtccattgcaggacatgctgaagaacttaaagatcaaaggaaatgtacttttgttttgaaagatccgaataagaatccggcttttcttcccttcggttctggtgctcgtgcttgcgttggccagaaatttgtcattcaaggagttgcaacgttgtttgcttccttgctcgaacaatacgaggtgaggcttcgttcaggatcaaagacaaactcaaaaccgtcgacaaactactcgatgtctcaagattttctgagttccgaactagttttcgcaagaaggaataactgaaaagccataacaaacatacatactgtcatccttaaacccttagtttgctcttgttttccggttttcgttttttcgccatacagctttttgatggagaaagacatcctgattctcaccctctttttcctccgaaaatcatcggagaagctcattcattgcttcttacctatggataatctcacatggggcatatttcaaatctcatgtaatcctccatggttttaaaagtgtcttaaaaagtgcagtatttgatttcaagcattttagtgtttgtttttgaagcactatgagacactatttgcagtgt

SEQ ID NO: 620 - DNA, 531 bp, Gossypium hirsutum
  unsure (1)..(531): unsure at all n locations
  Clone ID: uC-gsflmaxxa004f05b1
ccctcgcgtccgattttctttgcgaaagaaggtgaagattgcaaactaacaccaatgaaagaaaatattcaaccgtcggtaaccgtgcctttcgaacaaggtacaggacagaaattccaacagccgcccggatcggggatcagtttctttatgttcgaggaatcggaattactgaacgtgggtgaggacgggatttatcccctggcagtgaaagcagaggcatttcccgtcaactcaaatgacggatcccgtaatactcagataactctagccgtgttcgagaaagacatcctgattctcaccctctttttcctccgaaaatcatcggagaagctcattcattgcttcttacctatggataatctcacatggggcatatttcaaatctcatgtaatcctccatggctttaaaaggtgtcttaaaaagtgcagtatttgatttcaagcattttagtgtctgtttttgcagcactttgagacactatttgcagtgaaaacaaaacanaaacaaaaaaaaaaaaactcaaaaac

SEQ ID NO: 621 - DNA, 473 bp, Gossypium hirsutum
  Clone ID: GOSHI-09MAY01-C15273_1
gtttcgtttaccaaatgccacaaattgatgggtttctctacaggaccaagatcgcgagctacccattggaagcaaacagtcctatatctagaggatgtgttaaccatctgtgaaggggaggcaataattgggagcatgactgttgcaccaaacaagaagaatccccgagacgttgatataatggttaaatattcattgagcggacgacgttgtgtggtttcgagagttcaattctataagatgcgctgattttgttgcagagcatttcatcaccactactagctgtaggaggggaccttgtttgcatgttcctcaaacgtttcaccaaacatttttttaattccttttctactttctttttcctcgaaaggttttccctgagaaagaaaaacacataagatgcatgtacttcattaactcaatccaactgttttcttctcatttatgcttcatattgaatcttgtggtttctt

SEQ ID NO: 622 - DNA, 1318 bp, Gossypium hirsutum
  Clone ID: GOSHI-09MAY01-C15263_1
cgttccgattcgatattgtgttccgcttcttaaattacagccagagtataccttaggaaagtgagtgaacgtgtgaggcgtttcaaagaattcaaaaacacttttggagaaagaatcaacaagcgctgcgtgtgcatcaccattgagaagcgcagatggagaaatatcatagattggtgtcataaaagaaaaaacagccagctttttggatcaaccctttcttctgagaaaacataagaattcagagaaagttgcaccggagaatgccaaaagtgaaaacgttgaaaagaagatgaaaggaagtggagaactcaaagaggaaaagaagggagaggatttatatatggcaaatgtggcataggaaatgggacaagatgccccaaaggaactgttccaatacggcggagcacaactcgtgatgttttgagagccaagtctttgtttcacttcggcaagaaacaatctaccaccaccaaccctactcgccgtgccgacgctcccgacgtcgttagcagtaacggacatgagcatgcgattgcatatacgggaacatcccaagaggtatatggagcaaaggctacgataaacgtgtgggacccatccatccaagaggtcaacgaattcagcctatcacagatttggattctttcggggtcattcgacggctctgatctcaacagcatccaacctggatggcaggtcagtccggagctttatggtgacagcaggccaaaactcttcacatattggacgtctgattcctatcaagcaactggatgctacaaccttctatgtgcaggctttgtgcaaacaaatagtagaattgccattggggctgccatttctcctgtctcacaatatgatgctaatcaatatgatattaccatcctcatttggaaggatcctaagctaggaaattggtggatggggtttggtgataataacctggtaggttattggccagcagagctatttactcacctagcagaccatgccaccatggtggaatggggtggtgaagtagtgaactcaagggccaacggcaagcacacgtctacggaaatgggctccggtcactttgctgaagatgggtttggaaaatcgagctatttccggaacttggagcttgttgatgccgataatagcttgagttcggtccatgacatatcaaccctagctgaaaatacaaattgttacaacatcaggagctcatataacaaggaatggggcacatttttttattatggggggcctgggaataacccacgctgcccttagatcaatattattgtttgaattaaatattgattcttttaat

SEQ ID NO: 623 - DNA, 584 bp, Gossypium hirsutum
  Clone ID: GOSHI-09MAY01-C15213_1
ttccgccgccagttgaatccactgccatcagtccaccgccgcagctgattcttcagttctcttatctccctgctgcctctaataaaaataaaaaagcttgtccattttgaaacagtgttgttatttttaacgattttttgaaaaagcggcaacgagatggatattaatggcaagggtgattccgtggatgagctcaagggcctccgaattactaaccttgacgatgatgacgacgatgacgatgacgaaaacatcgctgttgacgaggatgataatggtgaagacgaagacgatgatgaagaacaggaatctgtaattcttgggtttgtagaaaagcctgaacacaactggtcacttcttcgccagcagtttccaagcaaagctggaggcgtcccagcttggttggacccagataatttgcctacaggtatgtcttgtgtatgtgatgtatgcggagaacccctgcaattcctactccaggtttatgctccattagttgaaaaagactcaacatttcatcgaacattatttgtgttcatgtgtctggctatgaaatgtcttctccgagatcaacatgaacaatg

SEQ ID NO: 624 - DNA, 671 bp, Gossypium hirsutum
  Clone ID: GOSHI-09MAY01-C15233_7
ctctgcgaaaatttcttaatttcctcgctatctcaaacagattttacctcttatctccgggggatctcatctatggctcgtaccaagcaaacagctaggaaatcaaccggaggaaaagctccgaggaagcagctagctacaaaggccgcgcgtaagtccgctccggcgaccggtggagtgaagaagcctcaccgtttcaggccaggaactgttgctttgagagagatccggaagtaccagaagagcaccgagctgttgatcaggaagcttcctttccagaggttggtgagcgaaatcgctcaagatttcaagactgatttgaggttccagagtagcgctgttgccgctcttcaagaagctgccgaggcttaccttgttggactgttcgaggataccaatctctgtgccattcacgctaagagggttacgatcatgcccaaggatattcaacttgctaggaggattagaggggagagagcttagagtttgattttcggctgggtaacgtctaaagctggagatctaagcttttcatcatttgtacgttttgctttctcagcaaatgttcatttaaattgatggaaaacagttggaagctttatgatttcgttggttaaaattgccttttgcttttttggtaactctttaatatcctttttttggggtatgtg

SEQ ID NO: 625 - DNA, 547 bp, Gossypium hirsutum
  Clone ID: GOSHI-09MAY01-C15233_5
tatttccttcgctttctttcaatccaaatcctatctgttcaccgtcagttaacccctatggctcgtaccaagcaaacagcaaggaaatcaaccggtggtaaagctccacgtaagcaactggctacgaaggcggctcggaagtcggctccggcaaccggaggagtgaagaagcctcatcgttttaggcccggaactgttgctctgagagaaatcaggaagtaccagaagagcaccgagcttttgatcaggaaacttccattccaaaggttggtgagagaaatcgctcaagatttcaagactgatttgaggttccagagtagcgctgttgccgctcttcaagaagctgccgaggcttaccttgtcggactgttcgaggataccaatctctgtgccattcacgctaagagggttacaatcatgcccaaggatattcaacttgctaggaggattagaggtgagagagcttagttgcttgtatttgctcgatcgattttaaaattcagaaagacctagatcttggatttagtttctggaatttgctttctcg

SEQ ID NO: 626 - DNA, 661 bp, Gossypium hirsutum
  Clone ID: GOSHI-09MAY01-C15233_4
tccgctttctcgcaatccaaacacccttattttctcatcacattgtttaacaaatggctcgtactaagcaaactgcgaggaaatcaaccggcggcaaggccccacgtaagcaactacccacgaaggctgctcggaagtcagctccggcgaccggaggagtgaagaagcctcaccgtttcaggccaggaactgtggctctcagggaaatcaggaagtaccagaagagccccgagctcttgatcagaaagcttccattccagaggcttgtgagagaaatcgctcaagatttcaagaccgatttaaggtttcaaagcagcgctgtcgccgctcttcaagaagctgccgaggcttatctcgtcgggctgtttgaagatactaatctatgtgctattcatgctaagagggttaccatcatgcctaaagatatccagcttgccaggaggatcagaggcgagagagcttaggttagtttgttttagttgactaatgcctagaataagagatatatgcttgtgttcgtttggttgtattatctttctctgcaagtgttagatttaaatcgatcgaattttaatggatgctgtatagtttcttgatgttttcatgaaatttggttaatggaacggcaacagtttcttctaagaatagataattttccggg

SEQ ID NO: 627 - DNA, 632 bp, Gossypium hirsutum
  Clone ID: GOSHI-09MAY01-C15233_3
gtcgacccagcgttctccccccccttctcagcaaccaaacaaaaccttccattgtcttctagaactatccaagcacactggtattaatcaatggctcgtacaaagcaaacagccaggaaatcaaccggtggaaaagctccacgtaagcaattggcgaccaaagccgcgaggaaatcagctccagccaccggaggagtgaagaagcctcaccgtttcaggccaggaacagtggcgttgagagaaatcaggaagtaccagaagagtaccgagcttttgatccgtaaacttccgttccaaaggctagtgagggaaatcgctcaagatttcaagacggatctgagattccaaagtagtgcggtggcggctttacaagaagcggcggaagcgtatctggttggcctgtttgaggataccaatctctgtgctattcatgccaagagggttactattatgcctaaagatattcaactggctcggaggattagaggagagagagcttaaatgatgtatatgatgatttgctttgaatgctttctgcttttagaatctgtgttgttaggttttctctagatgtagatctctcagtttagtggcttgtgttcagtgattgatgaaatgaaagtttggaaaga

SEQ ID NO: 628 - DNA, 694 bp, Gossypium hirsutum
  Clone ID: GOSHI-09MAY01-C15233_2
tcgcccacgaaaatttctttaatttctcataagccaaacagattttgtcatatctcgaaatcatcacatcaatggctcgtacaaagcaaacagctaggaagtcgaccggtggaaaagctccaaggaagcagctagccacgaaggccgcgcgtaagtccgctccggcgaccggcggagtgaagaagcctcaccgtttcaggccaggaaccgtggctttgagagagatccgtaagtaccagaagagcaccgagttgttgatcaggaagcttcctttccagaggctggtgagggaaatcgctcaagatttcaagactgatttaaggttccaaagcagcgccgtcgctgctcttcaagaagcggcggaggcttatctcgtcggattgtttgaagacactaacctgtgtgcaattcatgctaagagggttactatcatgcccaaggatatccagcttgctaggaggattagaggtgaaagagcttagattgtttgtatttacttgattgattgtgaaattaggttagatctagtgtttggtatccgtttttggaatttgctttctcggcaaaagtccttatgtaaacggtcgtctttctatggagttctagtactttcgtttgaaatttggctctacttttgatttcgagtttcatattcttcatcatcaaccgatgaatgattttgaaatgattaagt

SEQ ID NO: 629 - DNA, 648 bp, Gossypium hirsutum
  Clone ID: GOSHI-09MAY01-C15233_1
cggccgcgtggcgccaaaaattcttgctttcaagcaatctaaacacttattttctcatcaaatcgctttgacatatggctcgtaccaagcaaactgctagaaaatcaaccggtgggaaggctccacgtaagcagctagccactaaagctgctcggaagtcagcaccggcgaccggaggagtgaagaagcctcaccgtttcaggccaggaactgtggctcttagggaaatcaggaagtaccagaagagcaccgagctcttgatccgaaagcttccattccagaggcttgtgagagaaatcgctcaagattttaagactgatttgaggttccaaagcagtgccgttgccgctcttcaagaggctgctgaagcttaccttgtcggactgttcgaggatactaatctgtgtgctattcatgctaagagggttaccattatgcctaaagatatccaacttgctaggaggattagaggagagagagcttaggtctgttagtttttagttgattgattcctagaattagaaatctgtactttctgttcattttgttgtatttgcagtctctgcaaatcattaatgaaattctgtggaattttaacggtttcatgaaattgcaacatattcttcaagttgcgaggttcacccgtat

SEQ ID NO: 630 - DNA, 407 bp, Gossypium hirsutum
  Clone ID: uC-gsronu33B171h01b1
cggactcttgggcgaatttctcagcaaccaaacaaaatcttccattgtcttctagaactctccaagcacactagagttaatcaatggctcgtacaaagcaaacagccaggaaatcaaccggtggaaaagctccacgtcagcaactggcgacgaaagccgcgaggaaatcagctccagccaccggaggagcgaagaatcctgaccggctaaggccatgaacagagggctggcgagagagctctgacaggacgaaaccagacgccagccatagagctgtccctggactgggtgccggttgggctggacgaactgtagagcggctacgaggggcattctctgttcttacgaagatgcgcccccaagatcggcgcgttctatttcctggaccagctgctcatggggttcga

SEQ ID NO: 631 - DNA, 348 bp, Gossypium hirsutum
  Clone ID: LIB3146-042-Q1-K1-F3
gcatattttcatatcaaattgttctacaaatggctcgtaccaagcaaactgctaggaaatcaaccggcggcaaggcgccacgtaagcagctagccacgaaggccgctcgaaaatcagctccggcgactggaggagtgaagaagcctcatcgtttcaggccaggaactgtggctcttagggaaatcaggaagtaccagaaaagcactgagctcttgatcagaaagcttccattccagaggcttgtgagaaaaaatcgctcaagaatttaaaaactgcctggaggttcaaaaccacgcttgtggttctttttaagaagccggtgaagcttattttgtccgactatttgag

SEQ ID NO: 632 - DNA, 320 bp, Gossypium hirsutum
  Clone ID: LIB3146-050-Q1-K1-A2
gaacggacagggcccggacgacccacacgtactttgacgcattttttttagaactatgcactcacactggtggtaatcaatggctcgtacaaatcaaacagccatgaaataaaccggtggaaaagctccacgtaagcaattggcgaccaaagccgcgaggaaatcatctccatccaccggaggagtgtagaagccttaccgttttaagccaagaacaatggctttgagagaaatcaagaagtaccacaagagtacctagcttttgattcgttaactttcggtccaaaggctagtgaaggaaatccttcaagatttttaag

SEQ ID NO: 633 - DNA, 153 bp, Gossypium hirsutum
  unsure (1)..(153): unsure at all n locations
  Clone ID: LIB3149-022-Q1-K1-D10
ctattgggcattatgctagagagtacaatcatgcctaaggatatccagcttgctaggaggattagaggtgagagagcttangttgcctgtatttaccttgatttgattattaaaattttaagaaaaggaatctaagatatctttgggaatttt

SEQ ID NO: 634 - DNA, 580 bp, Gossypium hirsutum
  Clone ID: GOSHI-09MAY01-C16963_4
accttttataactgtggctttgacatatttccaacttgctgctgaaaatcatgaatggtgggggaggtctttcctctgtggtggatcaactggtctctttatctatgcctactgcttgtattattactatgcacgatcagatatgtctggttttatgcaaacctcgttcttctttggttacatggcatgcatctgctacggattcttcctcttgctggggacagtgggtttccgtgcctcgctattctttgtgcgtcacatatacaggtctatcaagtgtgagtaggggttttagttgtcccttgccctttcccagcaattctgttagagaaaaaaatctatggtttttgttagaaaattaactggaagattgaatgtcaagtaacaaatgaggcatgctttgactatgcttaatggatatctacgaaatcattgtgtttattaatatttggactgtacgtaaagatgttgacagatttgtgtaggttgctgttactttaatacctctttgcctcttttcaaccaaccagagttcgttcctgtccctttacgtgatgcagaaatccagttttctttaacc

SEQ ID NO: 635 - DNA, 921 bp, Gossypium hirsutum
  Clone ID: GOSHI-09MAY01-C16963_3
aactttcaaaggatgaggttgtctttttccgaggggcggtcgaaaaagattattatttccaaatgtactatgatgatttgcctatctgcccacgcgtcctattggcaaagttgataaggaaggaaaagctgatcccagcgagtacaagtatttccttttcaagcatatccagtttgatgtactttataacaaggatcgtgttattgagatcagcgcaaggatggatccacatttgctcgtggacttgactgaggataaggaagttgatgctgagtttatgtacactgtgaaatggaaggaaactgatactccttttgagaagaggatggagagatattccatgtcttcttctttgccgcatcatttagagattcattggttttcgattatcaactcttgtgtgacggttctccttttgactggtttccttgcaacaattctcatgcgggtcttgaagaatgatttcattaagtacggtcaagatgaagaagcagctgatgatcaagaagagactggatggaagtatattcatggagacgtattccgtttcccaaagtacaaatctctctttgctgctgctctcggatctggaacacagctgttcactttaacggtcttcatttttatgcttgcactggttggtgtcttttatccatacaaccgaggagctctatttactgccctggtggtaatatatgcccttacgtcagggattgcaggctacgtagcaacttctttctactgtcagcttgaagggacaaactgggttaggaatctgttattgactggctgccttttctgtgggcccttggttcttacattctgcttccttaacacagttgccattgcatacagtgcaactgcagcactgccttttggaactattgtagtaatagtcctcatatggacactcgtgacatc

SEQ ID NO: 636 - DNA, 1346 bp, Gossypium hirsutum
  Clone ID: GOSHI-09MAY01-C16963_2
gcgggttttgaagaatgatttcatcagctgcttcttcatcttgaccatacttgatgaaatcattcttcaagtatggtcaagatgaagaagcagctgatgaccaagaagaaaccggtgggaaatatattcacggagctgtattccggttcccaaagtacaaatctttgtttgctgctgctcttggatctggaactcagctgtttactttaaccgttttcatttttatgcttgcattggttggtgtcttttatccgtacaatcgaggagctctattcactgcccttgtggtcatatatgcacttacatcaggaattgcaggatatactgcaacttctttctattgtcagcttgaaggaaacaactgggttaggaatctcttattgactggctgtcttttctgtggcccgttgtttctcacattctgcttccttaacacggttgctattgtatacagtgcaactgctgcactgccttttggaactattgtagtaatagtccttatatggacactagtgacatctccattgcttgttctgggtggaattgctggcaaaaatagcaaggctgagttccaagctccttgccgcaccacaaagtatcctcgagagattccaccattgccatggtacaggagtgccattcctcagatggcaatggctggatttcttccttttagtgccatctacattgagctttactacatattcgccagcgtttggggccacaggatctatactatatacagcatcttgtttattgtcttcatcatccttctgattgtcactgcttttataactgtggctttgacatacttccaactcgctgctgaagatcatgaatggtggtggaggtctttcctctgtggtggatcaaccggtgtctttatctacgcctactgcttgtattattactacgctcgatcagacatgtctggatttatgcaaacctcgttcttctttggttatatggcctgcatctgctacggattcttcctcatgctcgggacagttggtttccgtgcctcgctactctttgtccgtcacatatacaggtctatcaaatgcgagtgacaggttatttttcatttccttccattctgtcatagaaaatattctatgatttttgttagatatttagcaggaattggagaagtgccttaaattgtcagctagcaaattgttgatgcatgtgggtggcagagggccttggattaagttttaggcatcatctgtttattaatatttgggttctatataaaccccatgagacagatttgtttaggatgctgttatttttatacttttatcatataaaattgatccttttttttttaaaaaacagaaaaa

SEQ ID NO: 637 - DNA, 769 bp, Gossypium hirsutum
  Clone ID: GOSHI-09MAY01-C16963_1
tttatatatatattgcattgcagaatttcacaaatgctttcacacatcttcctttttctctcattattatcctacccaaatgagaaactttggcaactctccggcctttgtaatcctcggagtttttatcctctcttgtgtttcccatgttagatccgacgcctccgaccaccgttacaaagaaggtgaccctgtccctctctacgccaacaaggtcggccctttccacaaccccagtgaaacctatcgctactttgatctgcccttctgttctccagatcatgtaaaggagaagaaagaagcattaggtgaggtattgaatggagatcgactcgtcagtgctccttataaactgaattttaaagaggaaaaagattcttccgttgtttgtaagaagaaactttcaaaggatgaggttgtctttttccgaaaggcggtcgaaaaagattattatttccaaatgtactatgatggatctgcctatctggggttttattggcaaagttgataaggaatgaaaagctgatcccatgagttcaaagtattacctttacaagcatatgcagttgatggtacttattcaaggatcgtggtatggagatcagcgcaagattggatccacattgcctcgtggcttgactgaaataggaattgtgctgagtatgtacacggggaatggaaggaactgatactctttggaaaaagttggaagatttcatggcttgtcttgccgttctttaagatacatgtttcaatttcaacctggggg

SEQ ID NO: 638 - DNA, 387 bp, Gossypium hirsutum
  Clone ID: LIB3272-016-P1-K1-B5
gtgaggtattgaatggagatcgactcgtgagtgctccttataaactgaattttagagaggaaaaagattcttccgttgtttgtaagaagaaactttctaaggatgaggttgtctttttccgaaaggcggttgaaaaagattattatttccaaatgtactatgatgatttgcctattgtagtaatagtcctcatatggacactcgtgacatctccattgcttgttctgggtggtattgctggcaaaaatagcagggccgagttccaagctccttgccgcaccacgaagtatcctcgagaaattccaccattgccttggtacaggagtgccattcctcagatggcaatggctggatttcttccatttagtgctatttacattgaacttt

SEQ ID NO: 639 - DNA, 357 bp, Gossypium hirsutum
  Clone ID: LIB3083-110-Q1-L1-D4
agaaaactggatttctgcatcaagtaaagggacaggaaagatctttggttggttgaaaagagccaagaggtattaaagtaacagcaacctacacaaatctgtcaacatctttacgtacagtcaaaatattaataaacacaatgatttcgtagatctccattaagcatagtcaaagcatgcctcatttgttaattgacatataccatatatatttttttctgacacaaaatcggggaaatggcaagggacaactaaaacctctactctcactttatagacctgtgtatgtgacacacacagaatatcgcggggcacggacaccctgtgcccagcatgaggaagaatacgtagcacatg

SEQ ID NO: 640 - DNA, 298 bp, Gossypium hirsutum
  Clone ID: LIB3493-024-P1-M1-H6
actgtttacagaaaattgaatgctggttagactcatgctacctttggggttggtttcatttgtactttcactttatggcgtttggtggttaaatctgtttgatcacaagtttgttctgttgaaacttttagtttataatgagatccaagtgttgcattatttcatttttacccatccaagtgcttaatttgttacaggtcttttttatgtggtggatcaaccggtatatttatctacgcctactgcttgtattattactacgctcgatccgacatgtctggatttatgcaaacctcgt

SEQ ID NO: 641 - DNA, 299 bp, Gossypium hirsutum
  unsure (1)..(299): unsure at all n locations
  Clone ID: LIB3083-023-Q1-L1-C1
gaagcanttagtgaggtattgaatggagatcgactcgtgagtgcggcttataaactgaagtttagagaggaaaatgattcttccgttgtttgttagaagaaactttctaaggatgaagttgtcttattcctgaaggcggttgaaaaagattattatttccacatgtactatgatgatttgcctatctggtgttttattggttaaggttgataaggaaggaaaagctgatcccaatgagttcaagtattacctttacaagcgtatgcatgttgatgtactctataacatggaccgtgtta

SEQ ID NO: 642 - DNA, 260 bp, Gossypium hirsutum
  Clone ID: LIB3584-061-P1-K1-A6
atctatttgtacattttctcatatttttgttatttctttttggtcattggttgctgtgaatgtttgatttcttatgaaaggtatggtcaagatgaagaagcagctgatgaccaagaagaaactggatggaaatatattcacggagatgtattccggttcccaaagtacaaatctttgtttgctgctgctcttggatctggaactcagctgtttactttaaccgttttcatttttatgcttgcattggttggtgtctttta

SEQ ID NO: 643 - DNA, 479 bp, Gossypium hirsutum
  Clone ID: GOSHI-09MAY01-C16913_2
cgtttctccgccgtcgacgcaaccgtcttaaatggcctccgtcgcactcacctcctcctgccccctcggttactcacgtatcaaatcacttgctttctcttccagatcatgtccaaacccggtcttttcccctccgtttctcccaaagtccacttcacataattccagcttcattaaacagttaagtctcactccagtcataacgaacaatagaatccagaaaaggcacagcaaattaactgtcaaagcggcggcatcaactccagccgccgtaactccgccgtcccagcaaccatggcaaggtgcagcattaaagccattgatagcctcgattgctacaggtgtcattctctggttccttcccgtcccctccggtgtctctcgcaacgcctggcagttactttccattttcctcgccacaatcgtcggcatcatcactcaaccattaccactcggagctgtggctttacttggactag

SEQ ID NO: 644 - DNA, 615 bp, Gossypium hirsutum
  Clone ID: GOSHI-09MAY01-C16913_1
cccacgcgtccgcacgcacttaacaaatggaacatggcacagggtctagctgagctcatcctgcccggtccgttactcaggtaggaaatcactcgctgtctcttacagatcatgtgcaaacccggtcttttcccctgcgtttctcccaaagtccacttcacataattccagcttcattaaacagttaagtctcactccagtcataacgaacaatagaatccagaaaagacacagcaaattaactgtcaaagcggcggcatcaactccagccgccgtaactccgccgtcccagcaaccatggcaaggtgcagcattaaagccattgatagcctcgattgctacaggtgtcattctctggttccttcccgtcccatccggtgtctctcgtaacgcctggcagctactttccattttcctcgccacaatcgtcggcatcatcactcaaccattaccactcggagctgtggctttacttggactaggcgcttccgtcctcaccaaaaccctaaccttttccgctgccttctccgcttttggcgatcccattccttggctaatcgctctcggcttctttcttcgctcggggtttcatcaagactggacttggtaatcgaa

SEQ ID NO: 645 - DNA, 592 bp, Gossypium hirsutum
  Clone ID: GOSHI-09MAY01-C16903_1
gaaacagcacgaatgagtaccataaacagcgccgcttggttttcttcagtcttccaaaacccatcacaaactgaactttttcctgcaaatttcaaatgtaggttcaattccaagctccccaagaagcaatctaaaatgggtgctcctagaattttctgtaacttgtctgaaaccgagactggagtggatgataatcccagaaacagtaaggtttctgtgaggtccaagaacaggatggaagagtataacactgccatgaagaaaatgatgaggaatccatatgagtatcatcatgatattggcatgaactacacactgataactgacaatttgattgtcggctctcagccccagaaacccgaagacatagatcatctgaaacaagaagagaaggtggcctatatactgaacttgcagcaggacaatgacatcgagtattggggaatcgacttgcagcctataatcaaaagatgtcgacaacttggaattcatcatatgagaacacctgcaagagactttgatccagattccttgagaaatatattacctaaagctgtttcttcattggaatgggccattgctgagggaaaag

SEQ ID NO: 646 - DNA, 665 bp, Gossypium hirsutum
  Clone ID: GOSHI-09MAY01-C16923_1
cccacccgtccgaccgctgggtttttccttcttcctaagccttacggtttctgtttgcggatgagatttatactccgatgtctttccttccgaggattctgtcctcagatctgctcgcatcggttcaacatatcctctttgatttctgatgttgtactgtgaaaggagtagcgtcgttggatctatggttttaaaggcctttgctgggcaaggaagcaaagattggcaggattcaagttcttgctgctttttaaggatggtctcaccaggggctgagatttatacgctcttcagatgtaagttgaaaataaacaaggcatctgattgtgtgagacggcgacgtgagattgaatcggctggtttgcttatgaaaggatgtgtaagatgtccgggcaaaaagtcctactgataatatgtttattgaaggggaccgtgtcctgatctatctttgtcgtccgagacctttgccatgacaggtgcgcttgcatggcaggtcacccaaacttaataaaaattgaacttttttgtggtgttttttgaggggagatcgcacgggggtttgcccgggttctcccttctgctgtggtgtctcgtatcgtgtcttctcttcttttttcttctctttcccttgctctctttccattattttgcatcatacgggatgc

SEQ ID NO: 647 - DNA, 625 bp, Gossypium hirsutum
  unsure (1)..(625): unsure at all n locations
  Clone ID: LIB3543-063-Q6-K6-G9
ccccgcgtccggngnacaccaagcgtgatctccattccctctcctctttttgttcttttcttttctttttggtttttttgaaggaaacgctttatttatttatttatttattacgaaatacataaatatgcaggcggtttctcctacacaaaatcttaattcttctgtcattcgtgcttccaagcctcgccggttccatcagttgactcgctcctttatccgttgcgtttatcacaatgactccgttcaattccctaatggagtcggtttaaaccgcgctgattggcagagctcttgcgctattctttctagcaaggtcttttcgcaagatcaaggttccggtgacaaatccactgctccttccaactcggaccaccttgctgccgccgtcaatggtcataaaacttccatagatcttaaccttgtccctattgaaacaaacaacaagcctcaaccacctacacagaaacccttaaccatcaccgacctctcccctgctccgatgcacggctctcagttgcgcgtggcttaccaaggagtccccggggcctactccgaagctgccgctgggaaagcttatcctaattgcgaagcgatcccttgtgaccagtttgaagtcgcattc

SEQ ID NO: 648 - DNA, 368 bp, Gossypium hirsutum
  Clone ID: LIB3197-030-Q1-M1-H6
attaggatttgtgtatcttgaaaattatacacacaagcagcatgacctctatgctttattgatataagaataacctctctttcctgtactttaatgtcagctagacattttattattgaagagaacaccaagcttatctgcattccctctcctattttttcttttttggttttggaaggaaacgctttatttattaggaaatacacaaatatgcaggcggtttctactacacaaaatcttaattcttctgtcattcgtccttccaagcctcgccggttccatcagttgactcgctcctttatccgttgcgtttatcacaatgactccgttcaattccctaatggagtcggtttaaaccgcgctgattg

SEQ ID NO: 649 - DNA, 1269 bp, Gossypium hirsutum
  Clone ID: GOSHI-09MAY01-C16593_1
tcggattgagttagtttacccttaaggggaataagcagtagggagggggatttttttgttttcttatgttcttatccgctttcccgtcgccgtaatcagacacgcaattcaaggcattatctacacgcgatcaacgatgatgacgaaacccatttaccaaaaccagatccatgttgaaaatattttttttatataaccatttccaaaattgcaataaaatttattcatcttctcttttgaatctttccctttctttccttttcctgtaaaaatggagggttcctcgtctgacaagctgatcgttgtgacccgtgaacctgatgggatcgctattgttaccatcaatcgacccaaatctctcaactccttgacccgacccatgatggtggacttggccaaggctttcaaggctcttgcgaaggacaactcggtgcgggtcatcatcttgtctggagctggacgggctttctgttcaggcgtggatttgacggctgcacaagatgttttcaagggtgacgttaaggacccggagacggatccggttgttcagatggagcaatgccccaaacccatcatcggagctatcaacggcgttgctattactgccggcttcgagatcgccctcgcttgtgacatgctggtcgctgctaagggagccactttcgttgatactcacgccagatttgggatatttccttcatggggtttatcccagaagcttgcacgcttcataggaccaaacaaggctcgcgaagtgtcgttggcagccatgcctttgtcagcagaggaagctgagaaattggggtttgtcaattatgttgttgaccaaaatgaagtgctgaataaagctcgacaacttgcaggagcaattatgaagaacagtcaagacttggttctcaggtacaagtctgtgatcaatgatgggtacaaattggatcttcgccagggtcttgccatagaaaaggagaggggtcatgaatactacgatggaatgacaccggagcagtttaagaagatgcaagaattcatagctaggcggagttccaagaaaccatcttccaagttgtaatatgatctcctccatgcatcttctgatttgttgtttagtcactgttttataatgaaaacataatgtggggaaataaatttgttggttactggactcttactaatacataagtatcagttctgtataatgagttatatggtttttaacatgataaaaccatgtttggaatgtattaatttactttcttcttcaaagaaaaa

SEQ ID NO: 650 - DNA, 673 bp, Gossypium hirsutum
  unsure (1)..(673): unsure at all n locations
  Clone ID: AI055613.1
catggggtttatcccagaagcttgcacgctttataggaccaaacaaggctcgcgaagtgtcgttggcagccatgcctttgtcagcagaggaagctgagaaattggggtttgtcaattatgttgttgaccaaaatgaagtgctgaataaagctcgacaacttgcaggagcaattatgaagaacagtcaagacttggttctcaggtacaagtctgtgatcaatgatgggtacaaattggatcttcgtgagggtctcgccatggaaaaggtattcattacgcttatgtatatcttttcttggataagcatggtnttatttatctaaaagaacttggaatttgctgctacataatgaaaggaaagtaatcaaagctatgcattacaagaataaaggaagtgaaaaagattgatttcatggggnctttcattggtttcttagcctgctaacggtttcttcgcccggtgatggttgtttgggaatctgttgaaaatttcatatatctggtgttatctccttcaaattgtagatgaaggtctagcaatactcatacaatctgatcgagattcctgcttagatctactgccattctgtcttcttcagctggatacttttttgagtgattgctagatatcttggactctaagagccattgagacaaggtttcaatttgttgg

SEQ ID NO: 651 - DNA, 447 bp, Gossypium hirsutum
  Clone ID: LIB3120-060-Q1-K1-B5
cccacgcgtccgcccacgcgtccgcccacgcgtccgcggacgcgtgggcttttttacttagtggaaactgaaaaaacccttgagttgctttttcctttttccgatttactgtttgccccactacttttgaaatctcagttttggtttcactttttcttttccatccatcaatccacattttcattagacttttcatccctttcaatgggtatgaaaagggcagaaaagcaaccaacttttctgcttttaaataaactttgattaactcttcaaggggttgtcaagttttccctttgcttgttttttttttagggtcacaatggaagctgcttttgggttccataattagcagtgggagataaccccacttctttttgtttcttataattgcatattctttgcatctagtcggtttccttttccttttttttttgtgtgttaattata

SEQ ID NO: 652 - DNA, 423 bp, Gossypium hirsutum
  Clone ID: LIB3197-027-Q1-M1-C10
ctcttaatgggtgtgaaaagggcagaaaagcagccaacttctctgcttttaaataaactttgattaactcttcaaggaatttatgatgcttgcttgcatatgggggggatctataaaccaagctattttgcaaattccaaggtcctctctatttgcaagaaagctaaatcccatgaatacatgatgtttgactcttcacttgatcaatctgctataagccaaaatgattgtcagctagatattgttagtgaacttcaagacaataactcatcgatagaggaaacaagtactaatgaaaagactggaagtgttgaatcatgttctaaaagcactgatttttatccttacaggtttccacttgagcaagatgtacatagattgcaacaaatacttgcaagaagatatagacttgcattctgtttt

SEQ ID NO: 653 - DNA, 411 bp, Gossypium hirsutum
  Clone ID: LIB3189-031-P1-K1-B5
cagttttggtttcacttatttttttccatccatcaatccacattttcattagacttttcatccctttcaatgggtatgaaaagggcagaaaagcaaccaacttctctgcttttaaataaactttgattaactcttcaaggaatttatgatgcttgtttgcatatgggggtgatatagaagccaagctattttggaaattccagggtcctctctttttggaagaaagctaaatcccatgaatacaagatgtttgactttttgcttgccaatctgctttaagccaaaatgaaggtcggcttgattttgttagtggacttaaagacaataacttcattgatggagggaaacacagtttttattgaaatagacctggaatgtgtttatatatttttttaaaagccagcttttttt

SEQ ID NO: 654 - DNA, 759 bp, Gossypium hirsutum
  Clone ID: GOSHI-09MAY01-C16533_1
ggaaaatctactatggcagattggacccaactccccaagggactactagacctgatcgccggagcgcctaggaacccactatgacgtcatccgtttccgttccgtttgctccacctggcgctccgccgttactgcccccaaccgctgccgcaaccgcttcgctccccgtttcccgcttctccctatttcctcccaattctccctctcaaagcgctccgtattcctcctcggatcacccacaactagtacccaaacaaacgcttggagcccctcctcgtgggtaatcaaaatcgaagaagatccgatgaacggcagagtccagcttttgaaccctctctcaaggtctcgtttcgattctctccctgataatttccccaaacctttaaatttgttggattttagggttcttgaattgggtgaagagtatgtgcttcattatttaactcatcacagtgtgggcaacttgtacatggaaaaagttgtcctgtcttgtttagatgataatgttaacgatttcattatacttacaattcatgtttctgggaaattagcaatgtttaaatctagtgttaagaaatgggctataattcaagacatgccatctccttttgacgatgtgatattatataaaggggaattttatgctgtgataatactggtaggactgtggttgtgggatgggatttcgagacaatttgattgctatgccctgttttggtggtgataaaaagttttggggtgatcaaaggttgagtatgg

SEQ ID NO: 655 - DNA, 441 bp, Gossypium hirsutum
  Clone ID: GOSHI-09MAY01-C16493_1
cggacgcgtgggtttctctttcttctccttttcttccctttctttttttgcttgtgggtttatcaggatttggactttcaactgataatgtataacccacatttcacattttcctccaattagactgcattttcttgtcaattttagaaagttaaaaggaaacttgatttttgtgtcctctgataactttgaatatatggcgaagttaatgagactcatttcaatggctcctctgtttctgctacttcgccttccttttgcatttggtgggcatgattataaccaagctttgagtcagagtattctcttctttgaagctcatagatctggttacctccctcataaccagagagtcacatgctgagctaactctactttgaatgacggcactgctagcgaggtggatctgttaggagggtattatgattcaagagacaatgt

SEQ ID NO: 656 - DNA, 952 bp, Gossypium hirsutum
  Clone ID: GOSHI-09MAY01-C16483_1
gaaaaacgaaaaatcaaatgaaaaaacagtattgaagacgaactctttcgaccaagaattcttgctgccataatcggagaaacggcattaaaattggtgaaggttttgaagagaagacgaaaatggatgctgccaagaagaagtacagtataatagtaccaacgtataacgagcgcctcaacattgctctcatcgtctatctcatcttcaaacatctccgggatgttgattttgaaataattgttgtggatgatgggagcccagatggtactcaagaagttgtgaaacagctgcagacactctatggtgaagatcgaattttattgagacctagacctaagaagcttggattgggaacggcttatatacatggtttgaagcatgcttctggaaattttgttgtaatcatggatgctgatctgtcacatcatccaaaatacttgccaagcttcatcaagaagcagccggaaactggtgccagcatagttactggaacacgatatgtcagaggcggtggcgtgcatggatggaatctgatgcgcaagctaacaagtaggggagccaatgttcttgcacagactcttttgtggcctggtgtatcggacttaaccggatccttcaggctttataagaaatcagtgcttgaagatgtcatttcctcctgcgttagcaagggatacgtatttcaaatggagatgattgttagggcttcaaggaaaggctatcacattgaagaggttccaataacttttgttgatagagtgttcggaagttcaaagcttgggggatccgaaattgtagagtatcttaaaggcctttcatatcttttggtcacaacatgagccctgagattggctgagtaagctttgcagcgaacaatttttatggcttagttcttactagttcctttgtaacctgactttttgatggctaatttagttggtattttgct

SEQ ID NO: 657 - DNA, 558 bp, Gossypium hirsutum
  Clone ID: LIB3829-001-Q1-K6-B2
aaccaatccatttattcatcaaactaaagagggaaaaaagggctaaaaatcaacacacataaaataaatatttaggccatggctttcacacatatgtaagaaaaaaggctctgaatacatctacacctttatagtacctacttacaacgagcgcctcaacattgctctcatcgtttatctcatctttaaacatctccggcatgttgattttgaaataattgttgtggatgatgggagccctgatggtactcatgaagctgagaaacaattgcagaaactgtatggtgaagatcgtgttctattgatacctatacctaataagcttggattgggaacagcttacattcacggcttgaagcatgcttctggaaattttggtgaaatcatgggtgctgatctgtgccatcatccaaaatatttgccaagcttcgtcaagaagcagtctgaaactggtgccagcgtagctactggaacacgctgtgtcacgagtggtggcgtgcatggatggaatctgatgcgctcgctaacaagtgcggcagccaatgttcttgcacaaac

SEQ ID NO: 658 - DNA, 341 bp, Gossypium hirsutum
  Clone ID: LIB3048-039-Q1-L1-H4
gttagctactcccatagttggacttgtatggatctttaggggatggcatctccgtaccgagtaacttgctatcattatctcatgacccgagagcatactcgcgaaagctatgaatggcacgctaaagctgattctgactatatgaagtacagtgtagtattacctacgtatgacgcgcgcctcaacattggtatcatcgtatatctcatcttctgacatctccgtgatgtcgatttcgaaataattgttgagaatgatgggagcccacattgtactcaagaagttgtgaaacagctgcagacactctatggtgaatatcgaattttattgagacctatacc

SEQ ID NO: 659 - DNA, 776 bp, Gossypium hirsutum
  Clone ID: GOSHI-09MAY01-C16453_1
attaaccacagaaattcctatagaatatctgtttctttggttgaggttttcagaaggtaactggtaatggggagaccaccttgctgtgacaaagtcggtgtgaagaaaggtccatggactcctgaagaagatatcgtcttggtgtcttatattcaagaacatggtcctgggaattggagagctgttcctaccaatacagggttgctcagatgtagcaagagttgcaggcttagatggactaattacttgaggcccgggattcgaaggggtaactttacagaacatgaagagaagatgataatccaccttcaagctcttttaggcaacagatgggctgcaatagcatcttacttgcctcaaagaacagacaatgacattaaaaactactggaacactcatctgaagaagaagctgaagaaactccatggaagtgaagtttattgcagagatgggttcacatcatcagctgcatcagaccagatttcacgaggtcaatgggagagaaagttgcagactgatataaatatggctaaacaggctttatcagatgcattgtcccctgagaaatcaagtgatttaactgagttgaaaccttgtcatgggaacacttatgccaaaccagaagggtatgcatcaagcacggagaatatagctaagctgttgaaagggtggatgagaaagaacccattaaagcctgcttcaacaaactctggtgtcactcaacaatcatatgacaacagggtggctactggggtgaccactgattcagctaattc

SEQ ID NO: 660 - DNA, 1159 bp, Gossypium hirsutum
  Clone ID: GOSHI-09MAY01-C16463_1
caaaaatacaggcaagatatgtcagtgatccatcgtgaaaacaacttaacccaatcaatcctccatttataggagcctcgatctgaattcattttcaagatcaaaaggaaatgatggatgtgagggtgaagcttttaatccttttggcaacctcactcttgatttactcgctcatagttttactcaaagtcctgtatgactactggtgggtgcctctccgtatacaacacttcttgaattcacaaggacttaaagggcctccttacaagttcatccatggatgcaacaaacaaattaacaaaatgagaagtgaagcattaagcaaacctatggggctgacacatgacatacttcccagagttttccctcattattactcctggatcaacttatacggtgagtacgaaagaactatctttcttgggacggtgttcaagctcaggtggtgactactgacccagaactaataaaagaggttcttaaaaatagtgaacaaacttttcggaaaagggaacccccgatctatgttggcaggctattgggggatgggcttgttacaactgaaggagaaaaatgggcgaagaagaggaagttggccaactatgctttccatcggggagagtttaaagaacatgactccagcagtaattgccagcgttgaaacaatgctagacaagtggaaagacaaagaaggaaaagagatcgaagcattccaagaatttagaatcttgacttcagaagtcatatcaagaacagcttttggtagcagttacttcgaaggagagaagattttttacatgttgcagaagctcgcagatattgtgagccgcaattcaaacaagtctaggattccaatcctcagcaagttttggaaaactgacgatgacattgagtcagagaaacttgctagagaaatacaagatttggttatagagattgtgaagaaaagagaaaacaaagtttcgagtggaggagcagagagcttcggcagtgattttctgggattattagtaaaagcgtttaatatttcagatgaaaaaaactagatttcaatggaagatttggttgatgagtgcaaaacattttattttgccggacatgaaactggtaacgcctcacttgctttggcagtgctggttttggctatccatagagattg

SEQ ID NO: 661 - DNA, 1193 bp, Gossypium hirsutum
  Clone ID: GOSHI-09MAY01-C16753_1
gttagcttaacctttgcctttgccttgacttgatcactcacctaagctttccttctacagtcactctttgcttaacttcactccattcccaattcacactatttactatttagaataaattactaaaataaaaatcccctttccaaacccaaaaaagctcgtagtaaacgaaacagcagcaaaaatggtgctcacaaccacgaacccggcgccgaagcagtttgttgaatccagtacctttgcttccagatatgtccgccaacctcttcccaggttccagatgccagaaaattcaatgcccaaggaagcagcctatcaagtaataactgatgaactgatgcttgatggaaatcccaggttgaacttagcatcatttgtgaccacatggatggaacccgagtgcgataaactcatgatggcttcgataaacaagaactacgtcgacatggacgaataccctgtcaccactgagcttcagaatcgatgtgtaaacatgatagcaaacttatttaatgctcctatcgggagcggtgaagccgcggttggtgtcgggacagttggttcctctgaggcaataatgctggcaggattagcctttaaaaggaagtggcaacaaaagaatgaaatcacagggaaaaccgtatgataagcctaacatagtcaccggagcgaatgtgcaggtttgttgggagaagtttgcgaggtatttcgaggttgaattgaaggaagtgaagttgaaagagggatactatgtgatggaccctgtgaaagcggttgaaatggttgacgagaataccatatgtgttgcagcaattctcggatccaccctaacaggggagtttgagaatgtgaagctccttaatgaacttctcaccaagaagaataaggaaaccggttgggataccccaatacatgtggatgctgctagtggagggttcattgctccctttgtttacccgaaaatcgaatgggatttccgcctgccgttagtaaaaagcatcaatgtcagtgggcacaagtatggccttgtatatgctggtatcggttgggtcgtgtggagaagcaaggaggatttgccagacgatctcgtgtttcacatcaactaccttggatccgatcagcccacattcaccttaaacttctctaaaggctctagtcaaatcttagctcaatattatcagcttattcggctc

SEQ ID NO: 662 - DNA, 809 bp, Gossypium hirsutum
  Clone ID: GOSHI-09MAY01-C16723_1
ccccgcgtccgaaaaaactgagtggaaacagaaggccggcctgggcaaatctgggaactagctactccgttcaaatcacccactttattttatcactctgaaagtaaattcacatcggcgagaggttagaaggtagcatttgggcgtgaaatgtcaatggggaccgataccacttgggttgggaagaagcctttgaggcgcatcggaggaatgtccgatgctctctccattgccgccgatcttggtttctctgttccccctcctccttctcaggaagaagtgcaaaacttatcatctgctacaggagaaaagggtgatgacttgataaaggtattaagagagctaaccactgtacaaagaaagatagccgatttgcaagttgaactacagggccgaaaggatgacaaaaatgttgcacaccttacacacgtgagtgaaatggaaaagaagtgtgaaacattggcgaggattactactatattgaaggatgttattcagaataaggatcgaattatagctcgtctgcaacaaccgtattccctagattgcattcccgtggaagcagaatatcagaaacaattttccggattactgatgaaggctgccagtgattatggtgcattgacagctgctgtgtactgatttcccatgaccaacttaagaccctcttatggggggaactcgccaatcagtgatacatctgacccatttttgagctgttgcacagaagtttgcacttaaattgaatggcttgaccatacacaccctcaggtctcctgcatggggatagcccacttcgttgaaaaaac

SEQ ID NO: 663 - DNA, 357 bp, Gossypium hirsutum
  Clone ID: LIB3197-029-Q1-M1-E12
atcccaaaattccaaatgaaatctcttctccttttttttcccttctttttcccaaaatcgattccccccacctgaaatcttcttttttctccattttatttttccccccaatttccccaaattggcagccctctacatctccgttggatcgtattgtaatgtgttcgacacctgaaatctcttcgtttttcttggatcgtattgtatacgagatagtggataatgctgttgatgaggctcaagcaggttttgcaacacttgggaccgataccacttgggttgggaagaagcctttgaggcgcatcggaggaatgtccgatgctctctccattgccgtcgatcttggtttctctgttc

SEQ ID NO: 664 - DNA, 808 bp, Gossypium hirsutum
  Clone ID: GOSHI-09MAY01-C16653_1
cggacgcgtgggctgcatctttgtcccttccctttgtcctaaacacagtgtgacttgaaaaccgagttcgttcatattgactcagtgaccacccattttctcccaccatttattttacctgtaagagaatccaatagaccaaaaccaaacaacaatgggttccatgccatctcctctcttcttcttcttttttcttctcttcacaatccaatgttgtttcagttcaaacactagtgagctaagagctttaatggatatcaaagcctctctagaccctgatcatcaatacttaacttcatggaccactaaaagtgacccttgttcttttgaaggcttagcgtgtaacgaacaacgccaagtagccaacatttccttacaaggcaaaggattgtccggcaaaatctcaccggccattgctgagcttcagaacttgaccggtctttacttgcattacaactatttatacggtgaagtactgagagaaatagctaacttgactcaactcgccgatttgcatcttaatatgaataatctatccggagagatcccgccggagattgctcacatggatagctcgcgagtgttgcagctgtgttataaccagttaactgggagcataccaacacagtttggttctttaaagaagcttaatgttcttgctttacaatcaaatcaactcactggtgcaatccctgcaagtttaggagatttgagtactctaataaggcttgatttgagctttaatgatctctgtggttcaatcccaacaaaactagctgatgctccactgcttgaagttcttgatata

SEQ ID NO: 665 - DNA, 1284 bp, Gossypium hirsutum
  Clone ID: GOSHI-09MAY01-C16663_1
agcatttccctttctttcctctcttatcaattttcccccatcttaaaactaaagaaaattaacaatgtccgctgttgctccttctttttccttgagtgtgctctgttttgcttcattgctctcctttttggctgtggtgaatgcaagaatccctggagtttatactggtggagcttgggaaagtgcccatgctacattttatggtggaagcgatgcttctggaacaatgggcggtgcatgtgggtacgggaatctctacagtcaaggctatggcgtgaatacagcagctttaagcactgcactttttaacaatggccttagctgcggtgcttgctttgagattaagtgcgcaaacgaccccagatggtgtcactccggcagcccttccattattatcactgccactaacttttgccctcctaactatgctctcccaaatgacaatggcggctggtgcaaccctccacgccctcactttgaccttgccatgcctatgttcctcaaaatcgccgagtaccgtgctggtattgtccccgtctccttccgcagagtgccatgccgaaagcaaggggggattcgattcaccatcaacggattccgttacttcaacttggttttggtcaccaacgtggcgggtgcaggggatattgtgaaggtgagcgtgaagggaaccaacaccggttggttgagcatgagccgtaactggggtcagaactggcagtccaacgccgttttggtaggccagccactctcgttcagagtcacgggcagtgacaggcgaacctccacttcgttgaacgtggcacctgcaaattggcaattcggccaaaccttcacgggaaagaatttccgcgtttgaatctcacacttgcccctttttagtaatatcttcacttattattttccttttttaacccagctcttcaaatttcctttattttcccaggaaattttgaagtagtgggtagttgggtaaaagtaaaaatgggggttggggggtgttcggtggaatttacaaaaaaaaaaatggtgatagatagtttagcaaagtgattaaagtgaagcatatgtagtaacttttgtttttcaccgtaatcttgggtcggcgttttccttttattttgttggtgattgaggtggtgctaatagttagtacaaagtccagctagtggtaaaatgttgttaagggggctgaagcggctgcaaatcaaggcaaaaaatgtagcccgcagctcttggtcttagtcattatatatatatactaatttttatttttactgctct

SEQ ID NO: 666 - DNA, 567 bp, Gossypium hirsutum
  unsure (1)..(567): unsure at all n locations
  Clone ID: LIB3828-034-Q6-K6-B12
gcgttcgtaggtggctggtgcaacccttcgggggggggtggggcgtgacatacctatgttcctcaaaatcgccgagtaccgtgctggtattgtccccgtctcttacgtanaggcctgccgaagcaggggggatacgattcaccattaatggattccgttacttcaacttggttgggggggggggcggcgcgggtgcaggggatatcgtgaaggtgaaggtgaagggaactaacaccaattggttgagcatgagccgtaactggggtcaaaactggcagtcaaacgccgttttggtgggtcaggcactctcgttcagagtcacgggcagtgacaggcgaacctgcacttcgttgaacgtggcacctgcaaattggcaattcggccaaaccttcacgggaaagaatttccgcgtttgaatctcacacttgcccctttttagtaatatcttcacttattattttccttttttaacccagctcttcaaatttcctttattttcccaggaaattttgaagtagtgggtagttgggtaaaagtaaaaagggggttggggggtgttcggtggaa

SEQ ID NO: 667 - DNA, 916 bp, Gossypium hirsutum
  Clone ID: GOSHI-09MAY01-C16603_1
gttgggttcgttgttactgaaagagtttgcattactctttttggggttccagaaaaggaataacgtttaaagatgctacagttgttgttcacggtgatattcgcagagatggcggtgatcatcgtactatgcttcaagacaccgttaaggaagctggtgttaatggttctggatcgggccaagaggggacgaggtccggtcatagtgaagacggtgggcggaacagtatccgttgtgatgttgtcgtacatattcagcatgatgatgctcaagaaacgctggatcgttgatggaaacgcttctctaacggacgagattctcatggccaaaaacctcctcgaaactactctcatggggggattgctattcctatctctaattatagacaaattacaccattatattaaagaactccgtataagaaggaagaccatggagactgccaagaaacaaggtcagggatttgaagatgcaggtgggtcagacaaagttacccctggaggaagaaatagccactctgagggcaaggattaagcagcttgaatctgactagagcttgtcacattcaggtggtaagaagaacgaatacctaaggaatttgagcacctcttgcgaatgtgtttttgcagtttcattagcgtttttccaataaaggtcttcaggagttctgtaatggatttgacgtttgcagtttagttcttgaactttgtcaaacggagaaagatccaaagaaaaaaaaaatacccacgcattcgtatatatatttgagaaattagcctctctttgtcatttcagcttcatgtttttattattgagaatctatctgttcaatgaatcaatggatgagttttgatctttgatatattttagaacattgtaatagtttgaatgctagaataagaactttatattaccc

SEQ ID NO: 668 - DNA, 1309 bp, Gossypium hirsutum
  Clone ID: GOSHI-09MAY01-C16143_1
cttaaagatcaggatgtgataagaactgtgctgaacatactgcagacaaatactagtgtggccagttctcttggaacatatttcttatctcggatttctttaatatcccgggacatgctcaatgtgtacagaatgtacagtgagcttatatcaagcagtattgcagaaggtgtaccctttgcttcaaaaacatcctatgtgaaacttctacgatctgttaagagggagactcttaagctcattgagacatttttagacaaggcagaagatcaaccgcaaattgggaaacaatttgtgcccccaatgatggatccagttcttggtgattatgctaggaatttgccagatgctagagagtctgaagttttatcactttttgctacaataataaacaagtacaaagctgcaatgatagatgatgttccccgtatatttgaagctgttttccagtgcacgctggagatgataaccaaaaattttgaagattacccggaacatcgcctcaagttcttttcattgcttcgtgccattgctactcattgtttccctgcacttattcagttgtcaagtcagcaactaaagctagttatggattcaatcatttgggcatttcggcatacagagatgaatattgcagaaactggtctaaatcttctattggagatgctgagaaactttcaggcttctgaattttgcaaccagttctaccgaacctactttttgtcaattgagcaagaaatatctgccgtcttgacagacacatttcacaaacctggcttcaagttgcatgtcttggttttgcagcacctgttctgcctggttgagagtggtttgttgactgagcctttgtgggatgctgctacggttccatttccgtatccaaacaatggaatgtttgttcgtgaatacacgataaagcttctgagtacatcattccccaacatgactgctgctgaggtttctcaatttgtgaatggattatttgactcgagaaatgatttgtccacttttaaaaatcacatacgggacttccttgtgcaatcaaaagaattttcagctcaggacaataaagatctctatgcagaagaagctgccctacagagggaaagagagcgacaacggatgctttctatcccagggctcattgccccaaatgagatacaagatgagatgttggactcgtagatgtggctaattttggcatggaggctaatttgtttaattttgacttgggagttaaggttgcgccttgattttatgacctgtatccctgaatgtaatcagatatgatacagcattttcacccatt

SEQ ID NO: 669 - DNA, 676 bp, Gossypium hirsutum
  Clone ID: GOSHI-09MAY01-C16113_1
cactctctttctctctcgtaaggaggagggtgaaaagaaaaaaaaaatcaatctttcggcgaagaaacagtctctgcatttgcttgaactttagggcaaaaatctgattcttgccctcttttttctctcctaaaagaccaaatcaaggaagagaaagaaaacaaatggaaggcataaaccctatggacctgctccgatccaatctctctcgggttcggatccctgaacccaccaatcgtatctacaagcaagaatgctgcctctccttcgattctccgaggtcagaaggaggattatttgttgatatgaatacgtttctagcgtttgggaaagattatgtgggttggaattatgaaaagactggaaatcctgtgtatctgcatattaagcaaacgaaaaagttggtttctgaagataggcctttgaagaaacccactctgttggctattggtgttgatggtggatttgacaacaatgaactagaatatgaagaaactcacaaaattgtcattttgcctagctatgcaactcttccttttccatctgtggagttgcctgaagaaggtaaggttggcagttgatgctattttaatggctgagggtgctgaacggaaagagcaagttgcagcctggacagctgataagaagcaaataagtgcatatgcaatggagttgc

SEQ ID NO: 670 - DNA, 555 bp, Gossypium hirsutum
  Clone ID: GOSHI-09MAY01-C16093_1
ctcctttttttcactcttttctctctcttatcttcttcttcatctctctagactggtttttttaaaagcttttttcagcttttttttgttgttccattcctgccatggattcatatgaagcaacgaggatagtcttttctaggatccaaaatttagaccctgaaaatgcttctaaaatcataggttaccttcttcttcaagaccatggtgacaaagaaatgatacgtttagcttttggacctgaagctttaatccattctttgatctttaaagctaaaacccatctaggtctccccatttctaacccgccttcgccgtctcctcctccgccgttctcttacgccggtgtcgttaatgggtgtgccaaatctttgcatggtgtggccgccgacgacaatggtggattcgtggatgattttcagtttcaagaacatgtttcggattatttgaccggccgtagtgggggatacgccgattcgactttacatcgacggagtttctcggttccgggactgtgtttaaccgtgaagatctgaaaccttgtttgattttgct

SEQ ID NO: 671 - DNA, 429 bp, Gossypium hirsutum
  unsure (1)..(429): unsure at all n locations
  Clone ID: LIB3197-020-Q1-M1-C4
gcaaagtccactctttgccctcttttactggcttttcttccctatcattttcttctctctctctctttctcccttgaagtgaaggcttctattttatctttggggggatttagagtttcagcacttcagcttggtgtttaaaaaaacaaaagaaagaaaaaaagaaagaaagagaaattgggttctccatggattcatatgaagcaacgaggatagtgttttcgaggatccaaaacttagaccctgaaaatgcttcgaaaatcatgggttatcttcttattcaagaccatggagagaagggaatgatacgtttagccctttggccctgaagctcacatccactctttaatcctcaaagccaaatcccatttgggactntccattttaaacccaccaacgccttctactccctcttntccttctcctttc

SEQ ID NO: 672 - DNA, 425 bp, Gossypium hirsutum
  Clone ID: uC-gsflmaxxa042a04b1
tcttttaaaaaaaaaaaaaaaaaaaaaaaaaaataaaaatgatttaaaaaaagctaaaaaaaagctaattatagaagttccattcctgccatggattcatatgaagcaacgaggatagtgttttctaggatccaaaatttagaccctgaaaatgcttctaaaatcataggttaccttcttcttcaagaccatggtgacaaagaaatgatacgtttagcttttggacctgaagctttaatccattctttgatctttaaagctaaaacccatctaggtctccccatttctaacccgccttcgccgtctcctcctccgccgttctcttacgccggtgtcgttaatgggtgtgccaaatctttgcatggtgtggccgccgacgacaatggtggattcgtggatgattttcagtttcaagaacatgtttc

SEQ ID NO: 673 - DNA, 587 bp, Gossypium hirsutum
  Clone ID: GOSHI-09MAY01-C16013_1
cttctacctcagccagagtggactgcatgggatcaaactgttgagtattgtgcctttgcatatcagcattatattgtcatctcttcattgcgccctcagtatagataccttggagatgttgcaatagcccatgccactggagctgtttggcaacggagacaattgtttgtagctacaccaactacaattgaatgtgtttttgttgatgctggcattgcacccattgacatagcaaccagaaagatgaaagaagagatgaaattaaaagaggcacaggcaagagcagttgctgaccatggagaattggctctaatctctgtggagggtccccaaactgctacacaagaaagaataacattgagaccgcctatgttgcaggtggttcggttagcttctttccagcatgctccttctgttccacctttcttatcattgccgaaacaatataaagttgatggggatgatacagcaatgctaaaagagatggaagaaagaaaggttaatgagatagctggtggtgggggaggagtttcagtagcagttactcgttttccaactgagcaaaaacggcctgtggaccactaatt

SEQ ID NO: 674 - DNA, 1362 bp, Gossypium hirsutum
  Clone ID: GOSHI-09MAY01-C16003_1
cccacgcgtccggttcctcttcttccctctcttttgtttgtctaaaaacagttgcttccctgcttaatttcgttgtcatggacactcccacccctctcttctccttgctttgtttcttcctcttctccctcttcttaggtgaggagcaacatgttgttgaagggtcaagggtgtggacctttggtttcagacccaagatgttgtttgtgttcggggattcctacgctgatacagggaacaacaggaaagctttggcaagttcctggaaacttccttatggaattacattccccgggaaacctgctggccgtttctctgatggtcgtgttttgactgatttcatcgctgggtacttggcgattaagacaccagtgccctacagatacaggaaagaactggggggtcgtctcaagtatgggttgaactttgcttatggaggaaccggtgttttcgacacgccagctcctgagccaaacatgacaacccagatcgatttcttgcaacagcttctcaatgactcggtctaccccaagagggccttgaaaacttctgttgcgcttgtcagtcttgcaggcaatgactactctaattacattgccaccaacggctctactgcgggatttccagtcttcattggaagggttgtgaaccaaatgaaggtgaacttgaaacgcatccataacttgggagtgaggaaaatagcggcgagtgcactgcaaccattggggtgcctccctcgaagcactgcccaattctcctttgagcaatgcaacgaaagtgaaaacgccctcgttggtctccataaccagctcttggctcaagcagtgaacgatctcaacaaagaaaccaacagctcctctttcttcgttcttgacatgtacaatgccttttggaacgttttcaatcaaaaacaagctcatcaagtgagtccaacatttgtgaatccatttgagccctgttgtgttggagtgagtgccgcattttcatgtggaagtgtagatgaaaatggtgtgaagcaatacacactttgctccaatcccaaatccaaattcttttgggatacagttcaccctacggaacaaggatggcgagctgtttactcaactccagctcttcaaagcagtctcaagcaattctggtagacattaccatgaaatgcttaccttttatcactttatgatgtttttacatttagtttcttggtatctgtcaaatcccttcgtgatctctgtattcatttgtgctggtcaaaagttgtatgaaatgaatggaatattaataataaatgttcttgtccaatgctactcctatttggttttatgtctgttgttataatgttaagttattttattcttttttgtt

SEQ ID NO: 675 - DNA, 656 bp, Gossypium hirsutum
  Clone ID: GOSHI-09MAY01-C16033_1
aattgtcccaaagagaagtgattttaaggaaaaatggcagaagaattgacgttggatttggaagagcttaggcagcttcaaagcatcgcaaagagaccacgcactctatctcttatttcctctgagattcgcaacttggagaagaccttgaaagagaatgaaaatggggcttctcctgttactgctccacaaattccaactcccatttcaacctcagttaagactccagttaaccctgcactgagttatgttacacttgcctccttcagctgggatcaagataacgataaagtcaagatatatgtctctctggaaggagttgaacaggaaaaaattcagacagagttcaagccaatgtcattcgatgttaaattccatgacgttcaaggcaaaaactacagatgtgctgttccaaaattgaacaaggaaattgaaccagagaagtgcaaggtgatggttaagccaacaagagtcatcatcacattgttcaaagcttctaaagggaattggactgacctgcactacaaagaggacaagctgaaaccaatcttggataaagagagagataccatggctgggatcatggacttgatgatacacatgttcgaggtaaggagatgaggaaatgaatagaacaattgctaaagcatggactg

SEQ ID NO: 676 - DNA, 476 bp, Gossypium hirsutum
  Clone ID: GOSHI-09MAY01-C16343_1
gaaagagactccaacagcaacagaggcttaagggtttgaccggattggaattcagacacagtgaacttcaacctttgctgtttcctgtttctcgagaaacaaacagagaagagaaaggatggtgctctccgcatctctgcattcgctttgcataatcccccatacctctcaatctaaaatcccaagcatcttcaacctcctaaagtctcccttagccaaaccccacctcaaattcaaccccattttcaaaccctcttccctttcccttttccctcaaccatccaagctcagaccaaaaacccaaaatttccgtacccccaccatccgctccctctttaccggtatcgtcgaagaaatgggtgaaatcaagcaactgggtatggccgatcacggcggattcgatctcaaaatacacgccaaaactgttatagaggatgtccacctcggtgacagcattgcggttaatggaacttgcc

SEQ ID NO: 677 - DNA, 953 bp, Gossypium hirsutum
  Clone ID: GOSHI-09MAY01-C16303_1
acgcgaaattttgatgaatttactcgaatttcctagctttgttggggcagtgtgagagacgagatgagtatctgtttccgctgggtttcaaatttgtcttcttctactactggaactctctccacttgcaaaacatacggttcacttccattgaagcctccgcttttctcctctatcctccaccttcctcctcgtcctagatttcaactcctaatccgagctacggctgccatggaaacagatcaaagtgcagtcacaagcacgaccgacaactcctcgaatccaccgatgaaactccttttcgtggagatgggtgttggttatgatcaacatgggcaagatatcacatctgcagcaatgagggcatgcagggatgctatttcttctaattcaattcctgcatttaggagaggatccatacctggggtctcgtttgagcaaatgaaattacagatcaaattaggtgttcctcattctcttcaacactcattggatattgagagggtgaagtctgtttttccttatggaaaaattttgaatgttgaagttgtggatggaggactagtatgctcaagtggcgtgtatgtagaagaaatgggagataagaatgatgattgttacatagttaatgctgcagtttatgttggttactagttttattcccactgccatcttgagagtttctttcaagtatttggaccatggcatcaagtagacttcagtcttcgggcgcctatgctgaaagttggcatgcttttgacggagaatatttgtataactgcaccatctttatttcctgctgcttgatcctatgtgatgcttttttttttttttgtggaattggtgatttttggaacaccctattttccctagaagaaacaagtataattcttgttatacacgaacagatctttcagacaataataattaattgctaaacatattgcctaaaa

SEQ ID NO: 678 - DNA, 501 bp, Gossypium hirsutum
  Clone ID: LIB3582-005-P1-K1-E2
actagttctagatcgcgagcggaagcccgcgatctaaaactctatccagcaccttagtcgtagggctagaggggaacttctaattcgagctacggctgtcatggaaacagaacaaagtgcagtcacaagcacgaccgacaactccttgaatacaccgatgaaacttcttttcgtggagatgggtgttggttatgatcaacatgggcaagaaattacatttgcagcaatgagggcatgcagggatgctatttcttctaattcaattcctgcatttaggagaggatccatacctggggtcttgtttgagcaaatgaaattaccggtcaaattaggtggttcttattcttttcaacacttattggatattgagagggtgaagtctgtttttacttatggaaaaattttgaatgttgaaattgtgaatggaggactagtatgctcaagtggagtgtatgtagaaaaaatgggagataagaatgataattggtacatagttaatgc

SEQ ID NO: 679 - DNA, 405 bp, Gossypium hirsutum
  Clone ID: GOSHI-09MAY01-C16333_1
atctctgcggctgccagcaggcagatcatgagccatcagctcctctggggccagctataggacaacagaactctcaccaaaggaccagacgcagcgggtaccatgggacagtgtcggtcagccaacgcagaggatgctcaggaattcagtgacgtggagagggccattaagaccctcatcaagaacttccaccagtactccgtggagggtgggaaggagacgctgaccccctctgagctacgggacctggtcacccagcagctgccccacctcatgccgagcaactgtggcctggaagagaaaattgccaacctgggcagctgcaatgactctaaactggagttcgggagtttctgggagctgattagagaagcggctaagagtgtgaagccagagaggcctgtc

SEQ ID NO: 680 - DNA, 906 bp, Gossypium hirsutum
  Clone ID: GOSHI-09MAY01-C16323_2
cggacgcgtgggctttgacgtccaaattgaatctccccaaaccctaaccatgacctgatccgaaatccccgaaatctctcatcttcatcctccaccgtccgatcaaagctccatcatagaataaaagcaaaagaaatcaccagaaaaacctgaactgcttgacgatgccgtcccacggggatctggatcgtcagatcgagcacttaatgcagtgcaagccgctatcggaaacggaggtgaagactctgtgcgagcaggcgcgtgcgatccttgtggaggagtggaatgttcagccggtgaagtgtccggtcaccgtctgcggcgatatccacggccaatttcacgatctcgtcgaactgtttcgcatcggtggccacgctcccgacactaattatctctttatgggcgattacgtagatcgaggatattactctgtggagactgtcactcttttagttgcactgaaagttcgttatagagatagaataactattttaagaggaaatcatgagagccgccagataactcaagtgtatggcttttatgatgaatgcttgagaaaatatggaaatgctaatgtgtggaagtatttcactgacctctttgactatttacctctgactgccctgattgaaagtcagattttctgcttgcatggtggactctccccatctttggatacattagataacatccgttctcttgaccgtattcaagaggttcctcatgagggtccaatgtgtgatctcttatggtctgatcctgatgatagatgtggatggggaatatctcctcgaggagctgggtatacctttgggcaggatatttctgggcagttcaaccacacatatgggctgaccctgatttctagagctcaccagcttgttatggaaggatataattggt

SEQ ID NO: 681 - DNA, 836 bp, Gossypium hirsutum
  Clone ID: GOSHI-09MAY01-C16323_1
catagaataaaagcaaaagaaatcaccacccacgcctccgcccccgcgcccggccgtcccacggggatctggatcgtcagatcgagcacttaatgcagtgcaagccgctatcggtggcggaggtgaagactctgtgcgagcaggcgcgtgcgatccttgtggaggagtggaatgttcagccggtgaagtgtccggtcaccgtctgcggcgatatccacggccaatttcacgatctcgtcgaactgtttcgcatcggtggccacgctcccgacactaattatctctttatgggcgattacgtagatcgaggatattactctgtggagactgtcactcttttagttgcactgaaagttcgttatagagatagaataactattttaagaggaaatcatgagagccggcagataactcaagtgtatggcttttatgatgaatgcttgagaaaatatggaaatgctaatgtctggaagtatttcactgacctctttgattatttacctctcactgccctgattgaaagtcagattttctgcttgcatggtggactatccccatctttggatacattagataacctcccttgccctggaccccataccggaggtccccctcgagggtcccaggtgtgatccctcgtggtctgatcccgatgacccatgtggatggggatatcccctcggggggccgggtataccttccgacacgatatttctggggcattcaccacacaaatgggctccctccgatttctatagccaccaacttgttagggaaggatatattggtcccccgaccacaatgtggtaacagtgttcagtgccccaattactgcc

SEQ ID NO: 682 - DNA, 578 bp, Gossypium hirsutum
  Clone ID: GOSHI-09MAY01-C16273_1
aatcctcctctgctcttgaataaacagccctgaccttccattccatccattgtgaatcaactagcatttgcatcacaccatgaaattccgatacgccatggctcgttcatccttcctgaaccgtagcatggaggcccactccctcctcaagaagcagggtttcgatgtttcctcctacggaaccggggctcacgtcaaactccctggtccttctctcagggaacccaacgtttacgagtttgggaccccttacaagcacatgttcgacgacctccgccgcaaagacccagagctgtataagcggaatgggatactgccgatgcttaaaagaaacttgagtgtcaaattggcgccccagcgttggcaagacaatgctgctgatggttgttttgacattgttttcacttttgaagagaaggtttttgatatggttcttgaagatctgcacaaccgggatcaagttctcctgaaaagtgtgctggtgatcaacttagaggttaaagataatcatgaggaaacagccataggagctcgtattgctttagatctatgtgaacagatcgaagctgttgagtcaa

SEQ ID NO: 683 - DNA, 443 bp, Gossypium hirsutum
  Clone ID: LIB3493-038-P1-M1-C12
cgaagcggaacatcatcaaaacacgctgataaagccgaggaattcagctttgctgaacttgttgcagcaaccaatggtttctcattagaaaacaagattggtgcagggagttacggggttgtttacttaattcctggaaaatgaggatcaaaatcgcactcgacgcggctcgagggatcgaataccttcacaactatgcagttccccctataattcatagagatataaagtcttccaacatattactcgatgcgaattggacagcaagggtttcagatttcggactctcgatgatgggaccggaatcagaccgagattacaagccaacaaaagcagccggaacagtcggttacattgatcccgaatactacggattaaacgtattaacaacaaagagcgatgtatatggactcggagtcgtaatgctagagcttctgacaggg

SEQ ID NO: 684 - DNA, 323 bp, Gossypium hirsutum
  Clone ID: LIB3197-051-Q1-M1-F1
gaaatatcaagagaaagagattgcatttgagtccgaattatccttcttatcaaggcttcaccacaagcatttggttagacttgttggatattgtgaagaaatggatgaaaggcttttagtttacgaatacatgaagaatggagcactttacgaccacttacatgataagaacaacatcgagaaatccagcagtttacttaattcctggaaaatgaggatcaaaatcgcactcgacgcggctcgagggatcgaataccttcacaactatgcagttccccctataattcatagagatataaagtcttcaacatatactcgatgcg

SEQ ID NO: 685 - DNA, 697 bp, Gossypium hirsutum
  unsure (1)..(697): unsure at all n locations
  Clone ID: AI729425.1
ggaaataaattttttattcaccagtctatcccttcaaggactgtaatgggaaaaaaaactcttcaatgatttgaagagatttgcaatttcctgccaaaagtcacccctcccccactctctcaactcctcctccatcttggagctcccatttctcaagcatggcggaaagtgatccgagccagcagcggcccgcaaggcctacctgcatcgcccctgccttcacttccctacaaaaaatcctatctcatgcacccaacaccacccctcttctcgctttcttattcatctttttcgtttcggccttaactctcctaatcctcactgctctcgccctctctgtcaccgttctcgggttcatattttttacgccattggttctttttactanccccatttggctccccggatgcaccttgctctttctcaccgctgccggcttcttgttggcgtgcggcttcggaggcgccgtcgcggctggctccacttggatgttccgctacttttggggcatgcacccacctgggtccaaccgggttggttctgcacaaacccggatttatgacacggctagccatgtcaaggactatgttggatacttgcaaagcaaggtcagggatgttgctcctggtgcatgaacaatggattttccccttcttttattacttatatntgtgatgatggtggtnttgtgtgtttt

SEQ ID NO: 686 - DNA, 418 bp, Gossypium hirsutum
  Clone ID: LIB3197-050-Q1-M1-H5
acgccgcggacgcgtgggctctcaacgtctgggtcggggcagagctgccatttataaagcatagaaggacgtgagccgagccagcagcggccgggacgggccacctgcatggcccctgacttcacttagatacaaaaaaggctatctcatgcacccagcaccaccccgatgggggctatataattcagcttggtggaatcaggcgtaactctgctaataaagactgctctcgacctggctgtcaccgatctcgggttcatattttttacgccattgggtctttttactagccccatttggctccccggatgcaccttgctctttctcaccgctgccggcttcttgttggcgtgcggcttcagaggcgccggcgcggctggctccacttggatgttccgctacttttggggcatgcacc

SEQ ID NO: 687 - DNA, 608 bp, Gossypium hirsutum
  Clone ID: GOSHI-09MAY01-C17913_1
atacctcactgcccctaaaatttaatcgaggagatctcgttgttctttagctccggtttgcagccatggctactctagattccgatgtgccgatggtgcccgccggtgaagcttccggtagctccgccgcgtcttcctctactaagaagcccaagcgcttcgagatcaagaagtggagtgccgttgccctctgggcctgggatattgtggtggataattgtgcaatttgcaggaatcacattatggatctctgtatcgagtgccaagctaaccaagccagcgccaccagtgaggaatgcactgttgcttggggggtctgcaaccatgcatttcacttccattgtatcagccgatggctcaagactcgtcaagtttgcccattggataacagtgagtgggagttccaaaagtatgggcactagagagctttcaggccgatactgcttgaaccctcttacctttctggtatggtgagagaagaatgcatatatttcattagcttttatgctgattcaagcagtagttgctgtaattttcagagtagaattttatatgcactgagtgtaatatgctatattttattagaattatcctttattattgtgctg

SEQ ID NO: 688 - DNA, 544 bp, Gossypium hirsutum
  unsure (1)..(544): unsure at all n locations
  Clone ID: uC-gsronu33B107e02b1
cccacgcgtccgggctactctagattccgatgtgccgatggtgcccgccggtgaagcttccggtagctccgccgcgtcttcctctactaagaagcccaagcgcttcgagatcaagaagtggagtgccgttgccctctgggcctgggatattgtggtggataattgtgcaatttgcaggaatcacattatggatctctgtatcgagtgccaagctaaccaagccagcgccaccagtgaggaatgcactgttccttggggggtctgcaaccatgcatttcacttccattgtatcagccgatggctcaagactcgtcaagtttgcccattggataacagtgagtgggagttccaaaagtatgggcactagagagctgtcaggccaatactggttgaaccctcttacctttctggtatggtgagagaagaatgcatatatttcattagctnttatgctgattcaaacagtagttgctttaatatttcagagtagaatgtggtcataattctatttgcaccgagtgaatatgctatatttatgagaata

SEQ ID NO: 689 - DNA, 422 bp, Gossypium hirsutum
  unsure (1)..(422): unsure at all n locations
  Clone ID: LIB3146-028-Q1-K1-C10
cggacgcgtgggcggacgcgtggggtaaagtgttgaagaaagtagtaggctcatctttacctacaaacatgtatatatcggaagaaaaatgccttgagctcatctattatatgtttttactataatctatgagttgtatgtatcatctcactttagctccaacatgcttgatcattgtgtaattgatttttctcttctttgtgtatgtaggggtctgcaaccatgcatttcacttccattgtatcagccgatggctcaagactcgtcaagtttgcccattggataacagtgagtgggagttccaaaagtatgggcactagagagctttcaggccaatactggttgaaccctcttacctttctggtatggtgagagaagaatgcatatatttcattagctnttatgctgattcaaacagtagt

SEQ ID NO: 690 - DNA, 664 bp, Gossypium hirsutum
  Clone ID: GOSHI-09MAY01-C17893_1
attaaactgataatcactggatccgccaagcttcaaatggcaacccagttgcctgatttcatgctgatcttcgtcatcagttgcctaggtttcatctccctttgtaaaccaatcctcggtttcatcaaatgggtgtgggtcatgttcctcaggccgccaaagaatctcaagcaccactacggttcatgggccatagtcaccggctgcaccgatgggatcgggacagccctggcgttccaactggcatccaagggtcttaacttggtcttggtggggcgaaaccctttgaaacttgtagcaaccgccgatgccatacgtgaaaatttcggcgcacaagttgggaccagaaacgtcgtcattgacttggcgaaaaccagcggagaagagatatctaagacgatggaggatgctattgaagggctagacattggcgtactggtgaacaacgccggcttggcctacaaaggagcgaggttcttacacaaagtggattcggaggtggcggagagcattataaaggtgaatatagtggcggcgacttggattactaaagcagtggttccgattatggcgaaaaaaaaaaaggggccattgttaacgttccgtctggttcttatggcggcttctgttcttaccctttatacaccatttatgctgctacaat

SEQ ID NO: 691 - DNA, 606 bp, Gossypium hirsutum
  Clone ID: GOSHI-09MAY01-C17843_1
cactcacccaaacttgaacattcaactcggtaactcactcacctccccaaaaaacccccactcccatcatcacctttaactcgtgttccactcacgggtctactcaatctctacttaatacaaaaaaccctactcctttgggctaaatcacaagactcacaaggaaaccagttgggtgaatttaatggcgacaaacacatcctctttaaagaagaaaagtgagcaagtcctagacggttcggatataatggagttggttgaaaaccaagaggtgttcactagtttcgtcgaccataagttcaaagagcttgataaagacagtgatggtcacctctctgtgaaagaattacaacctgctgtggctgatattggtgctgctctcggtttgcctgctcaaggttcttcacctgattctgaccatatttactctgaggtattgaatgaattcactcaagggaaacaagaaaaagtgagcaagaccgagtttaaagaggttctttcggatattctattaggtatggcggcgggtttgaagcgagaccctatcgtgatcctccgtatcgacggtgaagatctttcagagttcattaacggtccgagttatgc

SEQ ID NO: 692 - DNA, 571 bp, Gossypium hirsutum
  Clone ID: GOSHI-09MAY01-C17803_1
gttaatggcttccactaccaattccccatcaacccgcctcacccttcctaatttctccattcaaacttcaacattccttcccaaaacatctcaacgttccattatttcagaagaaaaagcctttcaactttaactccaaaacagtagtgtcatgcaaagccagcaatgggaaacaaaacgatgcagatcacacttcttttctcaataggttcgatagaagggacatccttcttggccttggagggggtctctacggtgcgaccagccttgttagagacccatttgcattggcagtcgtcccaatcgagcctgacctgtccagctgtggggaatcaaccgtagataccggtaaagcctgcatgaatgtcccttgctgcccaccagagttaaaagattcaaagatcatagacttcgaaccacctttaggttgcaagatccgttatcggccggcagcacatttagttgatcgtgattacctgtataagtttgaattggcaatggagagaatgaaagctctccctgtggatgatccacgtaatttcatgcaacaagccaatattcattgtgccta

SEQ ID NO: 693 - DNA, 738 bp, Gossypium hirsutum
  Clone ID: GOSHI-09MAY01-C17503_6
attctgtaagacattttcaggaaaatgaagcttcccctccccctccccctcccccttcctcttggtttgcaaatcagtgccattgacaatagtttggtcaaggagcttttccggttcctcctccatccaggatttggcatttgatctgtccatttctgcttttttgcgagataacatctacaactttggagaactccttgctcatccaattgcttctttagcgtttacaagtctggtcattgcagctgttggataattggatgggcaaagtacataacgcttggttatcaactgaggctaaaaacacctgatctcgttgcatcatgaatttttttctccagttcctttctgccattgtaacaatttcgttatttgaaaagggaagaagaagggaaagtgaaatgattagcaatgaggatagagataagtgttagtcatttgcgggaatagccatatttgtatgattcctttagtaggtattgcttgatccttaaatctttgttctgaaaggagcggctcatgtactaaacttttcactttttggcatttgttggatctacaatggcactggaatgcctgaggatacggttaaaaaccgcaaacatcatccttatcttttcattttgaattgggattattcattagatacaatcagatatgatccacttttaatgtggatgaaaggggctttttattttcaaaaaattaaaccaggaatggaaaagtataatttttttt

SEQ ID NO: 694 - DNA, 615 bp, Gossypium hirsutum
  Clone ID: GOSHI-09MAY01-C17503_5
ctcagcttctctttctctgtttcgacctctgtggagtaaatttggaatcgatggcggccttgcagtacctaagactctcttcgaaatgagcatccagagctaggcgactggtataattctcttgcagatctgtatcaaaagaagctctggcaccagctcactctcaagcttgagcagttcgttgctctcaccgttttccaggctggagatgcgttgataaagttgtatcataactttatcactgactttgagatgaagattaatcctctcaagcttgcacatttcgctgttatagtttctcagcagtactcagagaaagaggctgctattagtttccttgaaggggtgattgaaaagcttcaggctactaaagagcagcgcatagaagagccaattctttatattaagatgcagatttccaaattcaagcttgagcaaggtgatcaaaaggagtgcaagaaacttcttgaagatgggaagagtacccttgacagtatgaccgacatagatccatctgtatatgctacctattactgggtttcatctcaataccataaatttcgccaagaatttgctgagttctacagaagtgctctcctttatcttgcgtacaca

SEQ ID NO: 695 - DNA, 669 bp, Gossypium hirsutum
  Clone ID: GOSHI-09MAY01-C17503_2
ccccgcgtccgctcgaatcaggggaaaatcaaagctttcggtatttataatagagagaaaactaagttgacaagaaaggaaatatctttaatgcctcagctgctctttctctctttcgactctgtggagggaatttggggtcgatggcggccttgcagtacctagactctcttcgaaatgagcatccagagctagccgactggtatagttctcttgcagatctgtatcagaagaagctctggcaccagctcaccctcaagcttgagcagttcgttgctctcaccgtcttccaggctggagatgcgctgatcaaggtgtatcataactttatcactgactttgagaccaagattaatcctctcaagctcgcacatttcgctggtatagtttctcggcaatactcagagaaagaaggtgctattagttatctcgaaggggttattgaaaagcttcgagctactaaagagaagcgcatagaagaacctattctttatatcgagatgcaagtcgccaaattcaagcttgagctgggcgaccaaaaggagtgcaagaaacttcttgaagatggaaagagtacccttgacagtatggatggcgtagatccatctgtgtatgctagctattattgggtttcttctcaataccataaatttcgtcaagaatttgctg

SEQ ID NO: 696 - DNA, 1657 bp, Gossypium hirsutum
  Clone ID: GOSHI-09MAY01-C17503_1
cccacgcgtccgcccacgcgtccgaaaaaaaaaccctctttacgcttcagcttctcttcgactgtgtagtggaatcgggatccatggcggccttgcagtacctggaatctcttcgaaatgagcatccagagctagccgactggtatagttctctagcagatctgtatcagaagaagctttggcatcagctcactctcaagctggaacagttcgttgctctcaccgtctttcaggctggagatgcactgatacagttgtatcataattttatcactgactttgagaccaagattaatcttctcaagcttgcacattttgctgttatagtttctcggcagtattctgacaaagaagcttctactagttatcttgaaggtgtgatcgaaaagcttcaggctactaaagagcagcgcatagaagagccaattatttatattaagatgcaaattgccaaatttaagcttgagcagggtgaccaaaaggagtgcaagaaacttcttgatgatggaaagagtactcttgacagtatgactgacatagatccttctgtatatgctacctattattgggtttcatctcaataccataaatttcgccaagaatttgctgacttctacagaagtgctctcctttatcttgcatacacatctgtggcgtccctgtcagaatcctttaagctggatttggcatttgatctgtccctttctgctcttttgggagataacatcttcaactttggagaactccttgctcatccaattataaagagtcttctggggaccaaggtggagtggctttattatatcctccaatccttcaactctgggaatttggttcgctatgaagaattgtgtcgcgtgcacaatgctgcactgagtgctcaaccagccttggttgagaatgagaagaagctcttggaaaaaattaatattctgtgcttaatggagattatcttcagccgcccttctgatgatcgaactattcctttaaaagttattgctgagagaacaaaattgtcaattgaggatgttgagtatcttctcatgaagagcctgtctgttcgtctgattgagggtataatcgatcaagttgagggaacaattcatgtctcttgggtgcagccaagagttctggggattccacagatcaaatccttgcgtgaccggttggataattggatgggcaaagtacataacgcttggttatcaattgaggctgaaacacctgatcttgttgcatcatgactctttttctccagttcctttctgccattgtaacaatttcgttatttgaaaagggcaagaaaaagggaaagtgaaacgatgagcaatgaggatagagataagcgttagtcatttgcgggtagggccatctttgtatgattcctttagtaggtattgctcgatccttaaatctttgttctgaaaggagcggctcatgtattaaacttttcactttttggcatttgttggatctacaatggtactggagtgcctgaggatacggttaaaactgcaaacatcatccttatctttcattttgtattgggatttttcattagatacaatcagatatgatccatttttatgtggatgaaagtgcattttcatttcagattagatattttttctgcatgatctatatattgtttggcttc

SEQ ID NO: 697 - DNA, 585 bp, Gossypium hirsutum
  Clone ID: LIB3582-015-P1-K1-A8
cccacgcgtacgggcttttctttgttttccccttcagaattcatatagatacagagaaccaaagttgaaaaaaaaaaacatacacatctaaatctttaaggcttcagcttctctttctctgtttcgactctgtggagtaaatttgggatcgatggcggccttgcaatacctagactctcttcgaaatgagcatccagagctagccgactggtataattctcttgcagatctgtatcaaaagaagctctggcatcagctcactctcaagcttgagcagttcgttgctctcaccgtcttccaggctggagatgcattgataaagttgtatcgtaactttatcactgactttgagacgaagattaatcctctcaagcttgcacatttcgctgttatagtttctcagcagtacgcagagaaagaggctgctattagtttccttgaaggggtgattgaaaagcttcaggctactaaggagcagcgcatagaagagccaattctttatattaagatgcaaatttccaaattcaagcttgagcaaggtgatcaaaaggagtgcaagaaacttcttgaagatgggaagagtac

SEQ ID NO: 698 - DNA, 498 bp, Gossypium hirsutum
  unsure (1)..(498): unsure at all n locations
  Clone ID: uC-gsflnu33B110d04b1
tttttatgactaacgcttatctctatcctcattgctcatcatttcactttccctttttcttgcccttttcaaataacgaaattgttacaatggcagaaaggaactggagaaaaaaattcatgatgcaacaagatcaggtgtttcagcctcaattgataaccaagcgttatgtactttgcgggtagagccatctttgtatgattcctttagtaggtattgcttgatccttaaatctttgttctgaaaggagcggctcatgtactaaacttttcactttttggcatttgttggatctacaatggcactggaatgcctgaggatacggttaaaaccgcaaacatcatccttatctttcattttgtattgggattattcattagatacaatcagatatgatccacttttatgtggatgaaagtgcaaaanatacaaaataaaaccttccgctttctttaaaacttcttctaacaaaaaaggcttttcggtttctctttctta

SEQ ID NO: 699 - DNA, 525 bp, Gossypium hirsutum
  Clone ID: GOSHI-09MAY01-C17473_1
ttacttctttaatttgggtttcaagcaaagttaaaccccattcaacattcacatgtaagcttctttttttttctttctctaattcatttacagtcatcaagatctatttagtttctactactgggttttcaaaaacaagcaaaaccccattatttagtgatcaaattctgtttgtttggttgacttattttgagatctgattagtttttgaaattgggttttgaaaaatgaggaaacccacaaaagaatcagagttaaacactgagccaatcggtcaaaatctgatcaaattgattagtaatctctggttctctgtttttgtgttgtcggttcttatatttacagccattgctatcacttatcaaccaccagatccatggctggaatcagctccttctttaaccaagctcttcactcaaactgaaaatgccacttttaaaatcgatgattccattgttaaaaccggtgaagatttggtttcttcgccggttccggctattccccctgctttagcacctaatccca

SEQ ID NO: 700 - DNA, 438 bp, Gossypium hirsutum
  unsure (1)..(438): unsure at all n locations
  Clone ID: uC-gsflnu33B019g09b1
tgtcacgcgtccgaaaaccccattatttagtgatcaaattctgtttgtttggttgacttattttgagatctgattagtttttgaaattgggttttgaaaaatgaggaaacccacaaaagaatcagagttaaacactgagccaatcggtcaaaatctgatcaaattgattagtaatctctgtttctctgtttttgtgttgtcggttcttatatttacagccattgctatcacttatcaaccaccagatccatggctggaatcagctccttctttaaccaagctcttcactcaaactgaaaatgccactgtcggctgccattttttctctcattttctctcttgccaaacaccatttttcttcttcaaaagacagcaactggttacttctttaatttggggtttcaagcaaagttaaaccccattcaacaatnntactgt

SEQ ID NO: 701 - DNA, 603 bp, Gossypium hirsutum
  Clone ID: GOSHI-09MAY01-C17783_1
gcgttcgcaaaacgaagggacaagagagaaacgacaagtgaagaccagaaacagagaaggtggctcgtgttttaataaacgaaggcagaaaggaatcacttaaagaggttcaagaagaaagtgaaaactttagcagtccaatcgaagtagctgaagaaataccgataggaaagctaaataaggtcactcgaaaaccgaggggaaaaaagagaaaacgacgagagattaccaataaaccggtaaaggtactcaaggacgatattgcctggcccatgatggaaaacgagaagaaatatgtcaaggagcgacaacagcaactgaagggcggaaatggagtaacaaaatctgttggtgaacaagatcaaccacaacgaggtaagatggttagtgaacaaggctcacaggacccaaaaattgacatcagaaccaaaacgctggtaaatcctttcgatggagatgtaaataacttgaagatttcacctccgaagcgttccgctcgtctattagaaaagaaaaagaaagaaggtttaaagcacgaggaacagcagcaaaggaagcttcgtgaaagagaaagcgttcgcttattgtttgtgctttgccagc

SEQ ID NO: 702 - DNA, 617 bp, Gossypium hirsutum
  Clone ID: GOSHI-09MAY01-C17743_1
ctggaggaggcacttatgaagtcatggtgacaaggccacggttggatttgtatatgaaccttccggcccttaagaagcttgatgcaattttgattaccatgcttgatggttttagtgagacggagttttggtatgttgatcggggtatagttgtgggtgatggtggtgactgtggtgcttattcatcgtctgtttcatggagggagaccctcaattaggcaggaagagaagtggtggttgccgtgtccgaaagttccatcgaatggtttgtctgaagatgcaaggaagaagctgcaacaatgtagggatagcacaaaccaagtactaaaggctgccatggcgatcaataacagcgtgctcgctgagatggagattcctactgcttacttggagacattaccaaagaatggaaaagattgtttgggtgatatcatttaccgctacattacagctgatcagttctcgccggaatgtctccttgattgccttgatctgtcaacagaacatcaaactctggacatagctaacaggattgaggcagcagtacatgtttggaagcagaagatcagaggaacacacaatcacaccaaagggaagcgcttgtcatggggaagaat

SEQ ID NO: 703 - DNA, 645 bp, Gossypium hirsutum
  Clone ID: GOSHI-09MAY01-C17623_1
ctgataattctctatcgattcagcctcggagattggaaataaatattaaactaagaagagttctttgtatactacatgtgccgtggaatcccatagtttgcactgctttttatgctattaactactaacctcaccgtccatctccgttaccatctataaaaaaaactgttctactactcttcctttgttaattcataagaggaaatgggtgaggaagttaagcaggaacaacaacctccagcagaggagaaaacagaagacaaggtggaggagaagcctgccgaagaaaataaggaagaaacgccaccaccgccaccgcctccaccacctccttttgtattgtttgtggacttgcattgtgttggatgtgcaaagaagattgaaaaaaccatcatgaagatcagaggtgtggaaggagttgtgatcgacatggctcaaaaccaagttactataaaaggaataatcgaaccccaagctatatgtgctaaaatcatgaaaaaaaccaagagaagagctaaagtcctttctcctttgcctgcagctgagggtgaacctatccctgaagttgttacttcacaggttagtggattaacaaccgtggaacttaacgtagacatgcattgccaagcctgtgctgagcaactc

SEQ ID NO: 704 - DNA, 336 bp, Gossypium hirsutum
  Clone ID: LIB3197-046-Q1-M1-A3
gttaagcaggaacaacaacctccagcagaggagaaaacaaaagacaaggtggaggagaagcctgccgaagaaaataaagaagaaacggccccaccggcaccggctacaccaacctcttttgtattggttggggacttgcattgggttggatgtgcaaagaaaatcgaaaaaaccatcatgaagatcagaggtgtggaaggagttgtgatcgacatgctcaaaccaagtactataaaggatatcgacccagctttgtctaaatatgaaaaccaaagactagtctttcttgctgactagtgactatctgagtgtctacagtaggatacaccggactac

SEQ ID NO: 705 - DNA, 537 bp, Gossypium hirsutum
  Clone ID: GOSHI-09MAY01-C17173_1
cccacgcgtcgcccacgcgtccgcccacgcgtccggacggatcttccaaacgacaggctgtcgtgctttttgccttcacgttaaagcatgcagtgaattgaaattctgaaattacccttcaactttgtataactgccgccaactaaccatcatcaactctcgccaaccaagttttatctatcatcttcctaatcctaatctgtacccgtcatacctcttaaacctttcatttcatcaccatctttttgcagtttctctttatgggtgaaagtgaaactcttaaaagctgctaagagggaagtgaattaaaggagagatgataaagaagccacaaaaggtcaacatgtttattaaaaaatggtctgagcttgattggcgtcttctcttcttagtcgtcgttcccctttcgtttctgttttttgtttcttccttaacttctacgcatctcaattctgtcgtctcgctccgctcctttatcttcagcaacttgtcggattttataagtttacatccccactcggccaacgctgttcggtc

SEQ ID NO: 706 - DNA, 571 bp, Gossypium hirsutum
  Clone ID: GOSHI-09MAY01-C17093_1
actggaaaataagaatttatggttattaagctgtaattttagttgagcaaaacaatgggttcaattcaacattattatttaaaacaaaaaagaaacttaaatttgtttgaatttggaaaatttgttatattgtgttaatagatagcgaaaaatgtcaaacaaaaattctataggaaaatgaagagttcgagcttcataggatatatatgtttaaggcttctatcttttacttgaataagtcactcatctgtataaattgcaaagggttttagcttatctatgttatttcgaatctttatatttcttgagtaccggtatctgacacttggatatgggatatgaccttcaatcatatccagtttcaagcacatacccgtatctaactcttaagtaacagactgatttgcaatgaatagtgcatttgagttctttttggctatcagaactcaatagataagtaaatatagcttgaattctattgcaactgacattcttatacagtttgttcatgatttgctgaaaatgacatctgttgagggaaatacggctgagcctcggaaaactagtaatc

SEQ ID NO: 707 - DNA, 453 bp, Gossypium hirsutum
  Clone ID: GOSHI-09MAY01-C17003_1
tggcagataagtttggccggacaaggacttttcaattagatgccattccgctaatcattggagcagttcttactgctatagcacagaatgtccagactatgataattggccgcttactggctggtataggtattggtataacatctgctattgtgccactttacatatctgagatctcaccaactgatatccgtggtgcacttggatctgtaaaccaactttttatatgtattgggattcttgcagcattggtggctggattacctttatcacggagcccagtatggtggaggggaatgtttggtcttgctgttatcccctcaattttattggctctaggaatgacatattccccagaaagtcctcggtggctgttccagcaagggaaaatttctgaagcagaaaaatctataggaacactatatgggaaagaaagagttcctgaggttatgt

SEQ ID NO: 708 - DNA, 483 bp, Gossypium hirsutum
  Clone ID: GOSHI-09MAY01-C17343_1
cgaaaaataatacttgtcgttggcttaataataaaaaatatcctctctttttttgtcaacatttcattttagtacaaaaatgctattaaggagttcgtcaataccgatacgtgactcatgggtctcacactcgaagaatttctctcctgcgccggagttatggcaccagagttccctgacccgaaccgtttcatgttcgcgctccatttctgcagggtcgatcgacgattcgagttggaggatgatgaggacggtgtcggatacggatttgagggatctggtcgtcccccagatgaaaaccgctaagaataataacgtgctcttggatgggatctgtgtccaggaggaagaggtggaagagtgtgggataggcggtggtgggggacaaatctttggcggacgaagaggaagtggtggttcggactgtgaggataacgaatggggcttttgggattcgaaaaacggaaatgatagtactgattt

SEQ ID NO: 709 - DNA, 782 bp, Gossypium hirsutum
  Clone ID: GOSHI-09MAY01-C17303_1
ttttagtcgccctttactaatacagagtaaagaacagaaaccaaagcaaaacccaaaaatggcgacggcactcgcaaacagagctgcgcaaaatcaaactactgggctattgagactctccttcaacttcttcagaaacctctcaactgcgacttccacagaaaaaactggcgcctcctcttcagcttccaaaaagcccaagagaaaaaagaagaagaacctcttcgaggtagctcagttcttacccaactgggggcttggttaccgcatggccaaaactcattggactgatgtttcatatcagatcaccaagatcaatctttataaggatggaaggcatggcaaggcatggggagtggtccacaaagacggtgctccaactgcagatgctcccaaaaaaataagtggagttcacaaacgctgctggagatacattccacatctgtccaaacctggagatacccctccaaccttgatgaaaccaacagaaaatgccccaaaggctgatgctgaactagcttgatgcattgctttaaattatagatgctggtaacttgattttgcattgttggctcatcctttgcagtcagtaggcatgttgttattttcagatttggtagggctttacagttcatttctcaatccacttgatctttcccgccccaacaactttgtgctttaaaacctactcaccttttactggcacgaagataaatccatagtaagacctagaagttttgtgaacgagttgcatttatttaatagttctctccccttgtttg

SEQ ID NO: 710 - DNA, 654 bp, Gossypium hirsutum
  unsure (1)..(654): unsure at all n locations
  Clone ID: AW187566.1
ctttactaatacagagtaaagaacagaaaccaaagcaaaacccaaaaatggcgacggcactcgcaaacaaaactgcgcaaaatcaaactactgggctattgagactctccttcaacttcttcagaaacctctcaactgcgacttccacagaaaaaactggcgcctcctcttcagcttccaaaaagcccaagagaaaaaagaagaagaacctcttcgaggtagctcagttcttacccaactgggggcttggttaccgcatggccaaaactcattggactgatgtttcatatcagatcaccaagatcaatctttataaggatggaaggcatggcaaggcatggggagtggtccacaaaaacgatgctcccaaaaaaaataagtggagttcacaaacgctgctggagatacattccacatctgtccaaacctggagatacccctccaaccttgatgaaaccaacagaaaatgccccaaaggctgatgctgaactancttgatgcattgctttaaattataaatgctggtaacttgattttgcattgttggctcatcctttgcantcagtaggcatgttgttattttcagatttggtagggctttacagttcatttctcaatccacttgatctttcatgcaccaacaactttgtgcta

SEQ ID NO: 711 - DNA, 500 bp, Gossypium hirsutum
  Clone ID: GOSHI-09MAY01-C17253_2
gttccgagaaaagaccgccaagatctctgtcacaatcacaggctgaaagttcttacaaataaactccgatcaagccacttctgaaattcagatattttgtgaggtatcaggatgaaagcactcattcttggcggtggatttggaacacgattgagaccgttgactcttagcgtcccaaagcctttggtggattttgctaacaaacccatgatactgcatcagattgaagctctcaaagctattggagttactgaagttgttctggccatcaattaccagccagaggttatgttaaatttcctaaatgaatttgagaaaaagcttggcattaaaatcacctgctcacaggagactgaaccacttggcacagctggtcctattgctctggctagagacaagttgatcgatggctctggtgagccattttttggcctcaatagtgatggtataagtgaatatccactaaaagaaatggtaaattttcacaagggtcatggagg

SEQ ID NO: 712 - DNA, 525 bp, Gossypium hirsutum
  Clone ID: LIB3583-012-P1-K1-C11
cggacgcgtgggcggacgcgtgggttttttttaatactaccagattgaagctctcaaagctattggagttactgaagttgttctggccatcaattaccaaccagaggttatgttaaatttcctaaaagaatttgagaaaaagcttggcattaaaatcacctgctcacaggagactgaaccacttggcacagctggtcctattgctctggctagagacaagttgatcgatggctctggtgagccattttttgtcctcaatagtgatgttataagtgaatatccactaaaagaaatggtaaattttcacaagggtcatggaggagaagcttccattatggtgacaaaggtggatgagccatcgaaatatggtgttgtagtcatggaagaaactacaggcaaagttgaaaagtttgtcgagaaaccacaaatatttgttggtaacaaaatcaatgctgggatttacttgttgaacccatctgttcttaaccgaatagaactgagacccacctcaattgagaaagaagt

SEQ ID NO: 713 - DNA, 524 bp, Gossypium hirsutum
  Clone ID: GOSHI-09MAY01-C17233_2
ctgtggtttcggacgcgtgggttgggattttgaagatgggtgagaataggatgaccggcaaggtgaagtggttcgatgaccaaaagggttatggcttcatatcccctgacgacggcggcgacgatttgtttgttcaccagtcttccatccgttccgagggtttccgtagccttgctgatggtgaagaggtcgagtacgttgtcgagtcttctgaaggtcgccccaaggctgttgaggtcactggccccaacggcaaccctgttcgtggatcatctagatccggacgcggcggcggcggtggtggcggttatggcggtggatccggtggttatggtggagggggaaggagaggcggttatggtggaggaattggagggggattttagttgcaaaatggcatgcttaaaaatattataagttgtaagcgtgcatgctaatgcagagtgtggttgactatgacgtatcatactgccatactaattaatattattgagtaaaataaaaaacaatgctttcttgtttcc

SEQ ID NO: 714 - DNA, 1056 bp, Gossypium hirsutum
  Clone ID: GOSHI-09MAY01-C17233_1
cccgccaagcgccccagtggcccccacccccccaggcgccatgccttcatatcccctccgcccgccgtcgctgatttgtctgttcccaatcgttccatccgttcccagggtttccgtagccctccccatggtcaacaggtccagtccgctgttcagtcttctcaaggtcgccccaaggctgttgaggtcacgggccccaacggcaaccctgttcgtggatcatctagatccggacgcggcggcggcggtggtagcggttatggcggtggatccggtggttatggtggagggggaaggagaggcggttatggtggaggaggcggtggtggtggtggtggaggcgccggatgttataagtgtggtgagatgggccatttagcacgggactgtgggcagggtggcggtggcggtggaggcagatatggcggaggcggaggcgggggcggcggtgcttgttacaactgtggaggctctgggcatttcgctagggagtgccccaacagtggtcgctaattttgaggagggatttaaatgtgtcactcgcatctcctccgatccatcctttttttcctcttccgctactgtttctgtcggtttggttattattgtatggtttgctttttatgttttccttttccagtttatgcaggacgatttctcttagtcagtttgctgtttttgtctttttggattttgaagttggcaaatggttgtaatgggtgctttcgtagtagtcttacagtgagggtggacattagtgtcgatgggaaaacaacaatgaagaagaaaatgatgttaaaactcactgtcatcaagtgtttatatcgatatcatataaatacaaactgatggatgatggattggtttcaatccttttcctttttatttcagtacgctttcatgattttctttatttaatgcctcaattgttcgatgtgatttgttttggttccattctggttgtaatgtgccatgaacctgaagtttgtgttaatatgattgacccataatttacaacattttcacatttttagcaaaaaaaaaaaaaaccaaaac

SEQ ID NO: 715 - DNA, 805 bp, Gossypium hirsutum
  Clone ID: GOSHI-09MAY01-C10953_1
cccacgcgtccgcccacgcgtccggcaaatgtgatctctacatttggttgatggaagaaactccacactaaaataaagagagggaaacaaagataagaatatgcaattgacagcctccgaatagagcaaaaatcaccaaaaataaaaaagaactattagtaaagggaggaaaatgagcagcggtgcaggaaaaaccgtgtgtgtaaccggagcctctggctacatcgcgtcatggcttgtgaagcagcttctacttcgtggttacactgtcaaagcctctgttcgtgacccaaatgatccaaggaagacacaacacttgcttggacttgagggtgctgagagcaggctcatgttgttaaaagcagacctattggaacaaggttcctttgatcctgtggttgaaggttgtgtaggtgttttccacactgcatctccattctatcacgatgtccttgacccagaggcagaattacttgatcccgctgtgaaaggaacactgaatggtttgagctcatgcgctaagaccccttccgttaaacgagtggtattgacatcttctatagctgcagtcgcatataacggaaaacctcgaactcccgatgttgtggttgacgagaattggtttagcgatcctgattactgtaaggacttaaagctatggtacgtagtctcaaaaacaatggccgagattctgcctggaaattttcaaaggagaagggcattgacatggttgccataaaccctgcatggtgattggccctcttttacagcaacacttaacaccagtgctgcagcaatttaaact

SEQ ID NO: 716 - DNA, 400 bp, Gossypium hirsutum
  Clone ID: GOSHI-09MAY01-C10973_1
cccacgcgtccgattcttccgactttgttttcttctcctttctagaatttgattgactttagctggaaatttaactgtaaaaaataatcacccaaatgcatatgaatatcaatgttgaagatcctctaaacatttaaatgtcaggtttgaggttcctcagcttttactgaaatgtgcagtgggaaccattgctcgggctatgatcttaacattattgtagagattcagtattgttagcgatgcaactagtatcaaatgatagtcgaaaagaagatatttcagaaagagagcccatcttatgccagcccgatatttcacaaacatctgaagaatgtgaaattacagctgttggaggggattgtattattgttagtgaagatttggaagaaattaatgttga

SEQ ID NO: 717 - DNA, 547 bp, Gossypium hirsutum
  Clone ID: GOSHI-09MAY01-C10913_4
ctttcagacccacgcgtccgcacgagccccttattcactctctctctttctagatatagaaatatttagctgtctttttccttgactacatctatagatccgtcggttccttacctttcctacgatgccatctcgccgtagaacccttttgaaggtcatcatcctcggcgatagcggggtagggaagacgtctttgatgaatcatcaatatgttaataagaagtttagcaatcagtataaggcaacaattggggctgattttttgacaaaggaagtgcagtttgaggataggcttttcaccttacagatctgggatactgctggccaggaaagattccagagcttaggtgttgctttctaccgtggtgccgattgctgtgttcttgtatatgatgtcaactcaatgaaatcatttgacaaccttaacaactggagagaagagttccttgttcaggcaagcccttcagatccagagaatttcccttttgttgttttgggaaacaaagttgacgtggatggtggaaacagtagagtggtgtccgagaaa

SEQ ID NO: 718 - DNA, 554 bp, Gossypium hirsutum
  Clone ID: GOSHI-09MAY01-C10913_3
aaaaaaggctcgagcatggtgtgcctcaaaaggaaacatcccatattttgagacctctgctaaggagggagttaatgtggaagaagctttccagtgcatagcaaagaacgccctgaagagcggtgaagaggaagaaatatacttgcctgacaccattgacgtcgccagcagcagccaaccaaggtcaactggatgtgactgttgaagcatatcgtgtgatatttttttccctgtcggtaagcattatgaatgatttggccaacccaaccgttgttatggattcacgtgggggatatactgtacattagtgtatgtgtgaggaacaaaatagtctgttaattctcctttggtgcccgtgtatttgtaacgtcttaatttgtttagttttcttgttttttagccagcagcacccaatgtatggttatttcaaaatatcaatccagggagcaactttgcttccatgggctgggtcactcgatccggctcaagagcttacccaaaatatggaatttggaaatattttattatataaaataaatttaaaaatgtacagt

SEQ ID NO: 719 - DNA, 1111 bp, Gossypium hirsutum
  Clone ID: GOSHI-09MAY01-C10913_2
caaactttccctcaattccttcacaaattacaggtcattccagcttttgcataagagagagagagagaaaaaaaaagctagaaatttcgttgtaaaacacgctagaaagtttcagccagttttcctgccagacaaacaagtccaccagtcctctcactaggtttcaatatagaaaattttttctcctttttctatcgatctgtacatccgctgattccttagtgctctttacgatgccttctcgccgtagaaccctcttgaaggtcatcatcctcggcgacagcggggtagggaagacgtctttgatgaatcaatatgtaaataagaaatttagcaatcagtataaggcgacgattggagctgattttttgacaaaggaagtgcagtttgaggataggctttttaccttacagatctgggacacagctggccaggaaagattccagagcctaggtgttgctttctatcgcggtgctgattgttgtgttcttgtatatgatgtcaactcaatgaaatcgtttgacaaccttaacaactggagagaagaatttcttattcaggcaagcccttcggatcctgagaatttcccgtttgttgttttggggaacaaaattgatgttgatggtggaaacagtagagtggtgtctgtgaaaaagcccgagcatggtgtgcctcaaaaggaaatatcccctatttcgagacattctgccaaggtaaggagttaacgtggaagaagctttccaatgcgtcgcggaggatgctctaaagagtggggaagaggaagacatatacttgcccgacaccatagatgttgggagcagcagcagccaaccaaggtcaagcggatgcgaatgttgaaagatatcatgcatgttcattattttttcctgttccgccaataagtacggttaaaatgtttcgaatgatttggtgtttcccaaccattttatgggattcatggtgttggtgtgagagaaaaaaaaggtctgttaatgcttttggtttggctggatttagttctgtaatgttctcatttgtcaacattgttttttgttctgcactgcctacgcattgtttttaaagtacattctatggtatatttcataatttc

SEQ ID NO: 720 - DNA, 1071 bp, Gossypium hirsutum
  Clone ID: GOSHI-09MAY01-C10913_1
ccctcgctttcgattttcctaccgaaatttctgtgtcagacaaacaagtccacgagcccctcagtcacacactctctctttctagatacagtgaattttcttttttcgcttctcttcatctattgatccctcgattccttagtgtttcttacgatgccgtctcgccgtagaaccctcttgaaggtcatcatcctcggcgatagcggggtaggcaagacgtctttgatgaatcaatatgtgaataagaagtttagcaatcagtataaggcaacgatcggggccgatttcttgacaaaggaagtgcagtttgaggataggcttttcaccttacagatctgggatactgctggccaggaacgattccaaagcctaggtgttgctttctaccgtggcgctgattgctgtgttcttgtatacgatgtcaactcaatgaaatcatttgacaaccttaacaactggagagaagagttccttattcaggcaagcccttcggatccagagaatttcccttttgttgttttgggaaacaaagtcgacgtggatggtggaaacagtagagtggtgtctgagaaaaaggctcgagcatggtgtgcctcgaaaggaaatatcccatattttgagacatctgccaaggagggacttaatgtggaagaagctttccaatgcatagcaaagaatgccctaaagagtggggaagaggaagaaatatacttgcctgacaccattgacgtggcgagcagcagcagccaaccaaggtcaactgggtgtgaatgttgaagtacatatcgtgcttgataatatattttttccgtcatggttgctcaataaattatgtttcgagtttcacgaatgatttcaaaccatttttatggaatcatagtggggcgtatacactcgtacattatgtattatgtgtgagaaacacaaagtggtctgcgtaatgctgtggttggatttagttccagtggggtgccctttgaaaatgtttttaagttccttcatttcgtttaacattcttatgtttgctgattcattttccttgaaaaaaaaaaaaaaaaactcgagactagt

SEQ ID NO: 721 - DNA, 616 bp, Gossypium hirsutum
  Clone ID: LIB3543-054-Q1-K6-F5
ctatcgatctgtacatccgctgattccttagtgctctttacgatgccttctcgccgtagaaccctcttgaaggtcatcatcctcggcgacagcggggtagggaagacgtctttgatgaatcagtatcctgcagcagtcgttttttactaattattgagaaaagcagagaaatgaagtgttttttttatatgtaaataagaaatttactttttacttttagatatggttttgttttttactattagttacggttttgtttgcctttacattttacttttagatatgtaaataagaaatttagcaatcagtataaggcgacgattggagctgattttttgacaaaggaagtgcagtttgaggataggctttttaccttacagatctgggacacagctggccaggaaagattccagagcctaggtgttgctttctatcgcggtgctgattgttgtgttcttgtatatgatgtcaactcaatgaaatcgtttgacaaccttaacaactggagagaagaattccttattcaggcaagcccttcggatcctgagaatttcccgtttgttgttttggggaacaaaatcgatgttgatggtggaaacgtagagtggtgtctttg

SEQ ID NO: 722 - DNA, 372 bp, Gossypium hirsutum
  Clone ID: LIB3166-055-P1-K1-C4
tcagttaaaccctagattgacatttataaatacgtcggatccttacctttcctacgagtccatctcgccgtagaacccttttgaaggtcatcatcctcggcgatagcgggttagtatgtttctagggtttccagaacggatcttttgattcaaatcataacttgttgtttgtttcgcctgcgattttctttagtttttctttttggttttcaaactaatgtttatgactgcgattgatctgcgatttgcagggtagggaagacgtctctgactaatcaacattttaataagaagtttagcaatcagtataaggcagcaattggggctgattttttgacaaaggaagtgcatgtttgaggattggcttttcac

SEQ ID NO: 723 - DNA, 555 bp, Gossypium hirsutum
  Clone ID: GOSHI-09MAY01-C10883_2
tgttcgttctcgcgctttccctcaatcaatcatttttcttaccatgaagattatagattttttcctgatctcatcacttctctccgcgggctctagggctgaatctattgcatcagctcccttcatcgacagtcctactcatcaattccttcgcgctccatcctctaacgatgcctctcagtcagagccaatgttgctacctgaagttggtgcgactgcatcaggcttgcttggttttccaccacccattacactttcagctgctggctcatctaagctgaatgaggctctcatttctaatccgtttgatagacctcgtgccgtttttatgcttgaagttagcggagttgatgatcctcttgttgttggacccaagaatgctctcttccacaaagccttgaagagtagtggtggtcttggttcaactaaagtggacattcaacttccagatgaagagcaaggatctggtatttccttggacgagcctctaagagattaccctgaagaagagatcaatgactttgcatcttggttgggtggatcatatgtccctga

SEQ ID NO: 724 - DNA, 648 bp, Gossypium hirsutum
  Clone ID: GOSHI-09MAY01-C10883_1
taaagacgacaacacagatcgctctcgcgctttcccttaatcaatcatttttcttaccatgaagattatagattttttcctgatctcgtcacttctcttctcaatctctagggctgaatctattggatcagttttcttcatcgacagtcctactcatcaattccttcgcgctccatcctctaacgatgcctctcagtcagagccaatgttgttacctgaagttggtgcgactgcatcagtcttgcttggttttccaccacccattacactttcagctgctggctcatctaagctgaatgaggttctcatttctaatccatttgatagacctcgtgccgtttttatgcttgaagttagtggagttgatgatcctcttgttgttggacccaagaatgctctcttccacaaagccttgaagagtagtgttggtcttggttcaagtaaagcggacattctgcttccagatgaggaggcggtatccacgatctctttggaccaccctctaggagactactgtgaagaagagatcaatgaattgcatcttggttgggtggatcatatgctactgattgtacaaaacccctggatggagtattgagtattccctggcaaatggtgataactgaatcttctatgtcaaaaaaggcg

SEQ ID NO: 725 - DNA, 968 bp, Gossypium hirsutum
  Clone ID: GOSHI-09MAY01-C10853_1
tttcttccagcgtccgatttctctgggtcagccagggggtgtggataccagtgctggcccgagcttgttccctttgcaccgttgcaaaactcttcacttggatattcaagattgccttctttcttggcttttgctcgcaaaacaaggtaatgtggtcttatgaaacaatacatccagggggggggggctcatgggatccacaatgtagatggagataagaactataaagcatacatgtctccagaatattttgatgcacacattacccctcttggctggcaacaggtggataatttgcgtaagcatgtccatgaatgtggccttgctaagaggattgatttagtgattacatcccctttgctaaggacattgcaaacagctgttggggtatttggtggtgatggttatacggataggatggatgtagtgccacttatggtggcaaatgcaggaaatagtggtcgtgctgcaatttcaagtctaaactgcccaccgatcgttgcagtagaactttgtcgagaacatttgggagtccatccttgcgataagaggagaaatatcagtgactatcaattcctttttcctgcggttgatttctcactgatagaaagtgaccaggatacatggtggaaggctgatgttagggagacaaaagaggaagttgcagccagggggcagaagttcctgaactggttgtggacacggaaagagaaggagatagccattgttacccatagtgggttcttgtttcatacattaagtgcacttggaaatgattgtcatccattggtgaagaaagagatctgcaaacactttgcaaattgcgagcttcgttccatggtcattgttgatagaagtatgataggatttgacccttcgatgaccaattaccctggaaagactccatcaggattggatcttccaagtgatgttgtcgatgaagaagctgactaaaggacgtgatacaa

SEQ ID NO: 726 - DNA, 411 bp, Gossypium hirsutum
  Clone ID: LIB3148-030-Q1-K1-C8
tcggatttggggacattctctttcctggtttgcttattacatttacatacagatttgatagagaaagcaaaaagagtatgggcagaagttcctgaactggttgtggacacggaaagagaaggagatagccattgttacccatagtgggttcttgtttcatacattaagtgcacttggaaatgattgtcatccattggtgaagaaagagatctgcaaacactttgcaaattgcgagcttcgttccatggtcattgttgatagaagtatgataggatttgacccttcgatgaccaattaccctggaaagactccatcaggattggatctcccaagtgatgttgtcgatgagaaggctgactaaaggacgtgatacaaattgtcctctgagcattatgtttcatgcttgtgatg

SEQ ID NO: 727 - DNA, 287 bp, Gossypium hirsutum
  Clone ID: LIB3166-031-P1-K1-B4
cttcatcatccctttcctctattattgtttgtaatatggataccagtgctggcccgagcgtgttccctttgcaccgttgcaaaactttttacttggtgaggcatgctcaggggatccacattgtatatggagatatgaactattaatcattcatgtttccataatattttgatgctcacattacccctcttggctgacatcaggtggataatttgcgtaagcatgtccatgaatgtggccttgctaagaggattgattaagtgattacataccttttgctaaggaca

SEQ ID NO: 728 - DNA, 1181 bp, Gossypium hirsutum
  Clone ID: GOSHI-09MAY01-C10873_1
ccttccggccatttttgttgttccaggcaaatttttaggaagggtttttggtcccctgaggaggatgaaaagcttttaaggcttattacaaagtatggccatggttgctggagctccatccctaaacaagctgggttacagaggtgtgggaagagttgcaggttgaggtggattaattatttaaggcctgaattaaagagaggcacattgtcacatgaacgaagaaaatctcataattgagcgtcttgctcgcttggcgattcggtggtctcaaattgctgcacgattaccaggaagaaccgacagtgaaatcaagaacctatggaactcttgtttgaaaaagatgcttaaacagagaggcatcgaccctgtcactcacaagccactatccgaggtcgaaaatggcgaaggaaatggaagcaacaagccatctttggtgggtcatcatccaattcaccaatatacatcgccgcccccaccaccaccaaagctctcctctaactggttcaaccctgaattttcaccacccatgaccgcctcttacggacccttatactatggaaccaccaccggtggctcagccaataacaccacttggggattggttcaaacacaaactgaagaagaagaagaagaagaagaagaagaaacctggactgagttgcttaatagccctttattaatggcggctgctttacaaaatcaaaccccacaatcttattacaatatcgagatcaaatcagagccttgttacttaactaatagttcatcatcatcatcatcatcaaacgatatgtggtggcctcagacccaacaacagcagttaccactacgacatgaacctttacgaatccagacatatgtgggtaagatatgcaaacactcacagcagcagctttttggacataattaaggggttgtgtctggtaacccaatttttttttttaaaatttttttgccttccggtgttcatggtataatggggtcgtgagtacaaaaaaaaaagtgtgatccaagggttcggtttcctttttggtaccgatttgttgaaccaaaaaacaaccttctggttggtttggttaatttaaaccccttttgggttttcaagttttccaaaattttgggtgggttggtgttaaaaaagagaagaaggaaaagattttcttggggggccgggccaa

SEQ ID NO: 729 - DNA, 478 bp, Gossypium hirsutum
  unsure (1)..(478): unsure at all n locations
  Clone ID: LIB3493-030-P1-M1-D2
gttttcaattaggtggtctcaaattgctgggggttaccaggaagaaccgacaatgaaatcaagaacctatggaactcctgtttgaaaaagaagcttaaacagaaaggcatcgaccctgtcactcacaagccactctccgaggtcgaaaatggcgaaggaagtggaagcaacaagccatctttggtgggtcatcatccaattcatcaatatacatngnncgccccaccaccaccacagcttttctctaactggttcaaccctgaaatttccaccgccatgaccgcctcttatggacccctatactatggaacccacacggtggctcagccaataactcaactgggggatgttcaaacacaactgagaagagaggaagagaagagaagaaccaatgactgagttctaataacctttatatgcggctgttacaaatcaaccacatctatacattcagacaataagctgtctacgatgtata

SEQ ID NO: 730 - DNA, 470 bp, Gossypium hirsutum
  Clone ID: GOSHI-09MAY01-C10863_1
cccacgcgtccgcccacgcgtccgggcaacttgttatgatgattgtaaggtctcgagattcgagtgagagcagcaagagatcactttcagcattcgttaaggataagaggggctgttacaagagaaagaggtttgctcaaacaaagatagtggtgtctgataaaatagaagatgggcatgcatggagaaaatatggacaaaaaaatatcttacattctaaacatccaaggagttacttcaggtgcagtcacaagcatgatcaaggctgtagtgctatcaaacaagttcaaagaatggaagatgatgcccaaatgtaccacatcacatacattggtacccacacttgcagagaccagtactcatccatggctacaccacgaatcgacagtccgagtccgatattaaaactcgaatccgaggaacaagcgacgacaccaagcaatgttacggatttggattcgatgaccatg

SEQ ID NO: 731 - DNA, 501 bp, Gossypium hirsutum
  Clone ID: GOSHI-09MAY01-C10803_6
tccacgcgtccggtttcatttgcttaattagtttcaaaatctctccgccaaaatgggttatttcaatggcattgctttagcatgcttgatggctttgtcgctttcaagcattgatgttggcctagcagctcgtcaccttcagcagatgtcaccattgccaacattgcctacaactacactcccacctttgccatctatccctaatctcccgcagccaacaatgcctaggcctggggcgcttccaccacttcctaccatgcctgctttgccctctttgcctgctgtaccaacggccacactgcctcctctgccaagcatgccctcaatcccaacaatcccaactgctattccctctattccattcctctctccgccaccttctcctgctgctactccttgaaatacccccttcttcttccgtctattgacagacaaaatctggctgcatatatactggatttgttttgatgtgtttttagtcgtctttgtctctattgagtt

SEQ ID NO: 732 - DNA, 517 bp, Gossypium hirsutum
  Clone ID: GOSHI-09MAY01-C10803_4
ttcacgcgtccgaaaaagacttcggttcatctgcttaacagaaatggactcttccaatagctttgctttggcattcttcgtggctgtgacgtcttccggccgcccccgcggccgagcaggtcgccaccttctgcaactgcctccgatgccaacattgcctacaaccacactcccaccatttcccattctatcccctaatctcccacagccatccataccatctttcccaaggcccggggcactttctccatttcctaccatgcctgggttgcccacactgccaagtgtaccaagggccacactgcctcctctgccaggcataccctcattccccacaatccaacctacaattccctctattcctttcctttctccaccaccttctccttgtaccccttaaaaatccctttcggcttatgggacccagtccagagtcgggacatgctacctagtgttctcatctcattcagggttgaaagtggtagttacagactccagtttttaatcagcatatatt

SEQ ID NO: 733 - DNA, 491 bp, Gossypium hirsutum
  Clone ID: GOSHI-09MAY01-C10803_3
tttccacgcgtccgcccacgcgtccggctttctttcgtctgcttaattggactcactctctcctgataaagggcttctttcaatggctttgcgggggcatgcgtgatggctttgtcgtttgcaagcattgatgttggcctagctgctcgtcaccttctgcagctgcctcaattgcctccaatgccaactttgcctacaaccacactccccccactgccatctatccctaatctcccgcagccatccataccggcattgccaaggcctggggcgcttcctccacttcctaccatgcctgcgttgcccactttgcctgctgtaccaacggccacactgcctcctctgccaagcatgcccacaatcccaactgcaatcccctctattcctttcctttctccaccaccttctccttctacctcttgaaatacctttttgtttatctgctggatctggattggtttaatgtgattcagtcgtctcttgatttgagt

SEQ ID NO: 734 - DNA, 637 bp, Gossypium hirsutum
  Clone ID: GOSHI-09MAY01-C10803_2
tctttcacgcgtcggcagataaagaacttcgtttcatctgcttcatttgtttcgaaatctttgaacaaaaatggcctctttcaattgctttgctttagcattcttgattgctttgtcatttgcaagcattgatgttggggtagcagctcgtcaccttctgcagcagcctcaaacgcaaagtttaccatctttccctaatctcccaacgccatcccgaccatcattcccatggcctggggcgcttcctccacttcctaccacattcccaacaggactgccccctctgccaagcattccctcagtccccacaatcccaactgcaattccccctattcctttctcttttccaccattgccatctttccctaatctcccaaaccctggggcgcttcctccacttcctaccacattgccaagaggactgccgcctctgccaagcattccctcaatcccaactgcagttccctctattcctttcttttctccaccaccttctcgttctactccttgaaataccccctttttttctatctgctgcatactggatctggtttaataaggtttttagtcgtctttgtgtctttattatgagtattgattttgcccacttatatttgtttggttaaaatgggcgttc

SEQ ID NO: 735 - DNA, 560 bp, Gossypium hirsutum
  Clone ID: GOSHI-09MAY01-C10803_1
gctttttactttcgaaactctcacaaaaaggcctctttcaattgctttgctttagcattcttgatggctttgtcatttgcaagcattcatgttggggtagcagctcgtcaccttctgcagcagcctcaaacgccaagtttgttaaaaaaaactttcccaccattgccatcattccctaaaccatcattcccaaagccatccataccatcattcccaaggcgtggggtgcttcctccacttccttccagatttccaagtggaccaaaggccatactgccccctttgccaagcattccctcactcccccaaatccgaactacaattccctctattcatttcttttctccaccactttctcgttctactccttgaagtacccctttttttttaatctgcggcatactggatctggtttaataaggtttttagccccctttgtgtctttattatgagtattgatttcgcccacttatatttgtttgtataaatgggagttctccaattcccattatttggtgtactttgatacgttgttgcttattatatacggggtatttata

SEQ ID NO: 736 - DNA, 536 bp, Gossypium hirsutum
  Clone ID: uC-gsflnu33B056c12b1
tattagtttcaaaatctctggacaaaatgggttatttcaattgctttgctttgggattcttcgtggctctgtcgcttgcaagcattgatgttggggttgcagctcgtcaccttcagcaactgcctccaattccaacattgcctacaaccacactcccaccattcccatctatccctaatctcccacagccatccataccatctttcccaaggcctggggcgcttcctccacttcctgccatgcctgctttgcccacattgcctagtgtaccaagggccacattgccccctctaccaagcatgccttcgattcccacaatcccaactacaattccctctattccattcttctctccaccaccttctcctagtccttaaaaatccctttcgctaggtgatgggtggctattccaatccagagtcttatttttttggccaccacttatattgcattgtataaatgggagtttccccaattcccatgattttctgtactttgatacttattttgcttattattggattatatacttatta

SEQ ID NO: 737 - DNA, 486 bp, Gossypium hirsutum
  Clone ID: uC-gsronu33B109f10b1
ctctgtttcatctgcgtaaattgttccaaaaggggtcaacaaaaatgggttatttgaattgcattgctttagcattcttgatggctttgtcgtttccaagcattaaggttggccaagctactcgtcaccttcagcagctgcctccaatgccaactttgcctacagcaacactcccaccatttccatctatccctaatatcccacagccaaccataccaacaatgccaaggcctggggcgcttccaccacttcctaccatgcctgctttgccctcattgccaagtgtaccaagggccacactgccacctctgccgagcatgccctcaatcccaactgctattccctctattcctttcctctctccaccaccttgtgcttctccttctactccttgaatacccctttgttttttatctgctgcataatggatttggtttaatatgtttctagtcgaccttgtctgttgattttgaggatttgttttta

SEQ ID NO: 738 - DNA, 467 bp, Gossypium hirsutum
  Clone ID: uC-gsflnu33B074h10b1
cgcgtccgcaaaacaagagctttctttcgtctgcttaattggactcacatctctagaaaaatggcatctttcaattgctttgctttagcattcgtgatggctttgtcatttgcaagcactgatgttggggtagcagctcgtcaccttctgcagctgcctcaattgcctccaatgccaactttgcctacaaccacactccccccacttccatctatccctaatctcccacagccatccataccagcattgccaaggcctggggcgcttcctccacttcctatcatgccagggttgcccacattgccaagtgtaccaagggccacactgcctcctctgccaagcatgccctcaatcccaactgcaatcccctctattcctttcctttctccaccaccttctccttctactccttgaaataccctttggtttattgaaataccccctttggtttatctgctgcatactgg

SEQ ID NO: 739 - DNA, 516 bp, Gossypium hirsutum
  Clone ID: GOSHI-09MAY01-C10823_2
ggtggaggtcgttgtaagggattgtagtgagtggtgccttgcttgtttaaatagagcttggctactcatcttctttaacagcttatagttgttcccttcatattgtagagagcggaggcttctttgcttgccacctctcttttatctcttcaaacacttctaaaatcatggatgagaagatgagtttgactgttgctgatgcagtggactacaagggtcaccctgctgacaagtctagaactggtggctgggtacctgctgctctcagcttaggcattgaaatatgtgagaggctgtcaacaatgggaatagcagtgaaccttgtgacttacctgggtggaaccatgcaccttccaagtgctacttctgcaaatgttgtgacagacttcatggggacatcatttctactatgtttactgggcggcttcctagccgattcatacttgggcagatacctaacgatcgcaatattcgccatggttcagatgcttggaacttgcctgttagcagtatcga

SEQ ID NO: 740 - DNA, 529 bp, Gossypium hirsutum
  Clone ID: GOSHI-09MAY01-C10823_1
gagagacgaggcttgtttgcttggcacctttgttatatctctaaaaacacttgtacaagggtgggggtacaatatgaacgcggctgtggctgatgcagcggactacaatggacaccctgctaacaagtctagaactggtggctgggtacctgctgctctcaactaatgaattgaaatatgccacgcgcccgcaacaatgggaatagcagtgaaccttgtgacttacttgggtggagccatgcaccttccaagcgctacttctgcaaatgttgtgacagacttcatggggacatcatttctactatgtttactgggcggctccctagccgattcatacttgggcagataccgaacgatcgctatattctccatggttcagatgcttgggacttgcctgctagcagtatctacgaaactcccacaactacggccaccttcgtgcaagtataccgacgtaacacaatgcgaacaagctaacaacttttaaatgggaattctttatctttcaatatatctaatagcattaggg

SEQ ID NO: 741 - DNA, 365 bp, Gossypium hirsutum
  Clone ID: LIB3166-027-P1-K1-H6
tccacgcgtccgtccacgcgtccgtttgattcatacctcaatgcatataaagaagtatgccgtgccctttgtttgattcctattttgcattatgtaattgcgtttatggtgatttgggtagttttcctttacaatttcctggaatttcatttcttccaagactttttcagtggattccgaggtgctcccgttgctttgacctttcaccccacttcccatatctaccatggcgtcgtttccaagtgcaagatccttcatggcaggtatttagcaacaccgtggttatcaagtcctcattttcagactacttttctcaattttttcgggaacccttctgctttcagcttccggagacaactttttta

SEQ ID NO: 742 - DNA, 270 bp, Gossypium hirsutum
  unsure (1)..(270): unsure at all n locations
  Clone ID: LIB3166-027-P1-K1-H12
tccactcttccgaccacacctccgtttgaatcatacctcaatgcatataaagaaggatgccgtgccctttgtttgaatcctatannatataaataaatagataatatggcaagtgggtatgttttcctatacaagttcctggaatttcatttcttccaagactttttcagtggattccgaggtgctcccgttgctttgacctttcaccccacttgccatatctaccatgtgcgtcttaaaaagagtaagactctttgattaattgttttt

SEQ ID NO: 743 - DNA, 690 bp, Gossypium hirsutum
  Clone ID: GOSHI-09MAY01-C10553_2
ccccgcccccgccccggtgcacgagagatggagtggagggcttgttatttggatgtgatattggtgccattaagcatgctcatccccattgcttatcattgctggttatggcataaggttaggactcagcctctggctaccatcattggaatcaattccaccggacgacgcttctgggtctctgccatcatcaaggacaacgagaaaaagaacatcctggcagtccaaacgcttcgaaacaccataatgggatcgaccctaatggccacaacatccatcctgctgtgtgctgggttggcagccgtcatcagcagcacttacaccgtcaaaaagccactcaatgactctatattcggagctcacggggagttcatggtggctctcaagtacgtcacaatcctatgtatcttcctcttctcgttttcgtgccacaccttatctatcaggttcataaaccaagtcaacatcctcatcaacactccccaagaccccacctccattgtcacccctcactacctgtccgacttgctcgaaaaagggttcctcttgaacactgtgggcaacaggctcttctacgctgcgcttcctctcctgctatggatctttggccctgtgctcgtctttgttggctccatcaccatcgtcactttgctttacaaccttgacttcgtgtttgggtttaagagaaac

SEQ ID NO: 744 - DNA, 779 bp, Gossypium hirsutum
  Clone ID: GOSHI-09MAY01-C10553_1
cgtccgccccgcgtccggccactcatggcgtggtgtggggggctccggggagttctgggggttctcaagtacgtcacaatcctatagtatcgtcctcttctcgttttcgtgccacaccttatctatcaggttcataaaccaagtcaacatcctcatcaacactccccaggaccccacctgcattggtacccctcactacctgtccgacttgctcgaaaaaggttcctcttgaacactgtgggcaacaggctcttctacgctgcgcttcctctcctgctatggatctttggccctgtgctcggctttgttggctccatcaccatcgtcactttgctttacaaccttgacttcgtgtttgggtttaggagaaacaagcaaattgatgttggagactgtgaatcagggtgatcctactcgtacatgtaggctttaatgccctagcaaatgccatgcatgcggtactagattccttggtttgcttctctaattataagtatacgtgtgaagtgaagcaattcccgttgcttcactaataattaagtatgaaccccccccccccaatttgtaatgcaaatgatgaagtatatagctagtctctagctagcaactgagagcattcattcaaccttgctgtgcatgcctacctgctagtaaactcctgcaaatataaaaccaacttgatgaagctgttaaatagaatcttacaggctaaaataacatgcatttgtattgatggagttttaccaaaaaaaaaaaaaaaaaaaaaaaagggcggccgc

SEQ ID NO: 745 - DNA, 465 bp, Gossypium hirsutum
  Clone ID: uC-gsronu33B146g03b1
cttagtcatagatataattatgatccatggctaaaaattaatatacaccaaattcttatacccagcttcgcctgggatttaacaataaattataaataaatttattttgtaattatataaaaatttcgttgtttaaatatttatattatatgttaatgaatttataattaaattagactaatcataaaaaattatgtaaaataagagttgcattaaaatacaataaaatgaaggaaaaagaataaacatgataaacacaacgagaaaaagaacatcctggcagtccaaacgcttcgaaacaccttatgggatcgaccctaatggccacaacatccatcctgctatgtgctgggttggcagccgtcatcagcagcacttacacagtcaaaaagccactcaatgactctatattcggagctcaacgggagttcatggtggctctcaagtacgtcacaatcctatgta

SEQ ID NO: 746 - DNA, 315 bp, Gossypium hirsutum
  Clone ID: uC-gsronu33B046d09b1
ataggtgaagctggtagcgcctgcacggtaccggactcggaagtgttccggctcagacccacgcgtatctgattcatgtggatggagatgaggctctatattaatgaggaattttgaccttgaactacccaattgggcacgcgattgatgacaattgtagatgagcttgtagctgactagctgtgagccattatacaacctggctgtgcttgcctacctgctagtaaactcctgcaaatataaaaccaacttgaagctgataaataaaatcttacaggctaaaaacacatgcatttgtgtaaaaaaaataacccg

SEQ ID NO: 747 - DNA, 739 bp, Gossypium hirsutum
  Clone ID: GOSHI-09MAY01-C10563_1
tcttccacgcgtccggccaaagatcttggggcggctgtataagcagagaacacgaaagatggcaatgaaaatcttcagcttggcagcacttctcgttgggggtttggcttcatccgtgttgcagagcacatatgctgcaacttacactgtgggtgacgccaccggttggacagtccctaaccctaataatcctgaattctatgatgactggacagacaataagaacttcgtgggcggggatgttcttgcgtttagttttacaaccggacgacatgatgtcgccgaggtgaatgaaactgcttacgacaactgcatcactaccaatcccatcgttcgatatactacaggaccggcgaatgttacccttaacaggaccggtgaataccacttcatttgcactttcgccggtcactgtggcttcggccaaaagctcagcatcgatgtcagaactggccccagcactgctcccacacctggttcaacccccaatccttccagctcagcttcatcccttgttgccaccatatctcttgttttcatgtccattgccttagctttgttctgctaattttgcctgttcatttttatgtgagattcatatgtcaggtcagtataattcacactttgtggcgtatacccagacacagtcttcattcgttttggtattatcattatagtttatcatatggagtgagatttttgcatgtttgaataaaaaagcttgattcatttgctttcc

SEQ ID NO: 748 - DNA, 384 bp, Gossypium hirsutum
  Clone ID: GOSHI-09MAY01-C10513_1
gttaaaaggagccgaaaactaatttagtgggtcaatggattcctctaaactcggggaaaattcgactatggtgcacgaaacgcatcggcaaggaaaccctactgacccaaacgccgatcaaaacgctgctttgatcaattctttcattgaaatcacttcttcttctaaagaagaagcccttttctttttggaatctcatcagtgggacttagacgccgccgtttcgactttccttgtcagcaattctaccgccgcactacatccaccaccgtccgctcccactgtttctggcgttggtggtgttaacaactctgcttctcctttgcagtccgattcccctgattactctccctctcaatcgccttctcggtctcgttctccttc

SEQ ID NO: 749 - DNA, 766 bp, Gossypium hirsutum
  Clone ID: GOSHI-09MAY01-C10533_1
atataataaaacgtttttttgttcattcgccctttcgctgttgtatttggtttttgtttaatagcttaactgactctctgaaatatcgcggatctttggtgttctacacgcattttcgcttttaattatagcctgattttactcggaagatgaggctggaggaagagttctctcattgcgacaactacgacgaagaggaggaacccaaaacgatgtcgcaatgttccatcggagctttacaacaacaacagcagcagcaaaagtttgtcgttgtcggttatgcccttacctctaaaaaaatcaagagctttttacaaccaaagttcgaaggtttagccaggaataaggggatattatttgttgcaattgatcaaaatagacctctctcagtcccggggccccttgatattgtattgcacaagttgacaggaaaagaatggcgccagattcttgaggattatagacaaacacatcctgaagtcacagttctagatcctcctgatgctatacaacatttacacaatcgccaatcgatgctacaatgtgttgcagacatgaatttatctacctcctatggaagagttggtgttcccaggcaattagtcattaaaaaggatgcatcttctattgctgatgctgtagataaagctgggttgatactaccccttgttgcaaaaccattggttgctgacggaagtgcaaagtcacatgaattgtcacttgcttatgatcagtactccctccagaaactagaacctccacttgt

SEQ ID NO: 750 - DNA, 542 bp, Gossypium hirsutum
  Clone ID: GOSHI-09MAY01-C10523_1
attgttctccaaccatattttcaggtcaaacttgtgggttccctaaaacctctttggggttcttcttcttcttcttcttcttcttcttatcctcttttcaatctcaattattaagttcaactacgttttaattttcggtccttgaatcattgaatgtcacaaattaaaaaaagaaaagaaaaaaaagacaatggcagacactggagacactgccagctccagtggacctggtgattcgcacggagccctcatcggaagcaaccctgctcgggcaatacgacctcgggaagttgctgggatgtggggctttcgcaaaggtttaccacgcgcgcgacctcgactccgggcagagcgtgcccatcaaggccgtcagcaagaagaaggctttaaaaggcggcttcatggcacctgtctagagggagatcgctatcacgcgccgggtgcgccaccctaacatcgtcaagctcatcgaggttttggctaccaagactaaggcttatttcgtcatggaattcgccaaaggcggagaattgttcacgagg

SEQ ID NO: 751 - DNA, 334 bp, Gossypium hirsutum
  Clone ID: LIB3166-027-P1-K1-A2
ccgggacacggaattggccgggtccgaacccactgccgtccagacacctgcgatgacacatagatccgctacattcgaactggtgatttgccggagctgggatcgtaagcaaccctgttcgggaaatacaagcttgggaagttgctgggatgtggggctttcgcaaaggtttaccacgcgcgcgacgtcgactccgggcagagcgtggccatcaaggccgtcagcaagaagaaggttttaaaaggcgggttcatggcacatgttaagagggagatcgctatcatgcgccggttgcgccaccctaacatcgtcaagctcatcgaggttttggcta

SEQ ID NO: 752 - DNA, 383 bp, Gossypium hirsutum
  Clone ID: GOSHI-09MAY01-C10493_1
ctttttgcatcttcgaaatatcctgaaagattttaaagatttcccttctctttttctttggatcaactccattcttcagatcaccttacattgactgatcggagaatctgtgttcgtttccgaatttgcggcttttataatttggggaagaagagaattgcatgaatataaagttgtggtgtttgtactagatgaagggagcgcaggcgtggcgactaggcagcatgggtgatatgcaaatcttgcctgggtctcgccaccgccctcctttgaagaggccgatatggattatttctctggttcaattagttggccttttcctagtttgtgcttatatctattcaccacaaggcagtgctgcttgttatgtattttcttcaaga

SEQ ID NO: 753 - DNA, 1433 bp, Gossypium hirsutum
  Clone ID: GOSHI-09MAY01-C10443_1
tgttttaataacatcggggctaattaaaatattgtaggaagtagtcagttttacttgcatcttcatcgtgttaaatttgataattatattgggtaaactgtctctaaaatgaagttaaaaagttgcataactgtgaaatttgcaatatgatccattaatttttaacccatggaatattagattattagagcaatcatcgtttgatttagctgttatatacatgacaattaaaagttaatcctgtattaacccgcgcctccgggcagattttaattaatgttagttttaataaatattcattggatattattaaagaattttaaaaaaaaatattataagatattattaatatatagataaaggtattctaagaaaatttaatttactgataaaattttattcgaatttaatatgaacttttaagagtcgatttgcatcctaacttgacattataataccaaatttcatccacacggtttattgaattgcattttagtctttagtcttttatccttgcaaaagtttgaatgctcttgaattgcctatgcttccttttcgtttattatttacattatcatgttactttatttgaggcgaaatgcgctaattttgctattacttttatggaactgtaatacttaggagaatgtcatatgtaggttgatgcagcatatgtactttgcttgtatattgcatttggtagttgtttaggcccttgcacgggcttgtgttttaattggcttgaaggttgtgagtactatctgtgggtcgagtgaagatgtcacagcagtgaggttaaagatgttggaggtattttttggtttataccatatctattctctttgattaactctggaaatcaagatatgtgcgttgaagtgttcgtctctagttcggtcgacattcttgatctatgttggaaggtgtatgaagccctcgggagtcggaactgagatttggaggcagtgaatatagcaatacatggcgttgcaggtcaattctctggagatatttcaatcagaatcgaattgttgaagcattgaagtcgttatttgaacgtctcttggttttttatatgatgcagtgctatagtgagattagtttggttgagctcttgaacaaataccataagaggtacatgtagattggccgtgtaaaccagttccattacatagtgaagatttttaaagtggactaaggtcccgtggttttttcccttcaaggggttttccacgtaaattttggtgtcccctttttatgttaatgttgcgcacttatgtcaatatcttttgcagttttgataatgttactatagcaggtatgataactgtgagctgtttaatttatcagtaaattactctgtttattataaaaaattactaaaggtaattattacaaaaaaaaaaaaaaaaaaaaaagatacttatttataa

SEQ ID NO: 754 - DNA, 524 bp, Gossypium hirsutum
  unsure (1)..(524): unsure at all n locations
  Clone ID: LIB3828-025-Q6-N6-G3
atcaaaactgcaaaagaattgacataagtgcgcaacataaacagaaaaggggacaccaaaatttacgtgggaaaaccccttgggggggaaaaaaccacgggnacctttagtccactttaaaaatcttcactatgggggggggactggtttacacggccaatctacatgtacctcttgtggtattttgatcaagagctcttcaatactaatctcactacagcactgcaacgccatggattactatattcaccgtctccgaagctcggttccaactcccaagggattcaaacatagatcacgaatgtcaaccgaactagaggcgaacacttcaacgcacatatcttgatttccagagataatcaaagagaatagatatggcataaaccaaaaaatacctccaacatcattaacctcactgccgtgtcatcttcactggacccacagatagtactcacaaccttggccttgagagtcgctagtggtatagcttggagttcatgagcttattccgacgttggtgatga

SEQ ID NO: 755 - DNA, 540 bp, Gossypium hirsutum
  Clone ID: GOSHI-09MAY01-C10473_1
ctttttcttacgacaccgcaagataatcaaagccccttctttatcttctcttaccccaaatttcccttacaattagggttcttctctcgcgacaacttactcaaaaactgaaaacaatttttctgggatcttgtctctccagctttttctttttcccttgtttttctcttttgggtcaatttggaatttagaaatctaaaaaaaattcattgggttttttttttggaataatagaaatgcagtgtttgaaaccaggaccggagttaaccaccaccaatgtcgttacgatcaacgtcggcggcgaaaattttcagacgaccaaacagacgttaacacaagcgggaccgaattctctcctttctcaattggctgaaacgacgtcggatcgttttgttgaccgggaccctgtttacttctcgctcctcctttcactcctccgtacaggtgctcttccgtccaaagtcaaagactttgaccttagggatctcatcgaagagtcgagatactacggcattgagtcccttttgacgaactctttga

SEQ ID NO: 756 - DNA, 589 bp, Gossypium hirsutum
  Clone ID: GOSHI-09MAY01-C10463_1
gtttctgcacaattcctttattgagttatgctctcaagagttcaaaactcatctaggaaggcaatagtttgtgttgaacagctttctaagatattgcaaacaggtctttttaactaacaagaaggaggctgtcgggcggatatgcagtcggcaatatacaaactgcatcaatctttgggcttcatttatatcagcaaacgtgaaagattatgatcttcagccattgttatacatgatcattcagattatcaatggtgtagctgtcttgtttcctggaccaagatatttacctctaagaattaaatgcattcagtggttgaataacctttctagtgcaagtggggttttcattcctgttgcatcatttgctatggatattttggaatataaaactgggaaggacaatgggaaacctggaaaagatttcaacttctcttccactataaagttgccaaaacattggctaaaatctcgtaagtttcaggacaagtgtgtttcatctgtcattgaattacttgcaacgcactttgctcaatggagctgccacataactttccctgagctggctactatacccctgatctgcctt

SEQ ID NO: 757 - DNA, 706 bp, Gossypium hirsutum
  Clone ID: GOSHI-09MAY01-C10403_1
ccccgcgtccggacagcccacatgggcggggagacttctcttaaggctcttgtcaaatcttagctcaatattatcagcttattcggctcggttttgagggatacaagagtatcatgggaaaactgcattgggaatgcattaatcctgaaggaagggatagaaaaaacgggacgatgcgaggggggctccaaagacgtgggcgttcccctcgttgcttttgctctaaaagacagcactaaatacacggtgtttcacatatccgatgccttgaggaagttcgggtggatcgtccctgcatacacgatgcctgcagatgccgaacacatcgcagtcctgcgcgtggttgttagggaagacttcagttgtagcttggccgagaggcttatctcgcacattcaagaggtgttaaaggaactcgactcacttccgagtcaaattgtgaaagattctcacgttgttgccgttgcaaaagaagtggtagaggagaacaaagatggggaggcagctaaaatgggtgacagaaagattcaagaaaaggttactaagcaatggaggcattatgtgaaaactaagaagacgggtgtgtgttaaaaggctcctacaaaatctatgttctatcatatactgtgtggagctatatttccaaactgcagcataattgacctattacttggtcataatctcgttgtgtcatgcatttgtagca

SEQ ID NO: 758 - DNA, 608 bp, Gossypium hirsutum
  Clone ID: GOSHI-09MAY01-C10433_1
cggacgcgtgggcgcttcccaaaaattcaattagatcgtgaaattccagcgaagggggaggagacacacacacacacacacacacagagatcttcaaatttcatcaatggatcattcaaaggttcaagagatcgtggagaagcaggtattgaccgtggcgaaggccttcgaggaccagatcgacgaagagattgcggctttagatcgactcgaccatgacgatctggaagctattagagagcggaggttgcagcagatgaagaagatggcggagaagcgaagtcgttggatcggtttaggccatggtgaatactctgagattccagctgagaaagacttcttttccattgttaaagctagtgaacgagtcgtttgtcacttctatcgcgaaaattggccttgcaaggtgatggacaagcacttgagtgcactggcaaagcagcatatagagacacgtttcgtgaaaattcaagctgagaaaagcccgttcttggctgagaggctcaagattggtgttcttcctacacttgcccttatcaaaaaagccaaaatcgatgatattttgggtggtgtctgaaaacttgggggtacactacaattttttcttt

SEQ ID NO: 759 - DNA, 624 bp, Gossypium hirsutum
  Clone ID: GOSHI-09MAY01-C10783_1
gtggctctctgtttgcaggtgtcaggaggccgtgattggcgagctgagcggcggtggctaggtttttttgctgaaaattttgttctttgtgggctagggttggttagggtattgggctaaaaattgggctggcaaatttgggcttctacacctattactatgctccatttccgtcagacatggactttctcaagtgagtgtaaagttccagaagggtcagccttttaagccctttgatcaactaatgagtgtattgccactgccagaagtgctcatgcacttctgaaactgtatgcaaaacttttcaccgatgtcgattcccaaatcattgacttctatcctacagatttcgaaatcgacatggatggaaagcgccacgcatggcagggcatatgcaagcttccctttatcgatgaggaacggcttctatcagagacactaagacttgagaaggaattgatgaagaaacagaaaggaatgcagagaaaactgacaaactctctgtaccaagacatttaggatcaaagattttgagacttttgcctgataatcaaaagttgcatacagaagccgaactgatcaggggtgctgttagaggacatgtatcatcatcacttatcatgt

SEQ ID NO: 760 - DNA, 390 bp, Gossypium hirsutum
  Clone ID: LIB3166-030-P1-K1-C2
cagacatggactttctcaagtgagtgtaaagttccagaagggtcagccttttaggccctttgatcaactaatgagtgtattgccactgccagaagtgctcatgcacttctgaaactgtatgcaaaacttttcaccgatgtcgattcccaaatcattgacttctatcctacagatttcgaaatcgacatggatggaaagcgccacgcatggcagggcatatgcaagcttccctttatcgatgaggaacggcttctatcagagacactaagacttgagaaggaattgatgacatttaagatcaaagattttgagacttttgcctgataatcaaaagttgcatacagaagccgaactgatcaggggtgctgttagaggacatgtatcatcatc

SEQ ID NO: 761 - DNA, 763 bp, Gossypium hirsutum
  Clone ID: GOSHI-09MAY01-C10703_4
atcagcttatgccataggagttgctggctggggaactggtcttaagcttggaagtgaatgctgtggtatcacatattcgggtcatagatacattgggattgcccttttcgtcctcgctactgtccagatctttgctttgtttttaaggcctaaaaaggatcacaagctccgtttctactggaacatttaccaccacagttttggatacgcgatacttgtcctcggcatcatcaatgtgttcaagggcttccctcgcgtgaagcctgagcataagtggaaatcggcatatatgattgtgatcattgcgatgggcgggatttcgttgctattggaagctattacatggattgtagtgttgaagagaaagtccaggaaatccacaaaaccctatgatggatacaacaatgctcaatctaatcaacagcctcttgccatgtgatcaaccgattccttgtagtccaacctggttttgtagcaaccgtcgccctctctagactcgagaccctgcatgaggtttaccgatcccggaccagttatttatttttgtctattgtatgatctcttgattccatatattgctatcatcactagtatttgtattgtatgtacatatcgtgtgtatatatatactgccgagtatatcagctatctttttttcggatagaatataggaagggtgaaactttataagtttgaatatgtattgaaaatgattgtgaaacagattgtattcataattcttttttcttaaaaaaaaaaaaga

SEQ ID NO: 762 - DNA, 1042 bp, Gossypium hirsutum
  Clone ID: GOSHI-09MAY01-C10703_3
cgtctgaaaaccgggcgacccacgcgtccgcccacgcgtcgggtcccagcgtcggaactgatggtaggttggacaaacatgccttcgcgctgtaatttgcaatctaaaggaaccttgatttgaaaagggcagagtgcactagttctggagagacgacggctcagagaaaaatttatgggatttgaatgctggagttggggaatattgttccacttgagccatgattgcacgctacataagaaccttgaatctgcagatccagcctggttatctccacgccttctgtcaagtatcagcttatgccataggagttgctggctggggaactggtctgaagctcggaaggggatccttaggcatcacatgggccactcacagaaatattggaattgcccttttcgttcttgctactgtgcagatttttgccttgtttttaaggcccaagaaagatcacaagtatagattctactggaacgtttaccaccacagctttggatacgccatccttgtccttggcatcttcaatgtattcaagggtatcaatatcttgaaacctgaagacaaatggaaaacagcttatatgattgtgattattgccttgggtggtatttcattgctgtttgaagccattacttgggttgtcgttttgaagagaaaatctagaaagtccaccaaaccttgcgacggatacaacaatggccaaagttgatggcatcagcaagcctccaattgcagattttgtaacacccttgtgctttctcatccttgttgggatgttctatttcctattttcagtgtcttgtataattgcttggttccaaatgttggttttttttagcactcgatccttagtacatgttatatagttgtagtataccactgaatatttcagccatcattttgtgtgtttctagtattcgtacagacaccaatacgcaccatgttcacctaaccaaattacaagtcaccaaaccccattgttattggaattggtaggttggtggtacccccttgtgctttctcatccttgttgggatgttct

SEQ ID NO: 763 - DNA, 649 bp, Gossypium hirsutum
  Clone ID: GOSHI-09MAY01-C10703_2
cccacccgtcccgtgggccgttatttattcttttgccttttgtgttttgtctgagaaaaaaaggaaaggagcgaaaggtctccgtcgtcgcccccgccgttgtcagtcggctgtttttatttgtataagctttttggcactgatgatttcaccttcggctgctctcacttgcagttcccagacgtttacccataaccaagtatattccaactgcctggatctcccttatctttcctcttaccttcacttctcttacaattcttccaacaccactctctccatcgccttcatcgccacaccttccaaatcgggtggttggatcgcatgggccataaatccaaaggccaccggcatggcgggttcacaatccctcgttggctacaagaactccaccaccggcaccggccaggttcatacctatgacatcagctcctacagttcaattggtgccaaggatctcgccttcgaggtctgggataagacggctgagagtagaagggacgggagtttggcgattttcgctaaaattaaggttccggcggatttagcggcgagtgggaagattaatcagttttgcaagtgggtcccagcgtccgaactgatggcaggttggacaaacatgccttttgccgtctcttatttgcaatct

SEQ ID NO: 764 - DNA, 1292 bp, Gossypium hirsutum
  Clone ID: GOSHI-09MAY01-C10703_1
cggacgcgtgggcccacgcgtgcgcggacgcgtgggtttcagtttcgtcggaaaaaaatggctacatcgttcttggcgtctcttttcttcaccttttgggcgctgcttatttcaccggcgatttccctcacctgttcctcccagaagtttacgaaaaaccaagtttactccaactgcctcgaccttccttctctcgcctcttacctccacttcacttacgacccttctaacactactctctccgtcgccttcatctctactccttccaaacccggcggatggatttcctgggccataaatcccaacgccaccggcatggccggttcccaagcactcgttgcttacaaaaactccaccaccggcgttgccgtcgtgcatacttttgacatcagctcttattcttcaattgtgccgaaggatttgtcgttcgaagttccagataagacggcggagactagaagcgacgggagtctggccattttcgctacaattaaggttccggcgaatttagcggcgaaagggacgattaatcaggtgtggcaagttggtcccggcgtcggagaaggtggcatgttggaaaaacatgacttcgccgccgccaatttgcattctaaaggaacgctagatttgaaaaatggacagagtagcactaattctggaggagacaccaccgttaagaagaaaaatatccatgggatactgaatactgtgagttggggaattttgtttccacttggagctatgattgctaggtacataagaagctttgagtcagcagatccagcttggttttatcttcatgttttctgtcaaatatcagcttatgccataggagttgctggctggggaactggtcttaagcttggaagtgaatcctctggtatcacatattcgggtcatagatacattgggattgcccttttcgtcctcgctactgtccagatctttgctttgtttttaaggcctaaaaaggaccacaagctccgtttctactggaacatttaccaccacagttttggatacgcgatacttgtcctcggcatcatcaatgtgttcaagggcttcaatatcttgaagcctgagcataagtggaaatcggcatatatgattgtgatcattgcgatgggcgggatttcgttgctattggaagctattacatggattgtagtgttgaagagaaagtccaggaaatccacaaaaccctatgatggatacaacaatgctcaatctaatcaacaaagcctcttgccatgtgatcaattgcagattttgtaacacccttgtgctttctc

SEQ ID NO: 765 - DNA, 369 bp, Gossypium hirsutum
  Clone ID: LIB3189-018-P1-K1-G12
tcggtgcatgaatggacgcaaaaaaatgtttttatttttacttggcgtttgttttctagacacttttggtcacttgataatgacagcgggcatttccatcaccagttcctcccagaagtttacgaaaaaccaactctacttcaactgtctacgaccttccttctctcgcctcattacctccacttcacttacgaccctcctaacactactctgtccgtcgccttcatctctactccttccaaactcggcggatggattttctgggccataaatcccaacgccaccggcatgggcggttcccaagcactcgttagttacaaaaactgcatcaccggcgtttgctgtcgtgcatacttttgacatcagctc

SEQ ID NO: 766 - DNA, 361 bp, Gossypium hirsutum
  Clone ID: LIB3148-021-Q1-K1-A3
gtataattgcttggttccaaatgttggttttttttagcactcgatccttagtacatgttatataggggcaggataccactgaatatgggggccaaaaaaaaaaaaaaaaaaaaaaaaaaaaaaaaaaaaaagatactaaaaaaaagaaaaaaaaaaaacgaaaaaacaactgcaagaaaaacaaaatagaacaaagaaacaagcagactagtgaaaaagaaaaaaaataataaaaaaaagcgggcctgcctttaaaaaaaaaaaaggtttgaagaccagcctaaccactgtttaaccaaatacaagctgatgtagaaatggaaataaatggggatgggcataaaaatcaagaagtgaaaaa

SEQ ID NO: 767 - DNA, 895 bp, Gossypium hirsutum
  Clone ID: GOSHI-09MAY01-C10723_1
cccacgcgtccgcccacgcgtccggaaatttcttgatccctcgtttaaatttctcaagttgtataccctccaaattctcaactatttaggaatgatttgttgaaagaggaagagaaaagaaaatgggtttgattgggaagttgaagcgaaaggacatcgatcagggtaacgacgacttctccgatttctcgctttcgtcgccggccaccaagattcgtcgtctggatgctgatttgccccccataattgaggaagactccctccctgagaatcacgaaaaggccatcgttctctttaacccaaacccacttcttcttcatgacacacctcccttgtcttcccctccttctaccctctccttctctttcgattctcacctcctctccggatttaagaaccaaattctacgggcagctgacatgaaatcagccgaaactgaagagaacaagatggaaaacgaaggatgtctagcagttgttccatgggttccctctcagattgcttcagtagaaagtagagatagcgaacagcaagttccagcgttgatggaaactgatgaaatggatgtagaagagagctgtagcaacagtggaagtatgcaggaagagcatgggtatgaattggatgggttgaagccaagagacgccctccataactgggcgcagcagcaacattgcatgcttccccagcctcctcaaaacccttttactccaatcacatggtctgattgataactggggattatagtgttgccttttccttttgtaaatggttttgtcgtgtaatgttaggggttaagaaatgagatggacagagcctgagtagaggtgatggggtcttcctctcttgcttgcctgcttcattcaacgattttgaggggcataaatgcttgaaa

SEQ ID NO: 768 - DNA, 397 bp, Gossypium hirsutum
  Clone ID: GOSHI-09MAY01-C10683_1
ctctattcacaccccattatataacttggtactggcctgaggctttcaccatgaggaaacagtgcaaatctcaatgcattaaccatggaaggtattgtgcacctgatcccgaacaagattttagctccggttatgaggggaaagatgtcgtgattgaaatcttaaggcagctatgcgttttcaaagtcccaaatgtgagcaataagtcctggttgtggtgggactatgtgacagattttcaaataagatgccccatgaaggagaaaaaatatatcaaggaatgcgccgatgctgttatcaaatctctcgggcttgacagttaaaagattgaaaagtgtttgggagaccctaatgttgatgcagataatcctgttctaaaagaaaaacaagatgccca

SEQ ID NO: 769 - DNA, 415 bp, Gossypium hirsutum
  Clone ID: GOSHI-09MAY01-C10653_1
tttcactctcctactccctctttgcttaaacctcagcatagacaagttcaaacattttccagcttttagttaatcaaaacttaacattcaggccaagttccatggttgttacttcttgctcttcaccatttaggctatttcaatccctttggctgcttctgcttgtgatccttggagaagttttttcttcttcataaccaaatttacccggtctatagcaggtcatgaattagtatttccaagttccaaacaaggaatccctctctattttcttacagtggaaggaaagaagaaaaggaaaagaaaaatggagaacatgtggaagtgggagcaggggacactggtgagcgagctgattcaaggaatgcaattagcaaaacagctaaggttgcatttgggtgcatcatcatcttct

SEQ ID NO: 770 - DNA, 1038 bp, Gossypium hirsutum
  Clone ID: GOSHI-09MAY01-C10673_1
cggacgcgtgggttcaagtccatccaaactcctatgcattggttatcagcatggagaacatgaccctgaactggtacttcgggaatgatcgttcgaaacttgtatcaaactgcttattcaggatgggaggggctgcaatactgctctctaacaaatggtccgacaaaagaagatccaattatcaattggttcatactgttcgcactcacaagggttcagatgataaatgcttttcctgtgttacacaggaagaagactccatagggaagattggtgttacattgtcgaaggatctcatggcagttgctggtgatgccttaaagaccaacattaccacattggggcctctggttcttccaatgtctgagcagcttcttttctttggtacattggttggtaagaagctgttcaaaatgaaggtcaaaccgtacattccggatttcaagctagcttttgagcatttctgcattcatgccggaggaagagccgttttggatgaactggagaagaatttgcagctgtctgaatggcacatggaaccatcgagaatgactctctaccggttcgggaacacctcaagcagttctctgtggtacgaattagcttactccgaagctaagggtagaattagaaggggtgacagaacatggcaaatagcatttggttcaggattcaagtgtaacagtgcagtttggaaagctttgaggacgataaatccggtaaaggagaaaaacccatggatggatgagatccataatttcccagttgatgttccaagggtctccaccatctaaatgacagaattgggtggtggtttcagcattgggtggaggaaacctttgcatttagataatctagttttttaagttatttaaatgggactagctttgagtgggattattattgttgtaacaatttgtggaaagcattgattcgagggtgttatgagaaaacattagaacatttttttttttactgacattatttcatgagatgcttgggctttcttccaagatcttcatcattttaaactgggat

SEQ ID NO: 771 - DNA, 255 bp, Gossypium hirsutum
  Clone ID: LIB3148-030-Q1-K1-E4
cacaaaggaaagctagaggacttttacaggttatgaaaacaagtgaccaacttccatgattctagttctaaaacttcactcttttgcttgtacctatccgcatgcatattgatctgcacttcactcatgctaggcatatgataactatactaataccgatgtctttgctcgagaagatccaaatatcaattggttcctcctgttcgcactcacaagggttcagatgataaatgcttttcctgtgtaacacaggaa

SEQ ID NO: 772 - DNA, 490 bp, Gossypium hirsutum
  Clone ID: GOSHI-09MAY01-C10663_1
cggacccttgggatctgtttatgaaacagatacctttagccttattgacaaaaaaggtttgaaggttgaaaacgttgtggacttcagttggtcaccaactgatctcattcttgcactttttgttcctgaacttggaggtggaaaccagcctgctagagtgagtcttgttcaaattcccagtaaagtggaattgaggcaaaagaatcttttcagcgtcagcgactgcaaaatgtactggcaaagcaacggtgaatatcttgctgtaaaagctgaccgatacacgaaaacaaaaaaaagcacttataccggttttgagctctttcgcatcaaggaaagggacataccaattgaggttttggagcttgataataaaaatgataagataatcgcttttgcttgggagcccaaagggcacaagtttgcttgtattcatggggataatccaaggcctgatattaagcttttctcgatgaaatcatcgcacaatttg

SEQ ID NO: 773 - DNA, 649 bp, Gossypium hirsutum
  Clone ID: GOSHI-09MAY01-C10193_1
cccagcgtccgcttttaaaaaaaaaaatgggttccacaattcatttttaggttcaacaaccagatagtttatagtttatccaagttgaaacgtagccccttacatatcttcccttcgctttcccatccaacattcctggacgcaaaatgccaggggatttttttattcccgaaataccctcgcttttccttcaaatttccaacctttgccgctgctaaattgaataaacaaaaaggaaatctcacttaacagatctaaacaattgtcctgtgttggaatggtgcgcggcgaaatggtggagatggtggcccgtgaaaccgacgaagagctttcattgttgccacatcagagcaatgttgatcgatcatggcggttgaacttcgatggcttccagttatctcccgaacacaaagacaaaaagcctcctcgtagcctccatgattgccttggggttttaggtccggaagataacgtggctgaatactatcagcagcaggtagaaatgctggagggttttagtgaaatggatgccttagctgagcgtggatttattcctggcatgtcaaaggaagagcgggaaaggttggctagaagcgagacattagctattagaatttcgaatattgcaaacatggttctttttgccact

SEQ ID NO: 774 - DNA, 811 bp, Gossypium hirsutum
  Clone ID: GOSHI-09MAY01-C10103_1
aagcaacctgcaacagaatttatctcctttacgaatagcttccatggtaggacgatgggagcccttgctttgacgagtaaagagcactatcgttcaccatttgagcctgttatgcccggagttactttcttggagtatggcaacatacaagctgcaatagatcttattaggaatgggatgattgctgctgtatttgtagaaccagttcagggtgaaggtggaatatacagtgcaacaaaagagtttttgcaagctctgcgttccgcttgcgatgatgctggatccctcttggtctttgatgaggggcaatgcggattgggtcgaactggttatctctgggcacacgaagcgtacggcgtattcccggatatgatgacacttgcgaagccacttgcaggaggacttccaataggtgcgactttggtaactgaaatagttgcttctgccatagcccatggggaccatggaagtacttttgcaggttcacctcttgtttgcagtgctgcaatttctgttttcaataaaattgcaaaccccagtttcttgtccagcgtctcgaagaaaggtgattacatgaaagaattgttgaaccagaagctcggagggaatccccacgtgaaagaaatacgaggatggggtcttatgattgggatagagttggatgtgtctgcttcgccccttgtagatgcgtgccgaaattctggacttattgtattgactgcaaggaaaggaaatgtggtgagactggtgccaccattgatcatctcagacgaagaattgaaacatgcagctgagattcttcatgaatgtt

SEQ ID NO: 775 - DNA, 823 bp, Gossypium hirsutum
  Clone ID: GOSHI-09MAY01-C10373_1
cggccgcgtgggcggacgcgtggggattaatcaaaggatgaagacattacagaagctggttcccaattccagcaagacagacaaagcttcgatgctagacgaagtgattgaatatctgaaacaactgcaagcacaagttcaaatgatgaacaggatgaacataccacagatgatgttgccgatggcaatgcaacagccactccaaatgtcggtgctggccccagcgatggggatggggatggggatgggtatgggtatgggcatgggcatgggcatgggtgtcatggacatcaacactatgggccgtcccaacatcaccggcatctcacctgttatgcctaatcctttcatggctatgacctcctgggatggctccggtgagaggttacaacaagctgcctcagcagcagccatgatgccagacccgctttccacattcctggcttgccaaccacagccgatgaccatggatgcttacagtcggctggccgccatgtatcagcagatgcaacaaccaccagcgtctggttctaagagctaagcttcaagccagtactttttagctaatcttttctatacagaaacctgaagttgggtttcaattcttatacatttccctagcgtttagggtttggtacaatctagttcatgtagttatttcttaattacaagcgtgtgagtggtaattattttgattgcttaatttgtagtatgaaaggatcccatgagccaagagcttggtatctttccttttcgtcaaggcaaccattgtatttagtgttcacatttttttcttccagagtttcgtataattaattacttt

SEQ ID NO: 776 - DNA, 589 bp, Gossypium hirsutum
  Clone ID: GOSHI-09MAY01-C10363_1
atttttcaatatactgcacatttttctttaaaacagacgaaagatcgctgaccgaggaagattacagtccatggcgactccgctcaaacccaacttaacacagaaacagctccatccatctaactggctcagcgcactcaaagccctggtcaagattggcagctgttaaagtcaggtctctcgtttttttcttctataagtctcagttttcctataatttttccatatttatttttctatttgtatttataatcactagtttggtgacctaaacctaggtttctttcaatttgggaagttatgatttgggttttgatccgggatcttgatataaatatatgtgtgatgaaggtttttgaatttgagttttattagtttttagggcaaaatctagggtttctaatgatttgggttaggtttgtgattatgtgggatgattttctttaatcgaaagttaaattaaaagttttgtttttcctttttatctgggtaccttaaaacttgtggaaattataaggacgcattatctgggatcgaaaataaaggttgtttggagcatttttggaatgggtgaggaaacgcatgatac

SEQ ID NO: 777 - DNA, 596 bp, Gossypium hirsutum
  Clone ID: GOSHI-09MAY01-C10303_1
gtgtctactttcgagattcaaggtttttattttaacctttggtcccgggaaagcgttagccttgaatttcccttatgtattgcatcacatgccagacgagagcgtaaccatctcgaaccacagagaccgattgttgagattggtgaagagtttgtcccccaaagttgtcacacttgttgagcaagagtctaacaccaacacatccccctttttttctcggtacatcgagacacttgattattacacagctgtgttcgaatccatagacgtagcttgtccaagagatgacaagcaaaggatcagtgcggaacagcattgcgtggctcgggatattgtgaatatgattgcttgtgaagggcaagaaagggtggaaagacacgaacttctcggaaaatggaggtcgagatttatgatggccggcttttctccatatccgttgagttctttggtcacactagcggtacgagatatgttaaaagaatataacaacaactatagacttgtagagagagaagggtctctctatctagggtggataaacagagccatggcaacctcttctgcatggaggtgaaaaaagcatggaggaatctgta

SEQ ID NO: 778 - DNA, 452 bp, Gossypium hirsutum
  Clone ID: GOSHI-09MAY01-C10293_1
acaaagtttaatatggcgaagaggaagggtgatgtagctcaaagagcatggagggtactgcgtttagcattattatgggcgagaaaaggtgggtgtgttcaggagacggctgatgatggggctacgattggtgcctaagttcctcaagggtcttgctcatcatcaacctcatcgtcatcaccaactgatgagccattataaggaacgccagctttcattcgacgagacgcccatttttcacgtcaagatgcaccgtccagcctccatgcgattccttcttccttgcattagcactgaggaagtcgattttgactatgatttcggtcccgatgattacgatcgggtttactggtatgatgatggtgggagaaagagtgactcaacggcatctgatactgacgaagaagatggagaagtggaagagtgtggatatgaaggatgtgatgagaaag

SEQ ID NO: 779 - DNA, 512 bp, Gossypium hirsutum
  Clone ID: GOSHI-09MAY01-C10253_4
tccctagcagacaggacaagaatatcagcattactccaagctttgaatcttccacatgaagaggcctcacagtcggcatcatggatcatgtcatgcatgggtgcaacgtttctggtattcacaggtacagtcgggctctctctgcaggcgccacccatgtatgcatatttattgcataaaaacccaaaaaggaagagagaaacactgaatatgctaataaagctagatatgtctaaagccataaactactaaacgaggtagttttgtacttgtgttctagacaattttgacattggttaagttattgtttgggagatgggaggacattgaccattatagtcatatgttatttcatttctttgaagaatcatacttgtggtcctgtaggacactgatgttttagagaaaataaaaatttgtgctagaactttgaagttgttgaactataaagactttttaggctgtttaaattttggattaccactgataatggggttctaaaactttcaatc

SEQ ID NO: 780 - DNA, 438 bp, Gossypium hirsutum
  Clone ID: GOSHI-09MAY01-C10253_2
tcctccccctcctcaatgtgcatccaagcttattactcgagcagatgatactgaagaagttgttaagcaacggctccgcatataccaggcgatgactctacctgtagaggattactaccgcagtcgtgggaagctgttagaatttgatcttcctggaggagtccgagaatcatggccaaagttgctccatgctttgaatcttgaagatgaagagcacaaacagtctgcagctgcatgatgtcttacatggttgtatcatttgaagtacttacaggttgaactcggctttgagtgaatggttcggaggtggttgaaacgtttttatttatttatatttatttaataatttatttaatttaattgatttaaaatttttgaaaaataataatagtaaggatgataattttgagtaaggaagctactctgctttaaaaaaaa

SEQ ID NO: 781 - DNA, 1212 bp, Gossypium hirsutum
  Clone ID: GOSHI-09MAY01-C10253_1
ggtggtggtgtggttggtggaggttggagggagggaaaggcgtggacagtggtataagacgggcgtgtatagggagggggaagagagagacggaaggatagaaagatcgaggggggattggaagggggtacagggggaggggagagggaggggggagtgagcggttgtaggatggtatggggattcgtgaggtggggaggggtgatgttgtcggggaggagctgggttcgtgtggtcgccgttattgtgagctagaggagatggtgaacgagggcgggttagggtcagaggaaattagggtagatttactttccacacgtctggaggcgggagaagcgaggggcgaatcggggttcattggagcgggttgtcctcggacagtaagacaggcggaaatattagggggggggacagacattgagttagtgattaacgtgaagcttcggggagaagcattgcttgcaaaatgtcttggaagaaggatctgtagtgagtggggggggaaatataatgtggggggtatcgatatcaaggcagagaatgggaagcctgggatgtatatggatccagttcctccccctcctcaatgtgcatccgagcttattactcgagcagatgatactgaagaagttgttaagcaacggctccgcatataccaggcgatgactctacctgtagaggattactaccgcagtcgtgggaagctgttagaatttgatcttcctggaggagtccgagaatcatggccaaagttgctccatgctttgaatcttgaagatgaagagcacaaacagtctgcagctgcatgatgtcttacatggttgtatcatttgaagtacttacaggtaaattcggtcattctttgcatgcacaacccatgtatgcatatttatttcataaaaacccaaaaaggaagagagaaacactgaatatgctaataaagctagatatgtctaaagccataaactactaaacgaggtagttttgtacttgtgttctagacaattttgacattggttccccccccccccgggagatgggaggacattgagcattatagtcatatgttatttcatttctttgaagaatcatacttgtggtcctgtaggacactgatgttttagagaaaataaaaatttgtgctagaactttgaagttgttgtactaccccccccccccccccccggccgctccccacgcggccgcgaacgc

SEQ ID NO: 782 - DNA, 393 bp, Gossypium hirsutum
  Clone ID: LIB3166-023-P1-K1-H11
cccacgcgtccgcccacgcgttcgttcacgcgtccgaacggctccgtatataccaggcgatgactcgacctgtagaggatttctaccgcagtcgtgggaagttgttagaatttgatcttctgggaggaatcccagaatcatggccaaagctgctctgtgctttgaatcttgaagatcgcgaggacaaacagtccgcagctgcataatgtcttgcatagttgtatcatctgaagtaattgcagagaatatgtaaattaggtaagttattgtttgggagatgcggggcattgtgttctttaagctaactataatgttttgctttgaaactagtatatgtatatctgcttaatgccagtgccaattgtcattttgctgtatatttgtggtatgtcg

SEQ ID NO: 783 - DNA, 240 bp, Gossypium hirsutum
  Clone ID: LIB3148-016-Q1-K1-B5
gagaaacattgcatatgcaaataaagctaaacatgttttgtacttgtattgcagagaatatgtaaattaggtaagttattgtttgggagatgcggggcattgtgttctttaagctaactataatggttttgctttgaaactagtatatgtatgtctgcttaatgccaaaaaaaaaaaaaaaaaaaaaaaaagaaaaaaacaacaaaaaaaaaataaaaaaaaaaaaggctataataaaac

SEQ ID NO: 784 - DNA, 443 bp, Gossypium hirsutum
  Clone ID: GOSHI-09MAY01-C10243_1
cccacgcgtccgccaattttgaagattttttttggttttcatttacatattgcagagctttcttccctttaaaaaaattggttttggattcgtttcgttgctgctgagttttcgttgatctctgggctttgttgccctttcgcctttgaaatccatgatcttcagcaccccatggactcatctccagtgcacaccacttcttcactccatgaacaagaagatgagtgggacactgatggattcgtgattccgagcttgggaattgaagaaccatatgaaactaaagctgatacttcagatgtagaaacatcaaaaccgcattcgcagcaggccaaaaaagaagagtacatctacttgggaccgcatggtgcgccgccatcacaatcaaggcagcaggagctgaatccgtccactcgtaagccacggatcacacagaatctaaa

SEQ ID NO: 785 - DNA, 442 bp, Gossypium hirsutum
  Clone ID: GOSHI-09MAY01-C10273_2
cttcattgctcttccacctccgcaaatccccgcccaactctccgccgccgccaccgccaccgcaaccgccaccgccacagatccaagcaatgggccgcgtccgtaccaaaacagtgaagaaatcctcccgtcaggtcatcgagcgctactactctcgcatgaccctcgatttccacactaacaagaagatcatcgaagaagttgccattatcccatccaagaggctccgcaacaagatcgccggcttctcgacccatttgatgaaacggatccagaggggtccggttcgcggcatttccttgaagctccaagaggaagagcgtgagcgccgcatggatttcgtccccgatgaatcggccatcaaggtcgaccaaatcgaagttgataaggaaactcttgatatgctttcgggtcttgggatgtctgatattccggggcttgg

SEQ ID NO: 786 - DNA, 662 bp, Gossypium hirsutum
  Clone ID: GOSHI-09MAY01-C10273_1
caaaacaacagccaattactcttcagtctcagccgatcttaaaccatgggtcgcgttcgcacaaagacggtgaagaaatcgtcccgtcaggtaatcgagcggtactattctcgaatgaccctcgattttcacaccaacaaaaagattatcgaagaagtagctataatcccatccaagaggctccgtaacaagattgccggtttctcgacccatcttatgaaacgtatccagaaaggaccagttcgcgggatttctcttaagcttcaagaagaagagcgcgagcgtcgcatggattttgtccccgatgaatcggccatcaaggtcgaccaaatcgaagttgataaggaaacacttgatatgctttcggttattggaatgggtgatattcccggccttgttaaggttgacccggttgctgtttcggttcctcaagttgggttcggtcgcggtggtggacccgggaggaggttttgagtggtgggtcttcatggatttggtttcatgggttttttttttaagcttctatgtttttttctctgttttggggtagtttctaattttgtgttttttatggaacagtactagttaagtggaactgaaattttatcaattgtgatgtgtactttatttttgaagaaatttgaaatgggttattttagttt

SEQ ID NO: 787 - DNA, 377 bp, Gossypium hirsutum
  Clone ID: uC-gsronu33B099f09b1
accttcggaaattcccggccaacttttccccggcggcaccggcggcggcggagattcaaggaatggggcggggtcggaccaaaacaggggaggaaatcttccggtagggtatatgggcgctactactctggcaggaccttggatttccacactaacaggaagatcatcgaagaagttgccattatcccatccaagaggctccgcaacaagattgccggcttctcgacccatgtgatgaaacggatccagaggggtccggttcgcggcattttcttgaagctccaagaggaagagcgtgagcgccgcatggatttcgtccccgatgaatcggccatcaaggtcgaccaaatcgaagttgattaggaaactcttgatat

SEQ ID NO: 788 - DNA, 354 bp, Gossypium hirsutum
  Clone ID: GOSHI-09MAY01-C10263_2
aagggccgggccacgccacgcgtctatactaataaaggttaagtaaaattcatgttgcactggtttttctatatagtgaagggcggtatctttgttgttaggttgacattatacatttttctatatctccaattactgtaatttaatgtcttctgtcttggtacaattgttttctgtactactgatactattaaattgacactattggctgggtttgagggagagctctttgttgatgcagtaacagattggtttgcaatggcccgacttaacttagtctcgcatctttttactattttgggacactcttttagccaacttgcatctatatcttatgctacggtttggggggaa

SEQ ID NO: 789 - DNA, 956 bp, Gossypium hirsutum
  Clone ID: GOSHI-09MAY01-C10263_1
caaaactcgcttgctcggcagtgatctctcagtctctctctgaagaaaccagaggaatcatcggcgaaatcgagcgatggccggagattctgcgacgaaaatcaaagcctatgcggtgcctgcggttctattctctctttccatgttatatcagctcgttcttctccctcgtgcctttcccccttctcattacgatgttttgggattaaagacatattgttcaatggaagaagtgaaagaggcgtacgagaatcttgaatccaaatggaattcaggactggaaattcctactaccactgaatttatcaagattcggtatgcttatgagcttttgacaaatcccatatggaaaaggaattatgatgtatttggaattaatgagcaagatcatgttctggaaaaactcagccaacaatatgcagggggaaaagttctctaacatagcactcccattactgcgtactggttgcttctgatactggagatgatgctttttaatgttattacttccacaaggagtttcagtcctatgtttcaaggattccaaaccatggttacttcaggtgtattcatctggcagcgatcaatctgctcaatttgctaattcgtggaaaagaattgctgctttattgaatggggttgcaaacattggcatggtagaacttggtgaggttcaagttgcagcctacctttctgagagaaagccaatgggccggttcttcttcaggaatggtcttccttcagtggttgctttcccatcagggtgtaaaacttcagactgtcttatccggtttgagggagagctatctgttgatgcagtaacagattggtttgcaatggccgtacttaacttgcctcgcatcttttactattcaaaggaatcattggggccaaggtttctggcaaaaagcagtccccataaggtaaaagtgattttcttctcaaaaacaggggag

SEQ ID NO: 790 - DNA, 549 bp, Gossypium hirsutum
  Clone ID: GOSHI-09MAY01-C10233_1
agaaattgcagaaatcaaaacagagtttactttttcaaaaatggctttcgaatctttcttattcgatctgcatgtatagtatgcgttcgtagtttttacaaaaggaaaggttcttggctttataaccgaaccaaagaaaatgaaaaagaaaaatacaattccttttctttttttctcattgctctgcctgttttttgctattgctgttgtggtcgtcctttgcttgtcttcatttgcaggtacggaggcaacgtggtgggggtagctgacgcgtacagaggctgctggtggtgtcgacgtggaggcgcgagccatggtagtgctggaggctactgcggcgctgagcgaatggggctagggttagggccattgtatttgggccgtgtaattggattttggaactggacccggactattgattggtttttatttttatgggttttagatttattttggtattttggctttgacatgggcccgggcaaattgactcgtttacattatttattcaaatcttatatttaatataaatatttatatttgttgact

SEQ ID NO: 791 - DNA, 718 bp, Gossypium hirsutum
  Clone ID: GOSHI-09MAY01-C11993_1
gtttgaaacttatatcctgtaaacagggggggtgatatacagatgtaataacaatggagaatttttcttccctattacatgacatgacatgacataaacaataaaaatagaacctttaatgtgcaaattttcagattttgacggccttcgccaacacatttcatgttctccagcgggggggggggcttccttctgctttgcatggctagagcttgtcagtcataggactttcatgccaaaattgctcactgggaattctcagaagggttggccctatatccaacgtttgctggtggacttgcttcagttcctggagccgtttttgaggaatgctgagcttggagttccggttcattttctgtataaaggcacactcagggtgctgctgggtcggcggcgatgatcttcccggagtgcctgtgtgattgtcattttaccttctgtgatgtgattcccccgagctgcatacagatgcgaaatatcatccttagtgcttttccacgcaacatgaggctaccagatccatctactcccaacttaaagattgatttgcttccggaaatcagagaaccccctcgcatcctttctgaggttgatgctgctctgaaggcaaaacatatgaaggctgatgtagatgagtatctcaagatgaggcctcatggaggatctacatttttaactgaactgaaacaaagactactcctttcaccaagcgagg

SEQ ID NO: 792 - DNA, 375 bp, Gossypium hirsutum
  Clone ID: LIB3196-049-P1-M1-G4
ttttaatccgagaccatatttcagattatttatcaactggctgttagatcttggttccttggaccctgtcactgatggtgcaaattttcagattttgacggccttcgccaacacatttcatgttctccagccccttaaagttccttccttctgctttgcatggctagagcttgtcagtcataggactttcatgccaaaattgctcactgggaattctcagaagggttggccctatatccaacgtttgctggtggacttgcttcagttcctggagccgtttttgaggaatgctgagcttggagttccggttcattttctgtataaaggcacactaagggtgctgctggttctgcttcatgactttccggagttcct

SEQ ID NO: 793 - DNA, 406 bp, Gossypium hirsutum
  Clone ID: GOSHI-09MAY01-C11983_1
cccacgcgtccgtccatttcggaggctctttaagcagctcgaatcgatgctcctaatgcagcacatcaccctgccttgaaaagcaatggaagggtccttagctttggcctagatgcacccatttgtgattccatggcctctgtcttaaaccttggggagaaaaaggttttgaatggtgcccgagatggatttcatggtcttgaagaacaaagagtttcggttccaaacagaagggaaaacggtgatgattgctcgagtggatcttctatcacggtttcaaactcaatggaggaaggtggtagaagttgcattcaggaaaataggatgggcaacattaatggcttcccttcaccaattccttgtttacctggtgttccttggccttatccatggaattccgcggtgc

SEQ ID NO: 794 - DNA, 1239 bp, Gossypium hirsutum
  Clone ID: GOSHI-09MAY01-C11953_1
caagtctctgaagcaacgaaaccagatcttgttatttttgttatggatagtagtataggtcaagcagcttttgatcaagctcaagcatttaaacaaagtgttgcagttggtgctgtaattgtcacaaaaatggatggtcatgcaaagggtgggggtgctctcatgcggttgctgctactaagagtcctgtcatatttataggaactggagagcacatggatgagtttgaagtgtttgatgttaaaccatttgtaagccgccttttaggcatgggtgactggtctggattcatggacaaaattcatgaagttgttcccatggatcaacaacctgagcttctccaaaagctttcagaagggaactttaccttaaggattatgtatgagcaatttcaaaacatactcaaaatgggtccaattgggcaggttttctcaatgcttccaggatttagtgctgaactaatgccgaaaggtcgtgaaaaagaaagccaggcaaagatcaagcgctacatgaccatgatggactcaatgacgaatgaagagttggatagctcaaatcccaagctcatgaatgaatcaaggatgatgcgaatagcgcgggggtcgggacgtcatattcgagaggtaatggaaatgatggaggagtacaagcggctagcaaagatatggagcaagatgaaggggctgaaaattccaaagaagggtgaaatgagtgcgttgtctcggaacatgaatgcacagcacatgagcaaggtcctgcctccgcagatgttaaagcaaattgggggtatgggtgggttgcagaacttgatgaagcaaatgggttctaccaaagacatgatggggatgtttggaggtggtggggacaagtaatgtaattttccacacccactccaaggctctactttggactgctaatgcaggacaggattctccatgttgaagacaaagagagaatatatgcatatccccaagtgcaaactgtgttttccagcacaggcatgtattgtgattttgagatatataaatttcttttctcactatatttcaacatttagaattcaattttctccttttgtacgcatttagatgagcatagaagtgtttgggactgaaccttttacaaatgaactataaatgtaacagcatgtttggtttgctgaatggaatagatattacgatgtttggttggttaaaaattgtgaataagaattagatttctagattgtgtttttctcct

SEQ ID NO: 795 - DNA, 476 bp, Gossypium hirsutum
  Clone ID: GOSHI-09MAY01-C11963_1
cccacgcgtccgagtatttacccagcagaagtaagtaactttcagcttctgtgttctttatccaatctaaagagatttagattagagaaggtttcagttccatccttcagtacgagcgcgtttcagctaaagaatctgcgaaaaatatccttggtcatgtgtaatatcagtcaggcttttgaaaagggcacaaacaaaatgtcagataattttccaaatcttttggaaatcgacatcgactattgtgatgatctgacggaactgggtgaagggttgtgtgatgttgttcaactgatgaagcttagtatcaccaattgccacatgctccgtgcactgcctgaaggcattggaaagcttgtaaacttggaagttttgagactaacatcctgcactgacctcatgtcgttgcctgagaccattgggagcttatcccagctcactattcttgacatttccgactgtctaagcatcaaaaa

SEQ ID NO: 796 - DNA, 637 bp, Gossypium hirsutum
  unsure (1)..(637): unsure at all n locations
  Clone ID: LIB3543-044-Q6-K6-D6
ccanaattcagaatctggtgaagaattattcccagtttgtttctttcccaatctacacttttggcaagaaaaatcaaggacagttgaggtagaggaggaagaaccaccaaaagaaggagaagaaaacccagaagaagtgaagaaaaagaagacgactaaaactgagaagtattgggactgggaattagcaaatgaaacaaagccaatatggatgcgaaatcctaaggaggttgaaaaagacgagtacaatgaattctacaagaagactttcaacgaattcttggatccacttggatatactcacttcacaacagagggtgaggtggagtttaggagtgttctgtatattcctggcatgggtcctctaaacaatgaggatgtagtaaacccaaaaacaaagaacatacgtttgtatgtgaaacgtgtatttatctcagatgattttgatggagagctgtttccacgatacttgagctttgtgaagggtgttgtggactctgatgatcttccacttaatgtttctcgagagatcctccaagaaagccgtattgtgagaattatgagaaagaggcttgttaggaaaacttttgacatgattcaggagatttctgaaagtgaaaataaggaggattacaaa

SEQ ID NO: 797 - DNA, 430 bp, Gossypium hirsutum
  unsure (1)..(430): unsure at all n locations
  Clone ID: LIB3583-031-Q6-K7-E3
tctagtccgtggtacacagnatacactttatttaaggtcagatgacaagtatgaattctcagatcccaccagaattcagaatctggtgaagaattattcccagtttgtttctttcccaatctacacttggcttgtaaaaatcaaggacagttgaggtagaggaggaggagccaccaaaagaaggagaagaaaacccagaagaagtgaagagggggaagacgactaaaactgagaagtattgggactgggaattagcagatgaaacaaagccaatgtgggtgcgaagtcctaaggaggttgagtgatgagagttgttgtgagttgttttggaagacttttttgggtttgtttggttgtttgttgttttgttttttttggtntttggggggtgtttgtttttttttttttttttgggggttttttttttttt

SEQ ID NO: 798 - DNA, 371 bp, Gossypium hirsutum
  Clone ID: LIB3166-045-P1-K1-C11
cccacgcgtccgcccacgcgtccgttcaaccttaagaggaggtggtcgccacccagtttgagaaagtcaagatagaagaagaaccaccaaaagaaggagaagaaaacccagaagaagtgaagaaaaagaagacgactaaaactgagaagtattgggactgggaattagcaaatgaaacaaagccaatatggatgcgaaatcctaaggaggtcgaaaaagacgagtacaatgaattctacaagaagactttcaacgaattcttggatccgcttggatatactcacttcacaacagagtttccacgatacttgagctttgtgaagggtgttgtggactctgatgatctttcacttaatgtttctcgagagatc

SEQ ID NO: 799 - DNA, 560 bp, Gossypium hirsutum
  Clone ID: GOSHI-09MAY01-C11563_1
agatccctttgcccccttacccttttaatatgctttagtcgtcgcataagtcggtaaactcaacaccaagtaattcgcagggttgcaacagcagcagctgggagaaaagacgatccaaaacccttcctaaaacgagcaaaaatagtaagagttatattaatggatccgtgtccttttgtacggatcctggtaggtaatttggccctgaggtttccactttctacaaagccctcgctttcaaggatccatccttctacttctccatgttactgcaagatcaaactcaagaacttccctcaccaagtgggttcaatccctttgatccatgcaaacacccaaaacccagaaagctgcaacttctctttgcagaaatcgctcgctgcgtgtttcagtttaagcaagtcccaggtggataggatcatctcgaaagggggttcatcatataaactttccatcgaggtttacgctgaccctgatgacagtacctgcggattggcatctgggaagttattggggaaggttacggtgcccttggatttacgtggagcggaattaaagcc

SEQ ID NO: 800 - DNA, 349 bp, Gossypium hirsutum
  Clone ID: GOSHI-09MAY01-C11523_1
ggcggtcggacaacgagtaagatgtcctgggtatcgagtcatcacttcagaagttgaagcaagtaaattcaccgttgcaaaattcatctatggaacttcatggttaccctcaaccggagttgctttcttagctggcctacaagtttaatttttttttttacgtcctaattttttttacccatgatattgtaataatggtcgttattatcgttaaaattttaactcccgacatgttctagaaggttagaactagaatatagaatataaaaaattgtgtattgtattttcgtatttttttaaattgtcagcaatataaacacatcaaactacaaaaaaaaaaattcgagac

SEQ ID NO: 801 - DNA, 525 bp, Gossypium hirsutum
  Clone ID: LIB3583-041-P1-K1-B10
ctttgatattcgcttgcaaaattttaaaaaccatgaatgattttgtgaattacaaatttggaaattttctctcttagaaaaaaaatattaaaattaaaataactaataacttaaacattcagaaaaacatgatttctctctctctcaagtaatcacctctagattatggaataaaagttaagaaaggaaacaaaagtaattaatgctaatttcgataacacatataaagaagttatttacatgcaaaataacattaaaaagaaaaaactcattgaggcggcaccaccaccggatgttatagctgcattcgagaagtacgccgaaggtgggcctcaaatgacggcggagcagttgcataggttcttggtggatgcgcaggggcaaggcggtgcgaaggtctccaacgcggaggagattctgctgcaaggtctgcagaaacgacaccatatggcgaagttcagaaaacacaagcactgaccctcgatgatttccatcattacttgttttctgcaaatctaaatctac

SEQ ID NO: 802 - DNA, 395 bp, Gossypium hirsutum
  unsure (1)..(395): unsure at all n locations
  Clone ID: LIB3166-039-P1-K1-A6
cgacttttctaanaaccattttcaattcaactgctttatttctttcatttcatntcatcaagggggggggaaaagcagagttgaaagatggggacttataggatgtgcgggtgctttactaggaagttcaaaatcattgaggcggcaccaccaccggatgttatagctgcattcgagaagtacgccgaaggtgggcctcaaatgacggcggagcagttgcataggttcttggtggatgtgcaggggcaaggcggtgccaaggtctccgacgcggaggagattctgctgcaggttctgcagaaacgacaccatatggcgaagttcagaaaacacgcattgaccctcgatgatttccatcattacttgttttctgcagatctaaatccgccaatcga

SEQ ID NO: 803 - DNA, 1305 bp, Gossypium hirsutum
  Clone ID: GOSHI-09MAY01-C11413_1
cggcacgagcccacccgcccgttcattttcacgctttctctgccactcttttaaatcatcggttttccttgttttttaaatagtaccgaccgccggcgattgttcgccggagaacggaagaatctcgcagggggaaagagagatgaaggcactggtgagtgatgatgttcgcgtgaattcccaaggcaatcacgttacgtcctcgtgccgtcgcgtatttcgggaactttaaccgtatctgaaaagaaataaaaaccctcaagcaaaagcgacttaacttagcagagttttgaagttattctatgctttgtccggcaaaactgaggcagaattagtatataataatcaaagcttatgagtcccgagtcttggtaaaccgcattgaattttggccctccccagaaaaatattatgaatttctgtgttgatggcctttggcaggcctcatcgctaagccataatatgtcttccagttatcaaagcgaagaatcagaaagagcttgaagagctgccgtggaagcaaaaggggtctttggtctgttctggttttatttatttataatcaaaagctgggaaaattatcaatatgcctttcccaatgaagatccagcctatcgatttcagcccttcggaagacgttttgccgcctcgtttggagacggtgaagccggttgtgaaatcgcggttcaagaggctgtttgagcgccagttccctagcattctgaggaattccgcggcggagaaggtggacgctgatgagctgccttttagcaaagaatgcaccaccgccgagctggaaccgagctcattttgcttggcgaagatggtgcaaaatttcatcgaagataacaacgagaaacaacaatctggtgccgttaggtgtagccgtaaccgctctaactgcttcaatcgtaactgcaacgacagctccgatgacgatatggatggtttcggtttcagcgactccaatctctcttcttcagctgaagcatctgaaattctaaagagcttggttccttgtgggagtgtgaatgaaaggaatttactggcgcatacagcgagaatcatggagaagaacaagatctctaaacgtaaagatgatatctgcaggaagattgttattgatggattacttgcctttggatacgatgcttctatctgcaagtctcgttgggaaaaatctccctcttatcctgccggggaatatgaataccataatgttataatcgacggggagcgattggtgatcgacaatcatttcagatcagaattcgaaatcgcacgatcaacaaagacctataaatc

SEQ ID NO: 804 - DNA, 801 bp, Gossypium hirsutum
  Clone ID: GOSHI-09MAY01-C11433_1
cgggtgggaaggaacggggcggaccaacccgtccggggacgcgtgcggacgcgtggggtttatccaaagaattggtatcccattcctcttatgttctgccggccttggggtaagctgccagaaaatgtaccttgccatccaaaacttgccgactttgctaactgcatgaagaagaaaggccgtggaatgtccatatttatcaatatactagatggggactatcatgaacgtgctgaagatgcgaaggctgcctgcaaacagcttgatacctacattaactacaagaattgtgaaggtgttgcagaaatagttgtggcacccaatatgagtgaaggcttccgtggagttgtgcagacaatgggtctcggcaaccttaagcccaatattgtagtgatgcgatacccagaaatatggcgtcgtgagaacctaaaagaaatccaggcagatttgttggtataattacgactgtattgttgcaataggcaagttgtcattgtcaaggcctggatgaatggccaatgagtataaggcagatggtccattgatttgattggattggaaatgttggtctcatgcttcttctgtcacagcttcttctacgaagagagcttcagagcttgtaatttcaggtcttctcatgcgagagataccgatgcaaagggctcaggttattaaaaaattttttgatcttcgatgcagctgatgtttgtatcgatcaagtctgggatgacaaccgagatggttcttaccaatgatcaaagaggctttcccgttgtaacacggtgctgatactgcagaata

SEQ ID NO: 805 - DNA, 490 bp, Gossypium hirsutum
  Clone ID: LIB3585-043-P1-K1-C8
gatgctcccagttggcgtcctcgatggaaatttcatcactggagcttctgtgtccttggagcatcactttgtattgtgatcatgttcttgatctcatggtcattcactgttgtgtctctggcccttgcaagcctgatatattattatgtgagcattaaaggaaaagctggggactggggggatggtttcaaaagtgcttattttcaactagctcttcgcagccttagatctttaggagcaaaccaagttcatccaaagaattggtatcccattcctcttatattctgccggccttggggtaagctgccagaaaatgtaccttgccatccaaaacttgccgactttgctaactgcatgaagaagaaaggccgtggaatgtccatatttatcaatatactagatggggactatcatgaacgtgctgaagatgccaaggctgcctgcaaacagcttgatacctacattaactacaagaactgtgaaggtgttg

SEQ ID NO: 806 - DNA, 641 bp, Gossypium hirsutum
  Clone ID: GOSHI-09MAY01-C11783_1
ccgtccgcaaaaaaaaaaaaaaaaatccaatttatcgattcattttcatagtgaatcaaaataaaaaaccttaaaatcattattactttaaaaaacccagaaaaacaaaagcttagcaaacaacaatggtgaaacaccttagcgagaaatctgcgattgaaaggagggattcaaggttcacaggtgtacgtaagcgaaaatgggggaaatgggtatctgaaatcaggctaccaaacagtagagaaaggatttggttaggttcttacgacaccgccgagaaagcggcgcgtgcattcgacgccgctcttttttgcttacgcggccgttctgctaaattcaatttccctgataacccacccgagatagccggcggtacgtctttatctccccatgaaatccaagccgccgcagcgaggttcgcgaactcggagccttcgactatccattcggagcaaactgattctgcgttccaaatggagtcaccgtcgccgtcagtttcggacgcgaggttcgcaaacttggagccttcgacgatccattcggagcaaactgattctgcgttccaaatggaatcaccgtcgccgtcagtttcgtacgcgacggtacaattcgacgggtcggttatggatctattgacaatg

SEQ ID NO: 807 - DNA, 1080 bp, Gossypium hirsutum
  Clone ID: GOSHI-09MAY01-C11753_1
ctcttcctgcctccggatttcccgtcgctgaacctgtaaactaatcgaagccttagccatctccttcgccaactaaactgtctgacaaagaaacaaagacaaaagaaaaatggtaagagaaagagaaactccaaagcagcaacaacaggtttcatacacagtggagcagcttgtagccgtcaatccttacaatcccgacatcttacctgatctcgagaactacgttaatgaacaggtttcatcacaaacgtatagcctggatgctaatctctgccttcttcgcctctaccagtttgagcctgagcgtatgagcacacaaattgttgcacgcattttggttaaggctctcatggcaatgccagctccagatttcagcctctgtctctttttaattcctgagcgagtgcaaatggaggagcagttcaagacactgattgttctttctcactatctggagacaggaagatttcgtcagttctgggatgaagcagctaaaaatcgtcatatagtcgaggctgtaccgggttttgagcaagcaatccagacgtatgccattcatgtcctctccctgacttaccagaagattccaagacctgtacttgctgaggctattaacatcgaaggtctatccttggacaaattccttgaacaccaggcggccaacagcggttggattcttgagaagggtcatggcaggggtcaactaatagtcctacctcgaaacgaatttaaccatcctgagctgaagaaaatcgctgctgatagtgttccattggagcacatcacccgcattttccccattcttggttaagcctctagctgggatgaacacttttttggagttatttgtgccatgttttcgttgacattgcgaccattctctttgtttttttgtcttggatatatatatataactgagaacaagctattttaggatagacttgtcaagctaccccaaagattagctttgaatcggttcctttttatatctattttttcacttatcagaatttcagaatatatttatttactgcgcgttcttctttaaaaataaatttaaaataaaataaaaaataatac

SEQ ID NO: 808 - DNA, 686 bp, Gossypium hirsutum
  unsure (1)..(686): unsure at all n locations
  Clone ID: AI055119.1
tcttcctgcctccggatttcccgtcgctgaaccttggaaactaatcgaagccctaaccaatctctttggccaacttaactgtcttgacaagaaacaaagacaaaagaaaaatggtaagagaaagagaaactccaaagcagcaacaacaggtttcatacacagtggagcagcttgtagccgtcaatccttacaatcccgacatcttacctgatctcgagaactacgttaatgaacaggtttcatcacaaacgtatagcctggatgctaatctctgccttcttcgcctctaccagtttgagcctgagcgtatgagcaccaaattggtgacgctttttggtaaggctctcaggcaatgccgctcaaaattcagctctgctctttttattcctgaccagtgcaatggaggcccttttaagacctgattggtccttctactatctgagacggaggttcgncaagtctggattaaacactaaaatcgcatatatcaggttgacggttttgacaacatccaacgatgcatcatgtctttctgactacagagattcaaactgactgcgagctataccatagctatctgaaaatctgacacagcgccaaaagggggtttaaagttggggggaattaactactaacaatactctggtgaaaactttattggtggaaatccgttcctttgtgactcg

SEQ ID NO: 809 - DNA, 1025 bp, Gossypium hirsutum
  Clone ID: GOSHI-09MAY01-C11723_1
cctgttcataataccttttacatgaaaaactgtacgcaagttcttaaggagggacacttatttttcaggttggtaattggtgtagatggctgactgatatgtttggcatggatagtgatgataatttaaatgaagatcaatgttccagtcaagatgatttcagaaaaaatggagacggagaatctaaatctttcctttttcttaattccctgagtgatcttctaatgccccccccgcccgtgctaatggaccgttcaatcagagaggagctgtgcccatcaatagatcttccgttggttaaacgcattctctgcaacttcactccagatgaattttgtccagatcctgttccaggagctgtattggaagccttgaatgctgagactattgttgagcggaggttatcaggggacccagccagaagtttcccttatacagctgccctcgttgtctatactcctccatcctcagcagatgtggctgaaaaagttgtggaggcaggagggaagtcgccactgtctaggaatgcgtcagtggtacagaggaaagggtataccagtgacgaggaactggaggaattgaattctccactttcatcaataattgagaaatttccattgtcaccaacaattgttaccaatggaggagtgaatggaaaccatgaacatgcaggctatggtggtataaatgcaagatacaaactccttcacgaggtatggtccgtgtgagtgtttatgttagatcgttgtgtatatctctcatgttttgtagccatggaaaagtgagggtgaaggtgaaaaaactcaaggtgaaatgtttagatgatcaaagttacaggaaattctcaaacatcgtttattggcttgattgtacagttggaagaacttggtttctttttgttgaatgcggagaggcttgaaatcaactgcaattatgtcttcgatatacagaataaattcatactgttttttttaacggacaatgaacttcattggcaaagtgttcgctggcatctctttgaaagt

SEQ ID NO: 810 - DNA, 616 bp, Gossypium hirsutum
  Clone ID: GOSHI-09MAY01-C11683_1
agccacagctcatttaagtgtgtggaataacccatttcaaagttggtaatggctttgcagactgctgctttggttccagctactttcaccctacctaaagagggaaaatcaagtccatctttcaaggattcaactttctttggggtctcactttctgaacatgccaaagctgatttcagctcttctgcattaagatgcaaggacaagcatggttgtttctactgttttttttccattgtagagggaattcaacccaagaaatggagctgtgagagccgaaacaacagctactgcagctccagcaatcagcagatctgcggtggatggcaagaaaactctaagaaagggtagtgttatcatcaccggtgcctcctccggattgggtttagccactgcttaagccctggctgaaactgggaaatggcatattatcatggcttgcagggactttctcaaggctgaaagagctgcaaagtctgctggcatgtctaaacaaaactacaccatcatgcacttagatctcgcctcattggacagcgtccgccaattcgtcgaccgttacaagcgatcggggaggcctcttgatgtgcttagttgcaatgctgctgtttaccag

SEQ ID NO: 811 - DNA, 392 bp, Gossypium hirsutum
  unsure (1)..(392): unsure at all n locations
  Clone ID: LIB3120-009-Q1-K1-A3
ctcatttaagtgtcttaaataacccatttcaaagttggtaatggctttgcagactgctgctttggttccagctactttcaccctacctaaagagggaaaatcaagtccatctttcaaggattcaactttctttggggtctcactttctgaacatgccaaagctgatttcagctcttctgcattaagatgcaagagggaattcaacccaagaaatggagctgtgagagccgaaacaacagctactgcaactccagcaatcagcagatctgcggtggatggcaagaaaactctaagaaagggtagtgttatcatcaccggtgcctnctccggattgggtttagccactgctaaagccctggctgaaactgggaaatggcatattatcatggctt

SEQ ID NO: 812 - DNA, 849 bp, Gossypium hirsutum
  Clone ID: GOSHI-09MAY01-C11673_1
gggtttccttccctttctcttgattttcctcgtgattgcatattttccctcttgtgcacatccacaaaatgcagaccttattctgccattggaggctgtaaaccttggtaactggcttgttactgaaggatggatgaaaccttctcgttttgatggcatcattaacaaagatcttttggatggaacccaagttcagtttcgttcaacaaagctaaacaagtatttgtgtgctgaaaatggcggtggaaccgtcgttgtagccaaccgtccctcaccttctggttgggaaaccttcaggttatggagggtgagtgaatcatgctttaacttgagagtgttcaacaagcagtttgtgggattaggaaatcaaggtgtacaagcagtttcagatacacctactgatacagaaacgtttgagattgtaaggaaagatgatgatcgtaaccgagttcgattcaaagcatcaaatggtttgttcctacaggcacaatcggagacactggtaactgcagattatgcagagtctagttgggatgatagcgatccatctgtgttcataatgacaatcgtaaacaccatacaaggtgaatttcaaatcactaatggttatggccctgataaagcccctcaagtcatgcaggatcattggaattcttacatcactgaggaagatttcaatttcatgtctgcaaatggactgagtgccgtgaggatacctgtagggtggtggatagcgcaggatccaactccccctaagccttttgttggaggctcttcaatagccctcgacaatgctttcacatgggcagagaaatatgggatggagggaattattgatttgcacgcagc

SEQ ID NO: 813 - DNA, 442 bp, Gossypium hirsutum
  Clone ID: GOSHI-09MAY01-C11623_1
gattgcgatgcgaacccaagtcctaaaccagaaagcctgaaaaacttcgagaacaaaagaaatatggcgggattgttagcatgggcggcggacgtagtcggaggccacggcggcaacagcaaccaagacgatgacttcaacattatcccattaattttctccccagagcagcaacaatacgtgcaagaattggatcgaacggcttcctctctcacccgtctgatccaagatctacgtctcaggttgcctcctcctgacatctcccaacgcctccctcatcttcacgcccactccctcgcttccaatgccgcccttgctctccaactcaacgctcactcttctaccgcgtgagcaggcccaattgcgagaggagacgttgcaacaggaaaacactgcatatgaaaatgctatatcagattgtgatggtaaaatacacgagaag

SEQ ID NO: 814 - DNA, 663 bp, Gossypium hirsutum
  Clone ID: GOSHI-09MAY01-C11163_1
atatattaatgctgctactcctccggctaccgctcctcacattcccccctcgacccaccacgcctccgttttttcgtacgctcaaatacatctttctttcgtctcatttaaaatgccttgggggttccatattcagagcttgaccaacgttttctgtaatccctcccacccagttacagctttctttcctctttagagcctcctttgctcgaacatgagcataagtattctcttttttaggtataaaatgaaaccatatctcttgaaatctgtcttttgtgctttgaatgtctctaataattgctccaatggccgatttgtcaatctcgaaacgttggcatttctttataacagtttttgagtcgcccattaccttcattttgtttaatcccgtgaagtttcctaatttcattgcttgtagccctgcttgagcctctgccatgaacggagtagctatatcggaatgagtgaccactattcgatgctaagatcttcccctcttcatttcgtacaagcaaccccgaagccgatctggaatgttgttggtcataaactgcgttaaaataaactgtaacccttgctctgcgaacatgctgtgaaagcttctattggactgattaaccagagtccacaatagaaaaaatctgatcttgtcactagtcc

SEQ ID NO: 815 - DNA, 386 bp, Gossypium hirsutum
  Clone ID: LIB3166-035-P1-K1-E11
cggacgcgtgggtcagtccggatgccttggtcgatacttctccagagcttgacgaacgtgttctggaatccctcccaccagccctacttgagcctctgccatgaacggagtagctatatcagaatgattgaccattttcgatgctaagatcttcccctcttcatttcgtacaagcaagcccgaagccgatctggaatgttgttggtcataagctgcgtcaaaataaactgtaacccttgctccgaacatgctgtgaaagcttctattggactgattaaccagagtccacaatagaaaaatttgatctgttaactagttccctgttcaaagacccaagtaaaccactcccacgtagtctgagtatcaatattcagtacccaagacag

SEQ ID NO: 816 - DNA, 1277 bp, Gossypium hirsutum
  Clone ID: GOSHI-09MAY01-C11133_1
atacactaagtccggcagctggataatccagttttggtttttgatttgatcatctatctcggccgcgagacaaggatgaatttagtggaaggtttactgactcaaatccaggggctatcaagcaccgcctccgatgttttatccctacaaaatgtgcttaatcaagctgatgagtcgctccatgccgagtccactcggttgttgccttttctcgaccaactcgacccttccaaacactctctcggttacctctatttcctagaggcttgcactgctggtccagttacaacagaatcagctagttcatttgtgttagtcattgccagatttatcagttcatgtgttgctgagcaaatacgcttggctcctgataagtttatatctgtttgtaagaggttcaaggaccaagttctgttgcttgaggaacccttgcgtggcgtggctccgatgctgactgctgttcggaagcttcagtcttcgactgaacatttgactactttacatcccgagtttcttttactttgtttgttagcgaagtgttacaaaaccggtctctccattctcggacgcgtgggttttgaggttgatcagccaagggacctttatctctattgctactatgggggaatgatatgcattggacaaaagtgttttcggaaagcattggagcttctacacaatgttgtgactgctccaatgtctaccatcaacgctatagctgttgaggcttacaaaaaatatatattggtctctcttattcaccatggacagctttctaccagtctccccaagtatgcttcacgagttgctcagagaaacttgaagagcttatgtctgtcatatatgcaactggcaaatagttataacaatgggaaaattgcagacttagagacttatgtacaggcaaacatggagaaatttggaagtgacaacaatctaggtttggtgaagcaggttgtatcatctatatacaagcgaaacatccagaggttgacccagacatatttaacgctctcacttcaggacatagctaacacggtgcaactgaatagccccaaggaggctgaaatgcatgtccttcaaatgatccaagatggtgagatatatgcaacaatcaaccagaatgatgggatggttagattcgtagaggatcctgaactatataagacctgtgaaatgattgagcatattgacttatcgatccaaaagttgatgaccctctcaaataagctgactgtcatggatgaactcatgtcatgtgatccattgtatctagg

SEQ ID NO: 817 - DNA, 344 bp, Gossypium hirsutum
  Clone ID: LIB3165-042-Q1-K1-D3
ggtcaggtaactgagtagataggatcacaaaacactgctgcaaagggatgaacacagtggaaggtttagtgaatcaaatccagggactatcaaccactgcctccgatgttttatcgctgcaaaatttgcttaaacaagctgatgactcgctccatgccgagtccactcggttgtttccttttctcgaccaactcgacccttccaagcactctctgggttacctctatttcctggaggcatgcactgctggtccagttacaaaagagcaagctggttcatatgtgttaatgattgccagatttattacttcatgcattgctgagcaaattcgattggcgcctgat

SEQ ID NO: 818 - DNA, 378 bp, Gossypium hirsutum
  Clone ID: GOSHI-09MAY01-C11123_1
ggaattcagtggacaagtgaggaagaagagaagttcaaggctaaggttatggaggcatatgagagagaggggaatccgtactactcaacagctaggctctgggatgatggtattatagatcctgctgataccaggataattgcggggctctgcatctctgcttccaggaatcgcccatttgaagataccaaatatggtgtattccgaatgtaaatggaatcattaacttgtcaatccgtactcttctaacctgaaaagaaaatatggaaaacaggaagactatgcaataaaaaattctggataataatgcaatgcatgtcaatgatcaataattccttggttcaaatgtaaaagtcctggtgtaagggttcaggtgcc

SEQ ID NO: 819 - DNA, 436 bp, Gossypium hirsutum
  Clone ID: GOSHI-09MAY01-C11093_1
gccctagaatttttgttagaatctcttggatttgctaactgtaccgatgtctttcccgtgggtatcggagatgatcggaccgatgaagatgcattcaagatattgagggacagaggccaagagttttggtattcttgtatccaagttccccaaggacactaatgcatcctattcattacaagaaccagatgaggtcatggactttttacgacgtctggttgaatggaaagaattatctctaagaactcagtcgagaatgtagacgaaaataagatagtggaagtatatatctgtgcaccctagcaaagaaattgtgcaggggggtgtgggattaaagtagcaaaattattgttttaagatgagagaaatgattattaaagctttgttcatctttgtaactagttggggtacaaagggtaaaggctttgtggcttta

SEQ ID NO: 820 - DNA, 500 bp, Gossypium hirsutum
  Clone ID: GOSHI-09MAY01-C11043_1
attttcttggtgaaaatcagatctctactgtaaattaccatggcgaggtgcctgcagaacaaagggttgaaaacctgaacaagttcaagagtgatgatggagactgtcccacattggtttgcacggacttggctgctagagggctggacttggatgttaatcatgttatcatgtttgatttccctttaaactctatcgactaccttcatcgcactggaagaactgcacgaatgggtgccaaagggaaagtaacaagtttggtggctaaaaaggacttattgttggcagaaaggatagaggaggcaataagaaagaatgagagtttggaatctcttacagttgataatgtccgaagggatactgcaaggactcggattaccgagcagaaggggaagaatgttaaactgttcaaggcatctaatcagaaaaacaagaccaaagctgtgtctgcatctgtgcgcacatcagggaaaaaacccacaattgcaaagtcggtaaaa

SEQ ID NO: 821 - DNA, 465 bp, Gossypium hirsutum
  Clone ID: GOSHI-09MAY01-C11063_1
cccacgcgtccgcccacgcgtccggattcaagcacaagtgatggcccttcgggatggcttcgtctttcattgtatgggaattcacactctgcaggttcagcaaagacaaataccacggggagttatgcttcttccttgccttcgaacctttgtcgccacttctcgtttgctgagatcaaggctgccacgaagaacttcgatgaggccttagtccttggggtgggaggctttggtaaagtttacaaaggtgaaattgatggtgggactactaaagttgcgatcaagcggggcaaccccttatctgagcaaggtgtgcatgagttccagactgaaatcgaaatgctttccaagctccgacaccgccaccttgtttcgttgatcggttactgtgaagagaactgtgaaatgatcctaggttacgactatatggcttacggaactctgcgtgaacatctatacaaaaca

SEQ ID NO: 822 - DNA, 543 bp, Gossypium hirsutum
  Clone ID: GOSHI-09MAY01-C11003_1
aagtgtacgcgtatagattggttgcaggggattctccctgaggaggaggatctatagtacttgtttcaagaaggaattaattgcaaaaatgtggtttgagtggaacaagtatgttggtaaccggtgttttgatatggagactgttaatttgaacgcgtgcaatgatctctttttggaaagtcagttgttaagggaagacattagggttctgtacagaaggtagatgctgggcccatgggctgaggcggccatgggcagtttccttgtggtgcacatgtattttcttcttttgtagtctgtctttggatgtgtttcccggttaacttttgaaagcatctaggcagttgcttgagagcaatatgaatagattccttgctatagaaatgaccttttttgacggtccttggagacttttcccctcgtgtccaaggatctttagtgcaggcaggaatcgagatagatgcttactatttgttcatgaaactatgtgttcctagttttgaaatgggagaaggcgcttggttaagtaatcgaggttcccat

SEQ ID NO: 823 - DNA, 525 bp, Gossypium hirsutum
  Clone ID: GOSHI-09MAY01-C11023_1
tccacgcttcctcccacgcttttctttcgaacaattctcttcattttccgggaaaattatctcctgtttccccagaaaagttttgctcacttagtaacgaaaggtttataaatttcttaagagagaaattattaacataaagaaaccatgattggaccaaccaacttcatcgacgagatagattgcggcagcttcttcgaccacatagacgatctcctcgacttccctaacgaggatgtcgaagctggtttctccgccgctgattccgccgtcaacgccgccgcttttcccagcatttggactgctcaccccgagtcattcccgggttctgactcaggtttttccaacaacagcgcttccgacctctccgccgaactctctgttccgtatgaagacatcgttcaattggaatggttgtcaaactttgttgaagattcaaattgtggagcaagtttgacaattaagaaacaagagcctaattcaaacaataaggactcaccatcccatcatgatcatgatcaccat

SEQ ID NO: 824 - DNA, 469 bp, Gossypium hirsutum
  Clone ID: LIB3585-009-P1-K1-A5
ctcaaaggtttctcgaacaattctgtacattttccgggaaaatcatcttctgtatcctcagaaaagtattgctcactcagtaacgataggtttataaatttattaagagagaaattattaacataaataaaccatgattggaccaaccaacttcatcgacgagatagattgcggcagcttcttagaccacatagacgatcttctcgacttacctaacgaggatgtcgaagctggtttctccggcaatgattccgtcatcaacgccgtctcttttcccagcatttggactgctcactccgagtcattcctgggttctgactcagatttttccaacaacagctcttccaacctctccggctaactctctgttccagttagtggtctaaagtccatatcacccaagattaaagtttacatttgttttgaaaaaatatatcattatgatatcttgatgtcggctacattggtc

SEQ ID NO: 825 - DNA, 528 bp, Gossypium hirsutum
  Clone ID: GOSHI-09MAY01-C11383_3
gggaggcaatatgcagacacaaagctttggagcaacagcagggacagttatgaaccaaagtcaggcaagcggatcgacaacgggaggtgcaccggctcaacccaaacaaagagttagggctagaaggggtcaagctactgatccccacagcatcgctgaaagattacgcagagagagaattgcagagagaatgaaagctcttcaagaactggttcccaatgccaataagacagataaagcttcaatgcttgatgagataatcgactatgtcaaattcctccagctccccctccggccgctgtgtttgagcagattgggcggtgccgctgctggtgctccccttgttgctgaggtgccttctctcgggggtgattgtggccctaatttattttgttaaaaaaatttgagaaatttttacatgtgactagttgatgaaaaatcttgtcttgttcttgtttaaatcattccttgtctgaaatgcgggcagagctctttttcataaatttcgacaaaaacaaaagagcacgc

SEQ ID NO: 826 - DNA, 1405 bp, Gossypium hirsutum
  Clone ID: GOSHI-09MAY01-C11383_2
ggataaataaatcgtcacagtgcagtgtctttaatattgctctctgactcttttattttaattatatataaaccatccggttttgggaaaggcctaaagaaacaaatcaataattgcaattaattaatttggtgaaattatggcttagtccctccattatgttcaaatttacagattttcgccattagcaagtttggttaaaacgtaggcattgatttgatttcttcagaaataatccttttgatgctaaaaaaagttaatgtgggcatagtttttaaggaaaaactcacttttaaacggataattaattatgttaattatttagcccctgatattatgaaaaagggagtaaattaaaatattcaatttgaacaaagtggaagacctaaaaataggattaaacccattaatttaaacaaaaaggagtgtgtaattaaaatttgaatatttaaactgactaattagtattttaatggatgtgggatttggatttgacagacagataaagcttcaatgcttgatgagatcatcgactatgtcaaattcctccagctccaagtgaaggtttaaatttttttctattaattaagattcctgtcagtctgtcttggttgacatgatttatttaatgtgtttattaatcattattttttaaaaatccaatttgttgtatgggcatccctgaaaaacagaggaggggtcgttggccaggttctaagtatgagcagattgggtggtgctgctcctgttgctccccttgtttctgaggtaattactctcatgattaaaatttgcgctaatttattttgttaaaaaaatttgagaaatttttacatggtgacttatgatgaaaaatcttgtcttgttcttgtttaaatcattccttgtctgaaatccgacccatatctcatatctcattttaaaacgacaaaaacaaaagtagcacgcgtgccatcacttttatagatcccttttcatttttggtcatatttcggttttggtccctttatttttttaaaattttagttttaactcttatactttaatcctatttaatttaataatgttacttcatcaagagaagtatttgaagtgctatttgtttggagtgaactgacctcaatagctcaagtggtagcataattacccataagtatctcatatgttgtaaggcatgagcgcaaaccttactcaaaattttttaaatatgttgtttctccacaaaattaggagataaaatcccgatcgaggagaatatttgctctcatttgaacacatcaataagcgttttaatctaccttaaatttctttaaaaacttgaagccttttatgagaatagttagcggtgttaataatttaggttagctaataacaatacaatgattgaactatgtcaatttaatga

SEQ ID NO: 827 - DNA, 1085 bp, Gossypium hirsutum
  Clone ID: GOSHI-09MAY01-C11383_1
ctttgcatggaacttgcagcgaaagctttgtgggggctaattcagcaacagagatgacccaaagtcagggaagtggtccgacggccggagaagcggtgacggcgccggaaaagcctaaacaaagagttagggcaaggaggggtcaggctactgacccgcacagtatcgcggaaagactacgtagagttagaattgcagagagaatgaaagctcttcaagaactggttcccaacgccaacaagacagataaagcttcaatgcttgatgagatcatcgactatgtcaaattcctccagctccaagtgaaggttctgagtatgagcagattgggtggtgctgctgctgttgctccccttgtttctgagggaggtggcgattgtattcaaacaagtgccaatggtgggtcccatccacgaaattccaacggcgaccaaacgccgtcggccaacgacagactgacgatgacggagcaccaagtggccaagcttatggaagaggacatgggctccgccatgcagtatctgcaagagaagggtctgtgcctcatgccgatctctctcgccaccgccatctcaagcgccacgtctcgttcaaggaaccccatgatcaaccatgaaaacccggccaacggcagccaccttttgattcaatcaagcggcggcgatggaccttcctcgcctagcatgtccgtgttgacagtccagtcagccaccatgggtaacggtggccttgaaggtggcgcagcctcggtttccaagccctgataacggcggtgactgacatacgtagagaggaattgaagggaaacagcttttagtctatgagaataaggcggtcttcttcccaagtattttcttaaaagtacgaaacgacgccgtatttgacgtagacttataggctaacccctaagactgacctcatccaatcaacaaacaattacgtagagggaacaaattttagtagtataatgaaatggggtttaagttctttgtatttcaatcttttttctttatttctttgccttgttagaagaaatattattaagaaagtaactaacaattatattataaaaaaaaattagggtg

SEQ ID NO: 828 - DNA, 242 bp, Gossypium hirsutum
  unsure (1)..(242): unsure at all n locations
  Clone ID: LIB3145-005-Q1-K1-F5
ttcctgaaaaaaaactaaaattcttaggatgtaaagaggagattgacgatggtaaattttaagcagcagaacccagttcaagcaagccagtggaacaaaaagctaaaccaccagagccacctaaacaagactacatccatgtgcgagccagaangggtcaagctactgatccccacagcatcgctgaaagattacgcagagagagaattgcagagagaatgaaactcttcaagactgtttcc

SEQ ID NO: 829 - DNA, 755 bp, Gossypium hirsutum
  Clone ID: GOSHI-09MAY01-C11343_1
gaaccccaaaaagaaaaaccctttactttcaattttcattcaaaccctttaaaccttagtattcactcccatctcatcacctctcataagcttccatggtttgataaacaactgggaaaacccaaacaccatgatcccagcatgttttagccaacctagcaacttgtccggtacctctcaagtgcctcaaaatctcatcacctgcatttaccatactcagctatgggactcacctacgtgtctcacgcttacatggtccaaaacccatttctcccattccttaacagtctatgctgctgattccttttctattaccatttccctttttccttccaccttctccttcttcagaaaccgaccaggctccaaatctgtctacttgactcaccaccatcgtcaaagaatcaagctgtattgggatttcaccagggctgactttgctgaaaactcagctgagcccgagtcttccttctacattgccatttcatgcaatgggaatgctagaattcatccttggggatctcatggatgaactcgccaagaggtggtctgggttgtctatggctccacaggtactccttgaaccaacgctcttgtctaggagaggacatgtttttgggccttagagttatgtttcgagggctaactgcctggggtctaaacatgagataggggtggtgatggaaggtctaggtagatgtgccaacaagctgtattagcatggcttgatattaagattgagaggtattatgaag

SEQ ID NO: 830 - DNA, 752 bp, Gossypium hirsutum
  unsure (1)..(752): unsure at all n locations
  Clone ID: AI055120.1
agaatcgacgagtagggaacccaaaagaaaaaccctttacttccaattttcattcaaaacatttaaaccttaatattcactcccatctcatcacctctcataagcttccatggtttgataaacaactgggaaaacccaaacaccatgatcccagcatgttttagccaacctagcaacttgtccggtacctctcaagtgcctcaaaatctcatcacctgcatttaccatactcagctatgggactcacctacgtatctcacgcttacatggtccaaaacccatttctcccattccttaacagtctatgctgctgattccttttctattaccatttccctttttccttccaccttctccttcttcagaaaccgaccaggctctcaaatctgtctacttgactcaccaccatcgtcaaagaatcaagctgtatggngatttcaccgggctgactntgctgaaaactcagctgagctggagtcttccttctacattgncatttcatgcaatgggaagctagaattcatccttgtgattctcaggatgaactcgnncaaagtgttcntggtgcctatggctcacggtactccttgaccaacgctctgtctaggagagacatgtntgngcatanaaatatgtcaaggctagtncttggctaacctagataggataatgnnnnnnngaggtctgagtgattgcaacaagcttgataacattgctgaattaaggatanngattgaggaacngggattttt

SEQ ID NO: 831 - DNA, 585 bp, Gossypium hirsutum
  unsure (1)..(585): unsure at all n locations
  Clone ID: LIB3829-030-Q6-K6-A2
cttttctattaccatttccctttttccttccaccttctccttcttcaaaaaccgaccaggctccaaatctgtctacttgactcaccaccatcgtcaaagaatcaagctgtattgggatttcaccagggctgactttgctngaaaactcagctgagcctgagtcttccttctacattgccatttcatgcaatgggaagctagaattcatccttggtgatctcatggatgaactcgccaagaggtgttctgggttgtctatggctcgacaggtactccttgaaccaacgctcttgtctaggagagaacatgtttttgggcataagagttatgtttcgagggctaagttcttggggtctaaacatgagatagggatagattgtaatggaggggttctgaaggtgaaagttgatggccaaacaagccttgtcataaagcgattggcttggaaatttagagggaatgaaaggatttatgttaatggaatcgaggtggaatttttttgggatgttttcaattgggtcaatagtgagaataataataataataataataataccaatggccatggtgtgtttatttttcaag

SEQ ID NO: 832 - DNA, 1491 bp, Gossypium hirsutum
  Clone ID: GOSHI-09MAY01-C11363_1
cccacgcgtccggaaaaccttaacctctttgtcttcatctcatcctattcctaccttgtcccgctctataaattgggtgaatcaatcgtgtttggatattgagaaatcaccaagccaaagctgtttcatttcaacaagaatgtcgagcgaaagccagatatgggtgattccgttctttgggcaaggccatctcctcccatccatggaactgtgcaagcacatagcctctcgcaatttcaaagctactctcatcatttccttcaatctctcttcttctataccctcttccttccatgatcatcctctcattcaggttgcccaaataccctcttcaccgcctactccaccagagctcagttccggcccccatcatcatcactcagatttagctcagggcattgccagtctgctggagaatacctcccaacctgcctgtgccgtaatagataatatgatggattggacagcagacattttcaagaagcttaagattccaacaattgcgtttttcacctcgggtgcgtgttcagcagctctggagttcgccatgtggaaggctcgcgtactaaatatcaagcctggagagacaattttgcttcctgggttacctgaagaaatggctttgacagattccgatcttaaacaaggcccaccacctggaccacctcctccccagcttgggggcttcgggtttccacgtgggcctccaggaccaccaccaccgccggcagcgcacggctttcctcttggacatccaccaccgaaaatgggaccaccccaaccaggtggacaaccacaatggatggaaactgccaaggactcagtcgcattaatgctgaatagttgccatgagcttgaaggcccatttcttgactatttaaggctccaaattggtaaaccagtttggggtgttgggcccctattgccccaacagttttggaaatcatccgattccttactccacgatcgtgaaatccgacccaacaaacaatcgaacgttacggatgatgaagtgatgggatggttagattcaaagccacatggttcagtgctatacgtgtctttctgtactgaagttgctcccaccaaacaacagttccagcaattggctgatgcattagaagcctcgaacaggccatttatatgggtgatccaacatgggtcgggccgaccaggttcaccatctggtccaccacctggcccacctcaattcttagggaaccaacctgattccaatgatggagtctttgaagaaaagggttactttccacatggttttggaccaaaaggtcggtaaaagagggtttgatcaatacacgggtgggcgcccccgttgttaatattaaccatgcatcgacgggtgggtttctatcacattgtggatggaattctacggtggaagcaatcggacgtggggtgccattattggcatggcctattaggggtgaccacactccaatgccaaattggtattgaatcatctcaaagtgg

SEQ ID NO: 833 - DNA, 401 bp, Gossypium hirsutum
  Clone ID: GOSHI-09MAY01-C11283_2
cggacgcgtgggttgcacctttttttctctgcgcgcctccggtttgaaacgcgggagacggaaagaaaaatatcttcgttgccttttggccttacctgatctgattttttcattcctttgcaaatcaaatttcgaagcttttgatctctgcttcaaacagttcttagcaaaaagtggggtatataggatcacatggtgtacaagctttgaaaagatacaaatacagcggtgtggatcactcttaccttcctaaatatgtattacaacccttttggtgccgttttgttaactttcttccctctttggatgccaccaatcatgattacacttaccggatttatgctcttggttaccttatccgtgcttggcttttgtttattccccccacttggattttacct

SEQ ID NO: 834 - DNA, 724 bp, Gossypium hirsutum
  Clone ID: GOSHI-09MAY01-C11283_1
cccacgcgtccgcccacgcgtccgctgaaatggggaatttcccatggccgacaatatgttctcagttgccactctccaacaaacactctgcactcccatggctgatgagaccccaaaggccactccacagcctctcactcccttctccgccgtgaattaactaatatttaacccgcgcggccgcttatgtttgaaacgcgggagacggaaagaaaattttcttcgttgccttttggccttacttgatctgattttttgattcctttgcaaatcaaatttctaagcttttgatctctgcttcaaacagttcttagcaaaaaatggggtatataggatcacatggtgtacaagctttgaaaagatacaaatacagcggtgtggatcactcttaccttgctaaacatgtattacaacccttttggagccgttttgttaacttcttccctctttggatgccaccaaacatggtatctcttgctggcttcttcttcttggggactttctattaacatacaaactcggacatgcttatacatgtatatgcatgtatactattacacctgatttatttgattactaaattggtatgcttttgtttcttaagataacacttatgggatttatgttcttggttacctcagcagtgcttggctatgtttattcccctcacttggattcacctccaccaagatgggttcatttcgctcatgggttacttttattt

SEQ ID NO: 835 - DNA, 420 bp, Gossypium hirsutum
  Clone ID: LIB3146-005-Q1-K1-B9
tcgcccacgcgtccgactacttctaaattgtgattttctattaacatacaaactcggacatgcttatacatgtatatgcatgtttactattacacctgatttatttgattactaaattggtatgcttttgtttcttaagataacacttacaggatttatgttcttggttacctcagcagtgcttggctatgtgagtgacgaggtgtgctagtgaactagcttcttccatgtctttattaataaaagacatggcagaaacccaatgctccttccaaatttcttcggtcaatctcgtatctatcctcaattctaagctggctccagtttaactactttgaaaacacggagaggagcaacatctatagaaccaattagatatttctttcaatggcttgaattgctactacttgttaatatttg

SEQ ID NO: 836 - DNA, 571 bp, Gossypium hirsutum
  Clone ID: GOSHI-09MAY01-C11243_1
attataatttttttttctcaatttcatttttccctagctcaaaaccctagatttgattttctaagagggaataaaaagtaaatggcggtgggggctatctcatcttcgtcttctgttgatgagtccaccggcttaaaccgtaattccaatctcgagccggttgatgaacagttcggtttgttgtcattgaccgaacctgtcgaattggaacctaatcgtggaaacggctttggagtcgccaatggttcgttgaaccgggagagtagcaacggcgtggttgtgtttgaacgattttcagtgcagaatcgggaaatatttggcgacgaaaggccttcgagtcctacagtagtgggtatgccggtgagagagggagcacagtgcctcgaccgcgtcgaggatcgatggagcgagtgaggttgacggtgatgagattcaggaagtaggaacgattgttcccttgaagtattctccgatactcaggcctccgcttgggtaccgggtaaacgtcatgttgatgaggatgatggttcaatatcatggagaaagaggaagaaacacttctttattttgc

SEQ ID NO: 837 - DNA, 510 bp, Gossypium hirsutum
  Clone ID: GOSHI-09MAY01-C11233_2
ccggccgggaggcccggggcgaccctatcttcctcccactcttccttttttttacaaataccaaatggtcaaacccacaggcgatctttggctataaatcaggagccacaacaacaacagctgctgaacaaccccaagctacccacatccctgaaaaaccaggcactcaagcaccatggaagccagtggttccaaccccaagtgccaagcctgccccaaaaagtgacaccatccttggcaaaccatatgaagacataaggttgcactacacaattggtaaagaactgggaaaaggtcagtttggtgtaacttatctttgcattgagaattcaactgggaaacaatatgcttgcaagactatatcaaagaggaagttaatcacaaagaatgataaagaagatatgagaagggagatacaaattatgcagcatttgagtgggcaacctaatattgtggagtttaaaggtgcatatgaagataagttatcagttcaccttgtaatggaattat

SEQ ID NO: 838 - DNA, 666 bp, Gossypium hirsutum
  unsure (1)..(666): unsure at all n locations
  Clone ID: LIB3543-062-Q6-K6-D7
cggacgcgtgggtttttcatcaaatctgtgcagtagattcctgagtcactatcttgtattggtgattttgggtgttacaagtgaaaccagatgggtacttgcctgacgaaaagcaaagactcgaagccaacgcataatgggtatggatcaggaccgacaactacggctgctgtgcaccaacaaaggtaccaggagcctgttaggcctgcaccagttcaaccccaattccaccacantcccttgaaaaaccaggtactcaaacaccttggaagccagtggctccatcgccaagccccaagcctgttgccccaagggttgacaccattcttggtaaaccatttgaagatataaggatgcactacacaattggtaaagaattagggaaaggtcagtttggtgtgacttatctttgtattgaaaattcaactggaaagcaatatgcctgcaagaccatatccaaaaagaaattagtcacgaggaatgataaggaggatatgagaagggagatacaaattatgcagcatttgagtggacagcctaatattgtggagtttaaaggtgcatatgaggataagctatctgttcaccttgtaatggaattatgtgcntgtggtgaattgtttgataggattattgccaagggacattatattgaaagggcaactg

SEQ ID NO: 839 - DNA, 1951 bp, Gossypium hirsutum
  Clone ID: GOSHI-09MAY01-C12993_1
gtcaatataaaatttagacccagaaaaactgcaaccccaattgtttgaactgaaattattgtaggataatgttgataacggtcagggaagcttcttcttggcctctcaccttcaacctctcctctttctcttctcctaagccttctccaatactcaaaaactctgtttgcagagccagtttaagtgttcatccaaaacccacctccaattcccaatcatggaaccttagtcttctttctaacagccaaaaaggatctgtttttgatcctttgggtatcaacccagacgagtcttcaggtttaaatcgtgtttgggatagttttctatccttgttaacacctacatttgagagtacctcaggtactagaaaggagaaatcttcttcggctagaggagtggcagctgcaattgaggacagttccattgaatttggggatttcttcaaaggcccattaccaggaaaatttctcaagcttttagcatttttggctttatctcgtcttggagtttatatacctctgggaggggttaaccgagaggctttcgttggcaatttggatcagaacagtctactaagcactttggattcgttctccggaggaggcattggtagacttggtatatgctcccttggtattgttccttttattaacgctcaaatcgtgtttcaactcctcgcccaagtttaccctaaattgcaagatcttcagaaaagagaaggtgaagctggaagaaagaaaattttgcaatatactagatatgcctcggttttttgctatagtacaggcaattggccaagtactttaccttcgtccatatgtcaacgatttcagcacgcagtgggttctctcctctgttactttattgacacttggtgctgtactgacgacatatattggggaacggatttctgatctaaagcttggaaacggcacatctcttttaatatttacaaatattctatcctacttgcctgcatcttttggaaggacagttgcacaagcatatcaggatggtaactacattggacttgttgccatcattatctcgttcttcctgctggtacttggcatcgtttatgttcaggaagcagagaggaagattccaatcaactatgcctcaagatactccagcagaagcggaggacttcaaaaatctgcttacctaccctttaaggtaaacagttctggagtgatgccgattatattttctacatcatcccttgctcttcccggtactttagcacgatttactggcatatctgttctaaagaaggctgcagttgctttgaatcccggagggtctttctaccttcctaccaatatattgttgatagccttttttaattactactacactttcctacaactggaccctgatgatgttagtgaacaactgaagcggcaaggtgcttcgattccactggtccgacctggtaaaagtacagcagcatttttaaagacggttcttagtcggatatcagttctgggttcagtatttttagcaatcttggcagctggtcctgccgtgatcgagcaaaccacacacttgactgcattccgaggatttgcgggcacttcggttcttattcttgtgggatgtgcaactgatactgcaagaaaagttcaagcagagattatatcccagaagtacaagaacatagagttttacgactttgacaagtatagcccgtaaatgaggcggcaagtttaagaccagaagagaataggaagactttttttttccgagcaagttccgtataccgtagtctctctaacaagcaagacattgacacttgttatgagctatcatactccgaatatccttttttttttatttccgaagcataaaatgggactcgggatatatcttgtacatatgctgcccgtagcagccactgttattgctcaagtatctttcaaggtgacaggaatggtctatttggtagctg

SEQ ID NO: 840 - DNA, 528 bp, Gossypium hirsutum
  Clone ID: GOSHI-09MAY01-C12983_1
gaatagcccaagtgaaagttcctcacaatcatttgtcattcaaagaggggaagctcaaaacagtgatcaatgagaaaagggcaagtgaatgtgttctttttgttactgtttttgagtctctcttcagcttctgatcagaaatggaggaaagcaatgatgtcagcttacaatggttcttcttcttcttcttccatgatgatgaatagagttgggtcctccatcctgttcccaattcatggaaatgtgtatccaacagggtactataatgttaccatcaatataggtcaccctcccaagccttactttcttgattttgatactggaagcgacctcacatggctccaatgcaacgctccatgcgtccattgtattgaggcacctcacccgctttaccaacccagcaatgacctagttgcctgtagacatccgctatgtgcagcattgcatccgcctgactacaaatgtgaaagtccagaccaatgtgactatgaggttgagtatgcagatggtggttcatcccttggagtc

SEQ ID NO: 841 - DNA, 548 bp, Gossypium hirsutum
  Clone ID: GOSHI-09MAY01-C12943_1
tactatccgaggcttcgtctattgtatccgaagtgcccgattatttattcgggttggagaactccgatgagatccaacctcgtgacccgaaattaaggacacgtcagcttttgtatgagaataattcggtttcggatcccggttctcctgccccggttgtttcttcttctcctttttgttccacgtcatcagctactgttgtaccttcagtggctaaaccggataatcctgaaccggttttgaagtcaaagcaaagtcaaacggacagttttcgtggagcaacccgtttcgcaaccgaccacatattcgggtactccgatgtggcatcattatgttccggattctcattattctgctcctgccgtacaacaaatacccgtttatttatgttccgggtcatgtccaacccggaaatcatcagggtcaagctcaacccgttcaaattcgtacacagtatgtccagcagtattcgaattcatcgggtcaagtacccgtagggtatcatcaacaagttcatggtgcgggtcaaacaatactggcaggcacca

SEQ ID NO: 842 - DNA, 641 bp, Gossypium hirsutum
  Clone ID: GOSHI-09MAY01-C12883_1
ataaaccctcttttccttctctttcatctatcctcttcttgaacatgacaaagaccccctatttcttgatcaaacaaccccccacaaactgcatttaacccaaaaaaaaagaaggttgtataccagacttcaggcatggcaactctaaggtttaactcactgacagggaccctagaaaagaacccgacatcatctttttcttcaaatccaaggctgtcttgggcttactttcagtgtaataacaaaggtggaaagaagggcatcgagaatgacagtcaaagcaatgggagcagccaaatacaaaggaactcaaatgagggaaaagaagctaactgagatgattgggaaaaaagttacagaagctaagcaagtttgtgaaggagatgagacatctgatgagtgcaaagttgcttgggacgaggtcgaagagctaagtcaagctaaggctgatcttaggcttagacttgaaatagaaaagaaagatcctttggagtcgttttgccaggaaaatcctgagactgaagagtgtaagatctatgaagattgatgggaaaatgaatatcattttctagatctgcctattgttatttagtgggaaaatagtaaggaattaagcacctctttagaacaattgaaccttg

SEQ ID NO: 843 - DNA, 907 bp, Gossypium hirsutum
  Clone ID: GOSHI-09MAY01-C12843_1
tgaaactttgggaactctttttttaaaggctgaaactttgggaacgttgtcccagaacacacttagcatcagcctccaatggccagttggggtgtagcagaatgtagtttaagacccttcactgccgtcaaaatccaccataaacctagaccttcattaccttcaaacaccattaatgctttcaagttcaaacctttaccatgttctgcattcaaggtcccaactttatggtctaaaggtagaaacttggggggattggggctgttgagtgtgagtgctccattgaaagtgacaataactagtgaagaagataaaggtaaagaagagagcaccactgatggggttaataatggtgagtttgaccctggtgcagcacctccttttaagttgtctgatattaaagctgcaataccaaaacattgttgggttaaagatccatggagatctatgagttatgttgtgagagatgttgttgttgtgtttggattggctgctgttgctgcttatttcaataactgggttgtttggccactttattggattgctcaaggaaccatgttttgggcactttttgttcttggtcatgactgtggacatggtagtttttccaataatccagctttgaatagtgttgcaggtcatcttcttcattcttcaatccttgttccataccatggatggagaattagccatagaactcatcaccagaatcacgggcacgtcgaaaatgacgagtcatggcatccgttgtctgagaaaatttacaagagtttggacaatgcaacaagattattgagggtcaccttgcctttccctatgcttgcttatcctatctatctgtggagtccaagtccccgaaaaaaaggttcacatttccatccacacagtgatttatttgtcccaaatg

SEQ ID NO: 844 - DNA, 507 bp, Gossypium hirsutum
  Clone ID: GOSHI-09MAY01-C12583_1
cccacgcgtccgcccacgcgtccgttcactcttccgcccacgcgtccgagctcgtctcgtcagagtcatttgggatatccggcggccatggcagcttgttccctcactctatcgtcctccttgccccaacctaaacccgcattttttggatcgaaaccctctcatctatccctacacagcacttcgtttgcgctcaaatcccagtgtttcagggtttcctcaagttccgtttccatctccagtcgccccgccgatgatctagttgcatctcttctctccaaggtgatacaaacggatggtggagtttcactcaccacaaaacagcaccaagaggtagctcaagtggctaatgagttgaacaaatattgcgttgatgaaccagtcaaatgccctttaatcttcggagattgggatgtggtttactgctcgaatcccacgtcaccaggaggcggctacagaagtgcattggggcgccttttcttcaagaccaaggacatggttcaggct

SEQ ID NO: 845 - DNA, 375 bp, Gossypium hirsutum
  Clone ID: LIB3166-054-P1-K1-C2
caggcggccatggcagcttgttccctcattctatcgtcctccttgcctcaacctaagggctcattttttggatcgaaaccctctcatctatccctacacagcacttcgtttgcgctcaaatcccagtgtttcagggtttcctcaagttccgtttccatctctagtcgccccgccgatgatctagttgcatctcttctctccaaggtcttctttctttcacctccatttagttccatcaatttgttttttttttaatgcaactgaacaccaagtgagaattaggtgatacaaacggatggtggagtttcactcaccacaaaacagcactcaagaggtagcttaagtggctaatgagttgaacaaatattgcgttga

SEQ ID NO: 846 - DNA, 632 bp, Gossypium hirsutum
  Clone ID: GOSHI-09MAY01-C12443_1
tttgtttcttgtggttctccttgtagcattctgctcatttgttgttattggtggtttcctgttcttcaactttaggtgctattggctggagtttacaaggagctacgtcaggcatggaggatgccaaagagcaaattgtacaggagtccaaaaattccatgctaccatctcaagatgagaaaaatcccttcgtccctggaagagagataccttctgatgcgcaagatcaaatacaaagattttatcactactgaagcaaagagaagccctcgcgtccgataatattcttattgctagctttttacttcagcatgagttggcagataatgccatagctggctgcattgaaaatgaagaggctgttttgtcttttggggatgaagatatggtttcggttgatcaggaaaatgaagaatttcaggactgtgaggttcgtgctgagggacatgaaggaacccctcatgaagctcttattttggcgcttggctatttgggtgtgcgggatctttttcttattgagaatgtttgcacatctctgcgatctgtagttcagaatgatcctcttttatggagggatattcacataaatctgccactgaatgagaagattacagatgatgttcttttacaaa

SEQ ID NO: 847 - DNA, 791 bp, Gossypium hirsutum
  unsure (1)..(791): unsure at all n locations
  Clone ID: AW187980.1
tgcgtcgtgctcgccgctctcttactcgtttttatggtttataattatttattttttatttatatattatatttngatagtgtattagttattttcattggtgtgtagtggtgttgtatatattgtttataatttgtatatgagatacccttctatgtctactgtttccattatnnnnnnnnnnnnnnnnnnnnnnnnctggtttttacgcttcctttcaccctcagaggatgacactatccatgtgcttctctgccaccacggttgctgatcccattcccacttcagatccacatccaccccattcatccgactctcaatcactcgtggtcgtttccttctacaagtttgttgacttcgtacactattcatccgaccgtgctgatttccatcttgacattttatttgttcatattccatgtagtttatatttgtcatcttgaaaacaattccactgaaaatttcaacagtctttttatatttgtatttttttttcaaacgccatttttcaaatcttttcctttgaatttccgatcccttcacagtgctgaaaaatattcaggtgctattggctgggatttacaaggagctacgtcaggcatggaggatgccaaatagcaaattgtacaggagtctaaaaattccacgctactatctctaaatgaggataggtgcaaatggtttggataactcccttgggaaaaaagtttgcgggtatgcccccattgtggaaaacttgttctgttttacaacttggatcctacttactctcccacagaattggatgattc

SEQ ID NO: 848 - DNA, 531 bp, Gossypium hirsutum
  Clone ID: uC-gsronu33B011f09b1
gcgcctttctctggttttgcgcgcttcctttcaccctgagaggatgacactgtccatgtgcttctctgccaccacggctgctcatcctattcccacttcagatccgcatgcaccccattcatccgactctcaatcactcgtggctgtttccttctgcaagtttgttgatttcacagaccattcatccgaccatgctgatttccatcttgacattttatttgttcatattccatgtagtttatatttgccatcttgaaaacaactccaccaaaaatttcaacagtctttttatattgtattttttttcaaacgccatttttcaaatctttttctttgaatttcggatcccttcagagtgctgaaaaatattcaggtgctattgctagggtttacaaggagctacgtcaggcatggaggatgccaaagagcaaattatacaggagtccaaaaattccacgctaccatctcaagatgaggttgtgttcttatcttggctcattgtggaatatttgactgggtaaagatcttagc

SEQ ID NO: 849 - DNA, 452 bp, Gossypium hirsutum
  Clone ID: LIB3145-028-Q1-K1-B7
ccggaccggaagggcccgggccgacccacccgtacggctagcgctaactggttgctgcttattacttgatcaaaaagcaaaagagcgcatgggagacttgcatatgcttagctaggtactacatcatgagttgtgcgatcatgccattgatggctgcattggaaatgaagaggatggaatgacttatggggacgagagatatggtttcggttgatcaggaaaatgaagaatttcaggactgtgaggttcgtgctgagggacatgaaagaacccctcatgaagcttttattttggcgcttggctatttgggtgtgcgggatctttttcttattgagaatgtttgcacatctctgtgatctgtagttcacaatgatcctcttttatggagggatattcacataaatccgccactgaatgagaagattactgatgatgttcttttacaaataact

SEQ ID NO: 850 - DNA, 218 bp, Gossypium hirsutum
  Clone ID: LIB3196-008-P1-M1-C8
ccgatgcggtcagagggctgaaaaatattcacgtgctattggctggggtttacaaggagctacgtcaggcatggaggatgccaaagagcaaatcgaacaggagtccaaaaattccaagccaccatctcaagatgaggaggcagctataaagaaaaaatatggagggattattccccagaaaccagcactaatctataatgaccatgaacgggcctact

SEQ ID NO: 851 - DNA, 1025 bp, Gossypium hirsutum
  Clone ID: GOSHI-09MAY01-C12463_1
tccgcccagcgtccgccccgcgtccgcccacgcgtccgcccacgcgtccggtagaactaacacgggggtcagaggatctaccatggaaaaaaggtactggttctgggaaatctagcaaaggcgattcggcaaatcccgcgccggccgatggaaagttgaagtggtcacagtatgaggggcctgatccagatttagctgaaatgctggaaagggatgtcttagaaaccactcctggagtgcggtgggatgatgttgctggtttgactgaagcaaaaggcttttagaggaagctgttgttcttcctctatggatgcctgagtattttcagggaattaggagaccatggaaaggtgttcttatgtttggccctcctggaactggcaaaacgctcctggctaaagcagttgccactgagtgcggaacaacttttttcaatgtttcttctgctactttagcctcaaagtggcgtggggagagtgaacgcatggttcggtgcttgtttgatcttgcaagagcttatgcacccagtacaatttttattgatgagattgactctctttgcaatgcccgtggggcttctggtgagcatgagtcatctaggagggttaaatccgaacttcttgttcaggtagatggtgtaaataatactggcacaaacgaagatggtagccgtaagattgtgatggttttggctgcaactaacttcccatgggacataaatgaggctctcaggaggcgactggaaaagcgtatttacattcctctgcctaattttgagagtcgtaaggagcttattcggatcaatttaaaaacagtcgaggtggctgctgatgtggatattgatgaagtggctcgtcgaacagagggatacagtggggatgatctcacaaatgtttgtcgcgacgcttccttgaacggcatgagacgaaaaatagcgggaaagacaccagatgagatccagaacatgtcgcagatgagatttcgaagaccctgttgcaatgtgtgacttcgaagaaaccttggct

SEQ ID NO: 852 - DNA, 450 bp, Gossypium hirsutum
  Clone ID: GOSHI-09MAY01-C12793_1
cccacgcgtccgcggacgcgtgggtttgtattcttcaatccggatctctgctggaccgtccttccggaagatcgtctctccctcgcaccagggaatcccccataactgtcacagaggggagctccatttcactccctagtttaaccgcctgtaaacccgtaagggcttcagcagcaaatggagactgaacattccggtgtaaaaccgtcttcgtcgccatgagtcgtccgcccctgccccagaccaccaggccggatgccgacttaaaattcctgctatcaaaggctgcgtcgaactgaatcgtcacgctggttcctccctcttgatacctgtgactgctgctcggttttaaggtacttcctcatcctcaacccttcgagtcagctatgtagtgttaaacttgagagataactcctacctgttctgtttctgtcatgatgaattattcct

SEQ ID NO: 853 - DNA, 927 bp, Gossypium hirsutum
  Clone ID: GOSHI-09MAY01-C12693_1
cccagaccttagtttctctcggcatccgcttcgctttcctctcccctctcgacgccctccacggcgacattggcgcgctctccgccaccgacatcctcgtcctcttttcgaaatccggctccactgaagaactcctacgtctcatcccctgtgctagagccaagggggtttatatcatttcggtcacctccgtccccaacaatgccttggcaaacgcttgcgatatgaacgtgcatcttccgttggagagggagttgtgtccgtttgatttggcgccggttacttcgacagcgatccagatggttttcggagatacggtggcaatagcgcttatgggagctaggaacttgactaaggatcaatacgcggccaatcatcctgctggtcggggtgggggaaaagccttattttcaaggtaaaagatgtgatgaagaagcaagatgagcttccaatttgcaaggaaggcgatttgataatggagcaactggtggagctgagtagcaaaggatgcggatgcttgctggttatagatgatgaatatcacttgcttggcacatttacagacggtgatttgcggcgtactcttattaaggccagtggagaagcaatattcaagctcagagttggagacatgtgcaacagggaaccgagaaccattggtccggatgcaatggcagtggaagccatgcaaaagatggaatcaccaccttctcctgtacaatttctgcctgttattgatcatcaaaatgtcttgattggcattatcacattgcatggattagtgtcagctggcctttgagatgtatgtctggatttcaatgtgacataagtgttgactagaatttatggttcaaactatgataggatcttatgtatactggacataatttctgaccaatttatttattctatgtgatatgtttgggc

SEQ ID NO: 854 - DNA, 1027 bp, Gossypium hirsutum
  Clone ID: GOSHI-09MAY01-C12653_3
tgttttcaccacattagctaagggtgggtcagtatgagggtgataccaaaaaattgtaatttcagctccttccgcagatgctcctatgtttgtggtgggagtaaatgagaatacctacaatccaagcatggacatagtttcaaatgctttttgcactaccaattgctagctccgttggggggggggttttttttttttcatcattagtttaatgacaactgtccaccaactacacaactcaaaactttatcccttcaataagactgaaggaggtagaggagctggccaaaatattatccctagttcaactggtgctgcaaaggctgttggaaaagttcttcctgaacttaatggaaagcttactggaatggcattccgtgttcctacacccaacgtctctgttgtggatttaacttgtcgacttcagaggagtgcctcctatgaggatgtcaacgcagtcatgaagtatgctgcagaggggccacttaaaggcattcttggatacacagatgaagatgttgtctctaatgattttgttggtgattcgaggtcaagcatttttgatgcgaaagccggaatagggttaagtaaatctttcatgaagcttgtttcatggtatgacaatgaatggggttacagtaaccgagtacttgacctaatcgagcacattgcactagtaggagcaactcgcgactgaatattttagagctatgctgttccaattgagtgacaccacaattttatcgtagatgtttgtttcaatgagtaggcataaattcgattgtaccccgaagtggttttttctttcttgtcgattgcatatccagggaggaatcaggcacctgagaacgcaattctagaaataatgataattgaagctttgtatgagcccatcgagactgctttttttctttttttcttatttatggccaagtagtaggggaattgtcttttgtgagaaaacattgttgggcaatatcttgtattttaaaatctaatgtatcgtctgggtttatgctcatttgtt

SEQ ID NO: 855 - DNA, 726 bp, Gossypium hirsutum
  Clone ID: GOSHI-09MAY01-C12653_2
cggacgcgtgggatttcattttcatattttccatattatatatttcacaattgttctcgtgctttgctctctacagcaaaagccaaaagcttctcttcttctttttttttttccttaaacagtatcctttagggtttttattcattttttattcgtctctgaagcttttagcaatggctttttcttctctcttcagatccaccgccgccgcctccgcctctctcatcgaggcagcctccgatcggtctgacctatctctctcaccctctgatcgcctcaaggtttccagccttggttttggtggaaatttcaactccttttttggtgcctctgtttcaactagatcttcttcattacagaaatgcaactcaaggagtatccaacccatcaaagctacagctactgaaattcctcctacaattccaaagtcacggagcagtggcaagaccaagattggaatcaatggttttggtcggattggaaggttggttttacgaatagcaacttcaagggatgatattgatgtagtagctgtcaatgatccttttattgatgccaagtacatggcttatatgttcaaatatgattcaactcacggaccctttaagggaactatcagagttgtggatgagtccacattggaaattaatggcaagcaagtacaggttgtaagcaaaagggaccctgcagagatcccttggggtgagtatggggctgagtttgttg

SEQ ID NO: 856 - DNA, 1488 bp, Gossypium hirsutum
  Clone ID: GOSHI-09MAY01-C12653_1
gcgcgtcttcttctttcgtccttataacatgttgtcgctttgagggtttttatgtcatggtgtttagtgtcgtctctgaatgccttttatgcatatgtgcgtttttctttcctctgcttcatgtttccatccgtccgccgccgcctttccgcctcttctcattcgatggcctgccttccgatcggtctgacctatctctctcaccctctgatcgcctcaaggtttccagccttggttttggtggaaatttcaactccttttttggtgcctctgtttcaactagatcttcttcattacagaaatgcaactcaaggagtatccaacccatcaaagctacagctactgaaattcctcctacaattccaaagtcacggagcagtggcaagaccaagattggaatcaatggttttggtcggattggaaggttggttttacgaatagcaacttcaagggatgatattgatgtagtagctgtcaatgatccttttattgatgccaagtacatggcttatatgttcaaatatgattcaactcacggaccctttaagggaactatcagagttgtggatgagtccacattggaaattaacggcaagcaaatacaggttgtaagcaaaagggaccctgcagagatcccttggggtgattatggggctgagtttgttgttgagtcatctggtgttttcaccacattagctaaggcttcagcacatatgaagggtggtgccaaaaaagttgtaatttcagctccttcggcagatgcacctatgtttgtggtgggagtaaatgagaatacctacaatccgagcatggacatagtttctaatgctagttgcactaccaattgtctagctccactggccaaggtggtccatgaggaattcggtatcgttgagggtttaatgacaactgtccacgcaactacagcaactcagaagactgttgatggcccttcaatgaaggactggagaggaggtagaggagctggccaaaatattatccctagttcaactggtgctgcaaaggctgttggaaaagttcttcctgaacttaatggaaagcttactggaatggcattccgtgttcctacacccaacgtctctgttgtggatttaacttgtcgacttcagaagagtgcctcctatgaggatgtcaaagcagtcataaagtatgctgcagtggggccacttaatggcattcttggatacacagaagacgatgttgtctcgaatgattttgttggtgattcgaggtcgagcatctttgatgcgaaagccggaatagggttgagtgattctttcatgaagcttgtttcatggtatgacaatgagtggggtcacagcaacagggttcttgacctaatagagcacattgcactggtggcagcaactcgcgactgattatttaaagatctgtactgccatctttgtgtgggttaaattggtttacggaatggcatgacttctacataccccaagtgtatgttct

SEQ ID NO: 857 - DNA, 402 bp, Gossypium hirsutum
  Clone ID: LIB3146-061-Q1-K1-E4
cccacgcgtccgggcattccgtgtccctacacccaacgtttctgttgtggatttaacctgccgacttcaaaagagtgcctcatatgaaactgtcaaagctgccataaagcgtgcttcacaggggccacttaaaggcattcttggatacacagatgaggatgttgtctctagtgattttgttggtgatccaaggtcaagcatattcgacgccaaagccgggatagggttgggcaattcattcatgaagcttgtttcatggtacgataatgagtggggttacagcaatcgagtagtcaacctaatacagcacatggaactggtaggatcaacacccaagtaaattatttagcaaggtatgctgttgaaactgagcgacgctgctgcaattttagtgtgcgcaat

SEQ ID NO: 858 - DNA, 609 bp, Gossypium hirsutum
  Clone ID: GOSHI-09MAY01-C12643_1
ctaatactttgtgttatggcaacagattttggttgtttgaaccacgttgtggaatgcatgacattggtggttggtacatcgaaacttttggcagagataagaaaggcaggacagtcccgtcacaaagatattgggatgggtttgatacaaccaaacaatttgaggagagattgcatccagctatgtatttgctcgcccttgcatataggacactcgatattgaagatacaaagataaggaagcaaaccatctggaaatttgttgaaggaaagctatttagtatcctcagtttgtacaagaagtttgtttaggatgattacctctttgggctagtgaaggctagatgtgctttatctttcacgaaggtaccgatgttttcgtttgttttttggcttgaggattggttgcaagtatgctttatacttgattgaggagcatcaagcaaaagtcacactagcaaatttcttggtacaaaatggtcgaggggttcgacttgatgaatcctatgagctgattccttttgaggtcaaaaacaaatagctgcttgttttgcattcgatattcaattgatccgagcatagtgaaacgctatgtgggtaatgggatcta

SEQ ID NO: 859 - DNA, 816 bp, Gossypium hirsutum
  Clone ID: GOSHI-09MAY01-C12613_2
cccacgcgtccgacaaaagcaaaccctacccttttttttagagatctgagatcagaggtttcagagggaggcacgacacagaagaatagagcgtgggagatcagtgatgggatctggggctggaagtttccttaaggttctatttaggaactttgatgttcttgctgggccagttattagtctgctgtaccctctatatgcctcggttagggcaattgaatcggagtctcgtgccgatgacaggcaatggcttacatattgggttctctattccatgatgacattgctggaactcacttttgccaaagtcattgaatggattcctatctggtcctatgcaaagctgattttcacttgctggctggtcatcccgtacttctctggcgctgcctatgtttacgagcactatctgcgacccttctttatgaacccacaacagacgattaacatctggtatgttccgagaaagaaggatttcttcagtaagccggacgatattttaactgccgctgagaaatacattgaagagaatggaacagatgcatttgagaagctcattcatcgggtacgccaacaaccttcggactgttattagcccatgtttagtgcgtgatttggtcccttgttttgcaggctgacaagtccaggagtagcagttatggtcacatatatgatgatgatggctacaggcattgatatccttacagcaaccccgctatattttgttgctcttgtgaagaactcttgaatgcttgtttaaagtgtgtaaattatcttaaattgcttgttagtgcaagtttctaaacactttttttc

SEQ ID NO: 860 - DNA, 756 bp, Gossypium hirsutum
  Clone ID: GOSHI-09MAY01-C12613_1
aaacacacttttcactcaagcaactgccccaataagaacaaaaccaaagctttgggttagtttccttttttaattatatcaaaggtttcagaaagaaaaagagccttggaaagtgaagatgggatctggggctggaagttttcttaaggttttttttaagaactttgatgttcttgctgggccagttattagtcttctgtatcctctttatgcctcagttagggcaattgaatccgagtctcgtgccgatgaccggcaatggcttacatattgggttctctattccatgatgacattgctggaactcacctttgccaaagtcattgaatggatccctatctggtcccacgcgaagctgattttcacctgctggctggtcatcccgtacttctctggcgctgcctatgtttacgagcactatctgcgacccttctttatgaacccacaacagacgattaacatctggtatgttccgagaaagaaggatttcttcagtaagccggacgatattttaactgccgctgagaaatacattgaagagaatggaacagatgcatttgagaagctcattcatcgggctgacaagtccaggagtagcagttatggtcacatatatgatgatgatggctacaggcatggatatccttacagcaaccccgctatattttgttgctcttgtgaagaactcttgaatgcttgtttaaagcgtgtaaattatcttaatttgcttgttagtgcaagtttctaaacactttt

SEQ ID NO: 861 - DNA, 469 bp, Gossypium hirsutum
  Clone ID: LIB3147-029-Q1-K1-E6
cccacgcgtacgcataggctgcgccagataagtttggtatgaccagccagcaagccggacgatattttaactgccgcggagaaatacattgaagagaatggcacagatgcatttgagaagctcattcatagggctgacaagtccaggagtagtacttatggccacatatatgatgatgatggctacaggcattgatatccttacagcaacccggctatattttgttgctcttgagaagaactcttgaacgctagtttaaagcgtgtaaattatcttaattggcttgctagtgcaagtttctaaacacttttgtcaaactcagcacgactctttataagaaatacaaagattccaatcatataagaaaaggcaaaaagattatcatgagttgaaacagcacgattgccttatcaattattaaatgtaagacaatcagctcatgacttcaaattatgtcagttcgcaatca

SEQ ID NO: 862 - DNA, 623 bp, Gossypium hirsutum
  Clone ID: GOSHI-09MAY01-C12603_2
gttcatgtggacaaaaaaaaaacaagatcccgccgttcaccgggaaaaatatcaactgcctcaattcagtagctccaccatgagctccccggggagtggaatattcagtggatttacaaagctatgcaagggactaacggtgatactaatcggtggccacattgttgttcggcttctcccttcttctgttatttaccttgctcttattccggccaggacaatcccttttggttggaacctcataacagctggttatattgaacaatcattacatggggtggttgtgagtgttattggtcttcttttcatggggaagttgcttgagcctatatggggttctaaggagttcttgaagttcatcttcatagttaactttctaacttctgtctgtgttttcactactgctatcgccttgtactacataacgagggaagaaaattacctttacatgcctctttccggcttccatggggtgctggcgggcttcttggttggcatcaaacaaattgtacctgaccaagaactgtctttgctgaaaataaaagcaaagtggctgccatcacttatgctgttgatttcgattgccataagttttttcactccagattcggcaacatatcttc

SEQ ID NO: 863 - DNA, 1276 bp, Gossypium hirsutum
  Clone ID: GOSHI-09MAY01-C12603_1
cccgggtcgcccagcgttcgagatcactccgttcttcactggaaaaacataatcaaactgctacaaaataattctccaccatgagctctccgggaagtggaatgtttagtggatttacaaagttatgtaagggattggctgtgatattaatcggtggccacgttgtggttcagcttcttcctacttctgttacttaccttgctcttattcccgccaggactattccttttggttggaacctcataactgctggttacattgaacaatcagtgcatggggtggttgttagcacccttggtcttcttttcatggggaagttgcttgagcctatatggggttctaaggagttcttgaagttcatcttcatagttaactttctgacgtctgtttgtgttttcattactgctattgctttatactacctaacaatgcaggaaaagtacctttacatgcctctttccggcttccatggggtgctggcaggcttcttggttggcatcaagcaaatagtacctgaccaagagctatatctcctaaaaatcaaagtaaagtggttgccatcacttatgctattgctttcaattgccataagtttcttcactccagagtccgcaacatatcttccaactttgatatttgggacatatattggctggatttacctcaggtacctgcagagaaaaccagaatcaaagcttaggggagatccaagtgaagattttgcattctccacattcttccctgaatttctcaggccaatcattgatcccattgcatcaatatttcaccggatgctttgtgggaaatctgaagtttcatcaaatcctcagggttatacattgggaggtgcaccattacttggttctgaccccattgaggcatctaggagacgagaaagaggggctagagcgctggaggagagattggcagctgagaaattggctgccggacgtgattcagaagagccacacatagacggaaatgatcgtgtttgattgctaagaaagtcaatcgtcattgacacccatcaaggcttatgcacaatcatccatatgtgctgttgccgcatatatgattagaaatgaaaagattccagagcatgttgttacccttacagtataacataggcgaaattcattctttttttttctttttttcactttcttttgttcctatttgctgattgcttgtacaactgcactttgtcctcattgtgaaccttctttttcaatgtaaaatttctctttttttcttcttaaaaaaaaaaaaaaaaaac

SEQ ID NO: 864 - DNA, 675 bp, Gossypium hirsutum
  Clone ID: GOSHI-09MAY01-C12153_1
gccacgcgtgcgagaaaatggaagggtcatcttcatcttcacgccacgtactggcaatccttctcattatccttcaattcacgccctccatagccaaaaccttctcccacaaaccataccacaccaaaagaaacaccgaatacatcagatcttcatgcaccaccactacctaccccagattatgttaccgctccctctcctcctacgcctccaaaatcaacaccagcccccgactgattgcccacaccgccctgctcgtcaccttcagagccagcaaatccacgtccaggttcatgcgaaaaatcgccagaacccatcgtttgaaacctcaggtcgctgccgccatggcggattgcatcgaaatgatcgacgactctatcgacgagccccaaaaatctataggtgaaattgctcgtatcagacgctccaactttgtgcttattatgagtgatcttcaaacctgggttagtgctgcactgacagatgaagatacttgcatggatggattctcaggcagggctatgaatgggtacgcgaagatgatggtgaggaaacgaatcgtaagatcgcacatttgacgagcaatgctttggctctcatcaataactatgcttcatctcagatccttgattgattttctcgagaaaatttcgatggcaacgaaagcactgcgtt

SEQ ID NO: 865 - DNA, 658 bp, Gossypium hirsutum
  Clone ID: GOSHI-09MAY01-C12173_1
cccacgcgtccgttagaagagagtgtgagaatggggttgaccggtgacagctcaatgggacactacgctgattggggaagcaacaaatacaaaggaagccagaatgggtatgcagtggcttacaccgaaagtgaatgttataaccaaatccgcaagcccacccataggatgatcaaaccccagaaagcttatgggatggctgaaacctgggatgaggagaatgctcaatcttacgccacctacaagtcccaaactggacctccaatgttcaaaactcaagttcatggtccttctcggaatggcttcggctcccactccaatactgcaactgcccacatgcaatcctatggctttagtagccccggaaaacgcgaaggtcgtgtttatggatatgggggccccaccgcagccgctagacaccagaaaagtaatggcggaatgggccatggtttcgatattcatggaaactacaaaaaaactgaggcttacggttatgaagagagcaatgggtatggggagtacgcgatgaatgggatggcgcgtacccagccgcacattcgcggcaaacacaccggacatggaaacgggttcgtcaagaaccaagcttacggccctaccaaaaacaagggcttttggatttacctgaagcccgagtttt

SEQ ID NO: 866 - DNA, 867 bp, Gossypium hirsutum
  Clone ID: GOSHI-09MAY01-C12163_1
gcacattcagcaaatggtttaatcatcacaaagaaataggaaccaacacagtgaagaagaaagacaaaatacgtgcagaaaacgctcggcttcactccgccgtttccatcgccggattagctgcaggtttggcctcagtagccgccgcagggaactccgacggcggcggcgcaggctcgaaaatgagcatggcattggcatccgctactgaacttctagcatcccattgcatcgagttagctgagctagctggggctgatcacgaccgagttgcctcagttgtgaaatcagcagtggatattcaaagtgcaggtgatttgattacactcactgcagctgctgcaacagcattgagaggagaagcagctttgaaggcaagaataccaaaagaagcaaagaaaaattcagcaataagtccatatgcagaaactcaatggtctgatgctttgcatactcaaatgaaagaccaaaatcctccttgtcaaggtgaactattgcaacatacaagaaaaggtgtgttgagatggaaacgggtcaatgtgtacatcaacaagaaatctcaggtaataattaagctcaaaagcaaacacgttgggggagcattctccaacaacaataaatggattgtttatgaagtgtaaaagcaaaattgacaagcaaaaatgggtggatgggattcaaaatctactacgacaagtctgccatggtcaaccacctgagctttctcttgaatctttgagtattaacgatggtatatagtttttgtagtatatagttcatctttttttgtgtatacacagtgaatttggggttgttgaaattatgaacttttatacacaatatgtgaaaatatgtgaagaatgaaat

SEQ ID NO: 867 - DNA, 705 bp, Gossypium hirsutum
  Clone ID: GOSHI-09MAY01-C12113_1
cccacgcgtacgcccacgcgtccgatacatataaactgtaattccacaaaaccaacttctttttatacgtagaaaaaggagaatatgaaggcatcatatattgcattgtgtgcagtgatggtgatcctcttggcagaagcagtaggggtgtcaacggcggtgacatgcagcccaacgcagctgagctcctgcgtgagcgccataacatcttcatctccaccatctcaactgtgctgtagcaagatcaaggagcagaagccatgcctttgccaatatcttaagaaccctaaccttaagaaatttattaacactggcaatgccaggaaggttgcttccacctgtggaactccttttccaaagtgctaagctagaccctttgcttaaggctttctttctctctattttcactgcagaatggatagagaggaagtactataattattaatattatgtagttgtggtgtgtggaatatatatatatatatcgttttgctgcttctagtatatattaagcactaagattagctctgtggaaaattaaaaaaatgttgggcgtcatggttcgttgactgtttgtgtgtgatctatcatgttcatgttgtactagatagtagtagttattgtcgccccaagcactagtttttaatagaattctccagtgttggattattatcacaaaaaaaaaaaaaaaagggcggcgctcgc

SEQ ID NO: 868 - DNA, 485 bp, Gossypium hirsutum
  Clone ID: GOSHI-09MAY01-C12053_2
ccctctcttcctcccacgcgtccgcccacgcgtccggtgaaaaggtctttaaattgaagtctaaactggaagctcttccttcatctctttctataattttccataactttcctttcaagattcagtttcccttcttttctgatcctctcgctttctcttttctgattctctcgctttcttccttccttcctttttgtcaagaaaaacaaaagatagtgtttcttttgctaatagtagttcagatagatatgtgtattttctttttctaaaaccctccactttttttaacaaatcccctctatcgaattcccacccatgtcttccacttctttatccgacgccacaactacgtcggcgtctgatcctcacgcgcccctcctccgcatgcgccagtctgatgcctccgcggctcgctcttccgcgctggctcttttgttggggcgggtcaccggacgccgtggcgcgtccatgcttgtgagggagac

SEQ ID NO: 869 - DNA, 581 bp, Gossypium hirsutum
  Clone ID: GOSHI-09MAY01-C12053_1
caaagtccaaagtgaaaaggtctttaaattgaagtctaaactggaagctcttccttcatctctttctataattggggggagggttcctttcaagattcatttcccttcttttctgattctctcgctttcttccttccttcctctttttcaagaaaaacaaaagacagtgtttctttggctgaatagtagttcagatagatgtgtattttctttttctaaaaccctccacgagtttaacaaatccaccctatcgaattcccacccatgtcttccacttctttatccgacgccacaactacgtcggcgtctgatcctcacgcgcccctcctccgctcgcgccagtctgatgcctccgcggctcgctcttctgccctggctcttttgttggggcgggtcaccggacgccgtggcgcgtccatgcttgtgagggagaccgcggcacgcgagttggaggagcgccgggcggactgggggtactcgaagcctgtggtggccttggatattctgtggaacacggctttcgtggtggtgtcggtggtgatgttgatctgtacggtgaatgagagcctaacactcctgtc

SEQ ID NO: 870 - DNA, 785 bp, Gossypium hirsutum
  Clone ID: GOSHI-09MAY01-C12333_1
ccgtttcctcatcggttgccttggtgcactagctcctcttcccctgtcctctatttgctcactcggaggtgttaacctaaactatagctcaattgaagcctcccttccagctgtagaagcaactcaaaaacaccccggtgatcccactgcagttgccgttgtggaggtcacacaagatggccgccataagattttaggagaaatctcggcctcaaaactatggaaatgtgactatttagctgcagcttgggcattagccaacctctcagccggacaatttgttatgggggctgaggataatgtgagttcaagattgcttcctgatatttcggttaattcaacagttgaagataataaggtagcgaatggtggtgggtcagcaagggcaagaaaattcagtagtagaagcatcgggttcaatcccgtgagcccgagttttggtatggggaggaccatgtataggggcagaagtgcacccttgacatgcaaaacttcaagttctttagccgcagttatggctcaaatgctatcccatagggcaaaccatgtgtgggtaactgaggatgataatgacgatgttctggtcggcatggtcggttatgccgacattttggttgcagtgaccaagcaacctgctgcatttattccctcaactcgatccatcatggagcttgcctccgaaattcaaagttgagttcccctcctttttcaccattctgggttggaatattgtactgacagcagcaggtgagtcgtatggagcatgttggtgagagggattgggg

SEQ ID NO: 871 - DNA, 687 bp, Gossypium hirsutum
  Clone ID: GOSHI-09MAY01-C12323_1
cgttcattgatgagcagtttagttgcgttgccaatggaaggcctgatagagattatcagaaactgaaatggaagcctaaaggctgcactttaccaagattgaatggtggtcacatgttggagttattgaggggtaagaggcttgtttttgtcggggattctttaaataggaatatgtgggaatctctagtttgcattctgagaaatgctgcaaataaccccgaaaatgtttatgaagcacatggaagacattattttcgaggggaagcttcgtattctttcatattcaaagattttaatttcactatagagttcttcgtatctccgttcttggtccgagaatgggaaatgccagacaaaactggagcaaagaaggagacattgcggcttgatcttgttggaaaatcatcagatcaatataaatcggcagatatccttatcttcaatacaggtcattggtggactcatgagaaaacttccaaagggaaagattattaccaggaaggtagccatgtttataatgaattgaatgttctcgaggcctttcggaaagctctgacaacctgggctagatgggttgatgctagtgtaaatcctatgaagactatggtgttctttaggggttatttctgcttcgaatttcactggcggacagtggtatactggtggtgcttgtgatagcgaaact

SEQ ID NO: 872 - DNA, 634 bp, Gossypium hirsutum
  Clone ID: GOSHI-09MAY01-C12293_1
ggaaatcaacgggtgcggatcgtcccatcacttgtggagatagtctgattggtaccaagaagactttggttttctataaaggccgtacccctaatgggctcagaaccgattgggtcatgcatgagttccgcgccactgccgactccctgccccctaatgcgcttctagttcccaagataatgcagttggggctacgtctatggagtccaacagtacgcattttgatattgctttgcggatgtatatggaagaggaaggaatgtttgattctgatctcttaccatccggtggcttgcactgtttcccatcatccagtgccattttcaataatgaccagagcaggattgaagaagaacgtttctccttggaggattttgattaccaacagtctgatgacttggttgaaggtcaattcgtatacaccattgatgatgaaatgaaattctatgatgctctgtttcataatccagatgaacgtaccaatgcagaagctgagtacagggacaatgcatggcatgatcaaattgttcatatgtctgatgggacttgccatggccattcggaaggactcaatcagaggcgaatggaaacagggattcaataatgatgaggtcctgataatgaatcttggggt

SEQ ID NO: 873 - DNA, 396 bp, Gossypium hirsutum
  Clone ID: GOSHI-09MAY01-C12273_1
cgtatatttggaaacatcttctgtctgtgatttggcaaagaaaaaaaaagatcccacactaatgccaatctcggctctacttctcttctccctctccacacattcaacaaaccaaagggctcttctgaaattcccttcttccattcgcttggcactagaaaaaaggatccatcacagcacacataataaaaccttaaaccatgggtccaataaagattgcattcggggatatgttgattactttcatgcgggttttctgttcatcaatgtttggtttatttacctcttggatagccaccgccattcgggtccaaaccatttcttgggctcctattggtatcatcaccttcattattttcgctttcgttctcatctttaatattattggcggatttc

SEQ ID NO: 874 - DNA, 410 bp, Gossypium hirsutum
  Clone ID: LIB3149-046-Q1-K1-B5
cgagattcgatcatccccgtcgattatagcataatccagatcgttatggggctccgttctccggtggattccgacttccactgggcatatcatcgcctccgagaaacgccttctctctctcgtcaagactctgtatgtgcaagaactcgtgaatataggctcaggtccgcctggttctaaggttaggtggtttcgttcttcaagtaacgagccgaggttcataaacacagttacctttgatagcaaggagggttctcccacccttgttatggtacacggatatgctgcttctcaaggtttctttttcaagaattttgattatcttgccaatcgtttcaaggctattgctattgatcagcttggttggggtggatcaagtaagcctgactttacatgcaaaagcactgaag

SEQ ID NO: 875 - DNA, 452 bp, Gossypium hirsutum
  Clone ID: LIB3584-020-P1-K1-A10
cccacgcgtccgggcttggcttgattttcagtgaggcggttggtttatagttttacgaatcatgtcctcctttaaacacttcttattctcattttggaaactgctgactgtgttggctttttttttttcttttttctttttttgcgtttgatatctacattataatagtttcttattctttcttcatctttctctccagttggggtggatcaagtaggcctgactttacatgcaaaagcactgaagaaactgaggcatggtttattgattctttggaggagtggcgcaaagcaaaaaaccttagtaacttcatattacttgggcattcttttggaggatatgttgcagctaaatatgctctcaagcatcctgaacatgttcaacacttaattttagtggggactgctggactttcatcagaatcagacacaacatatgagtgggtaacccgc

SEQ ID NO: 876 - DNA, 352 bp, Gossypium hirsutum
  Clone ID: LIB3166-050-P1-K1-D10
cccacgcgtccgcccacgcgtccgtccacgcgtccgcccacgcgtccgcccacgcgtccggttatggtacacggatatgctgcttctcaaggtttctttttcaagaattttgattatcttgccaatcgtttcaaggttattgctattgatcagcttggttggggtggatcaagtaggcctgactttacatgcaaaagcactgaagaaactgaggcatggtttattgattctttggaggagtggcgcatagcaaaaaaccttagtaacttcatattacttgggcattcttttggaggatatgttgcagcttaatatgctctcaagcattctgaacatgttcaacacttaattt

SEQ ID NO: 877 - DNA, 802 bp, Gossypium hirsutum
  Clone ID: GOSHI-09MAY01-C13983_1
gttccaaccatggataacagagtatcttacttctcagcatcaatcctcacgacacctggaagaaacttcagttagagctcatgacagggttcaagcttcaacaacaaaagccttgctggagaaattttcgaaacttgatagagaagcaggcattggaatatcaagctttaggagtgattctgaatttagtggaaatgtgagggaagcagtttcattatcgagaaatgccccacctggccctcctccattgtgttcaatatgtcagcataaggcccctgtatttgggaaaccgccgaggtggtttacctatgctgaattggagcttgcaactggtggattttcacaagctaatttcttggctgagggtgggtttggatccgttcatagaggacttctcccagatggtcaggcaattgcagtgaagcaacacaaattggctagttctcaaggagatcttgagttttgctcagaggtggaagtcctgagctgtgctcagcacaggaatgttgttatgctgattgggttctgtattgaggatagaaggcgactgctggtttatgagtacatatgcaatggatccctagattctcatctatatgggcgtcatcgggaacctttagaatggtctgcacggcaaaagattgcagttggtgccgctagaggtctgagatacctttcatgaagaatgcacagttggctgcattgtgcaccgtgacatgcggccgaacaacattctcattcacccttgattttgaacctttggttggtgattttggccttgcaagatggcagcctgatggtg

SEQ ID NO: 878 - DNA, 688 bp, Gossypium hirsutum
  Clone ID: GOSHI-09MAY01-C13863_1
acatacgcttgtcaattggttatgcagactttgatatgaaaataaatggaattcttagcattatcctgcaagatgagggagattcattcgccaagagggctgaaatgtactatcaaaagagacctcagctcatccaaatggttgaagacttgcacaaatcctaccgctccttagctgataagtacgagcagctgagatcccaactcaaccacggttctcatccaacactattatcgtcgttgtcaagtcctgtcaaccaagtccaaggatatgttgagttgaatgctgaagatcctgatcttgagactgaattcgacgatgatgtctcgaaccatgtgtctagcaaggagtcaaagatgaaggcagaggataaaattaggcagggagagaaaaagaaaaggagcaatggcattggaatgcagcggaatacaagtgatggttatgaagcggccatgttggaaaatgagaagctgtggaatgaactaaggttcaaggtgtcggaactggtaaaagataacttaagtcaccacgctgagttgataaggagaaacgatgagaagagagaaatcttttgagatctttgttccccgatgaagatggatgagagcaaggccctgactgccaacaacactcggtctccagtatctagactaaagaggctattccttggggaagtttatgaatatct

SEQ ID NO: 879 - DNA, 1503 bp, Gossypium hirsutum
  Clone ID: GOSHI-09MAY01-C13583_1
aacccataaaagaaaacccccctttcttttctccatttcacactaaaaagattatatctttttgtattttttttttgttagctttcatttcattggagcatcaatggcggattcaaaggggtacatttccaaaacagagcttgaaacccacaaaaaaccagatgatctttggatctcaatccaaggcaagatctatgatgtaactcaatggagtcaccaccaccctggtgggccacttccattactgaacctcgccggtcaagacgccaccgatgctttcatagcttatcatcccggcatagcttggcaatatctcgacaagttcttcactggttattaccttgaaggttacttagtctctgatatatccaaagattatagaaagctagctgttgagttctcaaagatgggtctttttgacaagaaaggacatgggacatgtattttacttaccatcatagcattgctgtttttcatctgtgtttatggtgttttatgttgtgacaaaacttgggttcctctctgttgtggtgggttaatggggtttttatggatacaaagtggttggataggacatgattcaggacattacactgtcatgtctaataaaaacctcaacaggttggctcaacttcttacagggaattgtcttgctgggatcaccatggcatggtcgaaatggacacataatgctcaccatattgcttgtaacagcttatattttgatccagaccttcaacacatgcctttcttcacggtatcttcaaagttctttaattcaatcacatctgcattttatggtagaaaactgaactttgattctcttacaaggcttttagttagttaccaacattggacattctaccctgtcatgtgctttgctaggatcaacctatttgcacaatctatcatcttgttgttgtctaaaagaaaagtccctaacaaaggtcaagaaatttttgggatacttgttttttggacatggtatccattacttgtctctctcttacctaattggtacgaaagagtaatgtttgtggttgtaagttttgctgtgaccggtatccaacatgttcagttctgtttgaaccatttctcgtcgagtgtttacgtcggcccgccgaacgggaatgattggttcgagaaacaaaccgacgggacgcttaatatattgtgttcgtcttggatggattggttctatggtgggttgcaattccaagttgagcatcatttgttcccgaggttgcctaggtgccatttacggacaatttcaccatttgttaaggagttgtgtaagaaacacaatttggcttacaattgtgcttctttttggaaagctaatgcaatgacaattgagacacttaaatcagctgcattacaagctagggttcttaccaatgctgttccaaagaacttggtgtgggaagctgtcaacacacatgggtgacaactattttatgaatatgcttattattattattattatcgccataaatttttatg

SEQ ID NO: 880 - DNA, 372 bp, Gossypium hirsutum
  Clone ID: LIB3197-027-Q1-M1-H1
attgcttttactttcttgatgattttaacatacagcgagtcttatcacagaggggggtggttattctattttcactttataaagtgaataattttaccggctttatggcctaaggttaatggagtcaccaccaccctggtgggccacttccattactgaacctcgccggtcaagacgccaccgatgctttcatagcttatcatcccggcatagcttggcaatatctcgacaagttcttcactggttattaccttgaaggttacttagtctctgatatatccaaagattatatacagctagctgttgaattgttaaagatggttctttttgacaagaattgctttggtcgctgtattctccattttcaactta

SEQ ID NO: 881 - DNA, 1540 bp, Gossypium hirsutum
  Clone ID: GOSHI-09MAY01-C13563_1
caacccttcctaaataaagagggaaaaacgaaatgcagggatatcactgtatgacgattaaagaagctgggtatctccaaatctcaacctgaggaccgtgcacctgaagaagttaagaaatttgctaggcttgatattgacccgaattctattacgtggagaagagtgatggatgttaatgatcggttcttgaggaaaatcaccgttggccagggcccggaagagaaagggatggtgagggaaactggatttgatatttcagttgctagtgaaataatggctgttttagccctgactacgtctctcgctgatatgagagagaggctaggaaaaatggtgattggaaatagcaaggctggtgaacctataactgctgatgatcttggtgttggaggtgctttaacaggtctcatgaacgatgccattaaccctactctgatgcagaccctcgagggaacccctgttcttgttcatgctggtccatttgcaaacattgctcatggtaattcatctattgtggctgataagattgcactgaagctggttggaccacaagggtttgtggtcacggaagcacgttttggtgctcatattggaacagaaaagttcatgaatatcaagtctagatacagcgatctaagacctcagtgtgctgttattgtggcaacaataagggccttgaaaatgcatggtggtggcccggaagttgttgcagggaggcccctccgccatgcctacctaaatgagaatgttccgttggttgaagctggttgtgtgaatttggctaggcatattataaacacaaaggcctatggtgtgaatgttgttgttgctgtgaacaaattctcaaccgacactgaagcagaaatgaatgctgttatgaatgcagctatggctgccggggcatttaatgctgtaatttgtactcaccatgctcatggtggtaaaggagcggtcgaccttggagttgcagttcaaagggcttgtgcgagtgggaatcagcaactcaaatacctgtatcctttggatattagcattaaagagaaaattgaggcaattgctaagtcatacggtgccagtggtgttgaatacaccgaacaggctgagaaacagatcgagatgtacaccaaacaagggttttcaggtttaccaatctgcatggcgaaaactcagtactcattttcgcacaatgctgctgagaagggagcaccaggtggatttatcttaccgataagggatgtgcgagccagcataggagccgggttcatttatcctttagtgggtacaatgagcacaatgccagggctaccaacaaggccatgcttttatgaaatcgatctcgacactgccaccggaaaggtcattggtctttcatgaaggcatagcaggtttggtttggtgagagcttctggagtgggtgcatgaagcaattaacagttgttggtacttgtgttccttaacctttcccagttcttaattgtgttattttaatggtgaagttgaatacttgtgaagaataaaatccttttttaatttctct

SEQ ID NO: 882 - DNA, 472 bp, Gossypium hirsutum
  Clone ID: LIB3585-025-P1-K1-C8
ctgctttctccgctttatcttcgacaactccgcctgctagtttgctagagctgtcatggacaccgggcctgggatatgctcagcggctgaacctcagatcgatgtcgaattgcctgaggcggggctgtaacagttctgagatacgatgagacgctccgttgcttgccgcagaccggaggaggaacccaagcctttgtcgatgccggcacatatgcaaacatcgctcatggtaattcatctattgtggctgataagatcgcactgaagctggttggaccacaagggtttgtggtcacggaagccggttccggcgctgccataggaacagagagcatcaggaatatcaagtgtagatacagcgatcgaagacctcactgggctgatagtgcggcaacaataaggggctggacaatgcatggtggtgggccggaagtagtgcagggaagcctctcgaccatgcctacctaaatga

SEQ ID NO: 883 - DNA, 1049 bp, Gossypium hirsutum
  Clone ID: GOSHI-09MAY01-C13493_1
cctacgcgtccgaccgactcatctgtttttgtcaggtataatcgaatgctgcatgggaggaagactgaaagaggtcggaagcttgataatcttactataaagttcctcaaaccctgcgtccgccccgcgtcccataggattcaacctgagctaactgatgaggcttcagaacaaattgcaacagcttatgcagatctcagaaatgccagttcaaatgcaaagactggtggaacccttccaatcacagctagaaccttggaaaccattattcgtctgtcaactgctcatgcaaagttgaagttaagcagaaagattacgaaagttgatgtcgaagctgctctgaaagttctaaattttgctatttatcataaagaattgactgagatggaggatcgcgaacaagaacgggaaagagaacaacagagaaaacaaagagctgaccgtcgaggccaaactgcagatgctatggaagtagatgatcctccactagcccagcaggccactgctactggttctgtcgaaagaatagaagcttttaaaactatatttggtcagcatatgcgtgtaaaccacaaggaaaccgtatctattgcagaagtggaggatattgtcaacgtaggagctgacatccattactcaagggttgagatcatgtctatattagagaaattgcaagatgagaatatattgatgatagctggagaaaccgtgcatatgatagtttaagatgtaagagaagaccaggatcaaccaaaataagcagctgatattaggtgaactgtgaagtgctcagaatcttacatattccagaatttgatgtaacatgtattctttggagactgaagatgcagaaagttgagatcaatgctttaatgaagtacttataagttggttctttggaacctgatttgaacgttttctttattaattaatgtatacaattgttttttattatcaatttgacctttatttttttagttaaaattaactaatacatttatgtttgtttcctgttatgtatatgataaaatttaagagttgttttcagc

SEQ ID NO: 884 - DNA, 446 bp, Gossypium hirsutum
  unsure (1)..(446): unsure at all n locations
  Clone ID: LIB3147-054-Q1-K1-G11
aggaaaccgtatctattgcagaagtggaggttattgtcaacgtaggagctgacatccattggtcaagggttgagatcatgtctatattanagaaattgcaagatgagaatatattgatgatagctggagaaaccgtgcatatgatagtttaagatgtaagagaagaccaggatcaaccaaaataagcagatgcagaaagttgagatcatgctttaatgaagtacttataagttggttctttggaacctgatttgaacgttttctttattaattaatgtatacaattgttttttattatcaatttgacctttattttttttagttaaaattaactaatacatttatgtttggttcctgttatgtatatgataaaatttaagagttgttttcagcaaaattatttttgacatgaaatatttgtatgacaccaaattcgaattttaaat

SEQ ID NO: 885 - DNA, 418 bp, Gossypium hirsutum
  Clone ID: LIB3189-011-P1-K1-G2
ataaccgtatgttacatgggagaaaaacagaaagaggtcgtaagcgtgatactcttacgataaaggttgtgaaaaagtatatccattatgcaaaacacaggattcagcctgagctgactgatgaggcttcagaacacattgctacagcttacgcagagctcagaaatgccagttcaaatgcaaagactggcggaacccttccaatcacagctagaaccttggaaaccataattcgtctatcaactgctcatgcaaagttgaagttaagcagaaaggttacaaaagttgatgttgaagctgctctgaaagttctaaattttgctatttatcataaagaattgacagagatgggggatcgtgaacaagaacggcaaagagaagaagcaaggacacacagagcggatcgtcaagggccaac

SEQ ID NO: 886 - DNA, 794 bp, Gossypium hirsutum
  Clone ID: GOSHI-09MAY01-C13413_1
gcaatgtccgcatctacgctctccattagcgccaaccctgccgtgtccgctcgtcgccggcctgtcctccttgccgaaaataaatcgaacttcgaatcaattcccgccgaacctaaccctattggcgttaatgttggcgaagataaagccaccggcgccgctaacagcagagatctgagccaccattcggtccgggccgaggcgttgaaggactctgggcaagccagaaaagtcactgtggctcaaaagtcaaacgttccgctgcggcgaacacggaagggagtggtcaacaagacggagaaaccccggtggcagactgtggttagtatttttattaagaatttagtgcttttacttgttttggctgggttagttcagatggttaggagattggctttgaaatcaggggaggttagcagggctgggacagaggtcagctctatctcgaatttgaaggtagagttgctgaggttgagaactttttgaaaactactgcttaaatgatacaggtccaggtagaggtggttgatcggatacttgaaaatgaaattggtgggtttagggagggaattggatgagagaatagacgatcaaagtgtggcattggggaattcattgaaaatattggaagaaaagagcgagggattggataagtccttgcgtgaattgaagagcgcgaatttgttgaccaaggatgaatttgagaatatgtatgaacaaatgtttaaagagaagggtggaattggctagattgaaactgctgtgagtttgagtgatatatgttcctattcaag

SEQ ID NO: 887 - DNA, 535 bp, Gossypium hirsutum
  Clone ID: GOSHI-09MAY01-C13423_1
gcggtagcggagaggaagtggctgagcgagtattgagccagccatctttggccgggttgcagggccccacggtatgtccagttttttgtaagcgtgatggaaaagtaactgctgactactatgccatagtcatatgcgtacctaagaaagctttatacaagtctgtacaacaattgagagcgattggaggcagcggggtgttgatatcacctttgacctacatttttgatgaagagaccccaagatggagagaacttctttctttgcttggtgtcctgtccatcttgggattgaggcatgggtggttttacttgcatttcatataaaaagctgaataatttgtaagtgccgaggtggttgaaaatttacttttgccgagagatagggaccttcaaagtgttgtcatggtggtcttgtttctcagtagtggcattcttcagccccttgtttcttttgtcaataatgtttatttttattttttgcatttctcctctttgcaaccgtatcgatggtatacaaaacatgtttccctctc

SEQ ID NO: 888 - DNA, 747 bp, Gossypium hirsutum
  Clone ID: GOSHI-09MAY01-C13723_1
cccacccgtccgcaaccctcttcctttcccttacttgcacagagacagagatccaaggagtttggggccaaaaccctaacccccagagcagtcaccccagtaagctatctatcgtctctcaatcatccttattatcagtcatggctgctgcagctccagagggttctcaatttgatgctcgccagtatgatgctaaaatggatgaacttgaagctgtggggcaagatttctttacctcatatgatgaggtttatgacactttcgatgttatgggattgcaagaaaatcttcttaggggcatttatgcttatggttttgagaagccatctgcaattcagcaaagaggaattgtacccttttgcaagggacttgatgtaattcaacaagcacaatccggaacaggaaaaactgcaactttttgctctggaattctacagcagcttgactacagcttagttcagtgccaagcattggtccttgcaccaacccgtgaactagcacaacaaattgagaaggtcatgcgggcattaggtgattaccttggtgtcaaggttcatgcttgtgtaggtgggaccagtgtccgtgaagatcaacggattctctccagtggggttcatgtggttgttggtacacctggccgtgtatttgacatgttgaggagacaatctctccgccctgatcatataaagatgtttgttttggatgaagctgatgaaatgctctcaagaggcttcaaggatcagatct

SEQ ID NO: 889 - DNA, 463 bp, Gossypium hirsutum
  Clone ID: uC-gsflmaxxa090f08b1
acccccggggggcgcgggcgcggaatcccgggcgcgccccaccgcgcgcgtagttgtaggcacgaggctcacggcgtttggggcaagggggcctatcactacaaaacatcagccccagtaagctatctatcgtctctcaatcatctttattatcagtcatggctgctgcagctccagagggatctcaatttgatgctcgccagtatgaggctaaaatggatgaacttgaagctgtggggcaagatttctttacctcatatgatgaggcttatgacactttctatgatctgggatagcaagataatcttcttaggggcattgatgcttatggctctgagaagccatctgcagttcagccaagaggacttgtgctcttttgcaagggacttgatggaattcaacaagcacaatccggacaggaaaaaactgcagtttttgctctggaattctacagcggcttgac

SEQ ID NO: 890 - DNA, 632 bp, Gossypium hirsutum
  Clone ID: GOSHI-09MAY01-C13693_1
tcccacgcgtccgctcttctcttcgtaatctcccaaatatctttcctttgtcttatcgaatatgatgcaacaaccagcagctggaggcgtggctccgccaccttccatggcggccgatcagtctcaggctcatcagtaccagcaacaaccgcagtcgcagccctggatgatgatgtctcaacaacagcagggtggtcagccggttcctccacctaccggttggacgccgcaacctgttcctccgcccactcagatgcagcagtactccgccggttctgctgctgctggctccggtgagattcgatctctttggatcggagatcttcagccgtggatggatgagaattacctcatcaatatctttgctcaaactggagaggtggtttcggctaaggtgattaggaataagcaatctgctttaccggaaggatatgggtttatcgaatttgtgtcccgtgtggcagctgagaggggtttgcagccttataacgggctgccaatgccaaacgctgagcagaatcttaagttgaattgggcatcacttggatctggggaaaagaggcaacaagaggcgcctgagtacacaatctctgttcgggatggagcagctgatgtttcggattacatgttac

SEQ ID NO: 891 - DNA, 1188 bp, Gossypium hirsutum
  Clone ID: GOSHI-09MAY01-C13663_1
gttaaacaagaatgatctcacccgcccgcccgcccagaaattaaaagaaaaaatatcaattttattttattactaaagcgtgaagattcaagcttgcaatcgaattcctcatttgaaattctttgatgaaacaggtattagaactgtaatagagaggataaaaaaagatcattgttgaggatggcttgtaaaggatgcctagaatgcttgttgaagctgttgaacttcttgatgactcttgttggtttggcaatggttggatatgggatctacttgtttgttgagtacaaaagagctgctgatgttgccatgcttttgtcacctgtgggcactgaccaaatacagctcggtcggcccatgctcatggccgtgtctctttcgtctagtattttcgataatcttccaaaagcatggtttatatatttgtttattggagtaggtgtggttctctttgttatatcttgtttcggttgtattggagcttcgacgcggaatttatgctgtttgagttgttattcactgttggtggtcttgttgatcttggtggagctgggatgtgctgctttcatattcttcgacaaaagctggaaagaagaactcccgacggataaaacaggatattttgatatgatatatcaatttctggaagaaaattggagtattggcaaatgggtagctctcggaattgttgtcttagaggtaagtgtaacatgactgtgaccctaatcccgaggatttgaaaactacttcacattcatgaacaatcacgctcattgacttgcaaaaaactgatcatttagaatatgctaattgtatttttttttctcagccctcagaatttgtttctttgtatcgtcagttagctttggggaatatgataggattctttgggataacaaagcatggaatagtctaggactttcctatccttactgagtagattatctgttgcaaaaatatctagcatacaaaaagagataaaatcttatttaaattccataatcaagtcttaaagttgaaaagcattcaattaattgtactaagcagacttgaaaacttcatcagctatcattaattgggaacattgcatgtttggttcttttctgtgtggattatggttaagatgattgcatatgacataatagtcctagataactttaagaggctgtggttatgatcaccaaggaa

SEQ ID NO: 892 - DNA, 419 bp, Gossypium hirsutum
  Clone ID: uC-gsflmaxxa096h02b1
ttcctttcttgtttaacaaaaatgatctcagaaatggggagaaaatttatcaattttatttgattactacagcgtgaagattcaagcttgcaatcgaatgcctcacttgaaactctgtatcagaactgccatacgagaggatacaaaaaagatcattgctgaggatggcttgcaaaggatgcctaaaatgcttgctgaagctggtgcacttcttgatgactctagatggactggcaatggttggatacgggatctacttgagtgttgagtacaaaagagctgctgatgatgccatgcttgtgacacctgtgggcactgaccaaatacagctcggtcggcccatgctcatggccgtgtctctttcgtctagtattttcgataatcttccaaaagcatggtttatatatccggctattggt

SEQ ID NO: 893 - DNA, 772 bp, Gossypium hirsutum
  Clone ID: GOSHI-09MAY01-C13613_1
cggacgcgtagaccattcgacaatggtgacaatccctttctttgtcctaaacatcctccttttcctctccagctccgcggctacaccaaagagcggtgcagatcacgacctggtccgttcatcatgtgtccacgccagctatccaagcctctgttttcgcaccctttcttcctactccggcccagccaacaccccacgtgagttagcccaagccgccgtaaaagtcagcctgtcccgtgcccgtaaagtgtcgaactacttgtcgacgagtgtgacggggtacaacaagagggaacgagtcgcactgagtgactgcgtggagcaaatagatgagtcgatggaggagttgagcaagacattaggggagttgaagcacttgagaggggagacgttcgagtttcagatgagtaatgcgcggacatgggtgagtgcggcgctgacgaatgaggacacgtgtcttgatgggttcgaaggagttgacggcaaggttaaatctaatgtgaagaggaagatcacgaatgtggctaaagttaccagtaatgctctgtacatgatcaataggctcaatgaaagtcgtggtaggcaccgttgaatctttgatgatgatgatgatgaataatggatggttgtgatttatctagcttattatggttcttaaatatagtttttattttgattttggttgcaagctgtatatgtaatgttttctatttatatattaagcataaggtgatatgcgtttttttcttgtaaaacaaaaaaatataaatat

SEQ ID NO: 894 - DNA, 206 bp, Gossypium hirsutum
  Clone ID: LIB3120-043-P1-K1-H8
cccacgcgtccgcccacgcgtccgcccacgcgtccgcccactgctgtcctaatcatgctccttgggctctccagctccgcggccacaccaaagagcggtgcaggtcacgacctggtccgttcatcatgtgtccacgcaagctatcaaggcctttgttttagcacccttgtttcttactccggccaagccaacaccccacgtgagtt

SEQ ID NO: 895 - DNA, 1536 bp, Gossypium hirsutum
  Clone ID: GOSHI-09MAY01-C13193_1
gaaaaagttgatagagaagctagagataggagaagagaaagagacggtgacacagaaggagacagacctgagaagcgcagcaagtgctctgacaaagaatctgatgatgggtgtgcagatggtgaaggggctacggaaagggaaaaggaaggttttaattctggagtccagcagcgtaaaaggatgcttcgtccaagaggcagccctcaagtggctagccgtgagccttcttttagaccccgacctcaagacaacgaaggatctcagggtaaacctgaagtgtctactgttgtttataaagttggtgaatgcatgcaagagctgattaagttgtgggaagaatatgaagcctctcaagctgataaaaatggtgaaagctctcaaaatggccctactcttgaaattcaaatccctgctgagcatgttactgccacaaatcgtcaggtcaggggtggccagctatgggggactgatatatacacagatgactctgaccttgttgctgttcttatgcatactggttactgccgtccaactgcttctccacctccaccagctatccaagagctacgtgctactatccgtgtgctgccaccacaagattgctacacctctaaacttaggaacaatgttcgttcccgtgcttggggagctggaatcagttgtagttatcgtgttgaacgatgctgcattggtaagaaaggtggcggaaccattgatttggaagccatgccttacacattcatcaacagtggagcccaccccttgctccagttgctgtagaacggacaattactactagggcagcagcttctaatgccttacgacagcaaagatttgtacgggaagttgctatacagtacaacctatgcaatgagccttggattaagtatagtatcagtatagttgctgacaagggtctgaagaaacccctttatacatctgctcgtttgaagaagggtgaagttctgtacttggagacacattcgtgcaggtatgagctatgttttactggagagaaaatggtgaaagctacagtagcgtctcaagcacatgaagcagatacagagaagtctcaaaatcaccactcacattcctcaaatggtgaaaagaacgactctgagaacaccctgatagatgttttcagatggtctcggtgtaagaagcccctttcccagaaagtcatgcgttcaattggaattcccttgccactcgagcacgtagaggtattggtggagaatgttgactgggaagatgtgcagtggtcgcaaacaggggtttggatagctggaaaagagtacacacttgctcgagtgcattttctatctccaaattagctgttatttttcgagtttggtatcttcacatgcacagaccctttgtcatgttcttatggaggagtaaaaagtcagtgttatgaaataatatattttgaagtgttgaatactacatactagtgttttagtgtttactacaatttagtgaaacccaagttactcttttggggtacccatcaatagatattaatttgttgtc

SEQ ID NO: 896 - DNA, 466 bp, Gossypium hirsutum
  Clone ID: LIB3189-004-P1-K1-H9
cccacgcgtccggtcttcctcaataattaagggccattttcttcctcgttctctcaaataattgttttttacattggccctttgatttttcttgtttaactaatttatctcttgaatttttcatatagctttcaatctaacatagttggttgcttgttttccgagattcatccatgtctcggggtaaccagagagatcgagatcgagatagggcacatgccagagctgcccacatagccaaaggttccaaagacgatgggttaacccctgagcatcggcgtgaaagagatgcattggcattgtttgataagttggccttttatgcggctcatgcgacggttgttatctatcggcgaagtgtgtttaaaaacttgttattacagttggtagtttgtatagttttttttccctaagagtgtgtgtataatatttttctttctgctttattttttacacattttttttt

SEQ ID NO: 897 - DNA, 483 bp, Gossypium hirsutum
  unsure (1)..(483): unsure at all n locations
  Clone ID: LIB3582-005-P1-K1-A8
cggacgcgtgggcttcgtcaataattaagggccattttcttcctcgttctctcaaatcatttttctttacattttccctttgatttttcttgtttaactaatttatctcttgaatttttcatatagcttcaatctaacatagttggttgcttgttttccgagattcaaccatgtctcatatccttttttttctttctaatttgtttgattaatacataatttatagctcttaagctttggtatttcctggtttcttttttcttttttgtgttaattcctcaactcaagctaacggggtaaccagagagagcgagatcgagaaagggcacaagccagagcagcccacatagccaaaggttccaaagacgatgggttaacccctgagcaacggcgtgaaaggttccctctttcatttataccttttcttgaatatctctaattgtgcgaattttgcgtcttncgttttttacttgtggctttgag

SEQ ID NO: 898 - DNA, 419 bp, Gossypium hirsutum
  Clone ID: LIB3148-032-Q1-K1-G2
caataattaagggccattttcttcctcgttctctcaaataatttttttttacattgtccctttgatttttcttgtttaactaatttatctcttgaatttttcatatagctttcaatctaacatagttggttgcttgttttccgagattcaaccatgtctcggggtaaccagagagaacgagatcgagaaagggcacaagccagagcagcccacaaagccaaaggttccaaagacgatgggttaacccctgagcaacggcgtgaaagagatgcaaaggcattgcaagataagttggccaagaaagcggctcaagcgacggttgaatccgagcggcgaagtgggattaaaaacaagaaataacagtgggaagtgattatagattgcaggataaaagagagagtgtgattatattaattggg

SEQ ID NO: 899 - DNA, 1733 bp, Gossypium hirsutum
  Clone ID: GOSHI-09MAY01-C13173_1
tagtcgttggcgcgtacttgtacgcgtacacggccttcaatgaaattacggctttccttgtattcatgcaattaatgttggattatcatatcggagcagctagtattgcccgtagcttagctagctacgtggctaccattttcgagctcatccctgctttgaaaggaaacatacctccctgggttggtcatggtggtcaagaattctttggaggaactttgtctatcaatatcctggctccgattcttcttgccgtgttgactgttatcctctctctgggtgttggagaatcttctgctgttaattctttcatgactgcagccaaggttgtcatcgttatttttgtcattattgttggatctttcaaagttgatgtagataattggtctcctttcgctcccaatggtgttaaacatatatttacgggagcaaccgtagtattctttgcatatgttggatttgacgcggttgctaattctgctgaagaagcaaacagacctcagcgcgatttgccaatcggaatcttgggaagtctgcttgtatgtgttgttttatacgtgggcgtttgcttgcgtgctcaccgggatggtacacttacaacctccttggcgaagatgctcctttatctgaagcgtttacatccaagggtttgaagtatgtttctattttgatcagtattggagctgttgctgggcttacaacaacccttctagctggtctatatgtccagtctcgcttatatcttgggcttggaagggacggtttactgccttcaatattcgctaaagtgcatccgatacgccacacacctattcattctcaaatctgggtcggtatcgttgctgctgttttgggagggctgtttaacgtgcatatcctatcacacattctttcagttggctcactgaccggctattctgttgttgcagcctgtgttgtaacgcttcgctggaaaaataacaccggcaatcgagtttcttcaaagtgcatctcaacctggtgtgaaggtgtcctatgtattttcctagtggcatgctgtggttttgctgctggagttctttatcgttttggcactcacttcatttttatgattgttgcggtggctatagccataatggcttgtgctgctctttgtttccgtcaggcttattcagatcctccagggttttcttgtccatgggttccgattgtgccatctgtttgcatctttttcaacatatacctgtttgctcagttgcactatgaagcgtggatcagattcatcatcctcagcatagtttctgtaggtatttatgcattttatggacagtatcatgctaatccccgttcacatgaggcaattatttcccatatggcgcctgaagaacatagaccctgagcattaatgtccagtcaccaatggttattggggggacttgtagtctatcatcctattattgcgcaatcagcttatatcattgttagtgatcatagatgtggttttctattagaaaatgttggcatttatgctgactaataaacagagtgtatttacatggttttctctccggagcatttttaatttctgcccacgtaggtaggtttttcatgagcgttagtatttaccactgttaagcagaggattaattttgtggctcattgacttcttgtggtgattggccgttctacaaggcaagcatttatcgtctccaagttacggttttagtttggtgggaaaaaaaaaagagaaaaat

SEQ ID NO: 900 - DNA, 441 bp, Gossypium hirsutum
  Clone ID: LIB3147-055-Q1-K1-G9
cccacgcgtccgcccacgcgtccgcccacgcgtccgaatggtgttcaatgttaagatttgcgcttttggctatttacagcgcacatgctggctttctgcttggtttaacatgaccagctgaattgatcctccagggttttcttgtccatgggttccgattgtgccatctgtttgcatctttttcaacatatacctgtttgctcagttgcactatgaagcgtggatcagattcatcatcctcagcatagtatctgtaggtatttatgcattttatggacagtatcatgctaatccccgtttagatgagacaattatttaccatatggggcctgaagaagatagacactgagcattaatgtacagtcaccaatagttattggtgggacttgtagtctatcatcctattattgcacaatcagcttataaaattattagtgatca

SEQ ID NO: 901 - DNA, 634 bp, Gossypium hirsutum
  Clone ID: GOSHI-09MAY01-C13163_1
aaaaaaaagaaaagaaaagaacaaggagtagcagaagagatgaagctaacgtggaacaagaacaacaacaacaacaacaagcggtccagggaagctattgcaagctaccctaatcttccctttgatctacaagatccctcgcatgatgatatgcagttgcagaatcaagaacacgcccattctcaacatcaagacaagcccgcggcgggggctttggattctgactttaaacaacttgcccaatccttccaagcccaaggcaacaagcttgctgaggatgggaagttccgggaagcacttgggaagtgggagacagcacttaatttgatgcctgaaaatgcagttttgcttgaacagaaggcacaagttctactcgagctaggggatgcatggagtgcattgaaggcagccactcgagccactgaattggaaccatcatgggccggggcatggattactcttggtagatcacaattaaactttggagagcccgatagtgccattgagagttttggcagggcattagctatcaagcctgattctgtggaggcacaagacgacaggaaaactgcatcgcatcttataaagaaaagaaagcagcttcattcttcaggcctgagtactgataaaaacc

SEQ ID NO: 902 - DNA, 433 bp, Gossypium hirsutum
  Clone ID: LIB3189-004-P1-K1-A11
gttggagcaagcgtctactgagaaaatagatggagggggtatagatggaattcagaccatggatgattctgctcaacccactgaaatgatggcagctcgtgaaatggaggtttcagatgctgattctgaaagcaaaagatcagtagccatggcagtagaagaatctcatttaccaaagtctgttgaacaaaatagttttgaaggtgaaatgcaagaggagcaccatcagaatgaaggtgctgaaattggaggctcagatactgacggagaggctgaaagcatgttctttgagaatgctgatgctgctgagcaattcttgaaggagctagaacgaggagctgccattggttctcactcgggtgctgatacttctcatgatcattcgcagacaattgatggtcagattgtcattgattccggttgaagaagggga

SEQ ID NO: 903 - DNA, 420 bp, Gossypium hirsutum
  Clone ID: LIB3189-004-P1-K1-A6
ggacccgtggcgccttcctgaaccatacatggttccgtatagatagtatccataccatggatgattcttctcaaccaagaccaacaatcttttcataaatccaaagaaatgctcccaaaaatagacaaaagtggccgcttttgcagtcccaaatacaagaatctgatttaccaaagtatggtgaacaaaatagttttgcaggtgtaatgcaagaggagcaccatcagaatgaaggtgctgaaattggaggctcagatactgacggagaggctgaaagcatgttctttgagaatgctgatgctgctgagcaattcttgaaggagctagaacgaggagctgccattggttctcactcgggtgctgatacttctcatgatcattcgcagacaattgatggtcagattgtcattgattctgatg

SEQ ID NO: 904 - DNA, 479 bp, Gossypium hirsutum
  Clone ID: GOSHI-09MAY01-C13053_1
cccacgcgtccggacggagcgtaaatgtatcgaacggtggtgaatcgcatccttctaaccaaaaacaccggcggaggccgccgctgcctcctccgattccctgatcttcgaactgccgttacctcttctcgtttctccactacaacggaacctcaaacgtcccctaatcgtccccttaatccagctgattcttccacgtcatcttcgtcgacgagtttccaaacatcatctggggctggcgatattccgcgtcaggagagaaagaatccgccagctgagtaccagggggagcaagctcgggttcttcaagcctcactacgacacgtggtaagattgggatggagtgaagaagcgatgatagcaggagcaaaggaagttgggatttctccttccattgttggatcttttccccgaaaagaagctgcccttgtcgagttttttatggatgactgcttacaaaggcttattgatagaattga

SEQ ID NO: 905 - DNA, 783 bp, Gossypium hirsutum
  Clone ID: GOSHI-09MAY01-C13063_1
gcggagagaagaaacgcggctgacgagaacattgcagaataatggcgtcgctgtgtcttttagttttgctgttactttgtcttccttttatttccgttgcttacaggccaggggacatcgttcctatgagcaagatgggtcaataccactcctctagaactgtttggcatgacgtgatcgggaaacattgcccaatttttgctgttaatcgggaggtgttaattcctatagcaaagccgactggttacacgggagctgatccctataaaatatcattccaagttgggaaggagaagtttcttgttccttggctttttcttataaatcgtaaaagttctgaagttccaatgattgacatgcatttgaggtactcaggtggtgatttgcatggtgtcactgctaaaattgtagatatgcctcatcactatgttgaaattcatccaaatattcgtaaacaattctgggatcctcaacattggccaaaacatgtgcttgtcagatacacctgggaagaacaattagagatagatgtgacatctggattttacgttctgtttgggtcaggtctaatgctgtcatttattctctcaatctatatcttgcagtcatcaagggacaaattagcaaggttcgtaatggagactgttgcggaaagcagtgcccctgccgttggagttgcaaaggtcgagtgattccttcagtttcgagaaatgaacaaaaatgtggtggttaagtgatgtgtattatggcaaggatgttggaaccccacgaattgagatagtt

SEQ ID NO: 906 - DNA, 161 bp, Gossypium hirsutum
  Clone ID: GOSHI-09MAY01-C13013_1
gagggttgtactttgatcttgtatgtaatccatttcccacatcaacccgacctggagttggcttttcgtggcgggtgtcaagagaactcaaggtcgtgttgatgtgggaaatggattatttcaagatcaaagtacatccctctggacgcgttagtcgaccc

SEQ ID NO: 907 - DNA, 744 bp, Gossypium hirsutum
  Clone ID: GOSHI-09MAY01-C13033_1
aaaaaaaaagaagagcctgcaattgccggtgaatatttgtagacacctccaccgactcgtgacagcttccttttcatctcctcagatgagatcgaatcaggttcttatgattgcgaaataactgcagttggtcaatttttatcattgaacgtgccagttttgaagcctgagctacttttattatccgaaaattgttattattacctgtgattagtgatgattatttagctctaatgaaaatttggaagttcgttgttgttggaaaatttgtgttttttaccgatggctgtgagcttcttggcaatctcagcagcgtccacagctttaagcttcataggtcttcaagtttgggcagaattttcacttgataaacttcagaatgatgggttaattagcgagaatttcattcatacggaaaatgtcgaccgtgcacttgagcttcttttaggttcttatgcctccttggttctgctcgcaaattttgtgctcaatgtatttattctactcatcctttctctaaagactgtattttttggtgacttataccccttagaaactcggaagttagtagaacgtcttatcaactatgttatctacaaggggacctttctaccattagtaattccaccaacagtattccaagcaggtctctggtcaatttggttgattgttatatgttgtctaaagatgtttcaagctttggccagggatagatttgagcgtttgaatgcatctccttctgct

SEQ ID NO: 908 - DNA, 597 bp, Gossypium hirsutum
  Clone ID: GOSHI-09MAY01-C13023_1
tccatgcgtccgcccaaggcgactgaaaatggagcatccatatgtgcccagggatctgcaactgcctggatatgttcccgtctccctttctcagtccaccattcttaccgtctatggtctctcttccctgctcgtcgtctcccttgtttggttcctctctgggcgatcgcgcagcatatctaaacttgatagattgttgatgtgctggtgggctttcacgggacttacacacataattcttgaaggatattttgcattctcccctgaattctataaagacaagactggattttatctggctgaagtttggaaggaatatagcaaaggtgattcaagatatgcaggaagagactcagcaattgttgctgttgaaggaataacatcagttcttgaaggtccaccttgccttctagcagtgtatgctattgccaaaggaaaaggatatagctacatactccaatttgccatctctctgggacagttatatggcacatttgtatatttcataacagctttaaaccttaggagggtgataacttttctgcaacccatttatactatgcatactatgttttgcaaatcgtttggctttgatcc

SEQ ID NO: 909 - DNA, 689 bp, Gossypium hirsutum
  Clone ID: GOSHI-09MAY01-C13393_1
aaaaaaaaaagaaaaggggggggggagaaattctctctgggcgtcccacctccggcaattggaccaccggccgtccgtcgccggtgaccgccgtgcacggcggccagaggtgtaaaaatggcccattttaatacttcggctctccccacctcagatctgagtctcaaacgccaaaaaaaacccacggctggtgaaaaagaatgagaaaaccaatcggtttccttctctccgatcgctcaaaaaggttgctaggaggtcaacgtggttggtgcaaggccgaacaaaaggggtcaggcctcaggctaaaccggactgtgcgcttgaggcacgtgggggaaaacggcgcctagggtttctgcttccctcttttggctgaaagtgttttatttttgggctatggtttaccttgttgggctagattgggtttgtgaattggataatgcattgggtccatgcttgttacttgggtttccggcctgtaactgtgttgttaattggaactggtaattatggaccttgttttgtccccacctatgcccaggtgctcggcgcggccgtcattgctttccccccccgggggaaccccattccccctataattaatcccttttggccccgcccctggcccgccttttcaaaagttcgtaaccgggaaaaaccccggggttaccccattttaaccgccgtca

SEQ ID NO: 910 - DNA, 525 bp, Gossypium hirsutum
  Clone ID: GOSHI-09MAY01-C13373_4
agccagggcccctgcggttccggtttccgtattccttgcccggcccacgctttcgttttcgcgttcgggcaaacccccaagggagaactggaaagagctgaaggtcgaagatgccggtcttgccgctttggtcggaatggagtgctttgcatggttcggcgcatgtgagatagcgggaaggggttttactttcaccggttactatgtttaaggggagtgggggtgtttgttcgccattgcacgattgtattacggccacactgggtgtgcatttttgctgttttcagagattcttgaagctgagaaaccagtgaattaacactcgggatagcctgaataagttgttataggtgaaagttgaaacggcctttgttgataataagcccctgctattgtctcattttctttacagaatttaatgcaccccgaaaagttgataactggtgcaaaattactcaatttaataataatatatatttatatctaattttttttacctataaattattttttatactatatttt

SEQ ID NO: 911 - DNA, 1044 bp, Gossypium hirsutum
  Clone ID: GOSHI-09MAY01-C13373_2
tgcttcatggttgcttaaaaaatcatttctcgagttttaaaactcgaaattaagatcctaaatttttcctgaaactagactcatatatatatctacaaatattttttctaaaattttttacttagccaattagtacagtttattagttaaagttacccctatttcagaattcgactgcactaattggctaagtaaaaaattttagaaaaaatatatatatctaaaaaaaattttctagaatttttgacttatccaattagtacattttattagttaaagttacccctgttttagaattcgactacactgccctctacttactacaaacccaaaaagcacgctcttcttccttgtgtaagcggcgccggcaagaagctaaggccagtccacctcggatctctcgtctctgccttccatcgacaacaatctatcttacatgtttcacttcttctttcatcaaagattttgatggcgtcaaaattgcagcagttgcaatctcaggcgtgccaagcttcaaagtttgtggcgaagcacggaactgcttactacaagcagttgttggagcagaacaagcaatacattcaagagccgccgacagtggagaagtgcaacgagttggctaagcaactcttttacactcgccttgctagtatcccaggtcgtacagagtcattctggaaggagctcgattatgtcaagcaactatggaagaacaggaaagagctgaaggtcgaagatgccggtattgccgctttgtttggaatggagtgctttgcatggtattgcgcacgtgagataatgggaaggggtttgactttcaccgggtactatgtttaaggggagtttggatgtttgttcgccattgcacgattgaattacggccacactgggtgtgcatttttgttgttttcagagatttttgaagctgagaaatcagtgaattaacactcggtatagcctgaataagttgttatagttgaaagttgaaacggcttatgttggttaaaacaaacaatttttatacaacaaatgtatgccttaaaa

SEQ ID NO: 912 - DNA, 734 bp, Gossypium hirsutum
  Clone ID: GOSHI-09MAY01-C13373_1
cccacgcgtgcgctttctaaggtaaagcggcgttagaagccaagagcagtcctccactcacctatctatcgtctttgccttcaatcgataacgcgctctctttttctctcatcgaaggttttgatggcgtcaaaattgcagcagttgcaatctaaggcgtgtcaagcgtcgaagtttgtggcaaagaacggaactgcttactacaagcaattgttggagcagaataagcaatatattcaggagccaccaacagtggagaagtgcaatgagctgtctaagcagctgttttatactcgacttgccagtatccctggccgtaacgaggcattctggaaggagcttgattatgtcaagaatctgtggaagaataggcaagaactgaaggttgaagatgctggtattgctgcattgtttggactggaatgctttgcatggttttgtgctggtgagatagtgggaaggggttttacttttactggttactatccctaaggaaaatcagctagtagaaggcagggagtctgatggatgtgtatgccttttatcatcgtttgcatgattgaattgcggccactttagatgcacatttttctcgtttcggtgaaacttctgaagctgagatatcagtggttaacttgctagcctgaataatttgtatagtcgaaatggcttaatctatagtagcctaactggtgcgtatctagatatgtcagcataatgtaatgtaccccatt

SEQ ID NO: 913 - DNA, 548 bp, Gossypium hirsutum
  Clone ID: LIB3543-031-Q1-K6-H2
ctcgctcttctttctaagtaagcggcgggcagagccaagtcagtcccctcgcgtctttgtagccaaccgataacacgttctttttcctactttattttgctcttatcgaagattttgatggcgtcaaaactgctgcagtttcaatctaaggcttttgaagcttaaaagtttgtagccaagaacggatctgcttactataagcagctgttggaacagaacaagcaatacattcaggaaccacccacagcggagaagtgcaacgagttgactaagcagctgttttacactcgccttgctagtatccctggtcgtaccgagtcattctggaaggagcttgattatgtgaggaatctgtggaagaataggcaagaactgaaggttgaaaatgctggtattgcggctttgtttggactggagtgctttgcatggttttgtgcgggtgagatagtgggaaggggctttactttcactggctactatgtctgagggtgatcttctggcggacggtatttcatggagttggaagtgtatgcccttctggatgcata

SEQ ID NO: 914 - DNA, 564 bp, Gossypium hirsutum
  Clone ID: LIB3585-034-P1-K1-G9
tgatagtatcattagccaagcatttagcaatgataagacattccagaatgctctgaactcctcttttgagtatttcatcaacttgaataaccgttctcctgagttcatttccttgtttgtggatgacaagcttcgtaaaggtttgaaaggagtcagtgaggaggatgtggagataattcttgacaaagttatgatgctgtttcgctatctgcaggagaaggatgtatttgagaagtactacaaacagcacttagctaagcggcttctatctggcaaaactgtatctgatgatgcagagagaagtctgatagtcaagcttaagacagaatgtgggtatcaatttacatcgaaattagaaggcatgtttactgacatgaagacctcccaggatacaatgcaagggttttacgcaagccatcctgagctgactgatggtcctaccctagttgttcaagttctaacaacagggtcctggcctactcagcccagtattacttgcaacctgcctgcttgaacgtcagcactttgcgagaagtttcggtcatattatcttggaacccatac

SEQ ID NO: 915 - DNA, 384 bp, Gossypium hirsutum
  Clone ID: LIB3189-008-P1-K1-G10
taaccgttctcctgagttcatttccttgtttgatgatgacaagcttcgtaaaggtttgaaatgagtcagttaggaggatgtggagatctttctcgacaaaattcttatactgatcctatttctcattgattttgatctcttttttatgcaaaacaaattttacttaatattttccacctttcttatttccatattttttttacattattttttttttccatttttatttacctgttttatttaagaacttttttccatacaattttttcctttttttttctatccatgcttttttctaaaattttttctcactttttttttctcttaaattttttttcccctttattttttttcttcctatctttttttctccgattatttttt

SEQ ID NO: 916 - DNA, 1060 bp, Gossypium hirsutum
  Clone ID: GOSHI-09MAY01-C13313_1
cccacgcgtccggtccattcacagcctatacgaaccccaagagctcctcatctctttgtttttaccttccatttgaactcaagttcgtcgtcgctttctactctttagccatcaaagatgaccaccatggaaagcttaatcggtttagttaacaggatccaacgagcatgtacggtgctcggtgattacggtggcggcgacaacactttctcttccctttgggaagctcttccttccgttgccgtcgtcggtggtcagagttcagggaagtcttcggtgcttgaaagcatagtcggacgtgattttcttcctagaggatcaggaattgtgacgagacggcctttggtgttgcaacttcataagacagacgaaggttcacaagagtatgctgagtttcttcaccttcctaagagaagattcactgattttggggcggtccggaatgaaattcaggaggaaaccgatagaattactgggaagactaaacaaatttctcctgttcctattcatctcagtatctactctccaaatgttgtcaacttaaccctgatcgatttgccgggcttgacaaaagttgctgtcgagggacagccggaaactatagttgaagacatcgaaaccatggttaggtcttacgttgagaagcctaattgtatcatactagctatatctccagctaatcaagatatagcaacttctgatgctatcaaattggccagggaggtagacccctctggtgaccggacatttggggtgttaactaagcttgaccttatggacaaagggactaatgctttggatgttcttgaaggaagatcttaccggctacagcatccttgggttggaattgtgaaccgttctcaggctgatataaacaaaaatgtggacatgattgtggcaagacgcaaggagcgtgagtattttgccactagtccagactatggccacttagcaagtaaaatgggttcagagtatcttgcaaaacttctatcacagcatttggaaaatgttattaggtctccgataccaagtatcacttctttgataaacaaaagcattc

SEQ ID NO: 917 - DNA, 344 bp, Gossypium hirsutum
  Clone ID: LIB3189-008-P1-K1-A7
attttattttttatttagtttttattaattttctattcttcctgcttttctcaacctcattgagagcctatacgaaccccaagagctcctcatctcgttgtttttaccttccatttgaactcaagttcgtcgtagttttctactctctatccatcaaagatgtccaccatggaaagctgtaatccgtttagcaaacaggatccaacgagcacgtacggcgctcggtgattacgggggccgggacagcaacttgtccgcttattgaaaggctgtaagatcacatgccttgagcaaatgttccttctttctttccctatcaaggaggtcccaattcatttgaccaa

SEQ ID NO: 918 - DNA, 614 bp, Gossypium hirsutum
  Clone ID: GOSHI-09MAY01-C13333_1
cccacgcttccttccacggagagagagaaaggatggttttctcaacggtgttaacatcagttccaaatctctaccttaccaggaaacccaagaatattcacatccaaattcgatgcctatcgtcaccatctgtatcaatttcaagtcaatcaaatttgacccaattcgatttaaaggcttactgggctaccctttatgcagaaatcactcaaaagcttgaagaagcaatcccagtgaaatacccagatcagatctatgaagctatgaggtactctgttcttgcaaagggtgctaagcgagcccctcctgttatgtgtgtggctgcctatgaaatctttggggataatcgactcgctgcttttcctactgcttgtgctcttgaaatggttcatgctgcttcactaattcatgatgaccttccttgcatggatgatgctctagaacgcagaggcccaccttcgaaccataaggcctttggtgatgacatggcaatccttgctggtgatgcactcttccctcttggcttccaccatattggcatgcttacgcctcctgagcttgttcctgaatcccggctcttgcgtgtgattgctgagatagcacgcactgtgggg

SEQ ID NO: 919 - DNA, 335 bp, Gossypium hirsutum
  Clone ID: LIB3582-029-P1-K1-C7
cagaaatcactcaaaagcttgaagaagcaatcccagtgaaatacccagatcagatctatgaagctatgaggtactctgttcttgcaaagggtgctaagcgagcccctcctgttatgtgtgtggctgcctatgaaatctttggggataatcgactcgctgcttttcctactgcttgtgctcttgaaatggttgcctcctcttttcccatttatccaatttcctctctattcacatgatttgatctgattgttctttagtaaccacgcttaggtatctgctttaaggaatatggtgtaaaactttggttggattactttatctagttttaattctat

SEQ ID NO: 920 - DNA, 529 bp, Gossypium hirsutum
  Clone ID: GOSHI-09MAY01-C13293_1
caaatactcgaatatgtgtttggataaaaggagtgaaaagaggcaaaagtaaaagccaaggacatcggaagaaaattcaagttgcagacgtaaatcgggaatccatgttgaatagactgaaattgcagccacctgatttcagcgccactttcatcaatggcgcgtccccaactaacatcagcccaaaccgtcgtgtccgtaatctccgccttccgctcctccgctacggttctccttccgtccgatcggagtatggttcagcttcgcctccgccgccttcatcattatctgagccgtcggtttctactcattatgtctcctccgtcggatctccctctctccagctctctcaatggtcccttaccaatcgccacatcctcgtgcttaacgtcgtcgcctgcgctgtggcagtttcagcaacttggctttttctctctgcaatccccgcgcttctggctttcaagagagcagccgagtcactagagaagctgatggatgtcaccagggaagagcttcctgatacgatggc

SEQ ID NO: 921 - DNA, 524 bp, Gossypium hirsutum
  Clone ID: GOSHI-09MAY01-C13253_1
cccacgcgtccgagcaaatttcacaaaaacaaattcaaacccaaaacctgaaatcccaatattcgcccacccatttgcaacgatcaccttgaaaatcacatatccatggagtttaattgctcatctcctaccaccatccccgtggtttcaacttttgcatctccctttgacacttctgccgctggcaatggctcagactccgcctcaaccaggaagcccatcagcctatggccaggaatgtaccattcaccagtaaccaatgctttatgggaagccaagtcccagatctttgagagactccttgacccaccaaaagatgccccccctcagagcgagttgctcaccaaaaccccttctcaaagcaggaccagcattcctttataatttatcatcagactacattttgagagaacagtacaggggatccctggaatgaagttagaattgggaagttgcttgaagaccttgatgctttagctgggactatctctgtcaagcattgttcagatgatgatagcacaaca

SEQ ID NO: 922 - DNA, 739 bp, Gossypium hirsutum
  Clone ID: GOSHI-09MAY01-C13203_1
caaaaatgttccgcttgttgagcatcttcttcgtgagtgtaaccttttggggaaaatgcttgaagctgaaaagaattgcacattaacttctgatccgaatatgccaacaattagtgctgaaggtagaccgcctccaaagataggaaatcttggacacttgacacgcatatctaacaaacttgttcagcttggaaatagcaatgctgaaattcaggcacatctgcaggaaaacagtgaatgggttgattggcacactaatgtcttattaaagcgtaatgctacagaaaatatctatcagtgggcttgtgggaggccaacagctctacacgaccgaaccagagacagtgatgatgatgattaccatgatagggattatgatgttgcagccttggcaaataacttaagccaggcatttcgatatggcatttacagtaatgatgatatggatcaggtacatggctcactcgaaagagatgatgaggatgtttactttgatgatgaatctgctgaggttgtaatatcttccctgcgcctaggagacgaccaagaaagtggttctctttttacaaattccaactggtttgcatttgaagatgatagagtttccaatgagtgctcgactggggcattggcttctgcatcacccaacactgggagagctgctgttgtcaatggtgaaggcgaagatgacgaggttgttggtggtgaagatgacgacgacttagatgatactgcaaca

SEQ ID NO: 923 - DNA, 365 bp, Gossypium hirsutum
  Clone ID: GOSHI-09MAY01-C8950_1
ccttccaaaaagggtttgcttcattcaaatcaagagatcttcaatggaagttctttaactgatggttgggttaaaaagtatgcagccgatacttcattattgttcaaggaatttgccaagtctatgatcaagatgggaaacattaaacctctcacaggttatgctggggaaatcagaatcaactgccggaaagcaaattgaaacatgtttccatacttgcaagaaattttatttaaaaaaaaaaaaaagttatctgtctgttgtttgaagtgagtgattgagatgttcatataatttaaatttgtactatcctttttttttctctcctttttctaataaaatgtttattcaataaaagatcactt

SEQ ID NO: 924 - DNA, 496 bp, Gossypium hirsutum
  Clone ID: GOSHI-09MAY01-C8900_1
caatgccggtggggttaccataacctctctgtagttgaagatgtagttgagagttacaggaaggcccaaatcccacggtgatgtgatctggagtgatgatgatcatatggatggccataaggacttcaccctcaaccccgtaaactaccctcgtccgaagcttcttgcattcctggacaaaatacatagcagaggcatgaaatacattgtcatcattgatcctggaattggtgttaattccagttatggtgtataccaaagaggcatcgccaacgatgtatttatcaagtatgacggtgagccttacttggcccaagtgtggccccggggctgttaatttccccgacttcctcaaccctaatactgttgcatggtggggtgatgaagtcagacgtttccatgaacttgtccctgttgatgggctctggatcgacatgaatgaagcttcgaacttctgttctgggaagtgcacgataccgaaaggcaagcagtgccc

SEQ ID NO: 925 - DNA, 501 bp, Gossypium hirsutum
  Clone ID: GOSHI-09MAY01-C8930_3
ctctctctctctcgtattagaaattagacactactagacttgtagaaatgcaaggggtcggcttgttgccggtactgctttgcgccacctaccatatcgctctttccgcgaacaacgtacggtggcggacggtaagaatttacatatataatatatacatatatggacacaggagtttttacccctcgcgtccgatttcgagcaaagtaattttgtttattttgaaagcacagggagtaaaaataaataaacatctctactttctcttcatgaatttttggttggtatcaggaaacgtagcaagtagtatggttagttgttactcagttaaaaatagatttaaaattgttattgtcataaataaaaccaaaattttaataaaagaatatgcttactaggatttgaaagattgaactaattattttattgggttgattaaatcacgagagcttaatttaaaccctttgattatggtcctacacatattaccaaatttttata

SEQ ID NO: 926 - DNA, 1048 bp, Gossypium hirsutum
  Clone ID: GOSHI-09MAY01-C8930_2
cccacgcgtccgcaactatgcttgggcattcaaatcacaatctgatgcggtcatgttgattattcacaatcctggagtggaggaggatcctgcttgtggaccactcatcgatgcggtagctatcaaggctttatatcctcccagacccaccaacaagaacataatgaaaaatggtggttttgaagaaggtccttatatattccccaacactccatggggtgtcctaatcccacccaacattgaggatgataattctcctctccctgcctgggtagtcgaatccctcaaggccgtcaagtacatcgattcagcccattacttcgtgcctcaaggccgaagagccgtggagctagttggtggaaaagagagtgcaatcgctcaaataacaagaaccattgttggcaagacatacaggctctccttctcggtgggcgatgctaacaactcctgtgcaggttctttggtcgtcgaggcattcgccggtaaagccacactcaaagtcccatacgaatctaaagggactggtggattcaagcgagctgcacttagattcgtggctgtttccaacaggacaagaattatgttccttagcacgttctacaccatgagaagtgatgacttttcttctctatgcggtcctgttgttgacgatgtgaagcttttgagtattcgtaacccttgatcatcaccgaccttgttcggggctgttgatgatccattgttggacgtggtctatcaacattttgtcttcctaaggatgatttttttttctttggttctttgtgggcttggaaaatcaaaggttttcgtgtgagctaaagctatatattgtggggaaaaaagaacctaggctatatattaatccaacaaaataaagtatatatatatatagactaatatcagggagtatactagtgtgattttattacgtgtttaattatgaattataccataataaatgcgaaaatattgggttatcactttcatctttttcgctgcgtattgtatttaatgaaagattatccttataaaaccttaattactgaat

SEQ ID NO: 927 - DNA, 1116 bp, Gossypium hirsutum
  Clone ID: GOSHI-09MAY01-C8930_1
atttgttctctctctctcttattagaaattagacactactagacttgtagaaatgcaagggctcgtcttgttgccggtactcctttgcgccacctaccatatcgctctttccgcgaccaacgttacggtggcggacgggctgttagataatggtaactttgagcaagccccgaatgcctcaaacatgaagggcacggttgttgtggggcgttatgcaataccaggatgggtaaacgaagggtttgtggaatacataaagtccgggcaaaagcaaggggacatgttgctggtggtgcctgagggagcctatgcagtcaggttggggaacgaggcttcaatcaagcaggagataaaggtggcgaaagggatgtattactccatcaccttcagtgctgcccgtacttgtgctcaagaggagcgtttgaacgtgacggtagcacccgattccggtgtgatgcccatccagacagtgtatagcagcagcggttgggacaactatgcttgggcattcaaaacacaatctgatgcggtcatgttgattattcacaatcctggagtggaggaggatcctgcttgtggaccactcatcgatgcggtagctatcaaggctttatatcctcccagacccaccaacaagaacataatgaaaaatggtggttttgaagaaggtccttatatattccccaacactccatggggtgtcctaatcccacccaacattgaggatgataattctcctctccctgcctgggtagtcgaatccctcaaggccgtcaagtacatcgattcagcccattacttcgtgcctcaaggccgaagagccgtggagctagtttgtggaaaagagagtgcaatcgctcaataacaagaaccatgtggcaagaatacaggctctcttctgggggcgatgcctacaactccgtgaagtttttgtcctcaagctttcccgtaaagcaccctaaagtccttacaatttaagggatgtgattcaacgactgtcttaattcctgtggtcaacggccgatatgtctttacagtttaccctgaaagagactctttttatacggcgtgttcattaaacttgattcttactgattaccatttttgggggagaat

SEQ ID NO: 928 - DNA, 424 bp, Gossypium hirsutum
  Clone ID: GOSHI-09MAY01-C8860_1
tcagagttcactaagagattcatatcaagaacataatagaaagcaagcgaggtttgaatgatgttgacactgttctttcgaaaactactaaagggactctgggtcacagcatccagaggaccagctctcaaccaggaagattttgatgaagaactggaagcggcttcaccaacagtgccagatgatgttaaggaaggatattttacagtctttgcagtgaaggggaaggaagcgcagaggtatgttattgaactagacaacttaacaaaccctggattcctgagtctactggagctggctcgggaagaatacggattccaacaaaagggcgttctttgtcttccttgtagacctcaagaattacaggatattctacaactctggaaactagcctagaaagccaattggacaaataagttatttc

SEQ ID NO: 929 - DNA, 848 bp, Gossypium hirsutum
  Clone ID: GOSHI-09MAY01-C8540_2
ctctgtcttccaaagaatttaagataaggggtaggaaatgagtgaaaattaagtaagatgatgataatggaatgggatcaacagcaagagaaccaaagccaaaaccagagagaagatagtgtgaatctcaatgtgaacaatggagtaatgtatgtgaaggtgatgacagatgagcagttggagactctccggaagcaaattgctgtttatgcctctatctgtgagcaacttgttgagatgcacaagaatctcactgcccagcaagatcttacaggtgggagactgggaaatctgtattgtgacccattaatgacatcgggcgggcacaaaataagtgcgagacaacggtggacaccaaccgctgtgcaacttcaaatactggaacgtatatttgatgaaggaactggaactccaagcaagcaaaagatcaaagagataacctcagaactaagccagcatggccccatttctgaaaccaatgtgtataactggtttcaaaacagacgagctaggtctaaaaggaaacaagtaatggttgcatcctccagtaataacaacaataatcataataatgcaggtgaatcagaggtagagacagaagttgagtcaccaaagacaaaaccagagaatcttctgcttgtatcagagggtcaaggtcaacatcatgatgtgtgctttcagaacccagagataacttctcaactgcatttcttgggtgtaggagatgaccatatgtctgctaaaagaatggggggaagctaccacatttatgaccaagcatggcagggtgagtgagtgaatgagtgaggcaaagaaactacatagcatgcatgctttgacatagtaaa

SEQ ID NO: 930 - DNA, 430 bp, Gossypium hirsutum
  Clone ID: LIB3147-045-Q1-K1-C10
cccacgcgtccgcccacgcgtccgcccacgcgtccggcaggtgaatcagaggtagagacagaggttgagtcaccaaagacaaaaccagagaatcttctgcttgtatcagagggtcaaggtcaacatcatgatgtgtgctttcagaacccagagataacttctcaactgcatttcttgggtgtaggagatgaccatatgtctgctaaaagaatggggggaagctaccacatttatgaccaagcatggcagggtgagtgagtgaatgagtgaggcaaagaaactacatagcatgcatgctttgacatagtaaagctaatacataagctttgaatcttacactgccctttaggcttttggctttcttttgtttttgattaatatttgttaatatgaagaagtgaaaggaatgtgcttgggcaggtttttgatg

SEQ ID NO: 931 - DNA, 941 bp, Gossypium hirsutum
  Clone ID: GOSHI-09MAY01-C8560_1
gaaacttgtccctgccactccttttgattatgggagtggtcatgttaatccgagagctggtttggatcccggactcatctttgatgcaggttatgaggattatgttggattcttgtgcaccacacctggtattgacattcacgagataaagaagtacacaaactccccctgcaatagcaccattggccgcccttcgaatctcaacaccccatcaatcacaatctctcatcttgtcgggactcaaaccgtcactcgcaccgttacaaacgttgctgaggaagaaacctacgtcatcacagctagaatgcatccatccgttgccatcgaaaccaggccttcagccatgactttgagacccggcgcatcaagaaagttctctgtcacgcttaccgctcgatcagtaaccggaagctactgcttcggagagatcacaatgaaaggcagcagagggcacaagggtactataccagtggtggctatgggacactggcgatagacttaattggtaagcagaactagggagcattttcatctgcaattcgttttactacaaccttacaattattcaatcacaacactgaattacacggtcctcagttcattcaaacatggatttcagataatattttcacggatcattatacaattcacgattgtgattggttaattgtgttgtagtaattgtagatgaaatggtcctcgtactattattctttgtaatttgtggtaataagatatgggttttagattatatatatgtctgaaatatatagatgtggaatagtagtttgtaaaggtaaatgctatagcgtggggagacttgtagcatcttccttctataagttttgctactaattttctttgctaattccataaaaaaaatgcttcctttactattttgtattatgttttgttggattgacaaccaaaatttccctttt

SEQ ID NO: 932 - DNA, 779 bp, Gossypium hirsutum
  Clone ID: GOSHI-09MAY01-C8510_1
cggacgcgtgggtccgcttctgcctctattcctctttttgttcttcatttcctttgttttccctctccaaattactagggttttgttaagcgcagctgcgtttgacctgcctgatcggtgaaagttaaattcagcatcaactttcgtgattttaagctttcagaaatattaggggatggaagttacacaggtgcttttcaatgcgcaatcgattgatgggactgttcggaagaatgctgaagaaagcctgaaacagttccaggagcagaaccttcctggtttcttgctttcactttctggagagttggcaaatgaggaaaaacctagtgaaacacgtaaattagctggtttgatacttaaaaatgcattggatgctaaggagcagcacagaaaatttgagcttgttcaaagatggttgttgttggatgctactgcaaagagccagattaaggcatgcttattacagactttgtcttctccagtattcgatgctcgttcaactacatctcaagtcattgcaaaggttgctggcattgagctgccccaaaaacagtggccagaattgataggttcccttttatcaaatgttcatcagatcccagctcatgctaagcaagccactttggagacgcttggctatttgtgtgaggaggtctcccctgatgttattgatgaagatcaagtaaataaaatacttaccgcttgtagttcaaggtatgagtgcatctgaaggaaatattgatgtgaggcttgcagctaccagagcactttacaatgca

SEQ ID NO: 933 - DNA, 846 bp, Gossypium hirsutum
  Clone ID: GOSHI-09MAY01-C8530_1
aatatttgtttctattacaaggtaaatcttagaaaatttctcattttttttcgtctgtagataaattcgctttgtgggtaatttttgatccctcaaagttttaaatttttttttggttggattttaaagggttgtctatttttaaaaagaaaaacctcttttaatccgttctggatttaggacctgttcttcaagttttggtaagaaacaggttaatttttatttttaatttggtcctcatcttatttctagttttagtgtaatggcagctgcaatggatttcattagtagtggagtagatcaatcagatctatatgggggagaattgatggaagttcttgaaccttttatgaaaagtgtttcctcctcttccgcctccccttccccctcccccttccccttccccttcttctcttccttctacttcttacctttctttctcttcttccgaaacacagcctaatttttacccagatagctgttcttacccttaccctacaccaatggactcagtatcatgtccccaacagcctcaaactggttcaacaattgggcttaatagcttgacacaagctcagatccatcagatccagcttcatttccacctctcacaacaaccaacccagctacctttgccaaggtccccaacccaacaccatcagcgccaatagtaacccgatggttagctttctttgccctaaacctgtcccaatgaaacacgtgggtgcgccattcaaacccaccaaactttacagaggagttaggcaacgcccctgggggaaatgggtcgctgagatccgggtacctagaaaccggacacggtttttgttaggcacttttgacact

SEQ ID NO: 934 - DNA, 397 bp, Gossypium hirsutum
  Clone ID: LIB3166-002-Q1-K1-G6
attttaaagggttgtctatttttaaaaagaaaaacctcttttaatccgttctggatttaggacctgttcttcaagttttggtaagaaacaggttaatttttatttttaatttggtcctcatcttatttctagttttagtgtaatggcagctgcaatggatttcattagtagtggagtttatcaatcagatctatatgggggagaattgatggaagttcttgaaccttttatgaaaagagtttccttctttttccacttaccgttctgatttatctctcttcccctgtcgcgtgtcctgatacttcttacctttcttacttttcttcctagacacatgcttatttttacccagatcgctgctcttacccttaccctacacatatcgacttcatatgat

SEQ ID NO: 935 - DNA, 977 bp, Gossypium hirsutum
  Clone ID: GOSHI-09MAY01-C8520_1
cccacgcttccgctcttacactcacacacatgacagaaagaaaaccctaacttttcaagtttcaaactcctaattgaaaatttcaaatctctcaaaaccttcaaaatcttcaaaatctcccaaaaccttcaaaagtatcatagctggaggctagagctacagctggccgctgcccgctggtgttgccgtcgaagcacgggagcagaatgtccaccgaaccaacatctattgagggtagtggtacacctcctacttcgatagattctgaacattcgggagttggagcttcaagccaagcaaaggggactaccgggaaaagaaaagccactcctcaaaggtcagaagtttggtctcacttcactaagattattaatagtgagggtgcaagtaaggctaaatgtaattattgtcaaaaggatttttgttgtgatatgaaaaaaaaatggtacagggttattgaaatatcatattagttcatgtaagaaaaatcctagtaatattgttgacactagtcaaggacaactagttttacctagaaagggaagttgaaggggggaaaggaaatctttcaacttggagatttgatcaagaagcatgtgtggaaaggattagcacaaatgattgtgattgatgaattacctttcaaatttgttaaagtgaaggttttaagaatttaatgtttgggcatgcctaggtttcatattccttacgaactactatactgagatgttatcaattgtatttagataaaagggtcaagataaacaactttgaaaagtcttgtctaaagtttgcttactactgaccatggacttctttaaaaagtaataatttgtgatcactgttcctttaatgtaacgattgtaattgataagatttaactttgctattctagcataggtgatcttggatgtgatgaaatgcctgtgaatggggatgatattattactgtctgtgatatgcagttcaatagttcg

SEQ ID NO: 936 - DNA, 465 bp, Gossypium hirsutum
  Clone ID: AW186796.2
gaagaaatgaaaaaccagccatggtttttttcttattcggtcaaacttcatttttccattaaggcagcaaccgattttcacttaacacaaatcgtatctcaatctcagcaggcagcaaccgactttcacttaacacaaatcgtatctcaatcttagtcgaatctggaaaacccaccattttcaaacctttttgctgtccatttttcttccaccacaccaatacccagacccagaatgtcaaccaaaccaacatctattgagggtagtgttacacctcctacttcgatagattctgaaaattcgggagtaggagcttcaattcaaacaaaggggattaccgggaaaagaaaagccactcttcaaaggtttaatgcaaatggagatcttttggagagaagaaatggatacaaatggagaatattacagacttacatattaattatttgttaatttcaaaccttttgt

SEQ ID NO: 937 - DNA, 488 bp, Gossypium hirsutum
  unsure (1)..(488): unsure at all n locations
  Clone ID: LIB3584-009-P1-K1-B1
ttttgnaaaaaaccccactttttaattttaaaatccctaattcaaaatttcagatctctcaaaaccttcaaaattttccaaaagccaaaccttcaaaagttcatagctgctggagcctggagcctggagctacggctggctgcaacctgctgctgttgtcgtcgaagctaaggacaaggtgctgttcggctggtccaaagaaagcgatagaatgtccactgaaccaacatctattaagggtagtgttacacctcctacttcgatagattctgaaaattcgggtgttggagcttcaagccaagcaaatgtgactactgggaaaagaaaagccactcctcaaaggtataatgcaaatgaagattttttggagagaagaaatggacacaaatggagaatattaaagacttacatttcaattatgtgttaatttcaagacttatgtaatgtttttaattatgtagtgatttaatactaatgtatattgngtg

SEQ ID NO: 938 - DNA, 431 bp, Gossypium hirsutum
  Clone ID: LIB3149-064-Q1-K1-E8
cacacacatgacagaaaaaaaaccctaacttttcaagtttcaaactcctaattgaaaattgcaaatctctcaaaaccttcaaaatcttcaaaatctcccaaaaccttcaaaagtatcatagctggaggctagagctacagctggccgctgcccgctggtgttgccgtcgaagcacgggagcagaatgtccaccgaaccaacatctattgagggtagtggtacacatcctacttcgatagattctgaacattcgggagttggagcttcaagccaagcaaaggtgactactaggaaaagaaaagccattccttaaagatttaatgcaaatggagatcttgtggagagaagaaatggatacaaatggaaaatattaaagacttaaatttcaattatgtgttaatttcaagacttatgtaatgtttttaattatg

SEQ ID NO: 939 - DNA, 374 bp, Gossypium hirsutum
  Clone ID: LIB3166-002-Q1-K1-F7
acttaacacccctagccctaaatccctaatattctcaatctccgtcgaatcgggaaatcggaaaacccactatttttcacacctttttggcttttgctgtctatttctcttctgccggagtcagaccaccacaccaatacccagacccagggacagtgttacacctcctacttcgatagattctgaaaattcgggagttggagcttcaatccaaacaaaggggactaccgggaaaagaaaagccactccctcaaaggcaaaaagttggtcctcattcaactaagataataaatagggagggtgcaggtaaggctaatggaattattggccaaaaggtttttggtgggatattgaaaaaaaatgggaccggggta

SEQ ID NO: 940 - DNA, 284 bp, Gossypium hirsutum
  unsure (1)..(284): unsure at all n locations
  Clone ID: LIB3543-064-Q6-K6-A11
ntcnnantgtcanactaccatngccagaatgtcaacccaaccaacatctattgacggtagtgttacacctcctacttctatagattctaaaaatttaggggttggagcttcaatccaaacaaaggggactacctcccggaaaagaaatgcccctcatcaaacgtcataagtttggtctcacttcactaagtttattaatagtgacggtgcaagtaaagctaaatgtaattattctgataaggaatttttttgttatatcaaaaaaatntaccgggtcattgaaa

SEQ ID NO: 941 - DNA, 1157 bp, Gossypium hirsutum
  Clone ID: GOSHI-09MAY01-C8490_1
gaattgcgtcccgtgaatgcttccaccggatctgctatgccttcaccgaggtctgctgttatcaatgcagcggatatggctaatttgagccctctagcacttggttcatctgccttgccattgccaaccacttcaacgccgcccatgcctcctttggctgttgattcctctccaaagtctggtggcttgtggcacaagcaagttaacctcaccccacctacgttgcagctaccgggtagccgcttgaagacagcttttaatgccagagattttgatttggaaatgcaactacttgcgctcgagaatcatgctagccaattgcagcagcaacaattgatggatgagatatctagtctctcctctccatcttgttggactaaggaatacagtaggcttgaagatttaaagcctaccaaactcgatgatgcttttggatctctcgatccatctctgcaatctccgttgaagggactgtcaatagaatccgtaacacaaactcaatcacaatctcgccaaaacatgaaccaattccgtgcaagctacccaccgaacctttcatcatctccggtgaggaagccctcagcctttggttttgactcatctgctgctgtagctgcagcagtaatgaattccaggtcttcgggatttgcaaaacggagccagagttttatagaccgtggagcaatgaccggtcgtgctgggcttactacatctgctaactcaaaaactatgatgtcttcaaatatttctgattggagctcccctgatgggaaactggattggggtattcaaggagatgagctgaacaagcttagaaagtctgtttctttcgggtttcgaaacaacaatcccaccactacagaaacaacgaacatgatgccaaccgatgctgatgagccagatgtatcttgggttcattccattgtgaaggatgctgcacctacggaagctcgattgcatcaacaacagcgatacagtctcggtaaaggtgttcgagaaacacttccaccatggatggagcaaatgtacatagagcaggagcagatggtggcataagaaaaagatccctttgctcattgccttattctaacttatattatttcatattgtatcaatcaagaagtaaaacctatatgagcaggaagaattaagtgact

SEQ ID NO: 942 - DNA, 607 bp, Gossypium hirsutum
  Clone ID: GOSHI-09MAY01-C8470_1
atcgtgaacaccttttgaagggaactgtgatagtgatctttcagccggcagaggaagccggaaatggtgctaagcggatgatcggagatggggcattggaaaacgtagaggccattgttgcagtccatgtatcccacgaacaccccacgggtattatcggctcaaggcctggtcctcttcttgccggctgcggcttctttcgagctgttttcagtggaagaaaaggccttgccggcagcccccatcactccgtcgacccaatcttggctgcatcagctgccgtaattagtttacagggaattgtttctcgtgaatcaaatccattagattcccaggtcgtctcggtcacttctttcaatggaggcaataatcttgacatgatccctgaaacggtggtcatcggaggtactttcagggctttctccaacgccaatttttacaattttctccaaagaattgaagaggtaatcgtcgaacaggccaatgttttccgatgttgggtgacggtcggtttctttgaaaaagattcaccatctattccccaacattgaatgacgaccgtatgtccagcacctaggaaagtggcaattgattgctaggaccacca

SEQ ID NO: 943 - DNA, 911 bp, Gossypium hirsutum
  Clone ID: GOSHI-09MAY01-C8780_1
cggacgcgtgggggcttgcccggttatcattttctgttcccacattttgtttactttccttatatcactccactttatcatcaccctctttttatccccctcttttatcttgactttaatctccacgccttcttcccattacttcattacattcccaagagaaaaacccagagccaaaaaaaaatggccaaattattgctgttcattgcactatttgtggttccatgtcttgttagtgctacacgcatggtgaagaacccgttggtggttcaaggtcaagtttactgtgaccattgccgtgctgggtttgaaacaccaaagactagaaacatggctggtgccaaggttaaggtggtatgttccaaccggaagaccggtgatgtcgtgtacgagaaggaaggacacacggattcaaccggacaatacaagatcgctgtctccgaggatcatttggatgagatctgcgacgctgttctcgttaagagctcgcagccggagtgcgctgaaatgtcaccgggacgtgaacgtgcacgcgtggtcttgaccaacttcaacggcatttcatccaacacccgttttgccaacgcaatggggttcatggccaacaaggttgaagctggctgtgctgaggtaatgaaggtgtacctggaggaggatgattagagtggcggtctgtgaagtctaatttacttactagtttggcatatatgaatatgaacatgaatacgacatgcgtgctgttttctctgaattctattgaatttctaatataaaatatgcgatttcttctgtcaggatctttgtatttttttaattatttatttggaagacctgtgttcaatatttgtatttgaatacaaatatatgatattatttttattcaaattaatggaaaatgtgaagacaattga

SEQ ID NO: 944 - DNA, 350 bp, Gossypium hirsutum
  Clone ID: LIB3166-021-P1-K1-D5
ctttaatctccacgccttctttctattacttcattacattctcaagagagaaagccatatccaaaaaaatggccaaattattgctgttcattgcactatttgtggttccatgtcttgttagtgctacacgcatggtgaagaacccgttggtggttcaaggtcaagtttactgtgaccattgccgtgctgggtttgaaacaccaaagactagaaacatggctggtactttccatctttgcctttcttatatgttttttctatgtttccttatgcctgtttttagtgtgtttttgttgctggcactgttagatctgtttctttttgtgtgtgtgcacgtgtagttctgtgta

SEQ ID NO: 945 - DNA, 208 bp, Gossypium hirsutum
  Clone ID: LIB3189-026-P1-K1-H4
tcgcccacgcgtccgagaaaaacccagagccaaaaaaaaatggccaaattattgctgttcattgcactatttgtggttccatgtcttgttagtgctacacgcatggtgaagaacccgttggtggttcaaggttaagtttactgtttccattgccgtaacgtgttagtatcatacaataattttttatctttcttatgatacatttttt

SEQ ID NO: 946 - DNA, 767 bp, Gossypium hirsutum
  Clone ID: GOSHI-09MAY01-C8740_2
ctttctcttaccttctccttgctccctgaaacagcttcagctcaactgggacaaaattactacgcgaaaacctgtcccaatgtagaatccattgtaagaaacgcggttactaagaaattcagacaaacttttgtcactgtccctgcaactatccgcctcttcttccatgattgctttgtccaggttcttttaaagagcacaaccattttccagtttttcaccatgttggagctgatgttattttatttatatatataacaatcattatgttgttttcagggttgtgatgcttcagtaattattcaatccaccggcagcaacaaagccgaaaaggaccaccccgacaacttgtcgttagccggtgacggtttcgacaccgtcatcaaggcgaaacgagcggtcgatgcggttccgagttgtagaaacaacgtttcatgtgctgatattatggcaatggcgactcatgatgtcattgctatgtcaggtgtaccatcttatgcagtacgaattggctaggtacagatgggttaagctcacacagcatcttagtgtctaaggctatgacgtctcattcagacataagactggaaccaccttatctatatgatcataccacattgactcacccagtactgacatgactgcatcattagttgcactcactcactgactctatcgttacaaccatttgtcacaccgcttatacagtttcagccgtcagagtacattatacccgacattgaaccgagcatatgcgatctaactac

SEQ ID NO: 947 - DNA, 938 bp, Gossypium hirsutum
  Clone ID: GOSHI-09MAY01-C8740_1
cccacttgtccgttaaattttcagacccaaaatggctcacttcattacttttctactggtactgtcactttctcttaccttctccttgctccctgaaacagcttcagctcaactaagacaaaattactacgctaaaacctgtcccaatgtagaatccattgtaagaaacgccgttactcagaaattcagacaaacttttgtcactgtccccgcaactatccgcctcttcttccatgattgctttgtccagggttgtgatgcttcagtaattattcaatccaccggcagcaacaaagccgaaaaggaccaccccgacaacttgtcgttagccggtgacggtttcgacaccgtcatcaaggcgaaacaagcggtcgatgcggttccgagttgtagaaacaaggtttcatgtgctgatattttggcaatggcgactcgtgatgtcattgctctgtcaggtggaccatcttatgcagttgaattggggaggttggatgggttaagctccacagcagctagtgtcaatggcaagctgcctcatccagatttcaacttgaaccagctcaactctatgtttgcagcacatggactcacccaaactgacatgattgctctttcagctgcacacaccgttggattctctcattgcagcaagttttcaaaccggatatacaatttcagccgtcaaagtgcagtagacccgacattgaaccgagcatatgcgacccaactacaacaaatgtgtcctaaaaatgttgatcccagaatagccattaacatggaccctaacacaccacgtgcattcgacaatgtttactacaagaacttgcaacaaggcaagggattgttcacttccgaccagggtttgttcaccgacaagagatcgaaaccagtcgtagacgcttgggcggctaattcgaatacatttaactccgctttca

SEQ ID NO: 948 - DNA, 718 bp, Gossypium hirsutum
  Clone ID: GOSHI-09MAY01-C8770_1
cggccgcgtgggcggccgcgtgggtccgtagagaggagggaaaaaaatgaaaagaatgaaagagagggtctaaaagaaagtgtgaagaaatttgatggaggaacatctcagtccattagctgttactcatctccttcaacacacactaagaagcttgtgcattcatgagaactctcaatgggtttatgcagtcttttggaggatcttacctagaaactatccacctcccaaatgggatggccaaggagcttatgacaggtcaagaggaaacaggagaaactggatattagtttgggaagatggtttctgcaactttgctgcctcagcagctgaaataaactccggagactgtcatggttcctcagtccatggcagcagtgagtttcaacattatcaaggactgcaaccagagcttttctttaagatgtcacatgaaatctacaactatggagaaggtttgataggaaaagtggctgcagatcacagtcacaagtggatatacaaagaacccaatgagcaggaaatcaacttcttgtcagcatggcataactctgcagactcacatcctaggacatgggaagcacagtttcaggctggaataaagaccatcgccttgattgcagttagagaaggtgttgtgcaactaggagctgttcacaaggtaattgaagacctgagttatgtagttctactgagaaagaaattcagctacatagaa

SEQ ID NO: 949 - DNA, 509 bp, Gossypium hirsutum
  Clone ID: LIB3584-021-P1-K1-D6
cccacgcgtccgcccacgcgtccgcccacgcgtccgtgaaagagagggtctaaaagaaagtgtgaagaaatttgatggaggaacatctcagtccattagctgttactcatctccttcaacacacactaagaagcttgtgcattcatgagaactctcaatgggtttatgcagtcttttggaggatcttacctagaaactatccacctcccaaatgggatggccaaggagcttatgacaggtcaagaggaaacaggagaaactggatattagtttgggaagatggtttctgcaactttgctgcctcagcagctgaaataaactccggagactgtcatggttcctcagtccatggcagcagtgagtttcaacattttcaaggactgcaaccagagcttttctttaagatgtcacatgaaatctacaactatggagaaggtttgataggaaaagtggctgcagatcacagtcacaagtggatatacaaagaacccattgagcaggaaatcaac

SEQ ID NO: 950 - DNA, 372 bp, Gossypium hirsutum
  Clone ID: LIB3166-031-P1-K1-G9
gctggcttctcccttcttttaaggttagatatatcggtagagaggagggggaggggaaaatgaaaatgataagaatgaaagagagggtctaaaagaaagtgtgaagaaatttgatggaggaacatctcagaccattagctgttactcatctccttcaacacacactaagaagcttgtgcattcatgagaactctcaatgggtttatgcagtcttttggaggatcttacctagaaactatccacctcccaaatgggatggtcaaggagcttatgacaggtcaagaggaaacaggagaaactggttattatttttgggaagattggttctgcaactttgctgccttatcagctgaaataaacttccggagactg

SEQ ID NO: 951 - DNA, 1061 bp, Gossypium hirsutum
  Clone ID: GOSHI-09MAY01-C8760_1
ttccacgcgtccggttcgatgcggtttggcatgggccaaaacagcgatgtagcttggcacattgcaatgattctactgaacccatgcctgatcttaatcgatcacggtcattttcagtacaattgtatcagcttgggtcttaccatagctgccattgctgcagcactctctcaaaaggatcttgtggcttccgtgctatattgtcttgctctcaaccataaacagatgagtgcatattttgcacccgccttttttggctatctattgggtaaatgcctgaggaaaaagaatccactgctcgaggtgacaaaactgggattgatggttataggaacatttgctgtcgtctggtggccatatcttcagtcgaaagatgctgctttggctgttctatctcgtcttgcaccatttgagagagggatatacgaggattatgtggctaatttttggtgcaccagttcagtgcttgtgaaatggaaaaagttatattctacacaatcattgaggatttttagccttgctgcaactcttataacatgtctgccctcaatggttcaacaaatccttgctccgagcagtaagggttttctctatgcgttgcttaatagttctttctcgttctacttgttctcatttcaagtgcatgagaaatctattctgcttccgcttctgcctcttaccctattagccctggaagaaagtcgcttgatattgtggttaacacacttcgctatgttctctatgtttcctcttctacaccgggacaaactggttctagcgtatatggctctttaccccctctttatccttctgtattttggcacctgttgggcaagttggaaaatccccggcaccagaactctcttattccccgaagaccggaaaaattgaggatttctttcttcttactttccacccgctggtatgggctttctgggttggttctctctaatcctgcatgttatttacctagccatgcatcctccgaataagtatcttttccttttcgaggcattgatcatgcttatctgcttctcccactttgtcttgtgtacttttat

SEQ ID NO: 952 - DNA, 1454 bp, Gossypium hirsutum
  Clone ID: GOSHI-09MAY01-C8630_1
gccgcttcctcgttaaaaggctcattattctctgtttcgtatttctcttaaaactctacaatggctaaaacctttgcttgctttgtcctattagctctcatagttagttgcgcacttggtcaggctcctagctcggccccaaccaagtcaccgccgtcttctaaccctactccggctcccaaggtttctccaaccatgtctccaaccactacaccaaccgcatctccgccgtcaacatccactcccccgtcttcagcccctgaatcttcaccaacttcctctcccaccacttctcccccagctcctcccgctggttctcccgctggttctcccgctggctctcccgctggctctcccgctagcgctgtttctcccacaaactccatcagcgatacaccaggcagctctcccacttctcctacgagtgcagccgctttgaacagggtcaccgtcgccggatctgccgttgcagtcgtttttgctgctttgttgatttagatctgactttcgggggaggacaggatttggatttgatgatttttattttaggctcattgttaatttcttatttttagtagtgtatttcttttgtttttatttatttttatttatattttgacggtgatgatgattttatatcatgatagcgtgttgcttttttgtacggttgagatattgatgatggcttactctcgtttgttattataattattatgattagttatacctcgcgttcgcttcctctgctaaaaggctctttgttctctgtttcgtatttctcttaaaactctacaatggctaaaacctttgcttgctttgtcctattagctttcatagttagttgcgcacttggtcaggctcctagctcggccccaaccaattcaccgccgtcttctaaccctactccggctcccaaggtttctccaaccatgtctccaaccgctacaccaaccgcatctccgccgtcaacatccactcccccgtcttcagcccctgaatcttcaccaacttcctctcccactacttctcccccagctcctctcgctggttctcccgctggctctccccctaccgctgattctcccacgaactccatcagcgagacaccaggcagctctcccacttctcctacgagtgcagccgcttggaacagagtcaccgtcgctggatctgccgttgcagtcgtttttgctgctttgttgatttagatctgactttcgggggaggacaggatttggatttgatgatttttattttaggctcattgttaatttctcatttttagtagtgtatttcttttgttcttatttatttttatttatattttgacggtgatgatgattttatatcactatagcgtgttgctattttgacggttgagatttgatgatagcttactctcgattgttattataattattatgagtagttatatattttatttatttttctct

SEQ ID NO: 953 - DNA, 540 bp, Gossypium hirsutum
  unsure (1)..(540): unsure at all n locations
  Clone ID: uC-gsronu33B021a07b1
gccgcacgtacccggccttaatgcccggaccgacccacgcgttcttttctgtgtatcatctttctattaaaagaggcactttgaaaacctatgctttttttgacctattagctgtaatagntagacgcccactaggggaggctccaagctcggtcccaaccaattcaccggcgtcttctaaccctactccggctcccaaggtttttccaaccatgtatgaaaccgctacaccaaccggataagggccagcaacatccactatcccggcttcaggccctgaatcttaaccaacttcctcttccactacttgtaccccagctcctctcgctggttctccccctggctctccccctaccgctggaactcccacgaactccatcagctagacaccaggcaggtctcccacttctcctacgagtgcaggcgcttggaacaaaatcacccggcgtggatctgccgttgcaaacgtctttgctgcttaggtgattcagatctgacctttgggggaggacaggatttggaattgaagattttaattta

SEQ ID NO: 954 - DNA, 374 bp, Gossypium hirsutum
  Clone ID: uC-gsronu33B090a06b1
acccggacttacttccccgacccacccacgcgttttatttgccctttgcataacgtaacgaatctgggttgattctatacaatggctcagggcggttacaaactttgacctattagctttcatagttagttgcgcacttggtcaggctcctagctcggccccaaccaattcaccgccgtcttctaaccctactccggctcccaaggtttcttcaaccatgtctccaaccgctacaccaaccgcatctccgccgtcaacatccactcccccgtcttcagcccctgaatcttcaccaacttcctctcccactacttctcccccagctcctctcgctggttctcccgctggctctccccctaccgctgattctacca

SEQ ID NO: 955 - DNA, 373 bp, Gossypium hirsutum
  Clone ID: uC-gsronu33b025h07b1
tcttatacacctgcgggctctttgctctctggtgcgtatttatgggaaaactgtggagtgctaaaacctttgcttgctttgtcctattagctatcatagctagatgcgcacttggtcaggctcctagctcggccccaaccaattcaccgccgtcttctaaccctactccggatcccaaggtttctccaaccatgtcttcaaccgctacaccaaccgcatttccgccttcaacatacactcccccgtctttaggccctgaatcttcaccaacttgctctcccactacttctcccccagctccctctcgctggtatttccgttggctctccccctacccgctgattctcccaccaacttcatcatctagacacca

SEQ ID NO: 956 - DNA, 459 bp, Gossypium hirsutum
  Clone ID: GOSHI-09MAY01-C8120_1
attttctaaacacagcccccacttcaccaaacttctcagccctaaaaatcaaattgtttgggcatattccagcagccactgagtacaccacttcatcaggtgatcgatggcactccagcgacaatcgatgatgcctttggacccctccaacttcgattttcagcgaagagggcagagatccatggctgatttgtaaggttccattgtggctatggtcgcacggaaggaggggccgttcgtgggcgtggaggaggctcgaatgcttcggtactggcttcatgcgagactgctgcgcacttgagcttggtggctagggttccaaaaatctggctggggtttgagttttgggccattaggtgttgggctatttggggttaattgggttagacctggtctcgggctcaagggatttacttgggttgtaagtataaatggactatggacatttattggattttt

SEQ ID NO: 957 - DNA, 897 bp, Gossypium hirsutum
  Clone ID: GOSHI-09MAY01-C8060_1
ccccgcgtccgccccgcgtccggtgagctcagttatctatatggaaaaggaagaagggttgaaactcatcatcaaagtcatgattctgctaagtggatgccttcaaagatgaggatgatgaggaagatgatgagctccgatcacaccgatttatcaaatagccctacaccgaaatccgaagatcaccaggagcagaaacaaccatcatcttctccagacaacaacaacagcacaattagggtttgtgctgattgcaacactactaagactcctctctggaggagtggaccccggggccccaagtccctttgcaacgcctgtggaattcgtcaaagaaaagcaagaagggctgcagcggtggcggcggcggcggcaagcagcgttgttgcagctgagacaccgccaagtatgagaagtgaggttcaacttaaggcgaagagatcaagcaacaatggtgttccacatttgaagaacaaaaaatgcaaacataattctcaatctcaaagtagaaagaagctgtgtttcgaagatttaaggataatattgagcaagaattcagcttttcatggagtttttcctcaggacgagaaagaggccgcgatcctactcatggccttatcgtatggtcttgttcatggttgaaatttctccccaccaccttagccttatatattgttgttttctaggtttaaataattagtgttgggagtgtagtagctaactaaggtcataaatgtttgaaactagaattgtcattgagtgtgaacaaaaagtaatttgttaaaataaagaaaaagagattagaaaagcaaaatgcatgtagaactttagagctttgattatcaggtgaatttgaacaggttggtaaccataattatggagctcttgttcttctac

SEQ ID NO: 958 - DNA, 449 bp, Gossypium hirsutum
  Clone ID: GOSHI-09MAY01-C8000_1
cccacgcgtccgattttagatagttcttgagctttcttccatatttcccgaaagcaaggaacatatatttctttcctttgttttccaatcttgtttctttttgtactttgttcggtttgttttggttttgtttcagagagaaatggctgggattgttgtgatttttgatttcgacaaaactattattgactgtgacagtgataactgggttcttgatgaattgggtttcaccgatttgttcaaccagcttcttcctaccatgccttggaatcctctcatggacaagatgatgaaggagcttcatgctcaaggaaaaaccattgatgacattgttgaggttctgaaacgagctcctatccatcctaggatagtccctgccattaaagcagctcatgctttagggtgtgaactcagggtggttagtgatgcaaacatgttcttcattgaaa

SEQ ID NO: 959 - DNA, 1312 bp, Gossypium hirsutum
  Clone ID: GOSHI-09MAY01-C8030_1
caacccccgcgtcccggtacactgactacaaatgctatccttctgatcatctctctcttcctgacagccaaacgatggctggtattccgatcagattcggaatcattgggtgtgccgagatagcccgcaaagtttctcgagctatccagcttgctcctaacgccactgtctccgccgttgccagccgctccttcgacaaagccgccaatttcgccaaggctaatggcttcccacctgacaccaagatctacggctcctacgagtcccttcttgacgaccccgacatcgacgccgtttatttgcctttacccactagcctccacctcaaatgggctgttttgacggctcagaaaaagaagcatctgctcacggagaagcccgtcgccttgagcgtggccgagtttgatcagattctaaaggcttgtgaagaaaacggggttcagattatggacggtaccatgtgggtgcataatcccagaacccataaaatgaagcagtttttaaacgacaaggagcagtttggtcagcttagaacggtaaacagttgcttcacattttttgccgatccggattttctcaagaatgatattcgtgtgaagccagatcttgatgctcttggagctctcggtgatgccgggtggtatggcatcaggtcaatcttgtgggcagctgactatgagctaccgaaaactgttacagccttcagaaatccagttctaaatgaagcaggtgtactactagagtgtggagcgtcactactttgggcagatggcaaaattgcaaccttccattgttctttcttatcaaatttgacaatgaatctcactgctataggaacattggggaacactacatcttacagatttcatcattccttaccaagaacaccaggcctcatatactacgtccgcaaaacctggatttaacgaacttgtaaccggatgggtgcaacttccgagtgagcacactgtcactgtagatctacctcaggaagcctgcatggtgagagagtttgccagcttggttgcaaatattaaaaagaatggagcacaaccggataaaaagtggccgacaatcagccggaagacacaattggttctggaatgctgtgaaggcgtcgatggagaaaggttttcaatctgttgaaattgtgggttaatatgtttttatcatttgattgagctttatctatgcctgtttgaattatctgtttccccacgagactgcatgttgtgcatttgctttgtagcatgaaatctgaacttaattttagtgatttttgtagcatgaaatttaacttaattttagtgat

SEQ ID NO: 960 - DNA, 410 bp, Gossypium hirsutum
  Clone ID: GOSHI-09MAY01-C8350_1
ctccaaaaatggacctttcttgcttccgcttgctttgtctcctctctcttttcgtaacccatctctctttctctcatgtcctcgctgattcccacttcgaaggatttgacgccgaagaggatgaccctgttgaagatgacatcttacatcaccattccatcccatcgcctcctgtaactcagtccgactcacggcccctttcagatcttgaaaccaaatcccatcctgatccgaatcctgtccccacttcggatcctccggcccagtcggatcttcaaaagccctccactacttctttcgactactgggatgaggaccagttcgagggtttacctatcgaacaaccaccacccgaacctccaaaagttactgaaaccgctacttccgatgacccagaatcgaaaacaacc

SEQ ID NO: 961 - DNA, 1283 bp, Gossypium hirsutum
  Clone ID: GOSHI-09MAY01-C8370_1
atttttaacatctcctatgagaataatcacaaactttttaaaacacacacaaaatgtattttttttaaaataaaattttaaaaatcaataattgaataatatccttagttcccttgatttctacgaaaattttcttttatttttattttcattgaatcaccaaaatgggcggaggagctatgagagcggcggcgaaagttgccggagcgggaattgttaacactggccttcgtggcggtgttcaggtggctccgtcgtctgcggaatactccgtcatgtgcgtcgccgcttctcgttcggcttcttccggaatttctgtttctggcggtggggtgtcttccgtcgctgacatgacggcgtcgcccaatcagatgatgtcatgggagatggtggacgattgggagtttgctggtggtgttgaagaggaggtgcccaccgccatttccggcggaggagagccgatgcctcgggtgttgtttggaggtgctccaaccctggaggaggctaaggcagccgctagtgatttgaaagatgcattggataaggcttatctatcatctctggattcgaccgatgatacccggtcatctcgctcctcattgctttcggaggagactaaagattgcgttgcatatgatgccaaagccactttactaccaaagcctgcagttcaggcattcaaattactcaatgagagtcctgcagttcagtctatggttgcgtcaattgctgcggatccgaatgtatggaatgctgtactgcacaatccggcttacatggacttcatagggtcgcataagacgaattatccctcgcgtccgaatagatcccgtcagggttgtgaatctacgtcggtaaagatcgaagaatatttcaaagcaaatgaaggcaaagaagttggaaatccattttcggaatttctggagaacttgaagagtagtgtggttgaggtggctaataaagcaactgatttcctccagtgtctctttactatacccattgcaggaatggagaaagaaaatggtggattgaactatctggagaagacgatcggagcaagcctaatgggattggcggtgatggctattatggttgtgcttttgaaacgagtctacaataaaagtatgtgagtctgctggatcaaaaaaaacaaaacaaaacattttcatttgacgggggtgataaattgcagtgctatcgtatattggcttgtataaatggatagtgatataataattaggatcgcttttgctgaagaataataatgcaaccttcgttgagac

SEQ ID NO: 962 - DNA, 317 bp, Gossypium hirsutum
  Clone ID: LIB3166-036-P1-K1-G4
cccacgcgtccggaattctgtttcaaaaaatatatatttaaaagaaaaaaccatggctttgagagtttgaatctatttttaacatctcctatgagaataatcacaaactttttaaaacacacacaaaatgtattttttttaaaataaaattttaaaaatcaataattgaataatatccttagttcccttgatttctacgaaaattttcttttatttttattttcattgaatcaccaaaatgggcttatgatctatgtttgctgttgctaaagtttcctgttgcgataattgttatcattggctcttttttttttttt

SEQ ID NO: 963 - DNA, 400 bp, Gossypium hirsutum
  Clone ID: GOSHI-09MAY01-C8360_1
gcaaccagttcaacggatggaactgcttgcatttgggatttaaggagtatgagcggccataaactgaaaaccttaaagactgtgagccatagtagggctgttcattccgcttacttctctccctctggaagctctcttgcgaccacaagtttggacaacaaggtgggtataataagtggagttaattttgaggacgcttgtatgatataccatgataattggactgggaggtggctttccagtttcagaggtatatgggggtgggatgattcatacatcttcattggcaacatgaaaagaggtgttgatgtaatctctccatcacaaaagagaagtgttatgactttgcagagtccagaaatgtctgcaattccatgcagatttgatgcgcacccatatg

SEQ ID NO: 964 - DNA, 713 bp, Gossypium hirsutum
  Clone ID: GOSHI-09MAY01-C8310_1
aatatccttgagctttacactttaggccgtaaattaggacagggacagtttggggttacttacttatgtaccgagatttcgactgggattgaatatgcttgtaagtccatatcgaaaaggaagttgatttgcaaggaggatgtggaggatgttaggagggagatccaaattatgcaccatttggctggtcataagaatatcgtgacgatcaaaggcgcgtacgaggatcctttatttgtgcatatcgtgatggagctttgctccggaggcgaactgtttgatagaattatccatagggggcattacaccgagaggaaggcagctgagttgactaagatcattgttggtgttgttgaggcttgccattcacttggggttatgcatagagatttgaagcctgagaatttcttgttggttaacaaggatgatgatttctcactcaaggccatcgattttgggctctcggtgttctttaaacccggcgaagtctttactgatgttgttggaagcccatattatgttgctcctgaagtactcctcaaatgttatggaccagaagcagatgtatggactgctggagttatactctatatattgctaactggcgtgccaccgttttgggcagaaacacaacaaggaatatttgatgctgtgttgaaaggatatgttgacttcgactccgacccgtggcccctaatatctgatagcgcaaa

SEQ ID NO: 965 - DNA, 1012 bp, Gossypium hirsutum
  Clone ID: GOSHI-09MAY01-C8300_1
aatcccggtcgacgacgcgtccgcccacgcgtccgcccacgcgtccgatgttcttgacagttcgcatagttttaagtgtttcttagtagcctctgtgaagaacccaatcaaggaaaaaacaaaaaacccaactccaaatctgttcagagagagaaaacactagagacaaacaaacaagctcttatcaatgggggaggaagagaagaaacctgcagacgagaagaaaacggaagagcaagtatctgaaaaagatggaaagaaaggagatgaagaggaagtaaagcaggctgagaagccagttgaggaaaagaaagctgaagaatccaaggaagaaacgccgccgcctcctccgcaagagattatcttgaaggtttacatgcattgtgaagggtgtgcacggaaagttcgccggtgcctcaagggctttcaaggggtcgaagatgtaatgactgattacaagagtaataaggtggtggtgaaaggagagaaagctgatcctttggaagttcttgagagagttcaaaggaagagccaccggaaagtggagcttctttcaccggttccgaaaccaccgttcgccgaggagaaacaaccttgagaaaaagagaaacctaagcctgaagcgaagatagaaaagccggcgccgatcacggtggtgctaaaagttcacatgcattgtgaagcttgtgctcaggaaataaaaaaacgtattcaaagaatgaaaggggtggaatcagccgaaccagatctgaagagttcagaggtgacggtgaaaggagtgttcgaaccaccgaagctggtggcgtacgtttataagagaaccgggaagcacgcgctgataatgaaggaagaggcgacggagaccgacaagaaagaaggagaagaaaaagaaaaggccaaagatggcaacaaggaagagaaaaaaggtgaggaaaaagaaggcggtgaggaagtaaagaaagaagccggtggtgaagaagacaacaaagacaaaaaagatgaaggtgatcaa

SEQ ID NO: 966 - DNA, 524 bp, Gossypium hirsutum
  Clone ID: GOSHI-09MAY01-C8330_1
atgctactcgtaccatatttttcttgactccgagcgggactctcaagccagtcgccattgaactaagcctccctcacacctcaccaaattcccgatccaaacgtgtcgtcacacctcctgttgatgcaaccacaaattggatttggcagcttgctaaggcccacgtttgctccaatgatgctggtgttcaccaattggttaaccactggttacgaacacatgcatgcatggagccttttatattggctgcacataggcaattgagcgcaatgcacccgatctttaagcttttggatccacacatgagatatacgctagagatcaatgccctagctcgccaaagcttgatctgcgctgatggtgttatcgagaactgcttcactcccggtcgctactgcatggagatgagtgctgctgcttatcggagccattggcgcttcgacagggaaggcctgcctgcggatctaatccgaagggtaattactgagtaatcttttggtgttttatcaatattgagacgaaaa

SEQ ID NO: 967 - DNA, 698 bp, Gossypium hirsutum
  Clone ID: GOSHI-09MAY01-C8320_1
acgcgtccgcggacgcgtgggctctctctttccttttcattccctgtcactcgactcaggggggtgaaaaatcaaagaccacccttctcttttcttccttcgttattctcctcttcttttctctttctgctgctgtttcctcccctttccagctccattccctacttctccgccctctcccgtcggcgccagttctatcatggcaagattccggccttcctttcaactctctcgttgaaacttccgatttgcacacagttaattccaacacttcgctggggttgcagttggagttgcaccatttagacgctttgtcatcggaagaaacaccggagagactcttcgacctccgcctccaacgcgacgcgctccgtgcagaaacaatcaactccctcgtttcaaaagccgttgctcgtaagcatccacgcgcccccggaaggcgtcctgggtttagtagctctgttatttcaggactcgctcaaggtagtggagagtattttacgcgcctcggcgtcggtactccgccgaggtatctttacatggtgcttgacaccggtagtgacgtcatttgggtccaatgttcgccttgtaagaaatgttactctcaatccgacccgatatttgacccgactaaatcacggtcattttccggtattccctgtggatcccaactttgccgtagtttagattcttcgggt

SEQ ID NO: 968 - DNA, 420 bp, Gossypium hirsutum
  Clone ID: GOSHI-09MAY01-C8250_1
ggagctttttcctttccaagactgttgggtggttcctgcaaaagtagctttcgaccaaactgcgtgggctgcagtttggaacagcatttacttcgtgattttgggatttctgcgtcttgaatctccgatcagtatttttaacgaatggaaggcaacattcttgcctatgttgacagccggatggaaactttggccatttgctcatcttatcacttacggttttattccggtagaacaaaggcttctttgggtggactgcgtagaacttatttgggtgacgattctctcaacttattcgaatgaaaaatcggaagcaagaatctccgaggcagcaccagcagaagcaagttcaattttgccacccgttggtccacccgaggagtaaataatgagatttaggatatctgggatttgagacat

SEQ ID NO: 969 - DNA, 405 bp, Gossypium hirsutum
  Clone ID: GOSHI-09MAY01-C8200_1
gcgattctgtttaaccaaaattgattctttctctcccaatttgtgagatcttgttctttggcagtgatgagtaagggaccgggactgttcgtcgatatcggcaagagagccaaacatctcttgaccaaagattatacgtcccagcggacgggcacggcttccacttatactggcgctggagtggccatcacatcaacttctctaaagaaaggaggactttctactggggatgttgctgccctatacacgtacaagaacactcaccttgatgtcaaagtcgataccgactctaatatctcgacgaccatgacattcactgatattcttccctccactaagactattgcgtcatctaacgcgcctgattataacgctggccagctggacgttcagcattttcatcac

SEQ ID NO: 970 - DNA, 513 bp, Gossypium hirsutum
  Clone ID: GOSHI-09MAY01-C9980_1
cacactcttcctttagcaaaaccacattctcaagagaaacaaaggggaaaaaaaaagcagaacgcaagtgaagagagatcaggaaagaaaattaaagtcgggttggttacgggttttcgagctttgttcgtaaaattttgtgtataagtaacgcaatgactagcattatggatgcagaacatgacaagtatagcatgattaatttcgaagagacggagttacgtttaggattacccacaggcattgaaaatgataatgaaaccgccaaaaataatgggaaaagagggtattcggatatggttgatttgaagcttaacctttcaacaacaaaggaagcatcggtggatgaagctgagaagatgaaggagaaaaacactgcaaagcccccgtgctaaggcacatgtggtacgatggccaccggtcaggtcctttcggaaaaacatcatgaccggtcagaagaacagctccgacaacaagggtgagaaaaccggcagtggcaacaccattaacact

SEQ ID NO: 971 - DNA, 317 bp, Gossypium hirsutum
  Clone ID: LIB3048-040-Q1-L1-C9
tcacggatcatgggaataatccgttaatgtggtgccgtgatgcatatggctgagcgtcgatggtctgaagcaatcacagatttctattaagctctcaataactatgatgtatctagctatgatagacacattttatgtataatatacgcaatgactagctattatggattcagaacatgacaagtatagcatgattaatttcgaagagactgacttacgtttaggattacccacaagcattgaaaatgataatgaaaccgccaaaaataattggaaaagaaggtattctgatatggttgattttaagcttaaccttt

SEQ ID NO: 972 - DNA, 652 bp, Gossypium hirsutum
  Clone ID: GOSHI-09MAY01-C9950_1
cccacgcgtccgcggacaaaacccctttgttttaaaaatctgatcgctgctgctactctggtccggatcaagaaaaggaaatgttaggtgcgcttagtgctgcaagtttaacacttggtctggctggtgcgccagcagcattcaccgcccaatgcggcaatggtggcgctgccaaagccttagcgtttcctagtagcagcaacagcaacaaccgcgcccaattgttggttaagagctcattcacttccacttccaggactccaccatcctttaggacagccgttgctgcagtcgactccgaccagctcagtcccgacatgcaacaatccaaaaaatactattttgttgttgcgaatgcaaagttcatgcttgatgaagaggagcacttcaaagaacttttgtttgagaggcttcgttactacggagaacgcaataaagagcaggacttctggcttgtaattgaacccaagttcttggaaaatttccctgacatcacaaagaggttgcgcaggcctgctgttgctctggtttcaactaacggcccttggatcacgtttatgaagttgaggttggacagagttttatctgatagctatgaagctgacaatcttgaagaagctttagcttcaaatcctaccactctggagtttga

SEQ ID NO: 973 - DNA, 356 bp, Gossypium hirsutum
  Clone ID: LIB3166-020-P1-K1-D7
gcttgatgaagaggagcacttcaaagaacttttgtttgagaggcttcgttactacggagagggcaataaagagcaggacttctggcttgtaatcgaacccaagttcttggaaaatttccctgacatcacaaagaggttgcgcaggcctgctgttgctctggtttcaactaacggcccttggatcacgaaaaagtgcatcttagtttaagaatggcttgaaaacacccatcctcatggttgtaggcaacacaaatggaattacatcccaaactatttctgaaccttttattagtgggaattagccatagttttaaggtttatgaaattgaagttggacagagttttatctgatagct

SEQ ID NO: 974 - DNA, 927 bp, Gossypium hirsutum
  Clone ID: GOSHI-09MAY01-C9970_1
cccacgcgtccgcccacgcgtccgtcttttcataacatttctattgataatcaaatccatgtgatgtgttcaaggttttctctcatcatcctgatttctccttttctttcttccaaacgggactgttgtttggaaagaaagaaagcaaaagaagatcaagtggctgactgacttttgagaaaaaaaatggatctgtgggctgtccacttgaagaacgcaaaccctgggaatcctcctgcttctgcttctttgttgttgaagaggaattcgattcctgaaagacccaattcttgtaaggtttccaacttcggagttctttcgatcggggtttcaagaacatgcctcccttcatcttccattcgttctttcaccgttacgtctatggctaagaacaataatcacgatagttcatcatccccttcttttggaaatggtgatcaatctattcctgaccgggacagttcaagaagaaataattcttcagagagcaataaatctaatggtgatgcttctcagaagttccttgatgtaaacacaaactggagggagttcagagcaatgctatataacaactaccaggtggaaaagacagattccgttgctcaaggtgggacacctcatgtgtcaaaacctcttggcccgaaatgggctcacccactttcattgccggagactggctgtgttcttcttgccactgagaaacttgatggagttcgcacctttgaacgcacggtggttctccttctcagatctggaaccagacatccacaaaaaggccatttggggttgttatcaatcgtccacttcacaagaagatcaaacacatgaaacccaataataatgaattagccactacttttgctgattgttccctgcactttggggggcctcttgaacgagtatgtttcttttaaaagtgggaaaaat

SEQ ID NO: 975 - DNA, 986 bp, Gossypium hirsutum
  Clone ID: GOSHI-09MAY01-C9910_1
tattctctttgaaaacctctctcatctctttcatcgtgactcttcggttctcaacctggctgccttagtcttcgattctccctccaacgatgagcatggtccggatcctccccctgcagttaatatcctattcctctcttcaaggcttctttggcaaggaaataggcacaatcattttctgatctagggataaaatgaaactcgatattctgaaaataaacctttttgctttgaatgtctctgatgaacgctcctatagtcaatttgtccggatcttttgattgccctcgcgtccgccctcgcgtccggtcccccactatttgtaaactgttaaaacccattgaaatggcgaactgaatcgcttgtaacccggcatctgttttcgctgctagcggtgtcggtatatcggagtggataaccgttttggataccaagatcacacccctttcatcacggacagccagacccgaagcagatctggaggatcccttgtcaaaagccgcatcaaataagacagttaccgtcgtgcttctggccgtgtattcatgacctttatcaacatttaagcatgtccagattgaccatagtacgtaacagaagagtcgacattgctcaatatttcctcgtctaaaaacccaggacagtgccggaagatatggttgctatcttcctcagggttatgacatttgggacagatagctgctacgaccacttttttattcttgagatttgatagagtaggaatatagttccatgaaattctccagtttgtaattttaattttcggagggagatgtaaattccataatttcctgtagaaatctctagtctcagtttgtaaataattattactaggacccgaattagcctcttgtaatagtttataggcacttctaactgagaattcgcctgatgattccccccggcacacacttgaaagtcttcataagttgtctctgccagagggatctacaatattttctttt

SEQ ID NO: 976 - DNA, 583 bp, Gossypium hirsutum
  Clone ID: GOSHI-09MAY01-C9930_1
cccacgcgtccgagcactttcccgactttcttttctcttaatttactgaaagctttttttagttgaaatggagattcttccacagcgatcatcattatcctcaactctgaatcccaacgctccattgttcattccattagcatatcggatggtcaaggatttctctgatcaatggtgggctctcgtccaatcatccccttgcttccgcgactactggcttcaagaacgcttccacgatcccgaaaacgacgacgtttccgacgacgacgatgatcctctcttccccggcgacctcgatgacatatttgagcaatacgacgacgttttactcgacccaagaccggaggaaaaggaaaagaaattggtaccgtttgggacatcgaagtggcggaaggaccgagttgtgactgagtcaccgaggtttatcgaaaaagcacccaagattgtgaatgttaaagtgagtccaaggactattcaccaaccaaggtaaatcaactcgtactgagttgacatgggaggtctcattttaagctttttaccttcttttttcttattgatttggaatatattaggtacagagatc

SEQ ID NO: 977 - DNA, 410 bp, Gossypium hirsutum
  unsure (1)..(410): unsure at all n locations
  Clone ID: LIB3584-044-P1-K1-B2
ctcgatgacatatttgagcaatacgacgacgttttactcgacccaagacgtaagtgactgaattcaactcacacccgacgactctcacgagtcaattaagtataaactcggaacttttttttttttttttgcagcagaggaaaaggaaaagaaattggtaccgtttgggacatcgaagtggcggaaggaccgagttgtgactgagtcacggaggtttatcgaaaaagcacccaagattgtgactgttaaagtgagtccaaggactattcaccagccaaggtgaatcaactcgtactgagtggacatgggaggtctcattttaagctttttaacttcttttctcttattaatttggaatatattaggtacagagatctctcttnctttagatcctagtctgtgaacttttt

SEQ ID NO: 978 - DNA, 1002 bp, Gossypium hirsutum
  Clone ID: GOSHI-09MAY01-C9800_1
cggtcgcgtgggcggtcgcgtgggcggtcgcgtgggtttttccttcgccttcacactgtgacggttaaactctcccatttctttcttcaacaatactttcgaaactcggttaactcactgaactcaactcaccatggcttcgattctcaaccccccgccgccgccttactttcaccttacctctttgcctacctccgtttcttcctcaccggtgatcttatcttatcctttcctcaaaacgacgtcacttcaagttcggtttaaagcgttgaggacctggtccgacggcgggaaaatcgggagccaggaagcttacggcgccgatttcttgaggaagccgagtacagtgccgaagaaggacagtgatggaattttggaagaagaggaaggtagtgagggaaaaagaaacagaggtgaatggactgattgggaagataggattttagaggacaccgtgcctcttgtcggctttgttagaatgattattcactctggaaaatatggagctggagatagattgagtccagagcatgaaaggacgattttggaaaggttgcttccttaccatccagagttcgagaagaaaattggatgtggaattgattacatcactgttggttaccatcccgactttgtaggctcgagatgtttgttcatagttcgaaaagatggagaactggttgacttttcttattggaaatgcatcaagggcctaatcagaaaaacctatcctctatatgcagacagcttcattctcagacattttcgacggcgtagacgtagttgatatgggtaatactctgaacttgtcagcaacttttatgtcattatatcctgaagatcttgtgaattttgttcttattgtttgtaatatgtcttatttattagctaataacattgtagaaattaaagcaattattgaaacttcatgaaaattcaatgccggacatagttttgagaaaaagattatatacacaagtgctgctgaatgaatttactggt

SEQ ID NO: 979 - DNA, 1022 bp, Gossypium hirsutum
  Clone ID: GOSHI-09MAY01-C9820_1
cggacccgtggggtcagcgaagagttggtatatttggggatgttttccatttcaattggcggtgaattcaattccaacattaacccatttagctccattgagtattttcgctgatattgtggatcttggggcgatgggagcggtgtttgttgaggatgtgtcacttatcatgaagcaaagcaacgagattatcgcttttgggggtctctccgtgttcttctacggtatgggcgttgctgtttatgcgtttgaaggtattggtatggtttttccaattgaatctgagatgaaggaatccgggcgctttggcaaaatattggccctgagcatgggattgatttctttaatgtatggagcatttggcgcacttggttactttgcatttggtccagatacaaaagacatcattactgcgaatcttggtgccggctggatcagcgctatggttcaaataggtctttgcgttaacttatttatttctttcccattgatgatgaatcccgtttatgagatcgtaaagaggcgatttggaggagggaggtactgtttgtggctgaaatggctgctggttttgattgttagcttggtcgctttgttcgtcccaaattttgccgatttcttgtccttgatcggaagcagtgtgtgctgtggtttggggtttgtattgcctgctttattccatttgttggtgttcaaggaagagttggagtggaaaggatggactgtggatgtcggaattgtgaccttgggccttgctcttggagtttcaggaacatggtctgctcttgtggagatgttctccgtaaaggtgtagggatacagcgtcacaaatatcgtgaccttgggctttgttcttggtgttttaggaacttggtctgctctcatggagatttttatctgtgaaagcgtattggtacagtgttgaaatgaaggttaagtttctgaactgcttcatgatatactgtctacttgttttcttgatcgtatttggaaaaattgatattttatatttagattgaaaa

SEQ ID NO: 980 - DNA, 976 bp, Gossypium hirsutum
  Clone ID: GOSHI-09MAY01-C9550_2
acgggatatgctacgggtgaagatgggcaacaccggggggttggcaggacattactgttcatccacaaaaggatcttagtcaacgaacctttgttgaccaaacagccaattctgcggaccacaatgcgcaactttaaccatgtgccccccatagctaagggggagcctccgtcgtatgccgcctacaagaaattcctccgccatcctatttatcaaattccaaaacccgcgatattcggatttcaaaggctcgcgccaatgagctttcatggcgtccaaatcgtctaagaagaagcctaacagcaagcggtcaagctccaagcccgccttctccccgatggcatctccgaagcattttcatctcaaaagattcttcattttaatttcgattatgttgcctgtttgtgtaattgttgttttgggagtgtcgtcaaacacgtcgtttaagatatcgtcggatcattactccgttaagatttacggatttgaattagtcaatgaattcccccacgatccccgtgctttcactcagggccttgtttatgctggaaatgaatccttatacgagtcaactggactttacaagcagtcaactgttcgcagagtagctattcagacgggaaaggttgaggttcttcacaagatgcctgatgcattttttggagagggtttaacccttctcggtgaaaggctgttccaagtaacttggttgacgaaaattggcttcatatatgacacaaaaaatttgcagaaattagagcgatttacacatcagatggaagatgggtggggactggcaactgatggcaaaatcttatatggaagtgatgggacttcaacactgtatcaaatcgatcctcaaacattaaaagtcacaacaaaaaatgtcatcaagtttaatggtcaaaatgtacgctacctgaatgaattggaatatataaatggtgaaatatgggctaatgtttgacagactgac

SEQ ID NO: 981 - DNA, 839 bp, Gossypium hirsutum
  Clone ID: GOSHI-09MAY01-C9550_1
cccacgcgtccggagattcttcacaagatggctgattcatattttggagagggtttaactcttctgggtgaaaggtctgttagaaggaatttagttggctgttccaagtaacttggttgacgaaaattggtttcatatatgacagaaaaaaattgcagaaattagagcaatttacacatgagatggaagatgggtggggactggcaactgatggcaaaatcttatatggaagtgatgggacttcaacactgtatcaaatcgatcctcaaacattaaaagtcacaacaaaaaatgtcatcaagtttaatggtcaaaatgtacgctacctgaatgaattggaatatataaatggtgaaatatgggctaatgtttggcagactgactgcattgcaagaatctcacctaataatggtacaatacttggatggattcttcttccaagtttaagagaaggactattagcggccggatataacggtattgatgttgtaaatggcatcgcttgggatagcggcaataatcgcatttttgttaccggaaaactctggccaaagctttatgagatcaagctgcatccagctaagaaacactataacagtgaagacattgagaagctttgcttggcgtgaaaattaaggtatacgcatggatattgtacgttaaaactggagcccaaagttttccatttgaaaatacctgaattggaggttgtatttacacatttgattactagcattgttgtaaaatttgtatttacttgagaagctattatcggccagttctgataatactaataattcacatttttttatgttatattataattagtattgaacttg

SEQ ID NO: 982 - DNA, 423 bp, Gossypium hirsutum
  Clone ID: LIB3166-015-P1-K1-E7
gccggagcgaaaatccgagaggaagaaatgatcgtgtgcgtcgccgtcgttggccatggggagaatcctctctacatacagagcttcactgacgccgatgatgctttgaaactccaccatatcgtacattgctccctcgatgtcgtcgacgaacgagtgaacaatccaaaaaaatcaggaccgacattgaatgagacctttctgggattactttatcctactgagaattataaagttttttcaggaggttccatgctgcatatgttgatgctgtctcgaacccatttcatgttccgggtaaaaagattacatccaggacttttgcagatagagtgagcaccattgtccagtcatttggtcttagttcatctgtgtgattctggtttgtgttaaagtcccttggatagctttaatttaactagc

SEQ ID NO: 983 - DNA, 413 bp, Gossypium hirsutum
  Clone ID: LIB3145-020-Q1-K1-E6
gcgaaaatccgagaggaagaaatgatcgtgtgcgtcgccgtcgttggccatcagaacggtcctctctacatacagagcttcactgacgccgatgatgctttgaaactccaccatatcgtacattgctccctcgatgtcgtcgacgaacgagtgaacaatccaaaaaaatcaggaccgacattgaatgagacctttctgggattactttatcctactgagaattataaagtttatggttatttgaccaacacaaaggtgaagttcattttagtgactacggatttagacgttagagatgccgatgttagaaattttttcaggaggttccatgctgcatatgttgatgctgtctcgaacccatttcatgttccgggtaaaaagattacattcaggactttcgcagatagagtgag

SEQ ID NO: 984 - DNA, 1044 bp, Gossypium hirsutum
  Clone ID: GOSHI-09MAY01-C9560_1
tgctgactgtggtcataaaattggtttaaatggtgtttataacggtagaatctggtttgacggtgttcgagtgccgagagagaacttattaaattcagttgctgatgtttcacctgatggaaaatatctaagtgctataaaagacccagatcagagatttgctgcattcctggcccctctaacagcaggccgtgttaatattgcagttaatgcagtttaccagtcaaaggttggtttagctattgccattagatatgctttaacaaggcgggctttttctcttaaaccaaaggaacctgaggtcttattgcttgattacccaagtcatcaacgacgactcttgcctctccttgcaaagacgttgctatgagttttggagcaaattactgaaatgctgtatgtgaagaggacaccccagtcaaacaaaatcattcatgtagtttcaagttcattcaaggctacttttacatggagtaacatgcaaatacttcaggaatgtcgcgaagcttgtggaggacaaggactaaagacagagaatcgtgttggtcatctaaaagctgaacatgatgtgcaatccacttttgagggggacaataatattttaatgctgcaggtaaatttgctttcttctttccttacgaatttactttgacaaggacagttggttacaacttacaactaaaccggctgagaatatatgacctcaatgtaaaatgaaagtagcagatgcagaattggggaatgagttctctgtgtatgggtttttactggattttgttttccttgaaatgacccatatgatgcatgtagtcccctgaccatggcctgttagatgtgtaggtcatttaataggcttcatggattttgggttcacaacatcctaatgtattgacaactaaacagtggaacttatgattgaacatgacaactcaggtcagcaaagctctgtttgctgaatacatggcagctcagaagccaaacaaggctttcaaggggtctgggttagaacacatgaaaataacctgccctgtcattcatcacagt

SEQ ID NO: 985 - DNA, 536 bp, Gossypium hirsutum
  Clone ID: uC-gsronu33B129d11b1
tgtgttttttctcttaaaccaaaggaacctgagggcttattgcttgattacccaagtcatcaacgacgactcttgcctctccttgcaaagacgtttgctatgagttttggagcaaattacttgaaaatgctgtatgtgaagaggacaccccagtcaaacaaaatcattcatgtagtttcaagttcattcaaggctacttttacatggagtaacatgcaaatacttcaggaatgtcgcgaagcttgtggaggacaaggactaaagacagagaatcgtgttggtcatctaaaagctgaacatgatgtgcaatccacttttgagggggacaataatattttaatgctgcaggtcagcaaagctctgtttgctgaatacatggcagctcagaagccaaacaaggctttcaagggtctgggtttagaacacatgaataaaccctgccctgtcattccatcacagcttactacgactacccttagatgcagccaattccagatagatgccttgtgcttaagggagagagatctttttgaatc

SEQ ID NO: 986 - DNA, 745 bp, Gossypium hirsutum
  Clone ID: GOSHI-09MAY01-C9520_1
cccagcgtccggttctatgtcatgggtgaactttggggcagcgtcgtcatttctgttttattttgggggtttgcctatcagataacgactgtagaggaagcagagggattctatcctctgttcggtcttggagccaatattgccctcattttctctggtcgaactgttaagtacttttccaatttgaggcaaaatttgggtcccggagttgatggttgggccatctccttgaagggaatgatgagcattgtggtgctaatggggcttgccatctgtttcctctactggtgggtgaataagtttgttcctcttcccacacgtagcaagaagaagaaggaaaaacctaaaatgggaacaatggagagcttgaaattcttgctgtcttcaaagtacattagggatcttgccactttggtggttgcatatggtatcagcatcaaccttgttgaagttacctggaaatcaaagcttaaagctcagtttccaagcccgaatgaatactcctctttcatgggtgatttctcaactgccactggaattgcgacattcactatgatgctactaagtcaatttatatttgacaaatatggatggggagtagctgctggaattacacccactgtcctacttctgtctggagttggtttcttttccttgatattatttggtggtcctcttggaccaactcttgcaaagtttggcatgactcctcttcttgcagctgtatatgtgggtgccctgcaaa

SEQ ID NO: 987 - DNA, 415 bp, Gossypium hirsutum
  unsure (1)..(415): unsure at all n locations
  Clone ID: LIB3166-015-P1-K1-A12
cgcccacgccgtccgattaaaatctctttgcaactctgttatcatatttagatatnggagaacaacgtcaggggacatatcttgcaatgagctttttggtagcctttccatcnaactggatcntggtanctgatgctatacanggctgcagacacttagtgatggagagtatgaaatatatgaacaatttggtgatgataactactctgatgacgatgacgatgatgatgatggtggtgatgatagctaacgttcctaactccaaagtttacaggtagctttcttgcctttgttttggctccttttagtcattcatcttgcttcacttacagcaacaacagttcaaaatttctaatggaaattaatgcgattgatttgttgtcagaggatatagctagtatctttctaagttata

SEQ ID NO: 988 - DNA, 588 bp, Gossypium hirsutum
  unsure (1)..(588): unsure at all n locations
  Clone ID: LIB3827-001-Q1-N6-E10
aaataaacaagcatgaataaaaagattgttaagacccaattcatttacagccctagcagactagccatgaagcgacattaagtccactaagaaaaagaacaaaaacagagctaatgcttcaactgtgatgattattcctggaaatttgttgtctcctcttaatttacaaaggaccatgtctttttcataccattatattccttatctaaagcacaaatcagtttggctaaaagatgcttcctgataattggtaatttaggagctgatatgtaaacaagacctgcaatggaacatgcagatatctagtcacccttctctctagctagaaagactttaactgcagtatatcttccccatcctaccacgtattgtagcttcaagaatctggaaatctgtaaactttggagttaggaacattagctatnatnaccaccaacaccaccaccaccaccaccaccaccaccatcatcgtcgtcgtcgtcgttgttgttgtcgtcgtcgtcgtcgttgtcgtcgtcagagtagttattatcaccaaattgttcatatatttcatactctccatcactagtgtctgcagcctgtatt

SEQ ID NO: 989 - DNA, 386 bp, Gossypium hirsutum
  Clone ID: LIB3166-023-P1-K1-A1
caaggacatacttgcaagagctttttggtagctttccatcaactggatctggtactgatgctatacaggctgcagacactagtgatggagagtatgaaatatatgaacaatttggtgatgataactactctgatgacgatgacgatgatgatgatggtggtgatgatagctaacgttcctaactccaaagtttacaggtcttgtttacatatcagttcctaaattaccaattatcaggaaacgtcttttagccaaactgatttgtgctttagataaggaaacatactgttatgaaaaagacatggtcctttgtaaattaagaggagacaacgaatttccaggaataatcatcacagttgaagcattagctctggttttggtctttt

SEQ ID NO: 990 - DNA, 400 bp, Gossypium hirsutum
  Clone ID: GOSHI-09MAY01-C9480_1
gcaaaatagtggaagttctttgcgctacttggattatttcccctgtcaatgggagagtatagatcaggtagatttaagaatctgcaacctctaaggaacaatatggaataggggaagtttgatggtggatctaatagggctttaagagaacgaatcatgcttgttcttctattccaagatattggatgccgtgatgtgcctttaatgaatggttcttcaacatgcataaactcttcgtttgcttcttccttcttgcatataattttctttctcttatgcccttcaagtggcttgctacaacttgtgtttgagtgggagtcatgtatgttttgtacttatgaattttcgatgcttaacattttttctgtttttaaactgctataaatcaaaattgaatagg

SEQ ID NO: 991 - DNA, 512 bp, Gossypium hirsutum
  Clone ID: GOSHI-09MAY01-C9470_2
cccacgcgtccgctagaattgaaagttgtttgttttctgggaaaattttcattacaggaatggctacatctcagttaacagcatcatcaatgacagtatcagtaaggaatttggcttcagcggtcgggttctggccatcgtccattgtgaaattctcttcctttggatctttaaagcccgggtctttgactcaaaggtcctttaagggtttggttgtaaaagcggctactgttgttgctcccaagtacacctcgattaagcccttgggtgatagagtgttggtgaagatcaaagaaacagaagagaagacagagggtggaattttgctaccaacaacagctcaatcaaagcctcaagggggtgaagtggttgccatcggcgaggggaagacaattgggaagaccaaattggaatgttctgttaagactggtgctcagttatatattccaagtatgccggaactgagctggagttcaatggttcaaatcatcttatcttgaaagaagatgaca

SEQ ID NO: 992 - DNA, 647 bp, Gossypium hirsutum
  Clone ID: GOSHI-09MAY01-C9470_1
cggccaactcttatcactttcaatatcttacaccaaaacatcattttttttccactcaaaggaatggctacatctcagttaacagcatcatcaatgacagtatcagtaaggaatttggcttcatttgaaggattaaggccatcatccattgtgaaattctcttcctttggatctttaaagcctgggtctttgactcaaaggtcctttaagggtttggttgtaaaagcggctaccgttgttgctcccaagtacacctcgattaagcccttgggtgatagagtgttggtgaagatcaaagaaacagaagagaagactgagggtggaattttgctaccaacaacagctcaatcaaagcctcaagggggtgaagtggttgccatcggcgaggggaagacaattgggaagaccaaattggaatgttctgttaagactggtgctcaggttatatattccaagtatgccggaaccgagctggagttcaatggttcaaatcatcttatcttgaaggaagatgacattgtgggaattcttgaaacggatgatatcaaagatctcaagcctttaaatgacagggttttcattaaggttgcagaagccgaggagaagactgcggggaggttgttgctgactgagtcaagcaaagaaaa

SEQ ID NO: 993 - DNA, 1162 bp, Gossypium hirsutum
  Clone ID: GOSHI-09MAY01-C9420_1
ctcgctcacgtgttgtggatgataagagtaaggcccgtttttgttacatttggtcgagtcaacagagttgagccagtctcacttggagagcttggcatacccaggaatgatgttgctgataactgctctggagttttcagagatttattcattaatcagatgaacctccttgatcgggcagtgaagatggtagctgaattagatgaacctgtggagcagaactatgtacgtaagcacgccttagagcaagccaaagccttgggaattgaggttagagaagctgcaacaagggtcttctcaaacgcttcgggatcgtactcttcgaacgtcaaccttgctgttgagaactcctcatggaatgatgagaaacagctccaagatatgtacctgagccggaaatcatttgcttttgactgtgatgccccaggtgcaggtatgactgagaaaaggaaagtctttgagatggctctaagcacagcagatgccactttccaaaatcttgattcctcagaaatttcactgactgatgtgagtcactactttgactcggatccaacaaacttagtacaaaacctccgcaaggatggaaagaagccaagtgcatacattgcagataccaccactgcaaacgcccaggttcgaactctggctgaaactgtgcgactagatgcacgaaccaagttgttgaaccccaaatggtatgaaggaatgatgtccagtggatatgaaggggttcgcgaaattgagaagcgccttacaaatactgtagggtggagtgcaacttcggggcaagtggataactgggtgtacgaagaggctaattcaactttcattcaagatgagaacatgttgagcaggctgatgaacaccaatcccaactcgttcaggaagttgattcaaacattcttggaggccaacggacgtggctattgggaaacttcggaggagaatattgagaagttgaggcagttgtattcagaagtcgaagataagattgaaggtattgatcgatgaaccgtaaaccaaatagcttctaaaatggcaaatatttgatgacttacttgagcccctccctttaggatgagctgaaacactcgcgtgaacttatggaatgtaattttgttcataaaaaataaaaaaaataaaaaccctttgctttgtt

SEQ ID NO: 994 - DNA, 867 bp, Gossypium hirsutum
  Clone ID: GOSHI-09MAY01-C9780_1
agccttccgaccaaattggatgctgctatgaggcaagattccttgtctcggggacagcttacccgttttgctgctaccaccaccacttcagctggaaatgattctcttgaacccacatattttggaaatgccaaacgggcattgcaagataagcttttcctcgcaccacctcccattaatggggaatggctgccgaaaagtgctgtctatgcccttgttgatcttatggtcatcatttttggccgtccaaaaggaaatttcaaagagtgtgataaacgaattcagtctggaatacatatcatcaaagaggaactcatcaggcttggtataactgatgatgtgagagaagtggacttgcagcactcggcgatctggatggctggtgtatatttaatgctattgatgcagttccttgagaataaagtggctgtggagcttacacggtctgaatttcttgaagctcaagaggcattgatgcaaatgaagaactggttcattcgctttccaacaattttacaagcttgtgagagcatcatcgaaatgcttagggggcaatattcccattctgttggctgttataatgaagcagcttttcactatgtagaagctgcaaagataactgagagcaaatcaatgcaaatcatgtgccaagcttatgcagccatttcatacttttgcattggtgatgctgaatcgtcttcacaggcgcttgatttaattggaccagtttacagaatgaaggattcctttgttggagttcgtgaggaagcaagcatcctttttgcttatggccttctattgatgaagcagcagatctacaagaagcacgaaacccgctggccaagggttgcagatggctcatgttca

SEQ ID NO: 995 - DNA, 605 bp, Gossypium hirsutum
  Clone ID: GOSHI-09MAY01-C9750_1
gcggagcatgaagattctgtgttttccacggtattacttgagaaaacgcagtctctcaactgaagctctcgttcttctctgtgataaaattaagatcttaaaaaaatagaaaagcaaatggccgcgtcgggggcaggtgtgccgatgagaagagaggttcttcgcctccgccctcccctgcggcgagtggcgcgtcagttcggcgactacaacataagggagtactctaaacgtcggaccatggatgcgtttcgagacaacaagaacttacgcgacccttctcagctgtccgccgctttctccaacggtaaagctcagttggaagttgccaaaagacaatctctcctctattccctctatgctccaaaggtcaaaagcatcatggatttttaaaccctcttcttaaccatatacatacttatatcactatttctagctccttcagaaaagaataaactttgatttattgagagaataaattgagttcttttagcgcatgattttatttatttatttttgtagttatgtaataaacagtctgggatggcatgtgggaatttgctaatggggttcttttttattttatgcttttccttcttcttgtt

SEQ ID NO: 996 - DNA, 833 bp, Gossypium hirsutum
  Clone ID: GOSHI-09MAY01-C9770_1
gaagaattcgcggccgcagaatttttttttttttttttttttttttttttttttttaaggttttcgtttctctcttcctctctctctctgctccgggaactactgaaatccctgcctataatcaatctcttagcaaagggccaagctatagacaatggcagaaggcgaagaggatctgccgagggatgctaagattgtcaagtcactgcttaaatcaatgggcgtggaggactatgaacctcgcgttatccatcaatttctcgagctttggtatcgctatgtcgtggatgtactgacggatgcgcaggtgtactctgaacatgccggcaagcaaaccatcgattgcgatgatgtcaagcttgctattcaatctaaagtcaatttcagcttctcgcaacccccacccagagaggtgcttttggagttggcaagaaataggaacaaagttccattgccaaaggcaataccagggcctgggattccccttcctcctgagcaggatacattgataagtacaaactaccaactggctatccctaagaagcaaccggcacaggcgatggaagagacggaagaggatgaagaaagtgttgaacctaattcctcgcaagagcataagaccgatgcaccgcacccaacgtctcaaagagtatcgttccctctcactaagcgctctaagtgaggtttctgcttttgtaagatgtttcaataatccatttaggtagggtaatatatatgcttgaagattctatcatattcatcagaatgaagggttgatttttcttatgattggatgtaatgaatcgttgtcatagaatcaagtttctgcttct

SEQ ID NO: 997 - DNA, 621 bp, Gossypium hirsutum
  Clone ID: GOSHI-09MAY01-C9660_1
cccacgcgtccgcccactcgtccgcccacttcttccggaaaaaacaatggctacccttcatttcacaccatctccttgtactcctcccttaattgtcaacaaaccaaaacaccccaccacaatttcaacctcccaatcgaagttcaaccccaaaacccaccatgggtctttcaaaagattgtcgactttgatagcaaggtcttacaaaggtgtattggagcatgaaggcaactctaccgagctagaggtggaagacgatgagaccatactatcaaaggcattggacttgggcataaccgtgccatatgattgtcagcttggggtttgcatgacttgccctgctaagctcttaagtggaaccgttgatcaaagtgaaggtatgcttagtgatgatgttatagaccgtgggtttgcattactttgtgtagcttatccaacttcagattgccatatcaggactatccctgaagaagaactgctttctttgcagttaaaaacagctaatgattgacactgaaactgtttttgtgtgtgtctgtatgttggatgctgtgtttttatcttgaacgaaatggagttaaaacctaatttgatatcttcataggttattttcccagattg

SEQ ID NO: 998 - DNA, 1754 bp, Gossypium hirsutum
  Clone ID: GOSHI-09MAY01-C9170_1
cccacgccgccccccgcccgccccgggaaaaaataaaaactcccctccctttttttctgcatctgcttttatttctttacagctcaaaattaataattataaatcaaatcaaatcaaatctctttcttccttatcctttcgatctgctaatcaagtcatttcaagattttttttctgaacaagaaaaagaaaaatagtaggacaatgccgtccttggaggatgagctgtttccgtcgacgccagggaagttcaaggtcgacagagcacacaatatgaaccgtcaattccatcgttgcttcgcttcaaccagcaccatgtttttatgggctcttttcttgatcgcattgacggcgtcgtatttgagcttccagagtttcgttgattctggtagccgatatttcagtgcttcatggggtggtatccaatgggaaaaacaagtccgtaactccgctcagatccatcgttccggaggcatgtccgtcctggtgactggagcggctggtttcgtcggtacacacgtttcccttgccctcaaaaaacgcggagatggagtcgttgggcttgacaatttcaacaactattacgacccttcgttgaaaaaggcgaggaaatccctgcttaacagccacggcattttggtggttgaaggcgatttgaacgacgccaagctgttggctaagcttttcgacgtggtggcttttactcacgtgatgcatttggcggctcaagctggagtcaggtacgccatggaaaaccccaactcttatgttcacagcaacatcgccggtctcgtcacgcttctcgaaatttgcaaatccgctaatccccagccagccgttgtctgggcctcctccagttccgtttacggtctcaacgaaaaggttcctttctctgaggccgacaggaccgaccagccggctagtttgtatgccgccaccaagaaggcaggcgaagaaataacccacacttataatcatatctacgggctttcagttactggattaagatttttcaccgtgtacggtccatggggaaggcctgatatggcgtatttttcgtttacgagaaatattctgcaggggaagcccatcaccatttatcggggaaagaatcgggttgatttggcacgagattttacctacattgacgatatcgtgaaaggctgtttgggatcgttggatacatctgggaaaagcaccggttctggtgggaagaaaaaggggaacgctccatataggatttttaatttggggaatacttcgccggttaaggtgccggagctggtgaacatcctggaaagacatttgaaggtgaaagccaaaaggaatatcgtagatatgcctggaaacggtgacgttccattcactcatgcgaatatcagtttggcccaaagagaattcgggtacaagccctcaaccgatttgcaaaccgggttgaagaagtttgttagatggtatttatcttattatggttataacaaccgcaaaggtctacaataaaatttatttttggttttaaatgtaaggattttcttggtttcccgttagaatgaaatagaaggtaacgggaaaaccgaaggaaccgcaagttaaaaacaagagaaagacgaggattccgtattcttttcttgggggagcagtgaaaaaaacacttgccccggtatttcttgtcagttctttttttttttttcctttgtaagtaaagttctcatattttgctatagcttataatttaaattcattgctcttttttc

SEQ ID NO: 999 - DNA, 480 bp, Gossypium hirsutum
  Clone ID: uC-gsronu33B040b05b1
cctgcatggctaccgtgtccggaattgaccgattcgatcccacgtcttccgccctctcgtccgcgtagctggtgaacatcctggaaagacatttgaaggtgaaagccaaaaggaatatcgtagatatgcctggaaacggtgacgttccattcactcatgcaaatatcagtttggcccaaagagaattcgggtacaagcccacaaccgatttgcaaaccgggttgaagaagtttgttagatggtatttatcttattatggttataacaaccgtaaaggtctacaataaaatttatttttggttttaaatgtaaggattttcttggtttcccgttagaatgaaatagaaggtaatgggaaaaaccggaggaaccgcaagttaaaaacaagagaaagatgaggattacgtattctttttttgggggagcagtgaaaaaaacacctaagcccggtatttctttgcagttctttttatttttttc

SEQ ID NO: 1000 - DNA, 183 bp, Gossypium hirsutum
  Clone ID: LIB3166-028-P1-K1-B9
cggacgcgtgggcggacgcgtggtctgacgcgtgggctggattaagattggggaccgtgtacggtccatggggaaggcctgatatggcgtatttttcgtttacgagaaatattctgcaggggaagcccatcaccatttatcggggaaagaatcgggttgatttggcacgagattttacctaca

SEQ ID NO: 1001 - DNA, 404 bp, Gossypium hirsutum
  Clone ID: GOSHI-09MAY01-C9160_1
ggaatacccggggggacgcgcacgcgtccgaccaaggcgaggttatccgcaatggaggctgctggctccgactccgacggcagagaagtcagaaacgcacaagagatgtggagggaacaaatcggagatgaaggtgatgatcctaagaagattcaatggtaccgtgaaggcgttgcttattgggaaggtgtggaggcgtctgtggatggagtattgggtggatttgggcaagttaatgatgctgatattaaaggtagtgaagcttttctcaattcccttattgcatgaaagatttggtgttggtggatgaaatcagcaccttgttgcccttgattgtggttctggcatagggaggataaccaagaatctactcataagatattttaatgaggttgatcttcttg

SEQ ID NO: 1002 - DNA, 982 bp, Gossypium hirsutum
  Clone ID: GOSHI-09MAY01-C9100_1
ctccatgcgttcgacagaatcaactagctttaacctaaaacaaactatacataagactaacaggcaaaaaagccaactccttttgtcttttattccttccattcccatgtccattacctcaacataagctactctactcatcatttgtacacaaaagtcctttgatatctaaccaaatatttttttcaacctccaaatatagccttccagagtatgagggaatcttaggtaaccaatcgctgctctggtattgtagggctgtaaaacacactgttaaaaagctggttccaactaatgattatatctaatggaccggaaactgtgtgcaatggttcaataacccactggatgaatacattaaattcacttaacaacaataagtaagaaactctgtcttaccttgcacctttatcagatgactcgattgcaaaggaaattgatttcatgatgaaaaaagggtggattccttgtcttgaatttgatgaggtggtggctgtccacagggagaatagcagcattccagggtactatgatgggaggtattggactctatggaagctgccgatgtttgggtgcaacgactcttctcaagtcctgaaagaaattcacgagtgcaaaaaggcataccccaatgcttatatccgttgcctggcatttgacaacaagcaccaaggtcagtgcatgtcctttgtcattcacaaacctaattgaaaccaccaccaccgactgatcagcagctagctgcctactgggttttccccaatctattcctattcctttttattagtagaataatgctatatgatctctctttcttctgtcttttcgatggatgacaataggacagccggtggatgattataagtgtggtgggttgttttgtttcggacacttgtttgcttttattaaaacaactatgattattataatggcttaggcacgcacttacttttattaaaattaatgataattataatagctt

SEQ ID NO: 1003 - DNA, 1699 bp, Gossypium hirsutum
  Clone ID: GOSHI-09MAY01-C9130_1
cccacgcgtccgcccacgcgtccgcccgcgcgcccgcccacgcgtccgccagtttcaactcataataatctagtgttccctttcgagggattttcccccttttttttctttttttttcttttgattttttttgaatttttttcttttttgggtttaatttggtttagtttccttttttgtcctcatcctcatcttctttttcgatttctccagaaatcctaaccctatagattttctcagaatcttcaaaattttaactaaactgaaagaagatgcagcagcaaaggctaaagcagcaacatgctctgatgcaacaggctttgtaccacaatcccagtctcatgagtggtcctcagatagaacctatcttgagtgggaatcttcctcctggctttgatgcagctacttgccgcagcgtatacgtgggaaatattcacccccaggtcacggaaccccttctgcaagaagtcttcctgagtactggtcccattgaaggatgcaaacttattaaaaaagataagtcatcctatggttttgtggactactttgatcgcagatcagctgcccttgctattgtcactcttaacggaaggcatctatttgggcaacctattaaagttaattgggcatatgctagcagtcagagggaggacacgtcggctcatcacaacatttttgtcggtgatctcagccccgaagttacagatgctactttgtttgcttgcttttctgtgtactccagttgttcggatgcttagggtcatgtgggatcaaaaaaccggccgctcgaagaggtttgggttttgtttcttttaggaaccagcaggatgcccaaagtgcaataaatgacttaaatgggaagtggctcggaagtagacagatccgatgtaactgggctgcaaaaggtgctacttccaatgatgacaatgccaaaagtatcgtggactcgaatggaccttctgaagaaggtcaagaaaaatctaatgacgattctccggagaacaatcctatgtataccactgtttatgtgggcgacctcgctccagaggttacatcagctgatctccacagtcatttccatgccctcggagcaggaactatcgaagatgtccgtgtccaacgagacaaaggtttcggttttgtgaggtacagttcacacgatgaagctgctctcgccattcagatgggaaatgctcgaattctttgcagtaaaccaatcaagtgctcatggggtagcaaaccaaccgcactgggaacaagctctggtcctcttcctccaccaacagctgcacatatggctggtggtgctcaagtaatgaacatgatgcatccacaaggtcagtatgccgttaaggcacaggcagccatgggaatgagtggtggtgaagctagtcaggcgatgtacaatggcggataccaaaacgttgcgacatcccagcagcagcttatgtattaccagtaagtaaaaatgatgggatattttcttccatggggaagaataaagtgtttggagaaattgaatagtagtgctcttcctattgcccattgcccattgctagtttctgaatgtttcccatttttggttttctttgtgctttggcttaagaacagatttttggtagtttttcctggttttcctgcttgtattttatgaatagttttgttttggtttttgagatgatatttgagaccgttggat

SEQ ID NO: 1004 - DNA, 665 bp, Gossypium hirsutum
  unsure (1)..(665): unsure at all n locations
  Clone ID: LIB3543-042-Q1-K6-G4
ttttgattttttttgaatttttttctttttttgggtttaatttggtttagtttccttttttgtcctcatcctcatcttctttttcgatttctccagaaaccctaaccctatagattttctcagaatcttcaaaattttaactaaactgaaagaagatgcagcagcaaaggctaaagcagcaacatgctctgatgcaaccggctttgtaccacaatcccagtctcatgagtggtcctcagatagaacctatcttgagtgggaatcttcctcctggctttgatgcagctacttgccgcagcgtatacgtgggaaatattcacccccaggtcacggaaccccttctgcaagaagtctttctgagtactggtcccattgaaggatgcaaacttattaaaaaagataaggtcatcttttgatgcacttgttttcccatttttcttttgatatccgtgcttcatcaacttgttattggatttttgggggttcttggttcgtgcttgtatcattgctaatggagtgggcttatatttgcttttaacgcagtcatcgtatggttntgtggactactttgatcgcagatcagctgcccttgctattgttactctaaacggaaggcatctatttgggcaacctattaaagttaattgggcatatgctagcagtca

SEQ ID NO: 1005 - DNA, 598 bp, Gossypium hirsutum
  Clone ID: LIB3825-025-Q6-K6-A11
cggccgcgtgggaaaaaacccatttttcctcttcatcatcgtcgagtctccgaaccctagacccccttctttttccggcaagaaaaaaaaaatgcagcagcaagggctaaatccccaacagcaagctatgatgcaacaagctttataccatcatcccagtctcttcgctggtcctcagatagagcctatcttgagtggaaatcttcctcctaactttgattcagctacttgccgcagtgtgtacgtcggaaatattcatccacaggtatcggaaccgcttctacaagaagttttcttgagtactggtcctattgaaggttgcaaacttattaaaaaggataagtcatcctatggtttcgtgcactactttgatcgcggatcagctgcacttgctattgtgactcttaacggaaggcatctatttgggcaacctattaaagttaattgggcatatgctagcagtcagagggaggacacgtcgactcatcacaacatttttgtcggtgatctcagccccgaagttacagatgctacattatttgcatgcttttctgtgtattccagttgttcggatgcaagggtcatgtgggatcaaaaa

SEQ ID NO: 1006 - DNA, 838 bp, Gossypium hirsutum
  Clone ID: GOSHI-09MAY01-C9120_1
gacgcgaacaaagcagccattgtcaaagcaggggctgtgcataagatgctaaagctacttgaatccccaaacgagccaaaccaagcagtttcagatgcggtagtcgcaaatttccttggcttgagcgccttggattcaaataagcctatcattggctcttcgggggctatccctttcctggtaaaatccctcaagattttggacacaaacagcaggtctcaagccagacatgatgctcttcgagctctttataatctatccatctccccatcaaacatatccttcatctcggaagctgatttgataccttttctgctgaatgccttgggggacatggaagtcagtgaaaggattctttccattttgagcaatgtagtatccactccagaaggtagaaaaggcattagtattgcaccagaagcattcccgattttggtggacgtgttgaattggaccgattcgccagggtgtcaagagaaggcatcgtatattcttatggtaatggcacataaagcatatggagatagacaggccatgatcgaagctggcattgtttcatcattgcttgagctaacacttttgggtagtacattggctcagaagagagcttctaggatcttggaggtcctgagagtcgacatagggaagcgagtttcagaaaacttcggtgggaacatgaatgcagctgtctcggctccaatttgcggctcttcatcatcgtcttcaacaaatctgaacggaaaggagtgcttggtggaagaagcaggcatgatgagcgaagagaaaaaagctgttaaacagttggtccaacagagtttgcaaaacaatatgaggagaa

SEQ ID NO: 1007 - DNA, 1423 bp, Gossypium hirsutum
  Clone ID: GOSHI-09MAY01-C9080_1
tccccccacgcctccgctctttaactcctctgggttttttctttgtctaacaaagaaaagaaaatgacaatatctgcttcatttttgcttgcttctaccttgctgctcaccggctgtgttttgggtcctatatctcttgtttcagccaaacatggtgttccatcttatgctcataagaaaatcgcttctaaaccttttgaagggtatcttgaaaatggcaactttgaagaacagcccaacccgactgccttaaagaaaacagtactcataggagcacacgcacttcccaaatggactatcacagggttagtcgagtacatctcgggtgggcctcaacctggtgggatgttttaccccgtcgctcatggcgtccatgcggtgaagctgggaaacgaggccaccatttctcaaaccatacctgtaaaaccaggggtactgtatgcgctgacatttggggcgtccaggacttgtgcgcaagacgaggtgttgagagtgtcggtgggtactcagtcaggggacctccccttgcagaccttgtacagtagtatgggtgatgacgtttatgcttggggtttcattcccaaaaccaagtatgccactgttaaattccataacccaggtgttcaagaggatcccacctgtggtccattgttggatgcggttgctattaaggagcttgtccgtcccagagctaccagatataatctggtgaagaacagtggctttgaagagggtcctcatcgcctagtcaactccaccaatggtgtcttgcttccccctcggcaagaggatttcacatccccactcccgggctggatcattgaatcacttaaagccgtaaaattcatcgatgcaaagcacttcaacgtcccggcgggacactccgcagtcgagctggttgccgggagagaaagtgccatcgcccagatcctcaggaccatccccaacaaatcatacaacatgacgttcatcatcggggacgctcgcaacggttgcaacggagaaatgatggtggaggcattcgctgccaaacatacagtcaaagttcccttcacatcacgtggaaaaggtgaattcaaggctgcaagtttaatgttcaaagctgatacagccaggacaagagtcacattctacagctcttactaccacacgaggagtgatgacttcgggtctctttgtggtcctgttctggatgaagttacggtttaccctattgcttagatgccaagtgaaatttttttttatgaagcactagagcatataagatggtaagtgaagggttttgtaatggttttacgtttgtatatttagcggttctggtaagctgtctaaaaccagatggaggaatgcgttgccaatgttgactttcagcaatcatggataacaatttgaagatgctatctgggtttgatcattctttgga

SEQ ID NO: 1008 - DNA, 808 bp, Gossypium hirsutum
  Clone ID: GOSHI-09MAY01-C9040_1
gtgatctcatgatgaaccccaaatcagcgtcatcaaagggcaatttttgtaagaaacaaaaggtattcaatccaccaagttgtttaaaaatcccctcttgtgaaagatcaagatctgctgccattgatgttgtaatcttaattgctgtgattgccgcttttggaatcttattgtttccaactataaaatgcatatctttgaaagtgattgaattcatcgaagccgcctatgatttggttagagatgaaatgatgatatctccaatgatatatggatccataggacttggtttttcttgttctgcaatagctgcttggattttgcttctttgtacagctaggaaatgtgggaaccctcactgtaaagggctcaataaggccaccgaattcgatattcagttggaaaccgaggagtgtgttaagaacttgagccctacggttaaagatggtgtttccaaaggacttctccaattgctgcacaatcgtcacaaggaattggaagccgagttaaagaggctggcaccggttaatggaagagcagtgcttgtgtttcgagctaaatgtggatgttccgttggcagattggtggttccgggactgaagaagcaaagaaagatcaagaaattgggtttaaggatacgattagatagatgaattttaaagctaatacagaaactagctcataatgctgagaggagtttgagggccttcgcaagttatgttgtctttaaataagcttctcatagcaataagttgtaaggattatatgcagtcgggttattagtggagaaaatgaaaacccttatttt

SEQ ID NO: 1009 - DNA, 451 bp, Gossypium hirsutum
  Clone ID: uC-gsflmaxxa046a04b1
tttctctttccgtcctctcctgggttgatggatgctttctgtatccatcactccgatctctcctagaaagctaacatctcattttaaaatgaaaccatcagtacgtgcacctcatgttacatattgatgggctttcttttttagttttttgcacaccaattttgttcaacaacagccattcacttgctcccatctacccgaggggaaaaaaaaatcagaaactgtgtttctcagttgagttcttcttttctgttttgactgattggcgctcatgtattgcagtaactaaatagttctgaaatcatgaagcataaagatggaaaataccattcacaacctgaaaaacctttcaagattgtccctgcaacattgcttgttatcgttctatgtgggttatgtttctatcttggcggcatcttctgttctgagaaaagtctactagagggaaaga

SEQ ID NO: 1010 - DNA, 400 bp, Gossypium hirsutum
  Clone ID: LIB3166-009-P1-K1-A2
cccacgcgttcgcgtctcctttttcgtactatccttttaatttacaccccagtaccctacttatacaagcaccttccctatggggtctagttccttttccaaactcaaacagtcacaggcaccgtgtaattgtagagaagtgaggcaagtaactaaatagttctgaaatcatgaagcataaagatggaaaatataattcacaacctgaaaaacctttcaagattgtccctgcaacattgcttgttatcgttctatgtgggttttctttctatcttggaggaatcttctgttctgagaaaagtcgacttgagggaaagagtgtgcagtatgtttccaagactgcttcttctcctaaagaacctgcaatggacccccttcaaatcaatatccatggctttcc

SEQ ID NO: 1011 - DNA, 515 bp, Gossypium hirsutum
  Clone ID: GOSHI-09MAY01-C9000_1
cccacgcgtcccctctctctctctctctctctcatgtctgaagcagtaaaatcgaaaggatgggtcaagggacaccaggcggtttgaaccggcaaggtcttcccggggaccgtaaaggcgacggatcgaacaagaaggaaaagaagttcgagccagccgcaccccctgcgagggtgggtcggaagcaacgaaaacaaaagggtccggaagcggctgctcgacttcccacagtaaccccactcagcaagtgcaagctacggctgttaaagctggagcggatcaaggattatttactaatggaagaagagttcgtagccaatcaggaaaggcttaagccccaggaagagaaagccgaggaagaccgatctaaggtcgatgatttgagaggctccccgatgagtgtgggcaatttagaggaactcatcgatgagaatcacgccattgtttccttttcggttggccctgaatactatgtgggcattttatcatttgttgataaagaccaacttgagccc

SEQ ID NO: 1012 - DNA, 497 bp, Gossypium hirsutum
  Clone ID: GOSHI-09MAY01-C9020_1
tttattttaaaaaaagaaaaacaatagaagagatgctatataatatgttttggcccatttccgtcctgcagttcatttcaagcactcacatcacaggttaggtttggcgccagcttctctcctcgcagggtgttggtttacacttctgtagtagcaagaaaagagcaagtccaatatgaagtttaaggcatttctcaccgaacatggggtgaatctcttagaaaggcggtttctacctgccttggacaaaatgggcaagatatgccacttatttctcacccgagaccatgctatcttccttcacaaccttctcaatggcgatggggttcagtgcattgcacagtttcgaaaggaagctctctttgatgactatcgcatctcaagtcagaatgaggaccgcattgcttttgcaattgatgtatcccttctgcttcgtgctgttcggagtagtgtaagcatatgtactgaatttggtaatggaccttctgccaaccgcc

SEQ ID NO: 1013 - DNA, 1247 bp, Gossypium hirsutum
  Clone ID: GOSHI-09MAY01-C9390_1
gcagatgaagatttaaaaaaggaagcagctcaggtcaagaaatgttggagaaaagagcatgtgaatgataaacaaggactggaacatggccagggactcggtaacaatgtcaaaacgcagagactaatacctgaaatcattgaagaggacaatgagatgatgacaaaagatattatgcttgaccagatatctgagtgctcatctcatgggttaagccggagagaaacttcagaggctgatgatcagatgcttgggttgtgggaagccagtgaccgtgatggtacaattgatttgagtggtgataaggccctgaagattgtcacgggaccatctgaccatcaacaaattgatacagtaaaggtacacaagggcagtcagcactctacgaaatctcatgtcaaggagttgggtgtagataaagagaaatctaagagatatacagagccaaaccaagaagaaaagaagaggaagattttagaaagacttgattctgatgctcaaaagttggctaatcttcagataactgtgcaggacctgaagaggaaggtagagataactgagaagggcaaaaaggggaaaggaattgaatatggtacggtaaaagagcagctagaagaagctgaggaagctatcacgaaactatctgattttaatcgcaaattgatagtgcatgctggagacccttcacggtcccttcttgatgggaaacctgcaatagattcggatgggagcggaagtggtaggaggcagcgaatatcagaacaagctcgaaaagggtcagaaaagattgggcgcttgcagttggaggtgcagaaaattcaatttctcttattgaagcttgacgatgaaaaagaaagtagaggtcgaaccaaaatcaccgaacacaaaacaactgttttattgcgagactatctttacggtggtgtaagaaacatcaagaagaggaagaactcactcttttgtgcatgcgtgcgaccccaaactaaatgagatcgaggcaattaatcatgggcacataatcagtgtagtttaccgataatgagactagttgcattgtcaataaagttcaccttcctagttttgcatttcacatatttaatgtcttagagaagctttcatcttctttagtttcgagatcctgctgtatatttcaggcacatcaaagtgaaaagaagctgcacttttatagcctaaaaacttccttttatttataaatttaccttggtataaattcttggattcattag

SEQ ID NO: 1014 - DNA, 579 bp, Gossypium hirsutum
  unsure (1)..(579): unsure at all n locations
  Clone ID: LIB3585-026-P1-K1-E8
attcgagctctttcaagaaagaatcatataccacggaattggaattattcagaaagctttctcatacgagattcatcccgctcttggggcactgcttggagcatgaaactgataagctgttggtctataagtatatgccgaatggagatttggctaattcgttttacagggctatcaactcggatgacgatagtttaaagtccttggattggattacgaggttgaaagtagctaccggagctgccgaaggcctatgctacttacaccatgaatgtaaccctcccctggttcacagggatattcaagcaagcagtatccttcttgatgataaatttgaagtgagacttggaagcttgagtgaagttcattgccaagaaggggatacacaccaaaaggtgctcacgaggttgcttcggaagccggggacctccgagccaggcccctcaggttcaggttctacttcagctacttgcgcctacgatgtgtattgtttcggaaaaagattactcgagcttattacggngaaactngngatcaataaagtggaagatacatctacgaaggaatggctcgagcaaa

SEQ ID NO: 1015 - DNA, 223 bp, Gossypium hirsutum
  Clone ID: LIB3166-013-P1-K1-D12
cggacgcgtgggcggacgcgtgggcttggttttggggtcagagattccgaaatatgaaacaatacatcatttcataggcttttttcaacatattcttatggtttctttcggaacggacaggttctacttcagctacttgcgcctacgatgtgtattgtttcggaaaagtattactcgagcttataacggggaaacttgggatcagtaaaagtggagatacatc

SEQ ID NO: 1016 - DNA, 554 bp, Gossypium hirsutum
  Clone ID: GOSHI-09MAY01-C9360_1
gaagctgaagaagcattttatgaaagggaggcttgacattgctcgccaaaaactaatagatgaacttataacttttagtatgctaagaggggttaaagtggttgttgtatttgacgctatgatgtctggacttcctacacacggggaaacttttgccggcattgatatagtttactcaggagagtcttgtgctgatgcatggatcgaaaaggaggttgtagctctgagggaggatgggtgccccaaagtctgggttgtgacttctgatcattgtcagcagcatgcagcacatggagcgggagcctttatttggagctccaaggcattggtttctgagattaaagcttcacagaaggaggttgagaggatgcttctagaacaaagatctacgtcttttccaggtaaactattgaagcacaatctcgatactgaaggtgttgatgctcttaagggtctaagaagacagctttctgagaatgagtcctgctagctatttggatctggtttgttgttattgttctcagctgaatattgcataatcaaaatgctaatcc

SEQ ID NO: 1017 - DNA, 641 bp, Gossypium hirsutum
  Clone ID: GOSHI-09MAY01-C9240_1
cggacgcgtgggtttttgtggagacacaagctcatttaattggcaacatgggtgtgaaatcggtgatccctggagcttggagcatttcacttcaactagagcagtcgacaaggctgcccctgaaagcagtatccatcatgctcaagtaatgattgaccaatgtcaatcagacaattttcattcagatgcctttgttccttctgaagcaaagtttaagcattataccacttgttcatctactagttatggggttgacctacaatcttatagcaccagtatggatgcaatgggtttaatattgtttctatgcaagcatgtggaagatcacaattttatgcgctgtgaaatttctgacgctcttcaattggcccctgatcctgctagacttgttttggatgcaatatcaacctttaatataccagagtcatcgaatactcacgaaaagaagtggaatgggtctaattctggaaacttatgccatgtgagaaaaagttgcattcttttgttggagcagttaaggacatttccattccagattgatccccatgtaaacgaagaagttttgaagctggctttcgattggaaagatagagcactgaaaggtgtggtggcctatggtttcttgcagctgatattcacct

SEQ ID NO: 1018 - DNA, 851 bp, Gossypium hirsutum
  Clone ID: GOSHI-09MAY01-C9230_1
agaacagctcgtgctggaagatctggtgttgctatttcactagtcaatcagtatgagctggagtggtatcttcagatagaaaagcttattggcaaaaagttatccgagtatcctgctcaagaagaggaagtcttgcagtacttagaaagtgtcacagaagccaagagactatcacagatggtaacccaagtttcttttagctgtctatattttcatatttgatttgaaagtaaaatgtgatttatattatattccatgtttgataatgttccatacttaattttatttcatcccgaagagttacttaaatagcatgtagaatgtcttccttgtaatggattcatctatttgcttgtatttcttgttctatagtattttgattttgctgtttatttgaaatttcagagcatttttgtgaactctttcttggatgacaattttatttttattcaacactgcagaaacttaaagaaattggaggcacaaaaaagaggaggggcggagatgatgatgatgaggatatagagagatatctaggcgtcaaaggcaagtcctccaagaaagttaagagaaaatgagatttcctgcttgttatgttatctttttgtctccatctacctacttgttccacatttctaactaatttgttaggttcagggtagcttaaattttgatctgagtaatttagctttattaaggaaaaagaaaactggaaagagaatcagggaagaagtcttttatggggaagtgattgtacaaaactcggatgaaggaaaagaaatacatttgtatttgttattgttataaaatttaatttctagccgtctcattccctacccttagttaataat

SEQ ID NO: 1019 - DNA, 416 bp, Gossypium hirsutum
  Clone ID: LIB3166-011-P1-K1-F9
cttgacattccatctgtcgatatggttattaattatgatatccctacaaactctaaggattgcatccatcgtgtgggtagaacagctcgtgctggaagatctggtgttgctatctcactagtcaaccagtatgagctggagtggtatcttcagatagaaaagcttattggcaaaaagttacccgagtatcctgctcaagaagaggaagtcttgcaatacttagaaagtgtcacagaagccaagaggctatcacagatgaaacttaaagaaattggaggcacaaaaaagaggaggggcggagatgatgatgatgaggatatagagagatatctaggcgtcaaagccaagtccttcaagaaaggtaagagaaaatgagattacctgcttgttatgttatctttttgtctgcatctacc

SEQ ID NO: 1020 - DNA, 942 bp, Gossypium hirsutum
  Clone ID: GOSHI-09MAY01-C9220_1
tttgacgattcagcttttaggaaagtttatcctttcaaaaaccatttctccgactttcctttactttcctttcatttctctgtttcccctctgttatcaatctggctctcgtctctgatccattctttgttgaatctcagcatacaccggaacccccatttccaggtacgtctcctccttccttcttaaagtttccgttgttattacatgcgcaaggttgtttgcagatcttattgtacgtttgaaaaagaagcttctcgatctgttaatgttttgttgtatatcgtgtatataagctcctatatgtgaacgatcttgacttttggttgtgcattttttgattatcgtgagggagtcgctttctattatcaccttcggccattgttgtcccactcctactttgaccgcttttctacacgctattgcttcggctgcaaatgcggaagataccccgtggttgatctctgagtaggaaagaaggacaagcctttcctcgtctctgaccacaacccctgaggcagatttatggacagtcgcgtcatactcgcccgcttgtttcagcactttcaccgcaccgagggcagtttgtgttactgacgagctaatgctactgcatattaacccttgtcgacaaataattccatgagattctccatattgtaaccttaattttgcttggtagattaaggagccatagttttttgtaaaagttcatatagcctgtttgtaaagtgtaagctctaggaatttcctccaaagcttgtaatagtttattgtaatagtttataggcactgcgaaccgaaggctcacctgaatactcacctcaccagaccaagaaatcttcgtgaggtgtgcgtgctaaagggatacgaaggatttttccagccatcatctgcggaaaatttattgtttatgaaatctcacttccatgttctctcatt

SEQ ID NO: 1021 - DNA, 318 bp, Gossypium hirsutum
  Clone ID: LIB3148-002-P1-K1-B3
ccgtggttgatctctgagtaggaaagaaggacaagcctttcctcgtctctgaccacaacccctgaggcagatttatggtgagtcgcatcatactcaccatcaaaatttattttaacgaattcgcgatgtgggtagctccactttcttgtttcctttcccttaattgaccttcttatttcaagcccattaggttcaacaatatagttgttgatgaagtctgctatttgttgccctataaaaaatagatcaaaaatccaggtaatccactataaaaaatccatgttaggaaccagaatcaaattctgaatttttaatagt

SEQ ID NO: 1022 - DNA, 777 bp, Gossypium hirsutum
  Clone ID: GOSHI-09MAY01-C4990_1
cccacgcgtacgacgagttttattgcccataaagtcaaaaggtctaagacaagatatgatctgcggagggggataaattacacccataattctcttcaaagtctcatcgtaagggaccatcactttgtaaagggaagccttttggaattggagctgcaaaagaaacaaagggtaatcgtcgaagccatagttagcttactgccaactcaatcaaggaaaagtccagttcccatggcatttctctccagcttactgaaaaccgcactatcctcgtcagtatcaacatcttgcagatcacatttagagaggcggacaggtctgcaactggaccacgccattcttgaagatatactaataccagccaattcacatggaaacaatcatacagccatgtatgatacagagtcaattctgaggatcttctccatctttttgaacttggatgatgatgatgatgatgatgatgatgacgatgatgaggataatcgcttgacagatgaaagtgaaatggcatatgattttgacagtccgggatctcccaaacaaagttcaatccttaaagtgtccaaggtgctcgactcgtaccttgctgaagttgcactagacacaaacttgtcgccatcaaaattcatagcattagcagaactacttccagaccatgctcgcatcgttagcgatgcactatacagatctgttgatatcttcctcaaagttcacccgaacataaaggattctgaacgctacagactatgcaaaacaatagactgtcagaaacta

SEQ ID NO: 1023 - DNA, 598 bp, Gossypium hirsutum
  Clone ID: GOSHI-09MAY01-C4940_1
ctattcagccatcagttaggtcctaccgtcattctccttccatgagctatagccgaagctcagtagacctcagagatgtttcttctcatttggtttcacctgcctcattgaattacccatccatttcaccacttaatgcaagatacatgtcccaatattttccaagcccaagcaacgcatcaccaagtttagtccaatcttccagtcgccggctgtatccattgcattgtagcaagtcagctgctagtttttcaccttttgcatctgctcaatcccttccagaatgttaatgaggtaaagtaattatgagctgcatttggtagaatggaatgacctacagcaaattattattcaatccttcgtgatacgatcgggtgtggttgttattcaatctccagattttaacttgctgaatttgtacattgtaacataagatttatgaaattgatttttatttccccgaatgatattttgctttacataattgaggtactcaaacttgagatttcgagaatgtgagtgatttgagaagaggattgtgaacattgttttatcagtcttgtgaatatagttatgtattacttaaaaaaaagggggg

SEQ ID NO: 1024 - DNA, 1320 bp, Gossypium hirsutum
  Clone ID: GOSHI-09MAY01-C4970_1
cttatatttttctttttagttactacctatctcttttgggctttctaattttggcaaaatttaaaggagcggtggagatccatttcccccttttaactttcttgataagtgacgagggccatgtgagttgtttgaactgaaatactgttgttgacgtttttcgacgggataagcttattgttgttctaagtgtgcacaaagatgggtagatgcaagggttgtgggaaattaggaaggattctaccaagggatgagcctgtgaatccttaccattctgcatttctgtgttcccctgttgtttctgtttgggattgcattgtccgtaagatgagatattcttgcagacctgagtttgtgtagccttgattttatataatttatattaggaataagtagccgtcaaagtgtttttttaaagaaaaaaaaaggtgaaagaggaaaacagataggtttatagggaaatgtatacgatttagaggaacccttttacagaaaaaagaaagaatctgagtaaacagaagtgcgggtttaaaagctgtttaagttttaatggataacaagggatgcaataaagtgcaaccagtagcgagaaaagcaaaaaagaaacaggtgaaggatgagttggatcgtattaaacaggccgagaagaaaaaaaggcgtttggagaaagctcttgctacttctgcagccatccgttccgaactagagaagaagaaacagaaaaagaaggaagaacagcaaaggcttgatgaggatggtgctgcaattgctgaggctgttgctttgcatgtcctggttggtgaagactcgggggattcatgtgagattatggtaaagaaggacgaggggttcaaccgttgggattggggaaggagagctaggcttccccatcaggctcacacaacctctcaagggtgggtcgctaatgcatatagtggtggatgcgagtgggctgagtttggaagcagtgactggtccttcacgtatggagcttgcagaagggatctacatgcaccatggtttgaggatagaggctggggaaatgaagaactttcagctggtcttatagcagcacaggctgtttcagcgctgcaaatcacagaggacgcagaagtagtagacaccatcgtgcttgacagaatgttgagaggctagcctagcattttgctgttgtatttgccactttccatgttgcttgctgtctttttatcttttattcataaatctgaataatggatctgtatatatatgtgatgactttgtcacgcatctggttcttgttgcttctttaaatattaaactttgttgcaccagactgtc

SEQ ID NO: 1025 - DNA, 781 bp, Gossypium hirsutum
  Clone ID: GOSHI-09MAY01-C4910_1
ggagcatgcatttccacttgacgagttgagaccgctatcgtgtgaaggagaagatacacttggtggttatgccttgacactgattgattctttagacacattggctttacttggagaccgagaacgctttacagcctctgttgaatggattgaataaaacagtttctatttttgagaccaccatcagggtccttggaggtttactttccgctcatcttattgcaagtgactatgctacgggcatgagaaggccttcatatgacaatgaattacttgacttagctgaagatctggctaggaggttattacctgcatttgacactcctacaggaatcccatttggttctgttaatctaatgtatggagttgatgaacatgaaagcaagataacatctacagctggtggtgggactttgacccttgaatttggagtgctaagccgtttgacaaatgatcctatttttgagcaagttaccaaaaatgctgttcggggcctatgggctcgccgttcaaagcttaatttagttggtgctcacatcaatgtgtttactggtgaatggacacagaaggatgctggaatagggacaagcatcgactccttctacgagtatcttctgaaggcatatttattgtttggggatgaagaatgtttgttcatattccaagaagcatacagtgctgctatgcactatctttacaatgatccctggtatgtagaggtcaatatggattctgctgctatggtctggccactatttaacagtttacaggcattttggcc

SEQ ID NO: 1026 - DNA, 627 bp, Gossypium hirsutum
  Clone ID: GOSHI-09MAY01-C4920_1
tcgcccacgcgtccgaagaaatatactcttcctcgttatccctccctcagatctcctcaattgtaccatcaacaaatttccccacccaaacaaggcattatcatcttcagtcttttttttatattgggggcattcgagaataatcagaaactgcaaagggaagccacaatgttgtcattttcttactcattgcctctcttcctctgttttatctcaagctttaacggaatctttgctgccacagaattcgatttcggtacgttaaacctcagcagcttgaagctccttggtgacgctcacttaaacaatgggagcgtcagactcactcgcgacctccaagtacccgcttccggcgccggcagagccttgtactcgaaacccgtcagattccgggaaccccagactcattctccttgtagcttctccaccttcttctccttctacattaccaacctcaacccgtcttccatcggcggtggtttagcctttgtcatttccccggatggtgatttcattggcgccggcggcggctctttgggactcttagatgataagggtcgggcttcggggttcgttgctgttgaattcgacactcttatggacgtagaattcgatgactttaatggg

SEQ ID NO: 1027 - DNA, 817 bp, Gossypium hirsutum
  Clone ID: GOSHI-09MAY01-C4850_1
gaacggaaggcccgacccgacccacgcgtacgcccacgcgtcgggccagttgtgggttggcctccaattcgttcttttaggaaaaatatagcagagaggagttcatcgaaactagcttctgaatcatcaccaagtgtgctccctcacaaggttggtaatgaaaaaaaagctgcagagccgagtgcgaaatttgtgaaaatcaacatggatggagttcccataggcaggaaagtcgatctcaacagcctatgacagctatgaaaaactctcgacagctgttgatgaactcttcagaggcctccttgctgctcaaagagattcctccgctggtggaatagtgaagaagcagcaggaggagaaagcgatcacgggcttattagatggaagtggggaatatacactggtttacgaggataacgaaggagacaggatgcttgttggggatgtcccgtggcacatgtttgtgtccacagtggagaggctgcgcgtgttgaagagctcggaactgtctgcccttagccttggaagcagtaaacgagggaagtaccggcttgactctgtctccaccaaagtttgaagatgaggcattgaaatttgaattatgttcatgttttgacattttgttccctgttttgcctttaaacctgacgcacttactgtatatattagtaggtcggtatgtaatttttgacttcgttttctttctttccctacatgaatgccatttgctattatcctttgctgcttttttacttggtattaacatcaagcacccatcatcgcctttaaaaatgatgggttactatggagttgatat

SEQ ID NO: 1028 - DNA, 572 bp, Gossypium hirsutum
  unsure (1)..(572): unsure at all n locations
  Clone ID: LIB3829-031-Q6-K6-A12
ctgnacagtcacaggataccttacttgttgttgagtggtccatgcatgctttgttagttatttcaattttaaccatcagcttcagatgttttcaaaatttgtttgtttttaacctcatttattgctattgatctgctcattcatgatggctctaacccttttctggtaaactgctcctgggccagttgtgggttggcctccaattcgttcttttaggaaaaatatagcaaacagccagttcatcgtaaactagcttctgaatcatcaccaagtgtgctccctcacaaggttggtaatgaaaaaaaagctgcatagcctactgcgaaatttgtgaaaatcaacatggatggagttcccataggcaaggaaagtcgatctcaaagcctatgacagctatgaaaaactctcgacagctgttgatgaactcttcagaggcctccttgctgctcaaataattcctccgctggtggaatagtgaataagcaggaggaggagaaagcgatcacgggcttattagatggaagtggggaatatacactgggttacgaggataacgaaggagacaggatgct

SEQ ID NO: 1029 - DNA, 273 bp, Gossypium hirsutum
  Clone ID: uC-gsflnu33B018g05b1
ttcttggaagcagtaaacgagggaagtaccggcttgactctgtctccaccaaagtttgaagatgaggcattgaaatttgaattatgttcatgttttgacattttgttccctgttttgcctttaaacctgactcacttactgtatatattagtaggtcagcaatgtaatttttgacattcgttttctttctttccctacatgaatgccatttgctaaaaaaaaaaacaaaaaaaaaaataaaatatgaaaataaaaacaacaaaaaaaaatatg

SEQ ID NO: 1030 - DNA, 172 bp, Gossypium hirsutum
  Clone ID: LIB3148-025-Q1-K1-H6
gggggtcgaaccaggcgttcgccggcatttaaacattataatgttcatgttttgacattaggtgccctgttttgcctttaaacctgacgcacttactgtatatattagtaggtcggtatgtaatttttgacttcgttttctttctttccctacatgaatgccatttgctttt

SEQ ID NO: 1031 - DNA, 567 bp, Gossypium hirsutum
  Clone ID: LIB3584-035-P1-K1-A12
ccgagtctagctttctccacgacatatgcacttttgattttgttttgggctgagatttactaccaagttaggttatttgagcttcatgagttgcctccctgcctcctgctttctaattttatgagactttatcttaaactttgtctatcgtaaacaggcacgtgctgtatcaactgatagattgaggcctagtttctttacaactaatgctgtagtttatactattcaggtgatatttatgttctattattttggtaaagtgcccatagaaaggagaatttgaaattgtttttctctttgtttgagagctagtaatgtttggtccagaacaataatgttatatagtttcacataacttagtttgttgatttgtcacatattctatacatgttaagtggggaatgatgtatatagcatttgcaggtttttgaaggttagaagaatatgatatttattttgccattagttggatgagggataaaccataaaatagggatatgaagatatgacctccgaggatccttcaaatacataggaaaactaaccacacctatgtcagatacatac

SEQ ID NO: 1032 - DNA, 540 bp, Gossypium hirsutum
  Clone ID: LIB3584-053-P1-K2-H1
cccacgcgtccgcccacgcgtccgatttactactaaaatttgcaagtgctagaaacatccttgcattgttctagcaaaagaaatagcgtattctaacttactaacctattttatggtttatccctcatccaactaatggcaaaataaatatcatattcttctaaccttctaaaatctgcaaatgctatatacatccttccccacttaacatgtatagaatatgtgacaaatcaacaatctaagttatgtgaaactatataacattattgttctggaccaaacattactagctttcaaacagagagaaaaacaacttcaaattctcctttctatgggcactttaccaaaataatagaacataaatatcacctgaatagtataaactacagcattaattgtaaagaaactaggcctcaatccatcagttgatacagcacgtgcctgtttacgatagacaaagtttaagataaagtctcataaaattagaaagcaggaggtagggaggcaactcataaagctcaaataacctaacctggtagt

SEQ ID NO: 1033 - DNA, 997 bp, Gossypium hirsutum
  Clone ID: GOSHI-09MAY01-C4550_1
cggcccgaccgcacgcgtgcgaaatatattagcccaaagattgtctaaattctttacttttaagtgacaaggggggaacggtatactttcttgtgtatgtggccgtctcatcaatgagcgtcgattgatagatatggcttttgtgctggtcaatctgtatcccattcttcagatatagttttgtttgatcatagatcggcaggtgacctgtcctttctccccctttcgtcataagaggcctggtctgactctgagaaaaaccattcctgtgtttaggtccctactaagctgaattcgtaaactatgcaagggctattttggatcctactgcttctttttgtctcatctcatacacgttctctctctttgtacctttacttttgaaaccctaacaatactatggtaggatttaagaacagatacatggttatggaggtattgttggatccaaataaagaaatttcaggggatgaccccattgtagttacccaatttaacatatcaaaagcaatcaaagatagcattcttgtcaacttcggtgaatgtggtctagcttcttcgctcggatctttccaagttaaatacgtcaatccgattacaaagctgtgtgttatcagagtttcaagagatgaataccaaaaaatttggtcttcaataagcatggttaggagaattgggaattgggtcctgtgctatttaatttgctggatcttagtggtaaatataaaggggcatgtaaaactgctgccttgaagtgcgatgaattaaaattcgagcagtacaagcttatggttggagcacggctctcggctgatgtcacccagcacatgaaaaactgtcttgagaagatcagaattttagaacactaaaaagtgatccacaggcagtagctgattgccctgggatgctggtatgccactatgcacttatgaactgagatcaaattgttcaaattttggataggcaaattaggcattcatatttcacaatatttgga

SEQ ID NO: 1034 - DNA, 419 bp, Gossypium hirsutum
  Clone ID: LIB3148-017-Q1-K1-G10
aaaagatagcattcttgtcaacttcggtgaatgttgtctagcttcttcgctcagatctttgcaagttaaatatgtcaattcaattacaaagctgtgtattatcagagcttcaagagatgaatacaaaaaaatttggtattcaattagcatggttagaagtattgggaactgtcttgtgctatttaatttgttggatcttagtggtagtataaaagcatgtaaaactgctgccttgaagtgcgatgagttaaaattcgagcaatacaagcttatggttggagcacggctctcggttgatgttattcggcacatgcaaaattgtattgagaagatcaaaattttagaacactaagactccgtttgtttgtcagtaaaatatttttcggaaaatgatttacttttctagatatattaataaa

SEQ ID NO: 1035 - DNA, 560 bp, Gossypium hirsutum
  Clone ID: GOSHI-09MAY01-C4500_1
cccacgcgtccgagaaaatccaccaaaaacagcgatagtgtcgttgacgaaaccttttatttccgctactcctccgccgtcgccccaccctcatcctcctcctctaatcccaatcaagccacctccaaatccaccggcggtggcggcgggtccggcggtctagccccatcgaaatcaaccctttacgtctccaacctcgactactccctcacaaactccgacctccacactctcttctccaccttcggcaaaatcgcccgcgtaacagtactcaaagaccgagccacaaggaattcaaagggggtcgccttcgtccagtttgtttcccgcgatgacgcgctatccgcggcgagtgttatgcacgggaatatactcatcggcagaaccctcagcgcttccatcgccgtcgataatggacgagccccggagtttattaagaaaagggtttataaggataagtctagatgttatgaatgtggggctggtgggcatttatcttatgagtgtccaaagaatcagttggggccaagggagagaccggtgcccaagaaagggcggag

SEQ ID NO: 1036 - DNA, 504 bp, Gossypium hirsutum
  Clone ID: uC-gsflmaxxa090f11b1
gcgcaattttatccaccaatcacagccatagagacgaagggggaatttttgagattcggtgctgttacgccgacaccccacccttgtcctcctgctctaagccccaactagccacctacaagccaccgcgggggcggcagtgccggaggactagccccatcgaaatcaacactttacgtctccaacctagactactccctcacaaactccgacctccacactctcttctacaccttcggcaaaatcgcccgcgtaacagtcctcaaagaccgcgccacaaggaattcaaagggggtcgccttcgcccagatagattcccgcgaggacgcgctatccgcggcgagtgttatgcacgggaaaatactcaacggcagaaccctcagcgctaccatcgccgtctataatggacgagccccggagtttattaagaaaagggtttataaggataagtctagatgttatgaatgtggcgctgtggtcatttatcttatgagtgtccaaaga

SEQ ID NO: 1037 - DNA, 498 bp, Gossypium hirsutum
  unsure (1)..(498): unsure at all n locations
  Clone ID: LIB3584-046-P1-K2-B1
cnacgcgtccggcctgaaaagattttcagacattgcaaaaaaatcaaaaatcattttcttttttccttttgtttttcagttctgtcttcctccttccagatgggaagggaagggaaggttggccattcaagcaattttaagaaaagggttagatcgaaacatgagggttcagatgattccgatgaagattatgtagcttcggagggaaatgaacgatctgatgatgatgctgaatattattgctcttccttagatgaatgtgcatcggaagaaggttttcagggttacaatgaggaggaagaggaagaggtgagagaggttgttagattgaaaagagaacggatatcttcggtaagggagaggaagattctggataaaaaatctgtcaagcgggaaagcatgtcttgtgaagaagatgaagacacggattctcacgaggaagaagaagaagacgaagaggtgagagaggctgttaggttgaaaagagaacggatatct

SEQ ID NO: 1038 - DNA, 484 bp, Gossypium hirsutum
  unsure (1)..(484): unsure at all n locations
  Clone ID: LIB3582-019-P1-K1-H5
cctaggcgtacgcgaaaccgtgtctgttgaagaagatgaacacatggattatgaggaggaagaagacgaaaaggaagaggtgagagaggttgttaggttgaaaagagaacggatatcttcggaaagggagaggaagattgcggataaaaaatctgtcaagcgggaaagcttgtctgttgaagaagatgaagacaaggattatgaggaggaagaagaagaaaaggaagatgatgatgaggagttcactccagatttagaagattgtttggatgaggaatttactctggatgaagaggattgtttggatgaagaattcactccggatgaagaggattgtttagatgacgaagaggaattgactatgactaagaggaaaaacaaaacaaaagttagcaagcaagttttgcggaaaaagtacccttctaaacatangacaaagaggaagaggtctgcagtttctaagaagccttcgagaaaacaagga

SEQ ID NO: 1039 - DNA, 297 bp, Gossypium hirsutum
  Clone ID: GOSHI-09MAY01-C4470_3
ataaattagagcctccccagcagctgccatattcttcgtaaaaagtaaaaattgcggcattgggattttgattttgggtttcggttgcattgttgtgtttcacttgttgatgatacatatgattttggaagacatgcatttgtctgttgtaagtcatgggtcatgaacttcaattgctttgataggtgggctaaattgttaacttgtattattttccatgtttgtatcaatgagcacgcattcttttctaaaaaccttttgattaacttaaatatatatactactttagttaggatc

SEQ ID NO: 1040 - DNA, 964 bp, Gossypium hirsutum
  Clone ID: GOSHI-09MAY01-C4470_2
cccacgcgtccgcccacgcgtccggtttgcacaacttcaagaaatccaagaatcggtcatctagagcatattggaattgatcttgcccaaaacaaatcaagcaaagaaggtctgcatttgcaaaatgggttttcccatgaatcagaggaggaatcatcatctgatctcccaggaagtattgttgatccacatcaacggttgttaatagttttgagtaatataggatactgcaaagatgagctttcttccgaattgtacaagaagtacaaatgcatttggctgcaatccagggacaaagatgaagaggagtcagacatacaagagttggtagtgtcttttactggacttgaagagaaggtccttgagcagtatacttttgctaaggcaaatttgattaggacagctgccatgaactatttgttagattctggtgttcagtggggatcagcacctgcagtaaaaggtgtcagagatgcagctgtcgagttattacatgctctggtagctgtacatgctgaggtctttgctggtgctaagcccctcctggacaagacacttggcattcttgtggaaggtctaattgatattttaatcagtcttttccatgagaatgaatctaaagatctcagttcacttgatgcaaatggtttctgccagctcatgcttgagcttgaatatttcgagaccattttaaatccatttttcactcagcgtaggcgcagataaattagagccaccccagcagcagccatattcttcgtaaaaagtaaattttttttccttttgattttgattttgattttaattttggtttcacttgttgatgatacatacgattttggaagacatgcatttgtctgttgtaagtcatgggtcatgaacttcaattgctttgataggtgggctaaattattaccttgtattattttaccatgtttgtatcaatgagcacgcagtcttttct

SEQ ID NO: 1041 - DNA, 684 bp, Gossypium hirsutum
  Clone ID: GOSHI-09MAY01-C4470_1
gaagtctttacaaggggtgctgttggagaaagccactgaaagcctctctgaggttgaaaatcctgggcacaaccggcggccaactcgtggaagtgaagatgctgctgcagatgagaagctcctcgcggccgctgtatctccggatgacctgattgctcttgcacagcaatatagctctgaattgctacaaggagagcttgagaggactcgcatcaatacagcatgttttgtggaatcactccccatggaatctgctccagactcggtaaaagctgcatatgcatcttttagaggtccaatggactctcccagcaaaaattacagaggcacacaagcaacgggatcccctagtttcactcagcgtaggcgcagataaattagagccaccccagcagcagccatattcttcgtaaaaagtaaaaatttcttcattttgattttgattttggttctcatttgcattgttgtgcttcacttgttgacgatacatatgattttgtaagacatgctttttttttgtgttaggtttaatttcactcatctttctacttctctatttgggtgtgccatactttttcctttttatttctttccctgttttttttatatacttactctattttttttactttcttttttctcaatcttattccctcttttatttttaataaatttctctaatac

SEQ ID NO: 1042 - DNA, 717 bp, Gossypium hirsutum
  Clone ID: GOSHI-09MAY01-C4410_1
cggacgcgtgggtttcgcttattcttccattggtctaggactctccatagccaaagttgcaggtggggaacatgtaaggacatccttaactggtgtaacagtaggggttgatgtgtcgggatccgaaaaggtttggaggactttccaagctatcggtgacattgcctttgcgtatgcttactgcactgttctcattgagattcaggacacgatcaaatcgagcccaccagagaacaaatctatgaaaagagcaagtagcattggtgtttcgacaaccactttattttatgtactttgcggtcttattggatatgcagcatttggcaacgatgcaccagggaattttcttacagggtttggtttctatgaacccttttggctgattgacttcgccaacatctgcattgccatccatctcattggtgcataccaggtttttgcacaacccttattcgggttcgtggagggttggtgttccaggaactggcctaatagcaggttcattacaagtgaacatgctggtgatgttccattctatggtatttactacctcaacttcttcaggttggtatggaggacggcatacgttatcataacagccgtggtagccatgatctttcctttcttcaatgatttcttgggtctcattggagccggctcgttttggccgttaacagtctactttcccatcgagatgcacatcgcgcaatcgaaaac

SEQ ID NO: 1043 - DNA, 1148 bp, Gossypium hirsutum
  Clone ID: GOSHI-09MAY01-C4400_1
gctatccttatctcttcagattttctctagattctcttcaatctaggtttctcaaccatctctcctctcgttcactttgaagacgagtgaaatctgctgcctctaggcatttttcttctctctttcttaaagcttctgttgcaagttcatgggcataaccgtttcctaatctttgaacaaacatgaagttgatttattggaagtaatgtttcttcctttgaatatctcggatgatcgcccctaaagctgacttgtctgttgctattgagttgcatttttttatgactgtttttgaatcccctaatatatctactgattgaaaacccattgaaatccctaacttcactgcttgtaaccctgcatgtgcctctaccatgaacggagacgatattgcagagtggaatactgtttttgatgctaaaaactcacccactccccccacaccaccagacccgaggccaatcttaagtgtttactgttgaatgctgcatcaaaaaaatatttactctcgcatttctttcaatcagtctctgtcttctatcatcgcctaagattatccatgcggcacagcaaaaaagtcgaaattgtttactattacccatggtgaaaacccaagacattgtctaaaagcatggttactgtcttcttctgtatttcggcatcgaggacatgagctatctgaagccactcttcttaatcttagattgtttagagcaggaataaagttccaggaaatacaccaaatagtgatggcaattttttttgggagatgtaaattccacagttttctgcagaaaatttttgtttcggtctgtattaaataagtaataggatccatattagcctcttgtaatagtttacaggcacttctgactgaaaattcaccaaaatattctcctcgtcaaacttaaaaatcatgatgttcatcttccgccagaggaatttacagaatcttctgtgctgtgtctgcttgaaagaaatatggtctcctctaccgactcgctagcataagtcatctttcagtaacccttttgctgcctaaacgcttttccaagtgaatgaaggtaaattccctaattgtgcatggatgaaatatgaatttgggtaatatttagcttttaagaccttttctaataaaataatttggg

SEQ ID NO: 1044 - DNA, 499 bp, Gossypium hirsutum
  Clone ID: LIB3584-045-P1-K2-D4
tgtcctccattcaagatgacaatatatagatgagctgaatcttacccctccccccgcaccaccagacgcgaggccaatcttaagtgtctactggcgaatgctgcatcaaaaagatatggactctggcatccctttcaatcagcctctgtcttgtatcatcggctaagattatccatgcggcacagcaaaaaagtcgaaattgttcactattacccatggtgaaaacccaagacatagactaaaagcatgggcactgtcttgtactgactcaccgcatagaggacatgaactataagaagccactatgcttaatcttacatattgtagagcaggaataaagttccaggaaaaacaccatatagggatggcaatgtgttttgggagaagtaaatggcacagattactgtagaaaatattaggttcgggctggattaaataaggaatcggagccatattaacctatagagaattgttacaggcacttcggactgaaaattca

SEQ ID NO: 1045 - DNA, 620 bp, Gossypium hirsutum
  Clone ID: GOSHI-09MAY01-C4420_2
cttaccttagcacatgtaaaatcccatctgcagatgtatagaactgtgaagaccactgacagagcagcagcatcgtcaggacaaatggatgcatttgaaaatggatcatctggggatacatctgaagatatgatgtttgaaattcaaaacccaagaagatcagagatatcagttcagcagggaagatcgtcatcatcaaatgctcatcaagacaaagagtaccatggactgtggagcaattcgtcaagggaagcttggctgcatggcaaacctgatgaggctcctctaaacttaccatctctccagaaggatatggatccaaaatgcttaagctatgagagaatatcagatgtaagctcatcaagcctttcagagacatgctccaagaagcctaatttggaattcacattgggggttccacattgatatagatataaataattttatatattagggtgtgtactgctcatttggaaatgatcatatatatctctgactccgaagagaggagaagggggagttggagaagagaatcagtaccctctcatattttatatatatatattaaaaagaatatcaaattatgaaaagaaaaagagagcaactaaagacagacaaag

SEQ ID NO: 1046 - DNA, 1062 bp, Gossypium hirsutum
  Clone ID: GOSHI-09MAY01-C4420_1
atcctctttactttctcatctcatcttgatttccctcgcggcttttaacgaactcctttctttctctagatctctcgtccttccatctctggttttctttttatcttacattaatataatcaatatctcatagttctttccttgttgttcctcttatttgtgtgtttttgaatgctcatcaacatcttgtccctgatgtttgaggactcatgtctcccgtactcagtgaaatcctcctttctgggtttatgataaactctactctgaggcgcaggacccatcttgttcaatctttctctgttgttttcctttactggttctacgttttttcatgaactctctctctctctctctctctctctctctctctctctctgattgtaaccccatagcccgctcttattttcttcagcttttcttcaccatttttcataaataattccatatctgagtttctttgcataataaaatttctgggttctgaggccagttattgtttcttctgttttttttgctataattgttgttgttacttatggctacttcaagcagtggagcatcctcaggttcaagcacgctgagaagctcgagttcatcggaggattttcagccgattttggatgaaaggaagcgcaagagaatgctatccaatagggaatctgcacgtcgctctcggatgcgtaaacagaagcacctggatgaactgatggcccaagtttctaatctcaccaaccacaataaccagatccacacaagcatcaatgtcaccacgcagctttactccaacgttgaggctgagaacttggttcttagagctcagatgactgagctcagcaacaggttgcaatctctcaatgaaatcattcatttcataaactccagcaatggggttctccaaaatgacactaacttttgaccaggccggcctactgtcatcctcatcatcagctcaatgatgatagtttaatgaatccatggaatttttccacaaccaatcaaccctgtatgccttctgctgacatgatgatgtattgattgattaatcagtctttgcagtgtacc

SEQ ID NO: 1047 - DNA, 525 bp, Gossypium hirsutum
  Clone ID: LIB3584-045-P1-K2-F3
cccacgcgtccgcccacgcgtccggtgtcaacaagctagcaaaattagctttaatatccttttttgatgcttattattaacaccttgttcttgatcttcgagactcatgtctcctgtagtcagcgaaatcctcctttctggtttgatgataaactctactcttaggcgcaggacccatcttgttcaatctttttccgttgttttcctttactggttctacgtgttttcatgaactatctctttctataatccatcccccatacatatacatatttttaaaaccaattttcatatataacccccaatttgaccgcttcacttgcctcttgtttttgctataattgttattgttatggctacttcaagaactggatcatcttcatcttcaaccacgccgaggagctcaagctcggtggaggagtttcagcaggttttaaatgaaaggaagcgtaaaagaatggcgtccaacagggaagccgcttgccggtctcggatgcgtaaacaaaagcagtttgatgatctgat

SEQ ID NO: 1048 - DNA, 362 bp, Gossypium hirsutum
  Clone ID: LIB3135-061-Q1-K1-G1
gagacatgctccaagaagcctaatttggagttcacattgggggttccacattgatatagatataaatgattttatatattaggatgtgtactgctcattttgaaatgatcatatatatctctgactccgaagagaggagaagggggagttggtgaagagaatcaggtaccctctctctctctctctctctctgattgtaaccccatagcccgctcttattttcttcagcttttcttcaccatttttcataaataattccatatctgagtttctttgcataataaaatttctgggttctgaggccagttattggttcttctgttttttttgttataattggtggtggtacttatggctacttc

SEQ ID NO: 1049 - DNA, 732 bp, Gossypium hirsutum
  Clone ID: GOSHI-09MAY01-C4690_1
gtaagacatgtattgacctgtctgcgggagacgagaaagctattaatctgtcagctatgtcacatgtagttgtgtatcttgattggaaatcaaagcttttggagaagtacaatataaattatcttgaaaacttgcctgaggtctttaaatatgggcctattaccaagaaagctcgtactgaacctctttctttgtatacttgcctggaggcctttttacgagaggagccattggtgccagaagatatgtggtactgccctcaatgcaaggaacaacgacaagcgagttaaaagcttgacctgtggaggcttcctgaggttctagttattcatctaaaaagattctcatatagccggtcaatgaagcataaagtagaaacttttgtcaactttcctattcatgattttgacttaaccaattatgtagctgacaagaggagttcctgttctcagctctacgaactctacgccttgaccaaccattatggtggcatgggcagtggccactataccgcgcacatcaaacttctagatgagaataagtggtacaactttgatgacagccatatatcacctataaatgaagaagatgtaaagtcagctgctgcatatgtcctgttttatcgaagggcaaagtccgatacctcaggtaccagttctgcagggtctcgtagagctcgggataaaacatcttataagtaattgaagtgaaggtacatgcctaaactatttg

SEQ ID NO: 1050 - DNA, 664 bp, Gossypium hirsutum
  Clone ID: GOSHI-09MAY01-C4680_1
catctcttggaagtaaacaagaggctcatgtattcaagtctaagtccggtgcatgtgctgcattcctagcaaactatgacacgagatattccgtaaaagtaaagttcggaaatggtcaatatgacttacctcgttggtccatcagcatcctcccggactgtaaaactgctgtttttaacacagccaagattggtgctcacagctcaaagaaggcaatggtgcctctaaacagagcattttcttggcaatcatacaatgaacaaagccccactgctgatgatcgagaagcaactgtacataatggtctctgggaacaaatatatctcaccagagatgcgtcagattatttgtggtacatgacagatgtaaaaatcgaccctaatgaagggttcttgaagggtgggcaaggtcctattctcactttttggtcagcaggccatgctttgcatgttttcatcaatggtcaactatcgggtaccgtgtatggcggattagacaatccaaaactaacattcagcaacaatgtcaagctaagagctgggattaacaggatttcttattaagcgttgcagttgggctcccgaatgttggcactcattttgagacatggattgccggccgtctaggccggttacattgaaaggtctcaatgaagggacaagaa

SEQ ID NO: 1051 - DNA, 696 bp, Gossypium hirsutum
  unsure (1)..(696): unsure at all n locations
  Clone ID: LIB3583-058-P1-K1-G9
ccgggtccgaccgcacgccgtccgcccacgcccgtctcgcccaccgcgtcnctngcttcaaaaaccttnnncacttttctctattggtnnttgattatggcgtttgaggagagctatntnnaactcgtccagaccctgcgagcccaccgcntttcctttnnccgcttnncgatgatacccctaatttacccactgcncnnttgaatnncctttacttttaagcgtaannngcgttcanannaacgaccccacgnntctcgacnncatgnntcactgcnncgaggannagaatattnntagctctnngtgtcttaatcaatgccctagcacgcgnnngcggtggcccannacgatctcnncttctccaacncnnaccatgnnncagaacccaccnnntcgacggagggagcccagaaaccccgagttaccaagtgcccagtgtttgtaacaagggcgtttaacctcttaccaggcttntgggtggacccataaagccagccaccgtaaggctttccggtgggaacgacgatcagacgacatcggcgaccgggacagccggtggggttgttaagtcatccggcgggaagtcacacgagtgttccatctgccataaaagcttccctacgggtcaggccttgggaggccataaaagacgccactatgaaggtggggcggggaataataacgccggcgcca

SEQ ID NO: 1052 - DNA, 494 bp, Gossypium hirsutum
  Clone ID: LIB3584-054-P1-K2-F2
cccacgcgtccgagcttcaaaaacttccacttttctctatggttggattatggctttagaagctattaactctccaacctcagccaccgctcctttccgcttcgatgatactaatttacactgccttgaatcctttactaagcgtaagcgttcaaaacgaccacgtctcgaccatgtcactgccgaggaagaatatttagctctgtgtcttatcatgctagcacgcggcggtggccaacgatctccttctccaaccaccatgccagaacccacctcgacggaggagcagaaaccgagttacaagtgcagtgtttgtaacaaggcgtttaactcttaccaggctttgggtggacataaagccagccaccgtaagctttccggtgggaacgacgatcagacgacatcggcgaccgggacagccggtggggttgttaagtcatccggcgggaagtcacacgagtgttccatctgccataaaagcttccctacgggtc

SEQ ID NO: 1053 - DNA, 1104 bp, Gossypium hirsutum
  Clone ID: GOSHI-09MAY01-C4640_1
cccacgcgtccgctaaaacgtagattaaaaaaaaatggcgcacacatgcgttacgacatcaacctcatcgattcaattcagttctctgctttacaacccaaattcaagcaccagtcttgattctcataacttgtcccttccttcccatcctcgtcgtaccaggaaattgaagaagctagttagtaatcaaaataatgtagtaatgggttttcagccaaaggctttttgggatgcagagacaagctctcggaagggaatttggtcaataagggatgatttgcaactgccatcatcgccttacattcctatgaatgcgcaagggcaggggccgcctccaatggtgcaagagcgttttcaaagtgttgttagccaacttttccagcatagaataattcgatgtggtggagctgttgacccccgcgtccctaacattattgtagctcagcttctctatcttgatgctgtggatcctcagaaggacattgtcatgtacgtcaattcccctggagggtcagttacagctggtatggccatatttgacaccatgaggcatatccggcccgatgtctcaactgtgtgtgttggacttgcagctagcatgggagcctttctgctaagtggcggaaccaaaggaaaacggtacagtttgcccaattcacggataatgatacatcagccccttggtggagctcaaggtaggtcaaactgatattgatattcaggcaaatgaaatgctgcatcataaggcaaacttaaacgggtatcttgcttaccataccggccaaagtttggagaagattaaccaggataccgaccgtgatttcttcatgagcgcaaaagaagcaaaagaatatggacttatcgatggtgtcattatgaatcctctcaaagctcttcagccactagctcctactgctgatagtgacgaataggcctccggatcttccttcaggtatttttactatcatttgacatggctaagagataattcgaaatgattgttcggttttctgattgcctcttcgaatactagataatctcgagtcgaattttgatgttaattaaatataccggtatcgaacctcgaaaaacaagttccatgtg

SEQ ID NO: 1054 - DNA, 521 bp, Gossypium hirsutum
  Clone ID: GOSHI-09MAY01-C4670_1
ggctagcacaagtagttttaaaatcagaacaagcaaggatggaaacaatgaaagaaatcgaaaaaatgagggttgaagctgaggctaaaagaggagaaatggacctcaaaagaactgagatcattgccaacactcaattggaaattgctaggctctttgcaggatcaaataaaggagttgattcttcattaaggattggaagaaattgaaaacttatggtgattattagtgaataatctaattaattatatgtgtatgtatagattttgtgtattgacaatgagcaagggcaggtgaaaaattaagggttaactcttaatagactaattaattaattagataaagaaaatggggttggtaaatagccatttctacctcatttctaagctttctcttttagagaaaatgtagtatttgtagaaagaaaaaatatgtacctacacaatcatactaaattgatgtgtagtacaagaacttctaatgtattaagcaaatgaacttctttccataactgtcagata

SEQ ID NO: 1055 - DNA, 952 bp, Gossypium hirsutum
  Clone ID: GOSHI-09MAY01-C4620_4
gagaaacacaagctatcatttcaaaagcaaaagctaaagcaagaagataataaagagaggaattcaaggttgaaggagggtttctctttttctatttctttttctttttaaaatctgtgtggagaaaactgaattaggggaaaatgatgcaaactgagcagcagcctcagcaccaaaatcagttaacggttcaaaactctgggagtctcagctttagcagtcatttgtctaaggaagatgaggagatctcaaagtcggcgctttctactttcagagccaaagaagaggagattgaaaggaagaagatggaggttagagaaaaagttcagcttcagttaggccgtgttgaagaggaaacgaaacgtttggccacgattcgtgaggagcttgaagcactggcagatcctatgaggaaggaagttgctgtggtccgaaagaagattgatgcagttaacaaagaattgaagccactaggccacacctgccagaaaaaggaaagggaatacaaggaagccctgagggcgtttaacgagaagaacaggaaaagtacagctaatacaaaattatggagcttgtgaccaaatgaaaaggtggaggttgaaaacctggaaaacttggtagaacctgatatcctgcctctatatttaagccttaggtgtgtttaactcataggctgtgtgatgtattaagggtacttcatattataatgatggtgttactggttttcggttgggttactgatgatgtatttccgttgtatttcatagcattgatgaacttactgattagaaaggaatgccctataacagttgtactactctgtgatgattgctcttgatttatgctaactttgccttaattaaagttttgaaaaaaaaaaaaaactagggggcgtccattcctttgggggataacactggcgtttacatgatggaacactgtccatatcctg

SEQ ID NO: 1056 - DNA, 861 bp, Gossypium hirsutum
  Clone ID: GOSHI-09MAY01-C4620_3
cggacgcgtgggtttctttttctttttttaaaaaaaaaatatctgtgtgaagaaactggggttagggaagatgatgcagactgagcagcagcctcagcaccaaaatcagttaacggttcaaaactctgggagtctcagcttcagcagtcatttgtccaaggaagatgaggagatctcaaagtctgcgctttctactttcagagccaaagaagaggagattgaaaagaagaagatggaggttagagaaaaagttcagcttcagttaggccgtgttgaagaggaaacgaaacgtttggcctcgattcgtgaggagcttgaagcactggcagatcctgtgaggaaggaagttgctgtggtccgaaagaagattgatgcagttaacaaagaattgaagccactaggccacacctgccagaaaaaggaaagggaatacaaggaagccctcgaggcgtttaacgagaagaacaaggaaaaagtacagctaatcacaaaattaatggagctggtgagcgaaagtgagaggttgaggatgaagaagctggaagagctgagtaagaacgtagattccttgcactaataatataaagcccttaagttgtgttttaactcattaggcttgtgtgatgtatttaaggttacttccatatttataaatggattgtgtttactgttttttcgggtttggtgtactgtatggtgtattttcgtttgtaatttcattagcatttgatgaaccttagctgatttaggaagggaaatgcccctataaacaggtttgtaactaaactcttggcgactgcatttgcttctctgatttttcatgctcaaaaaaaaaaaaaaaaaaaaaaaaaaaaaaaaaaa

SEQ ID NO: 1057 - DNA, 1090 bp, Gossypium hirsutum
  Clone ID: GOSHI-09MAY01-C4620_1
atcttttcaaagcataaaaaaagaaaaagaaacaaaagcaaagagataattaagagaggaattcgaggaagaagaagggttttttttttcaaaaaaaattgctttttttctcttttgtgtgaagaagctggagctatcaaagatgatgcagattgagcagcaacaacagcagccccagcaacaacaaaaccagttaatggttcaaaactctgggagtttaagctttagcagtcacttgtctaaagaagatgaagagatctctaaatcagctctttctacttttagagctaaagaagaagagattgaaaggaagaagatggaagttagagaaaaagttcagcttcagttaggtcgtgttgaagaagaaactaaacgtctggctgtgattcgtgaggagcttgaagcacttgcagatcctatgaggaaggaagttgctcaggtgaggaagaagattgatgcagttaacaaagaattgaagccgttagggaacacttgccagaaaaaggaaagggagtacaaggaagcccttgatgcattcaatgaaaagaacaaggaaaaagtacaactaatcacaaagttaatggagctggtgagtgaaagggaaaagttaaggatgaagaagctggaggagctgagtaagaacatagattccatacactgatcatataaggaaagagaagcccctttagctttggttttaactgattaggcttgtgtgtgatgtatttaaggtgactttgaatatttatatatgggtgtgttgtaatggtaatctttgtttgtttttagttagcattcgatgaatgctcaactgatttagaaaaagggaaataccctataaaaacaaaacaggtttgtaactaaaatgcactcttacatttctcatgttcaactattgtatctctttgttttagtttcttttcaagttttatgtaactcgaacttgcatactgtaattagtctacaatacacccttcagtagttccttggaaaaaaaaaaataaattaaattttatataataatttattaatattttaaaaatataatattattttttttattttaattttataaaataattaaataaaa

SEQ ID NO: 1058 - DNA, 651 bp, Gossypium hirsutum
  Clone ID: LIB3582-061-P1-K1-C9
caaaccaagtttagggggttaaccaacaggctatcattgtttataagcacttctcaacaggagaacaaaagaagagagagagaaacacaagctatcatttcaaaagcaaaagctaaagcaagaagataataaagagaggaattcaaggttgcaggagggtttctctttttctttttctttttttaaaaaaaaaaatctgtgtgaagaaactggagttagggaagatgatgcagactgagcagcagcctcagcaccaaaatcagttaacggttcaaaactctgggagtctcagctttagcagtcatttgtctaaggaagatgaggagatctcaaagtctgcgctttctactttcagagccaaagaagaggagattgaaaagaagaagatggaggttagagaaaaagttcagcttcagttaggccgtgttgaagaggaaacgaaacgtttggcctcgattcgtgaggagcttgaagcactggcagatcctatgaggaaggaagttgctgtggtccgaaagaagatgatgcagttaacaaagaattgaagccactaggccacacctgccagaaaaggtaaaattttgccatactttgaggccatttgaacctttttccgttaattgtgattgtattcatattatcaaacctttg

SEQ ID NO: 1059 - DNA, 421 bp, Gossypium hirsutum
  Clone ID: LIB3148-036-Q1-K1-G6
ggagatctcaaagtcggcgctttctactttcagagccaaagaagaggagattgaaaggaagaagatggaggttagagaaaaagttcagcttcagttaggccgtgttgaagaggaaacgaaacgtttggccacgattcgtgaggagcttgaagcactggcagatcctatgaggaagaatccttgtgcccattgctgtgccatcttttctgaggcgaaggttttgcagttgcgttttggttaagactctcctctgatttgatcagtctgtgattttttttaaaaggaaaagaaaaaaaagagtttacaatggttttgaggaggaaggtacgatgatggaacgaatttggatatgaatggtagggaagggttagatgtttacgtaaaagaagagcttgaaagataagcaaatgccctttttttg

SEQ ID NO: 1060 - DNA, 564 bp, Gossypium hirsutum
  unsure (1)..(564): unsure at all n locations
  Clone ID: LIB3829-035-Q1-N6-H11
gttggtttttttttttagaaccaactcccaattacatataaaacttttaaaaaaatataaagtacaaaagattgagcatngaaaaatcagagaagcaaatgcagtcaccaagagcttagttacaaacctgtttataggggcattntcccttntctaaatcagcgtaagggtgtcatcaaatgcgtaatgagaattaccaaacgagaaatactatgcatacagtgacacnncaaacccgaaaaaacagtaaacacaatccatttataaatatggaagtaaccttaaatacatcacacaagcctaatgagttaaaacacaacttaagggctttatattattagtgcaaggaatctatgttcttactcagctcttccagcttcttcatcctcaacctctcactttcgctcaccagctccattaattttgtgattagctgtactttttccttgttcttctcgttaaacgcctccagggcttccttgtattccctttcctttttctggcaggtgtggcctagtggcttcaattctttgttaactgcatcaatcttctttcggaccacag

SEQ ID NO: 1061 - DNA, 433 bp, Gossypium hirsutum
  unsure (1)..(433): unsure at all n locations
  Clone ID: LIB3584-031-P1-K1-D10
cccacgcgtccgcaaaaaaaaaagaaaaagaaacaaaagcaaagagataattaatagaggaatggcgggaagaataacggttttttttttcaaaaaaaattgctttttttctcttttgtgtgaagaagctggagctatcaaagatgatgcagattgagcagcatcaacagctgccccagcatcatcaaaaccagttaatgtttcaaaactctcggagtttaagctttagcggtcactgctctaaagaccatgaatacatctctcaatcatctttttctccttttaaacctaacaaaaaagataattatcggagaaatatctgcgtttgagaaaaagttcagcttcagttaggtcgtgtcgaagaagaaactaaacgtctggctgtnatccgttaggagcttgaagcacttgcctatcctattaggaaggaaat

SEQ ID NO: 1062 - DNA, 362 bp, Gossypium hirsutum
  Clone ID: uC-gsronu33B104h05b1
ttcaaaagcaaaagctaaagcaagaagataataaagagaggaattcaaggttgaaggagggtttctctttttctatttctttttctttttaaaatctgtgtggagaaactggagttagggaagatgatgcagactgagcagcagcctcagcaccaaaatcagttaacggttcaaaactctgggagtctcagctttagcagtcatttgtctaaggaagatgaggagatctcaaattcggcgctttctactttcagagccaaagaagaggagattgccaggaagaagatggaggttagagaaaacgttcgcttgggctgggccattgggcacattacactctcgtatacactcacacattattg

SEQ ID NO: 1063 - DNA, 683 bp, Gossypium hirsutum
  Clone ID: GOSHI-09MAY01-C4180_1
cccacgcgtacggctaactcaaaggacaacacactaaagtagaacagagagagaaactgaacagaagaagggaaaaaggatttcaagattttgtcagatcaagctagaaaaaaaaaaccttgtaatggggagggaactcagaggtgttcaagtggacaataagccaaacggcttagtgaaatcaaatggtgcggtgaataagaagtcaagtcccccagcattgaaatcccctggtgctggaaatactcaagcacacctcactttctccaaaactgctgcaaatggcatcgcaaatggtgactctccacctttccctatcaaggattctgagacgaactctccaaagactcctttgatatcaagaaagcatactgatgaagaagataattggtctgtcgcttcctctactgctgcatctgtacgaactgctagatcgagggtaactattgggactgctccaacttttagaagtgctgaacgagctgagaaacggagggagtttcaccaaaagttggaggaaaaacaccaagctctggaggccgagagaagccagtatgaggccaggctcagggaagagcaagaggcggccattaagcagcttcgaaagggcctgtttgtcaaagcaaacccggtacctagtttctactaaaggacctcaccaaaggtgactgaaaactgcatga

SEQ ID NO: 1064 - DNA, 401 bp, Gossypium hirsutum
  Clone ID: LIB3166-014-P1-K1-H10
cccacgcgtccgaagacatctactgatgagttttcttatatacatgtacgaactgcgagagggagggtaactattgggacggctccaacttttagaagtgctgaacgagctgagaaacggagggagtttcaccaaaagttagaggaaaaacaccaagctctggaggccgagagaagccagtatgaggccaggctcagtgaagagcaagaggcggccattaagcaacttcgaaagggcctgtttgtcaaagcaaacccggtacctagtttctactatgaaggacctccaccaaaggttgaactgaagaagctgccattgactcggccaaagtcaccaaatcttacccggagaaagagttgtagtgacgtagtccactcaaccgaggatgaaaaggcaaaaag

SEQ ID NO: 1065 - DNA, 638 bp, Gossypium hirsutum
  Clone ID: GOSHI-09MAY01-C4170_1
cccaacaccacctacagcgaaaatttaaccccttcatgaaccagtttatttctatgaaaccaaatactccacatggaaatcgcaatgattcgtttttgttggtcatctgctgcagaaaatgttctaacaaagcgaagcttgtgacacatcgactcttcaaaggatggaatctttacttgcagcgaagcccacacccactacagaataccacaagaccataacaggtgatcagaatcctccagctctgccttacacagtggacaagatacttccatacacaaagtcctacgcgccaaattaccaaagtgaggcaccaaattattcaccggtctccaaatatgtattttaatttttcctggaatgttcaacgaccataaggctttgtaaaaatctttgtaatcctcattaatagaggacatgtatatagtgtcctgtaagtattctctatttaggactcgatacccactcttaactgtgtagtccccaaaaccttcatgtttccaaaccaacctatcctccggaccacttccagatatgggaatagagagaattcgatcagctgtactctcatcaactaagttatgaaccagctcctattccaggtaacaggattcgtcgatgttatggatacccttcca

SEQ ID NO: 1066 - DNA, 347 bp, Gossypium hirsutum
  unsure (1)..(347): unsure at all n locations
  Clone ID: LIB3145-047-Q1-K1-A1
cccacgcgtccggccaaattatcaaagtgttgcaccagattattcaccagtctccaaatgtgtattttaattttccctagaatgttcaacgaccataagactctgtaaaaatctttgtaatcctcatcaatagaggacatgtatatagtgtcctgtaaatattttgtatttaggacccgatacccactcttaacagtgtattccccagaacctttatgttttcaaaccaacctatcctccagaccactttcagatatgggaatagaaaaaattcgatcagctgtacttctcaatnaaaaaaataaaaatttaaaaaattatataatttattttttttttttaattat

SEQ ID NO: 1067 - DNA, 732 bp, Gossypium hirsutum
  Clone ID: GOSHI-09MAY01-C4100_1
ggaaatggtgtttcgaaggatatacttgctcagtggagcaaccagggtggaaggggtagccctgatccagaaacttctatgatcctagtgcagcatgaaggtgggccctgtggtgtcttagcagacatacaagcatttgttctcaaacatcttatgttctgtccggatgacttgcataaagctgcccaaagtacacctcagaattcaactcccaggagattatccaaaaatcaatatgttgcttcaaataattttgctgcttttactgaaaatgcaaaagcaagagccttagttaaaagtatgggtgagatattgtgtttatgtggaaataataaaagagctgtgattgcaactttgagttctattggtgatggtgttgaagaatctgtagacagtctaaccgatgttatcattgcacaagcactccaaggtctttcaattgaatcggcttctgattcgcataaagttttaagagttgagacatacacaaccccagcaagtgcctataagaagcttgaagcaattattcctgtgtttcaagtcgcatgggagcattgcttttccttatctctgccttactttctcgaagattggactgtgttcaactgacgggatgatcccagccttcctctattaactgcaccttttgggcatgcttctcaggaaattgttgaactattgctctgtgggcaagctgttccgaatgtattgacggaaggatggattagaggt

SEQ ID NO: 1068 - DNA, 441 bp, Gossypium hirsutum
  Clone ID: GOSHI-09MAY01-C4130_4
gatgtctctaattctcttgtttacaaaagatcaccttcaattcgtagacatcccttttcaccagttttgaatcttcaaaacatcccgaaaagaaccaacgttttggtctcaaagccattgcatatctcatctgttgagtgtattggtaaggagaaaaaaccagtaattcaatgcaacgcttatgaagctgacaagtcagagcctattgaggcagcagagcaagtgaaatcagaagctgcaaaaagggtgaaaattgggatttattttgcaacttggtgggggttgaacgtggttttcaatatttataacaagaaggttttgaatgcttacccttacccttggttgacttcaacaattgtcccttgcttggggttctttaatgatgttaatttcatgggctacaaagattgcttggaccccaaaaacagattttgaggtttg

SEQ ID NO: 1069 - DNA, 1674 bp, Gossypium hirsutum
  Clone ID: GOSHI-09MAY01-C4130_2
gcaaaacactcagcaaatagatatttcctttaaaggaaaaaaaattcaactttttttggtttaaaataaaaataaaaataaaaatcgtggattactaggttttttcgtaattgacggtaaccttgtttcaaagttttaaaatttatttgtcttttcttgatcttgtcaagtttttaaagaaattctcagtttttttctattggttcacgcacaaaagaaaaaaaaatttgattcaagaaatacccaatttgtgttttgatttgagtagtttgaaaggaaaatgagttttagctttaagcaatcaggtttagctacatgcatgaatgttacaaattctgggtttcataaaagattaatttcaacaatttgtagcagatcttcgttttcaccatgtttgaaccttcaaaatccggaaagaagaaatctttcagtgtcaaaaccattgcatatttcatcgattgagaaaattaatgagaaaaaaccagtgtttgaatgcaaggcttttgaagctgacaagtcacaacctattgaagttgaagtgaaatcagaagctgcaaaaaggttgaaaattgggatttattttgcaacttggtgggctttgaatgtggttttcaatatatataacaagaaggttttgaatgcttacccttacccatggttgacttcaactttgtcccttgcttgtggttctttgatgatgttaatttcatgggctacaaggattgctgagaccccaaaaacagattttgagttttggaagactttgtttccggttgctgtggcacataccattggacatgtagcagcaactgtgagtatgtctaaggttgcagtttcattcacccacatcatcaagagtggtgaaccggctttcagtgtcttggtttctaggctcttgcttggagagagcttccctcctgcggtttacctctcccttgttcccatcattggtggttgcgctcttgctgccgtaactgaactcaactttaatatgaccggttttatgggagctatgatatcgaacttggcatttgtcttccgtaacatattctcgaagaagggcatgaaggggaaatccgttagtgggatgaactactacgcctgtctatctttgttgtctcttgtaattctcacacctttcgcaattgctgtagagggaccgcagatgtgggctgcaggatgggaaaaggccttatcccaaattggaccacagtttatctggtgggtagcggcccaaagtattttctatcatctctacaaccaggtctcatacatgtcccttgatgagatatctcccttgacatttagcgttggcaacaccatgaaacgtatatcagttatagtctcttccatcatcatcttccacacgcctgtccagccaatcaatgctctaggagctgccatcgctatcctcggaaccttcttgtattctcaggcaaaagcgtgagaaaaaccaggggttcgagaattttgattcatcatacaacatagatgatgaaagacaaaatcggtctccgaaagaatttagcttagatgagttcttatagattactactgtcttttagaattgatgaatgctgggttgggggctgataaagtctgtcatagtgtagatattttacaataatgatgattataaacaatgtcatataggaatggtattttttctcttca

SEQ ID NO: 1070 - DNA, 955 bp, Gossypium hirsutum
  Clone ID: GOSHI-09MAY01-C4130_1
tcccgcgcggccgtttggcgtaaagttgggttgtggactgagatttgagggtatttttttcaactttttaccgcttatagtctttattggcctctatacctttctttctgtttgattttttgtttgtagttttgaatttttttcctcaaagtattatcttgatagtgattcaccaaataccagaaacatgagttttagtctaaagcaatccgctttagctgcatgcagtgatgtttcaaattcagttctccagcgaagatcactttcttgcagatcttcaattttacctcctttggttttccaaaacaattcgaaaagaacaaatctttcactgtcaaagcctttgcatgtttccgctgttgagattattgggaaggataaagaacccgtgatcaagtgcagggcttatgaagctgataagtcccagcctattcaggctgcagctcaggaagtgaaatcagaagctgcaaaaagggtgaaaattgggatttattttgcaacttggtgggctttaaatgttgttttcaatatttataacaagaaggttttgaatgcttacccttacccttggttgacttcaactttgtcccttgcctgtggttctttgatgatgttgatttcatgggctacaaggattgctgaggcgcctaaaacagattttgagttttggaagactttgtttccggttgctgtggcacataccattggacatgtagcagcaactgtgagtatgtctaaggttgcagtttcgttcactcacataatcaagagtgctgagcacagctttcagtgtcctggtttctagcctcttgcttggagagagctttcctcctgcggtttacctctcccttgttcccataattggaggttgcgctcttgctgccttacctgaatctaattttatcttgtaccgatttttgggatgttttttttaaatcttttatttcattttttt

SEQ ID NO: 1071 - DNA, 652 bp, Gossypium hirsutum
  Clone ID: LIB3543-064-Q6-K6-D7
ccccgcgtccgccagttttgaagggtggggacatgccctgaaagaaaccaacgttttggtctcaaagccattgcatatctcatctgttgagtgtattggtaaggagaaaaaaccaataattcaatgcaacgcttatgaagctgacaagtcagagcctattgaggcagcagagcaagtgagagggagaagctgcaaaagggtgaaaattgggatttattttgcaacatggtgggggttgaacgtggttttcaatatttataacaagaaggttttgaatgcttacccttacccttggttgacttcaacattgtcccttgcttgtggttctttaatgatgttaatttcatgggctacaaggattgctgagaccccaaaaacagattttgagttttggaagactttgttcccggttgctgtggcacatacaattggacatgtagcagcaactgtgagtatgtctaaggttgcagtttcattcacccacatcatcaagagtggtgaacctgctttcagtgtcttggtttcaaggttcttgcttggagagaacttccctttatcggtttacttgtctcttatcccaatcattggcggatgtgctctttccgctttaaccgaactcaacttcaatatgactggttttatgggagctatg

SEQ ID NO: 1072 - DNA, 403 bp, Gossypium hirsutum
  Clone ID: LIB3166-002-Q1-K1-E2
cggacgcgtgggcggacgcgtgggcggacgcgtgggcggacgcgtgggtttttttctcaaaggattcatcctgatcctgattcaccaaataccagaaacatgagttttagtctaaagcaatccgctttagctgcatgcaatgatgtttcaaattcagttcttcagcgaagatcactttcttgcagatcttcaattttacctcctttggttttccaaaacaattcgaaaagaacaaatctttcactgtcaaagcctttgcatgtttccgctgttgagattattgggaaggataaagaacccgtgatcaagtgcagggcttatgaagctgataagtcccagcctattgaggctgcagctgaggaagtgaaatcagaagctgcaaaaagggtgaaaatggggattt

SEQ ID NO: 1073 - DNA, 356 bp, Gossypium hirsutum
  Clone ID: LIB3146-022-Q1-K1-A4
cccacgcgtccgcccttgatgagatctctcccttgacatttagcgtcgggaacaccatggagcgtatatctgttatagtctcctcaatcatcatcttccacacgccggtccagcccatcaatgctctcggagctgcaatcgccatcctcggaaccttcttgtattcccaggcaaaagcgtgaggaaaatcggggttttgagagtttagattcatcatgtaccatagatgatgaaaaaaagagcaaatatcatctggaagaagttacctcagatgagatcatgttttaatgacttttgtctttagtattggattgatgctggattatcgtcatagtgtagatatatataataatgat

SEQ ID NO: 1074 - DNA, 298 bp, Gossypium hirsutum
  Clone ID: GOSHI-09MAY01-C4090_1
gaagatggtaccggagaactgaaagtgatgatgatcatgatagggataaaagaagccgaggtgataggaagagatagaatgatgcatgatatatgctttattttcgctagtaaacgcagcaaatcaagtaggcttagcatctgtttttttgataaaacgaccagtcaattaccatattcatatgaatcaactaaaaccttaagcttgattaccaattacgaccttttccaaggtgttgtgttgtatctccatgagttacttttgatttttttttaactacactgagtctttcggtttt

SEQ ID NO: 1075 - DNA, 716 bp, Gossypium hirsutum
  Clone ID: GOSHI-09MAY01-C4030_1
cccacgcgtccgctttagctctctctactctcttcaacgccttattttctccttatataaactctaaaatctagttcccttgtattaaaccatcaattagatttcttttttctcattgctttcccccccttaatttccattgacagctataagctagaattctttgcttaatgcagaaacaatgaagcagtaaagatagttaagatttttctctttcagatctcttcagttttggattttctgatttcaggtgtggaattttgaagttttgactagcaaggaagggaatactgagtgatcatggcgttagggaaatatagtagagtagataataataataataataataggaagtcgtcttcgagttattgttccactgtcactattgtggttttcgtgggattatgtttagttgggatttggatgttgacgtcgtcctcggttgtccctgttcaaaccgggaacggatcggctgaggaaaagaaaaatcaggttgaagatcaggttacaccggtaaccagtgataacaatgacagcagtaacacctcagactttgaagataaccgcgggatttacctgatgatgccaccaaaggggacgcgaacgtgagtttagctgaaaatgatggtaaagggtacttgaatacacaagaaaatcaggataatactgaagagactaaaatggctgagtccaagaagcatgatgagcagtcagct

SEQ ID NO: 1076 - DNA, 636 bp, Gossypium hirsutum
  Clone ID: GOSHI-09MAY01-C4390_1
gcgttttggaagtcacattggatatatttatattatcctcacccactacaaaagaagaagagaaagaaaaagaaatgaagtctataatcgctactttgttgtttgtttccctagttttgtgttcatcatttattcaactctcctttgcctcacctgctgctgctccttcacctgctcctccaagttactgtgatgggaagtgcggggagaggtgtgccaaggctggaatgaaagatcggtgcttgaagtattgtgggatatgctgccaagaatgtaagtgtgttccttcagggacctatgggaacaagtcagaatgcccttgctatcgagacaagaagaactccaaacaccagcccaagtgcccttgaacttcaaactcttctccatcttttaaccttcatatatatatagatatatacgcatgtacgatttagctatttagcctccaactcttcatcgtcttaggcttcttcttattataattctcttgccattacactatcacttctgttctgtttatgatgtactgcttctgccacattttatctgccttctccgacctcataaggaaggaatattataggaataataaaatcattaatctactataatgaaaaaaaaaaaaattattcctct

SEQ ID NO: 1077 - DNA, 1492 bp, Gossypium hirsutum
  Clone ID: GOSHI-09MAY01-C4380_1
ttttacgcgtacgaaaatgggcagaatattttcgcttgcataaggatctctttgtattctggtctgctaaagctgctactgctgaattagaaggaaaactgcttactgaccattggaagatggaaaataatatgcgaaagagtgatgatcctgaaacaaaaatacatggtagagatgagctcttggctcgtttgcagtacgaggcagaggaaatagtcaaaatgaggaaatcaggctctgatacctccacgtcatccaatattcattctcctagaaacaatgctgaaggaacttcagcaccaaaaagtgtgatggtgggatttgtggcgtatcctaatgttgggaaaagctcaactataaatgctttggttgggcagaaacgtacaggtgtcacctccactccggggaagacaaagcatttccagacgttaataatttctgatgagctgactctatgtgattgtcctggattggtgtttccatccttctctagctcaagatatgagatgatttgcttcgggggtgttgccaattgacaggatgacggagcacagggaggctgtgcatgttgttgctaatagggtccaaaggcatgttatcgaggatgtatacaagattaaattacccaaacccaagccatatgaatcacagtcacggccacctcaggcctcagagtttctgagagcttattgtgcttcgcgtgggtatgttgcctctagtgggctacctgatgaaactagggcaggtcgccaaattttaaaggatttcattgatggaaagctgcctcactacgaaatgccacctggtatgtctgctgaagatggggaggaagatgatgggaacccgagcctgtctgaagttctcaagtcagatgcatctgatgttgaagattctttggaaaatggaactgaaactacacctgtgttcgagcatgtactagatgatcttagctcctttgaccttgccaatggacttgtttccaagaaggcaacagttaagaagtcgaatgaatcccgtaagcaccacaaaaagccccagcggaagaaggatcggtcatggagagttgggaatgatgatgaggacggaatgccagtaacccgagtcttccagaagccagtgaattcgggtcctcttaatgtttaatgaagcatcaactgaagaagtactaggataaaccagtcctcctttctcatgccttcttttaccatggatccccaatcaaatggagtttattagttggctgctggtttgtataccctcgtctccacgacgatgaatgaaaggaagaaaggtgaatatatacaggcatgcatatggctgcaatgctgctgtagttttttttgctttacaatatacatccatccccctatgggattttaacataagaaagtggtatgttggtgtatatcttatttttgctttgttttgtaattttcttattttaatgttgaatatcataatatgttgatcgaaatcttcttttgtctttgag

SEQ ID NO: 1078 - DNA, 686 bp, Gossypium hirsutum
  Clone ID: GOSHI-09MAY01-C4260_1
cccacgcgtccggattgtaataaaacatagtataaagtagtggaaaaaaacagagaacatgatgcataagaaagtatataaaatatattattgaggattaggtagatagaaatgccatcaagaagtatgctgcttgtgttgatcatttgtgatttgaacttatttttaatgatatggcgcagactgaaagatctttgctatatgaggtaaataccacttcttagcactagttaacgttgtatacatttgattaattagcttttaaaatatatctgtataaagtattcgaattttgttactaatttaaataattgttcatgtttatatttggaaaagaaattcgttgtccaatggacgcatggaatttagttttctaaattttaaaatataaataatgtataaatagttaaaaatataaatttatttgaataaattgaaattaaattgaaataaccaataaaatggtcaaattatagttttctccctctatcatgctaaaatttaatatttaatccttatactttgatttgacataatttaatttaattgttatttgttagttcaatcagttagtattgttgactctatcaaaatgctgatttgaatttattattagaattatatatttaaaaatataaattttagcattttaaccataatagttaatattgttaattgactattga

SEQ ID NO: 1079 - DNA, 663 bp, Gossypium hirsutum
  Clone ID: GOSHI-09MAY01-C4200_1
ctgacccttcaaatttctgcagctcctgatcctttttcaaattctcatcctctgagagttgatattcagatgggtattttctcaattggtcctttgttcgggcgctattggtattcaagaaatgaaacaactgcaggagagacaccttaccgcagtaaagctgagtacacagaaaagcagctccttttgaatgtatcagctcaactaaccattattggaaaagattatagcaatttttctgttctttttctggagggtctttatgatccgcattttggaaggatgtatcttgttggctgcagggatgttcgagcttcatggaagatcttatctcagaccattgatctagaatcagggttggattgcttgatcgaagtcatagtgtcttacccaccaactactgcacggtggttgttcaacccaactgcaagaatctccatatctagtcagagacctgaagatgacccactatattttggaatgattaagcttcagactcttccaattatgtacaggaagcagagggaagatattctctctaggcgggtattgagggaatcctctgtgttttgactctttcatttgcagttgcttgcatatctagtcagctgttttacctcaatcaggatgttggatcctctccttttatttcctttgttatgc

SEQ ID NO: 1080 - DNA, 908 bp, Gossypium hirsutum
  Clone ID: GOSHI-09MAY01-C4220_1
cccacgcgtccgcccacgcgtccgcccacgtttccaaaaaaacttaaaattctctctgaaatgagaggagagagagagagagcttggctccggtctccgtcgagccgagcctcggtcctcggcttcacgcgcccatgcgccgtcaccgactcctccccgttcggtggccgaagacccgaaacctcgatttttctacgcaaataaagggttcgacctttttcttttcattatttacagtatataagtacatatatgtaaaatattttacctttgtgtatctcaattaactgtagtatcctactttgtgtacgtatgtaaaaataagatttttattgcatctatgtatgtatttcagaaacctcaaaatcatccctttacatcctctcaatttgggctttttatagccactgaaaaagaaaaagaaagaatctttacaatctttggtttatttcttgccatatttgttctgtttctgtcgttttctttctatttttgcaggtatttgcgagaaatccagcggtggcgaaggcttcgatgatggcggtgacggtcccggccttgactgcattgatggcctcgattcggggaactagacagacactccccaaagcttccagaatcctttacggcgcgaggaaaaaaaagagaattaggaagaaaccctaaggtttgatgtgtgtttggggctcattgggcctgttaagaatttgggccatgactgtattggtgtattgggtcactgtaacgtgctatggggttattgggtttgatttaggctaacgggatgttgggttattttttttggggtgtatttgggttgttgggtagtaacagtgggcctgctgggtagggtcttgtaattggactttttaaatggacattttaaataaataaatacttatttattt

SEQ ID NO: 1081 - DNA, 561 bp, Gossypium hirsutum
  Clone ID: GOSHI-09MAY01-C5970_3
aagagaccccgtggctgaaacctcctattccttccgactagcaatatatttctttgcccgggtgccaacacattgggagggcggttgctaacaaggccctggcgagctcacgttcttaacatgcttaatgaatgttgctggctcgcttgtgagagtatttaccagcctccaggaaaaagcaccaacaatggttcttttgggctctgtacttgggattgcaacaaatggcgcagtcctgagtcaaattattctctattggaattcacaagtgccgaaggagaagaaagcagagtaaattgataccatgtcagagtcagaagtaggaggaggttaagattggtgcagttggtgatcatcggatgtatgtattaccaagcaaatatcatcaacttatagttgacactatgaattggcaaatcttgtagatgattcattttagatattcgtaaatgggattcttctgcttttatgtgctttctttaggagttgatatgaatcacgctgcatttgcctgttggttagtattattttcattttatgttgaatatttgatatcatcta

SEQ ID NO: 1082 - DNA, 742 bp, Gossypium hirsutum
  Clone ID: GOSHI-09MAY01-C5970_2
gaaggagagaagcaaaaacaaaaagaaatggattacctaggaatcgatcttagctgcgccattggatctctttaagatggcaatttccctcccaaggactgttggttgcctctcatctccaagctcctcggctacgccatcgtcgccgcttccaccaccgtcaaactccctcagatattgaaaattgtgaaccataaaagtgttagagggcttagtcttatagcctttgagcttgaagtagttggttagaccattgctttagcgtattgccttcacaacggactacccttttcagcttatggggaattggtatttcttttgatccaagccctaatcttagttgctgttatttactactattcaaaacccgtgggcatcacgacctggatcagggcactgctatattgtgctgtagcaccaacaatcttagctggccaaattgatcctattctttttgaagctctatatgcatcccagcatgcaatatttttctttgccagggtgccacaaatttggaagaacttttctaacaaaagcactggggagctcactttcttatcatgcttaatgaatgttgctggctcgcttgtgagagtatttaccagcctccaggaaaaagcaccaacaatgggtatcctttttctattgtactcgcatattcttgaaagatttttatacacttaattaaaacattttcatgatttattgtttcttctaaaaaaaacaattaattttttttttt

SEQ ID NO: 1083 - DNA, 992 bp, Gossypium hirsutum
  Clone ID: GOSHI-09MAY01-C5970_1
gccggaaaaagcatagcgaaggagagaagcaaaaacaaaaagaaatggattacctaggaatcgatcttagctgcgccattggatctctaaaagatggcaatttccctcccaaggactgtttgttgcctctcatctccaagctcctcggctacgccatcgtcgccgcttccaccaccgtcaaactccctcagatattgaaaattgtgaaccataaaagtgttagagggcttagtcttatagcctttgagcttgaagtagttggttataccattgctttagcgtattgccttcacaacggactacccttttcagcttatggggaattggtatttctttccccccgtccccccttccttggggcgggggtgtactactattcaaaacccgtgggcatcacgacctgggtcagggcactgctatattgtgctgtagcaccaacaatcttagctggccaaattgatcctgttctttttgaagctctatatgcatcccagcatgcaatatttttctttgccagggtgccacaaatttggaagaacttttctaacaaaagcactggggagctcagtttcttaacatgcttaatgaatgttgctggctcgcttgtgagagtatttaccagcctccaggaaaaagcaccagcaatggttcttttgggctctgtacttggtattgcaacaaatggcgcagtcctgagtcaaattattctgtattggaattcacaagtcccgaaggagaagaaagcagagtaaattgatatcatgtcagggtcagaagtaggaggaggttaagattggtgcagtcggtgatcatcggattatcatcaacttatagttgacactatgaattggcaaatcttgtagatgattcattttagatattagtaaatgggattgttctacttttatgtgctttctttagtagttgacatgaatcatgctgcatttgcctgttggttagtattattttcattttatgttgaatatttggta

SEQ ID NO: 1084 - DNA, 1251 bp, Gossypium hirsutum
  Clone ID: GOSHI-09MAY01-C5820_1
ccccaaacaaattcaacacacccaccatttctctctcccttatcttccatacgatggctgcccccaaaatttccctcactctcctctgtttcacttcattgctaccatttttcacttcggtgaacgcaaggatccccggcgttttctctaccggctcttgggaaactgcccacgccaccttttacggtggcagtgatgcttctggcacaatgggtggtgcatgtgggtacggaaacctgtacagccaaggctacggtgtcaacacggcggctttgagcactgcgcttttcaacaatggccttagttgtggtgcttgttttgagatcaaatgtgctagtgacccaaggtggtgtcaccctggtagcccttctattttcgtcactgccactaacttttgccctcctaactttgctcttcgaagtgacaatggcggttggtgtaaccctccccgtcctcattttgatcttgccatgcctatgttccttaaaatcgctgagtaccgtgctggtattgtcccagtctcctttcgtagagtgccgtgccgaaagcacgggggaataagattcacggtcaacggattccgttacttcaacttggttttaatcaccaacgtagccggtgcaggagacctcgtgaaggttagtatcaaaggaaccaaaaccggttggatgagcatgagccgtaactggggccaaaactggcaatcaaacgccgtgctgatcggtcaggcactctcttttagagtcaccggcagtgacaaacgcacttccacttcatggaatgtggcaccacctaattggcagttcggccaaaccttcaccggcaagaatttccgtatttgaaaaaaaaaaaaacacaagacaagccgtttgaaatcaaacttttttgttcttggtttcccgccttcaattttcctttattttcccggaaaatctgaagtggggtaaaagaaagtgttattattaggatttagggaaaggaaacctaaaagcttaggttataagtttgtaaactatgtgtgtggcgttaacttttttttactgttgtttttatttgtgaatgagctggtggtaatagtaaaaaaaaattccagcgaatggtaaaaaggtaaaggtgtagtagtgtttagggctgaagtggctgcagattaaagaaagcatgtggtagcccgcagctcttttattcatgtttttcattcatagtaatatcgacactacttttattatataaatgtatttgctcatttcattt

SEQ ID NO: 1085 - DNA, 770 bp, Gossypium hirsutum
  Clone ID: GOSHI-09MAY01-C5590_1
taaacccaacttttgtgcgtcgctcgtctctctctttgtttcaacctgtgaaaatcagtttgctttcaacagattttgtgttttgcctagagcattgagctgttcaaagggtgtttcattggtggtgggcttattttcattgttgatccctgcccgggcatttacttcaagcaaggtcccaaatgggtcagttgtgactaagactattggtaacattaaccatcgtggtaaaatctatcctataactcgagggtttgatcgtcggagactgagaaatacaggtcttttgatggcgaagttgaggtttccaaacgaacgtttgggaaacatatatgaaaaaactggtggtttcggtgtcactcgaggatcttccttgatatgcttgtcctcaagaactcaaaagtctgaaaccgattgctcggatgcatctagtgcacagattgccgaaggcgaagtcggtcattcaagcatgcatgggagaaccatacattcaagtcccggcttggctgaagcttgtagattcgcttgtaatgatgcaaagtttgtaaatgaaagggctcgtaacgacattgttttgctttctcgtggaataatgaggttggatgctcgtgctcgtcaggatgtcgctattctcgggtcaggatttcttaaactcgatgctagggcaagagaagatacagaaaaaatcgaccgaggtgtgaagaaaaaggccgaacgtcttcaccatattgccactatcttaaaagccaaggccgaatctagattgaaaa

SEQ ID NO: 1086 - DNA, 1407 bp, Gossypium hirsutum
  Clone ID: GOSHI-09MAY01-C5550_1
cccacgcgtccgcccacatttgatcaaatttctgcgaaaaataaagctatatatataaaaagcagctattgaaagaagtggagctgatgggttcgtctttcggtgaagcttttccagcaatgcaggaaactttgctggagtttcgtgctggtaaaatgatgttggaaggaaaaagggttgtccctgatacacgtaaagggctcattcgcatagctaggggtgaggagggactggttcattttcagtggcttgatcggactcaaaatgttattgaagatgatcagattattttccccgatgaggctgtttttgagaaggttaatcaagcatcaggcagggtttacatattaaagttcaataccgacgaccggaagttctttttctggatgcaggagccgaaagctgaagatgactcacaattatgttgcgcggtcaataatttcatcaatcaaccattagaacttggtgtagatgagcctgatgcttctgagcctttgcaagcgtctgaagacatggttgaagatgatatttcatcaagagctggaaacttgactcttacaaacttaggtgctgaagcgattagtgatgtaacctcttcatcagggccagttaaattggaagacttgcaaagaatactgagcagtattggtccagcagaggtagctggtgagccagatggaggcttggggttggatgatattttgaagccagatttgataatgccattaattgagacattgtcgttggaagagcgattagcttcatatttaccagagggtcaatggacacctgaggatttgttagagttgctgcagagtcctcctttccgtcaacaagtagattcatttacctatgtacttcgaaccggacagatagatttgtctcagttcggtattgatccaagtaaatataagttcactgttttatctttccttgaggcacttgaagattctgtttccaaaacttctggagaaacacaagatgaaaaagatgtaagacctcaatcctgtaatcgtaatgaccccatggatgagagcaagtgacagataatttcatctgctaccgttcccatcactctcgtttatcataggagagaatagttcatccctgttttaatttattcttcttggttgggtgggtgttctggaaaaaaaaaaggcagaaaaaagaaagcaatgaagaatggaaatggtttttattgtggttcaaagttttaagctattgtataatacaacccaaaaaacaaaaacaaaaaaggaagaaaaaattgtgttgaagattaagtggataattttttggtttttttaggaccatttttaataccttttgaacatacacggaaagcattgaattggtgaaaacatataaaggtcaagtgtatgttttgttggaaaaaaaaaaaaaaaa

SEQ ID NO: 1087 - DNA, 714 bp, Gossypium hirsutum
  Clone ID: GOSHI-09MAY01-C5480_1
aaaataaagaagccccaagagaaaagaaaaaggaggtgtgtggaatcttcaaagaagaccaggaggaagaatccttcccttttttcttttttttccccagaaagagcgattcctttcccttcccttctagttcctcgtttactttttcttcttctttcccttctgattataataagatttgggtttcgttatcctctgaaactctcgtctctggtttgaaaggagattgaaaaaatatggctgaagaacatagatgtcaagcaccacagttatgtgccaacaactgtggatttttcggaagcccgacgactcaaaatctctgctctaaatgttatcgcgatcttcaacttaaagaacaacaatcttcctctgccaaacaagcctttaatcacactttcgttccttcgtcgtcttcattgccatcgtcatcatcggcccgatcttcgttttcggcatccttgccggcgaaggaggaaccatcggcgggaacgaaggaaacgaaggtggtggaggaggaggaagttcaggttacgccaaacagatgcttgagttgcaagaaacgcgtggggctcacggggttcaagtgcaggtgcgggatggttttttgtgggatccataggtaccctgaacaacatgcttgtgcttttgatttcaaagggatgggaaaacaacaaatcgccaaagctaatcctcttgttaagggtgagaagcttc

SEQ ID NO: 1088 - DNA, 487 bp, Gossypium hirsutum
  Clone ID: LIB3272-018-P1-K1-A9
gcgactccacagcagtccgctttagtcatagtaatctatgagctcttttatcttagatttataggttaaacagggtgtttttttaggtctttatagagtttagaaagagaagattgcaaaaaatatggtctgaacgaacatagtatgtcatagcaccacagttatggtgccaacaacgtgagattttgtcggaaagcccgacaacatcaaaagtctctgtgtctaaatagttatctgcggatcttcaaacttaaaagaacaactaatcttccttctgccaaacaagctctttaatcacactttcgttccttcgtcgtcttcattgccatcgtcatcatcggcccgatcttcgttttcggcatccttgccggtggaggatgaaccattggcgggaacgaaggaaacgaatgtggtggagggggtagaagttcaggttacgccaaacagatgcttgagttgcaagaaacgcgtggggcttacggggttc

SEQ ID NO: 1089 - DNA, 533 bp, Gossypium hirsutum
  unsure (1)..(533): unsure at all n locations
  Clone ID: LIB3543-020-Q1-K1-A2
ccgaattccccggtccacccaaccctccgggaagaacccttcccttctttctttcttttcccccctagaaagagcgattcctttccctaccctcattttncccccccacttcatcttcttctttccattctgattataataagatttgggtttcgttttcctgtgaaactctcgtctctggtaaattttccctcggttttttttgggggtttatttttatttgtcatgaacctatggctttctatttgatttctgttaaacggggggtttttttttataggtttgaaaggagattgaaaaaatatggctgaagaacatagatgtcaagcaccacagttatgtgccaacaactgtggattcttcggaagcccaacgactcaaaatctctgttctaaatgttatcgcgatcttcaacttaaagaacaacaatcttcctctgccaaacaagcctttaatcacactttagttccttcgtcgtcttcattgccatcgtcatcatcggcccgatcttcgtttttcgcatccttgccggc

SEQ ID NO: 1090 - DNA, 221 bp, Gossypium hirsutum
  Clone ID: LIB3197-029-Q1-M1-B10
ggaagcttctcacccttaacaagaggattagctttggcgatttggtgttttcccatccctttgaaatcaaaagtacaagcatgttgatcaggttacgccaaacacatgcttgagatgcgagaaacgcgtggggctaacggggttaaagggctggtgcgggaaggatattactgggatccatgggtaaccctaacaacatactagtggggggggggggaagt

SEQ ID NO: 1091 - DNA, 740 bp, Gossypium hirsutum
  Clone ID: GOSHI-09MAY01-C5450_1
ggaagatttcccggccgcagaatttttttttttttttttttttttttttttttttttttttttttttgtggacgcgagggaattttgagactcttctatttagcaatggcttcttctctagctcttaagaggctcgtctcatccaacatcctccctagctccttacgcgtcgccatcgctccatccatctccagactctttaacaccaacgccgccacgcctgatgaccacgatgatcgccgtcgtgctgacggtttcttcccagatctgcaggggcggcgccagggggccaaaaaagatatgtttgatcctttgtctccaacaaggagcctgaacatgatggatcaagtcaaggggaatcgatttctctccacatcccgtgacattccagggcttgggagcgaggccaaagaatcaaaccttcgcccgttatctcctcatcttcctatttataagccacaactttctgcgactctttcaattaccaataggatctccggggttttcctaactactgcacttttgttctcttatcttctttctctgaaaatgggttcaatttgcttcacctattcgaatttctaccaattcttcttttattcagcaaagcttgccccagttaccgtctcaattgctgcattggccgtttcctatcatctgtgttatggggttcgtcatttattggcggacttttcgggaaagctgaggtgaagaacggtgaggaggaaaggatgtgattc

SEQ ID NO: 1092 - DNA, 453 bp, Gossypium hirsutum
  Clone ID: uC-gsflnu33B132f08b1
ttctttcacgcgtgcgggccggcggccactgaggagatcgttcagcgttgactagggtatagagccaacctacaccctttatctcttactcgggggagagggaatacgattattttatattttttacaccaacgccgccacgcctgtattcatcttttatctccggtatgctgacggtttcttcccagatctgcaggggcggggccagggggccaaaaaagatatgtttgatcctttgtcctccaacaaggagcctgaacatgatggatcaagtgaaggggaatcgatttctctccacattccgtgacattccagggcttgggagcgaggccaaagaatcaaaccttcgtccggtattttctgatctttctatttataagccacaactttttgggactctttcaattaccaataggatcttcggggttttcctaactactggacttttggtct

SEQ ID NO: 1093 - DNA, 676 bp, Gossypium hirsutum
  Clone ID: GOSHI-09MAY01-C5460_1
cccacgcgtccgcccacgcgtccgcccacgcgtccgcttctcctaaactcatgacttcatcggtcggtggcggaggcagatacatggccttctctccgtcgccttccgcccctcactctccccatctatccggccttcgctccgccgccgccgctctccttgaccaagagaaatatctctcggagttactggcagagcgttacaagcttagtccatttatgacagtgattcctcatacctgtagactgttgaaccaagaaattttgcgtataactacactgttggggaatgcatcagttttaggtcaaaatgggcttgaacaagctagccccctggcttctggaggaacattttcaaatggaggagccgatatgaacagatggatgtcacagtttcaatcagaaatgcctgggttagtacaaccctctttggcggagaactggctgaattctcaaggtggctcttccggtcttattgttaagagaacaatcagagtggatattcctgtcgacaagtatcctaactaccattttggtggccgcctccttggtcctaagggcaactctcttaagcgtgtggaggcaaatacggagtgccgtgtccttataagaggtcggggcagtattaaagatcctgctagggaggaaatgatgaaaggaaaacctgggtatgaaca

SEQ ID NO: 1094 - DNA, 575 bp, Gossypium hirsutum
  unsure (1)..(575): unsure at all n locations
  Clone ID: LIB3543-033-Q1-K1-C2
ggnanaaaaattacacacacaaccaccaccatcaccgctaccccgaagcaccttcgtcttctactcatgactacatcggacggtggaggaggcaggtacatggcctactctccctcgccttccgctcctcactcttcccacctctccggcctccgctccgtcgctgccgcagccgcttcctctgctgccctcctcgatcaggagaaatatctctcagagttattggcagagcgtcagaagattattccatttatgcccgtgctccctaatacctatagattgttgaaccaggaaattttgcgtgtaactacgctgttggggaatgcatcagttttaggtcaaagtgtgcttgaacaagctagccccctggcttctggaggaatattttcaaatggaggagctgatatgaacggatggacttcacgttttcaatcagaaatgtcaggtttagtacggccctcttcggcacaaaactgggtgggttctcaaggtagctcttctggtcttattgttaagagaacgatcagagtggatattcctgtagacagctatcctaattataattttgttggccg

SEQ ID NO: 1095 - DNA, 722 bp, Gossypium hirsutum
  Clone ID: GOSHI-09MAY01-C5420_6
gtaggtcccaccaataaggagttgtgtgtacacagggttttggagcttagatgaatatgatgttgggatgggaaagtgataacttgtattaggtctgcttattattattattatttttgggggggggtctacgaacaccaacgccatgggaagatttgaagagagaggattcgattcaggggtttgccctaagcctattcgaacctttagatggtctaccaactgttatcagactgagatggctgattcaaaaactggtgcagagcttcttgatataatcctccccgagggagggtatggggccgagaattccaccaaccaaatggcttcatcagccgccggttttgtgtggatcaccgccgagcaccgcgtcgaatccggtaattccaagatgcccgtttcaacgacgagcatgccggtgctacctccactaacatccccagcaacctcctcaaggggaggatgcgtgagggtgaaattcgggcagatgccagctgctgtacgaatcgagggatttgattgcctcaccagagatggccgccatcgcagcatctccgccgtggcttaaaaaaaaccaagatatgagaacaaaaatgtgagaggagagagggatgatgataaaattaagcaacaacttggaatagtgtgggtaggtgttgtatctttatctaaatttcttctatctctctttcatatttgtttcctattcaatttttcttatt

SEQ ID NO: 1096 - DNA, 1010 bp, Gossypium hirsutum
  Clone ID: GOSHI-09MAY01-C5420_2
aaccgggccgacccacgcgctcgcccctccctaaatctcaaacccagatttgttctctctctctctctctctctccaatcaattaattcctccattggaggagcttagggtttgttggtgttctgatctttgctctgtctgaaaaataaacagaattataacccaacaccaacgccatgggaagatttgaagagggaggattcgattcagtggtttgccctaagcctatacgaacctttagatggtctaccaacagctgttatcagactgagatggctgattcaaaagctggtgcagagcttcttgatataatcctctccgagggagggtatggggccgagaaccccaccgaccaaatggcttcatcaccaccgtatttctgtggatcaccgccgagcagggcgtcgaatccggtaatccaagatgcccgattcaacgacgagcagccggtgctacctccactaacatccccgggaccctcctcaaggggaggatgcgtgagggtgaaattcgggcagatgccagctgctgtacgaatcgagggatttgattgcctcaccagagatggccgccatcgcagaatctccgccgtggcttaagaaataccgaggggaagaaaattttgatatgagaaaaaaaaattgagaggagagagggagatgataaaattaagttacaacttggaatagtgtgggtagtgttggatttgtaaatagaagattaaaatgagatgatgggtgttaaattgttgggtctttgatgattttgggatgggattttccttgcataaaagaactagaggggagcaaaaacaaggtttattgcccccactcttgttagggttccttttttttttttttttttgctttctttaattattaattactgtatttggtgagaggagaggatggatgggagacccctttttgtaatatatcgtgtttgatcaatgacactctcatccttcctcctttcgcatgtaattgtaatttgaaggaaatggaggtttt

SEQ ID NO: 1097 - DNA, 1059 bp, Gossypium hirsutum
  Clone ID: GOSHI-09MAY01-C5420_1
ttgcaggtactttttattaattcccgtttctcccccccctttcctctctcaaaatctcaaacccagatttgttctctctctctctctctctctatttccaatcaattaattcctccattggaggagcttagggtttgttggtgttctggtctttgctttgtctgaaaaataaacagaattataaacgaacaccaacgccatgggaagatttgaagagagaggattcgattcagtggtttgccctaagcctatccgaacctttagatggtctaccaacagctgttatcagactgagatggctgattcaaaaactggtgcagagcttcttgatataatcctccccgagggagggtatggggccgagaatcccaccaaccaaatggcttcatcaccaccgtatttctgtggatcaccgccgagcagggcgtcgaatccggtaatccaagatgcccgattcaacgacgagcagccggtgctacctccactaacatccccagcaacctcctcaaggggaggatgcgtgagggtgaaattcgggcagatgccagctgctgtacgaatcgagggatttgattgcctcaccagagatggccgccatcgcagcatctccgccgtggcttaaaaaaaaccaagatatgagaacaaaaatgtgagaggagagagggagatgataaaattaagtaacaacttggaatagtgtgggtagtgttggatttgtaaatagaagattaaaatgagatgatgggtgttaaattgttgggtctttgatgattttgggatgggattttccttgcataaaagaactagaggggagcaaaaacaaggttgattgcccccactcttgttagggttcctttttctttttttgctttctttaattattaattactgtatttggtgagaggagaggatggatgggagacatttttgtaatatatcgtgtttgatcaatgacactctcatccttcctccttcgcatgtaattgtaatttgaaggaaatggaggttttaatttttcttttgccttaatttatcaatgaatgagaaatggggataatg

SEQ ID NO: 1098 - DNA, 643 bp, Gossypium hirsutum
  unsure (1)..(643): unsure at all n locations
  Clone ID: AW187223.1
ctcaaaatctcaaacccagatttgttctctctctctctctctctctccaatcaattaattcctccattggaggagcttagggtttgttggtgttctgatctttgctctgtctgaaaaataaacagaattataaaccaacaccaacgccatgggaagatttgaagagggaggattcgattcagtggtttgccctaagcctatacgaacctttagatggtctaccaactgttatcagactgagatggctgattcaaaagctggtgcagagcttcttgatataatcctctccgagggagggtatggggccgaaaaccccaccgaccaaatggcttcatcaccaccgtacttctgtagatcaccgccgaacagagcatacaatccggttctacatcatcctcgactacaccaagagtgacgcgtgctccatctattacaggaacaggacctcatcaacgggaggtacctttagtgttacacacaggaccataccttctgatgtacaacatcgatggacntataggatcagtacatatggcaccgatcacggatgcacagcgttgggataatatatctgtcggcgatgacaattcaagctgtaaaaatggggttcaggagaataaaagaggtggtctnggatctgacc

SEQ ID NO: 1099 - DNA, 528 bp, Gossypium hirsutum
  Clone ID: uC-gsflnu33B146h12b1
cccttgcgtccgcaaacccagatttgttctctctgtctctctctctctatttccaatcaattaattcctccattggaggagcttagggtttgttggtgttctggtctttgctttgtctgaaaaataaacagaattataaacgaacaccaacgccatgggaagatttgaagagagaggattcgattcagtggtttgccctaagcctatccgaacctttagatggtctaccaacagctgttatcagactgagatggctgattcaaaaactggtgcagagcttcttgatataatcctccactaacatccccagcaacctcctcaaggggaggatgcgtgagggtgaaattcgggcagatgccagctgctgtacgaatcgagggatttgattgcctcaccagagatggccgccatcgcagcatctccgccgtggcttaaaaaaaccaagatttgagaacaaaatgtgagaggagagagggagatgataaaatttagttacaacttggaatagtgggggtagtgttgatttgt

SEQ ID NO: 1100 - DNA, 545 bp, Gossypium hirsutum
  Clone ID: uC-gsronu33B015e09b1
tatatttcaaacccagatttgttctctctctctctctctctctatttccaatcaattaattcctccattggaggagcttagggtttgttggtgttctggtctttgctttgtctgaaaaataaacagaattataaacgaacaccaacgccatgggaagatttgatgagagaggattcgattcagtggtttgccctaagcctatccgaacctttagatggtctaccaacagctgttatcagactgagatggctgcttcaaacactggtgcagagcttgttgatataatccttcccgagggagggtttggggccgagaatcccaccaaccaaatggcttcattaccaccgtatttctgtggatcatcgtctagcaggtgcgtctatttggtttttccaagatgcccgattcaaacgactagcagtcggagcttcctttactaacattcctagcactctcctcaaggggtggatgcttgtggttgtatttgggccgatgcctatcttttgtttcattgcagattttgtttggctttacctttcttggtc

SEQ ID NO: 1101 - DNA, 979 bp, Gossypium hirsutum
  Clone ID: GOSHI-09MAY01-C5780_1
ggaaggatatatgaaataaccgctggaagtgccaacggtggcatggtctcctcaactgttgcgggtggcattgactgcttggatctacttcttgagcatggttcaggacgcaaatgtttgagtgtgattaaaagacacattagaggctttgttgctgctctattcaatataatcctgcacttgcagagtccattaatattctacagaaaatctgtgagtaatgaaggtgacagaaaccttgatccgggatctgttgttcttatgtgtattgaggtattgaccagagtttctggaaaacatgctctgtttcaactggatctgtgtcacatagggcagtctttgcgtatccctggagcactttttcaagaattccatcaactaaggatttctgaaggaccagtatcaagtaacacatttttggatgaacaaaatcacaattctactgtaagcatggaatatcatgttttgggcctggaccaacagttctctataaacctctttgctgcttgttgccgattattgtactccattctgaaacatcacaagagtgaatgtgaacggtgcattgctgtgcttgaagaatctgtttcccttcttcttcattgtttggagacagtggatgctgatctagtggtccaaaaaggttatttttcatgggaaatacaagagggagtgaaatgtgctggttttctccgaagaatctatgaagagataaggcagcagaaagatgtctttgcagggcactgttacaagttcttgtcaacctacatatgggttttttcaggatatggtccccataaaactggcattagaagggagatagatgaagctctaaaaccaggtgtatatgcattaatagatgcttgctcagctaatgatcttcaatatcttcatacagtatttggagagggtccttgtagaaacactttggccagtttgcaacgtgattacaaactgaatttccagtacgaaggggaaa

SEQ ID NO: 1102 - DNA, 428 bp, Gossypium hirsutum
  Clone ID: LIB3583-029-Q6-K1-E5
cgacaatcttctgacgcaggctttcggaattgataccatgctatcatggaatctactgaacgaaagagagtagaggtgatccatcgactgaatggagcatggtatatgacgcacatgttagagtgagattaaaagacacattagaggctttgttgatgatctattaaatataatcctgcacttgcagagtccattaatattctacagaaaatctgtgagtaatgaaggtgacagaaaccttgatccgggatctgttgttcttatgtgtattgaggtattgaccagagtttctggaaaacatgctctgtttcaactggatctgtgtcacatagggcaatctttgcgtatccctggagcacttattaagaattccattaactaaggatttctgaatgaccagtttaaaataacacattttcggatgaaca

SEQ ID NO: 1103 - DNA, 429 bp, Gossypium hirsutum
  Clone ID: GOSHI-09MAY01-C5720_1
atttgttactgtccttggcaccctttcagacgtcagtggagttgtattggttgttagtccatgtggctagtctgaagctgatgctcccttggtccaaatctgcaagcaatacaatagacaggcctgtaaggtcctgtgttggaaaatgggatgtccggtccctgatatcctcggcaccagaatcccatcgacctgaaaagtcaaccagagaacataagttgccccggcatattaaatttactttcaagaatcctattagatatcgcatcgtttgcataacactgccccttcatcggcctgcttcaagctctgtaaatttcgggaacgacttcattttattatctctggatgaaaatccctttacacaagatactcgacgtgcctcttttgtaggatcaactgaaagtagtccatgccttcatgccaaac

SEQ ID NO: 1104 - DNA, 528 bp, Gossypium hirsutum
  Clone ID: GOSHI-09MAY01-C5660_1
tcccggtcgaccacgcgtccgagcaaaaacctcaagtaaacaaatagaaactccaaaaaggaatcgaaccgcccttctaaaatcatttcaccaactcctcagttaacgaaaggcccccgagattcatagatttaggaggcttttagcctttgaacctcctctaactattgggtcttctgcaaaccaaaccatgtctgacctagacaggcaaatagagcagctaaagaagtgtgaacccttgaaagaatccgaagtgaaagctctttgtctcaaggccatggaaatccttgttgaagagagtaatgttcaaagggtcgatgcccctgtaactatatgtggtgatatccatgggcagttttatgatatgaaagagctttttaaagtaggaggtgattgccctaagacaaattatttggttcttggagattttgttgacagagggttttactacgtggaaacctggatgcttgtatcgccattgaaagacagatattctgatcgcataacactcattagagggaaccatga

SEQ ID NO: 1105 - DNA, 717 bp, Gossypium hirsutum
  Clone ID: GOSHI-09MAY01-C5620_1
acagccgtccgcccacgcgtccgctgctttaacagcatgtgctcatggaaaactttctccacgtgagctggctacaggcctaaaggattcacctgattttcttcctgcatctttggcaaccatggttggcatccttctctgctgaagtaagtcgatgtgtatggaaacctgttgttatgaacggtatggactggccaagccctgctgcaaatttgtccaatgttgaagagcatatcaaaaaaattctagcagccaccggtgttgatgtccctagactctctgcaggtggtagctctacagctactcttccactaccggtggctgcttttgtaagtctcaccattacttataaaatcgacaaaacctcggaaagatttctcaatttggctggtccagctttggagtcccttgcagcagactgtccatggccttgcatgccaattgtggcttccctatggactcaaaaggcaaagcggtggtttgacttccttgtcttttctgcatctcgcactgtttttctccataacagtgatgctatcgtccagcttcttaaaagctgtttcactgccacacttggcttgaacatcgcaccaatctccagcaatggtggtgttggagctcttcttggccatggatttggatcacatttctggggtgggctttcacctgttgctccagggattctctatctacgtgtttaccgttccatcagagata

SEQ ID NO: 1106 - DNA, 646 bp, Gossypium hirsutum
  Clone ID: GOSHI-09MAY01-C5160_1
cggacgcgtgggctttttcctttctaattattacactttctctcttacatatttatataaataatagtgattagtttcaccctattgtgccatgggactaagtcttaatctcataaacatagtggtgagtatatgtatgtaactgttgtgacacgtggaagtgctgaaaatggtaaatgaacattgaacagagacactgccaacgccggcgaggataaggagaggtgaggcaattgaagaggcgaagcttagcgagttcccgcaagagctggtgcagctggcggcggtgctgaaggggggatcatatcctcacaagttacccggaaaggatagggaaggacatgagcgtgaaggaaggtaaagagtacatggaagatccagtcaaacggttcttcgaggctggccattatgctaagaaaatgggagtcgacggcgaacagattgttcaaatgaagccttccctaactactcgttcatcaaaaccttcatctcaacatccataaaacctgtttttacattttttttttacgtttttatggggaatgaggaaaatatgtagcaatcttatttatattttagtatataggaaaagagaaaatattttgagttaatttatatttacatgaatgagctttggtcgtgttcc

SEQ ID NO: 1107 - DNA, 624 bp, Gossypium hirsutum
  Clone ID: GOSHI-09MAY01-C5120_1
ctcctgtcaatatcagtcctggttcagtacagagagtatttggcagcttttgagagcaatgaagtggccaaacagagaatgccaaaggcattattgtcagcattcgataaccgatcttggattccagttacaactattcttttacgtctgtgcaagggttctgggtttggttcttcaaagcatggagaatcttcatcatcatcaattattttccagggactgttgcgtgaagcttgcatctccgatgaagagttgttctcagcttttctcaatcgtctatttaacactctcagctggacaatgactgaattctcagtttccattcgggaaatgcaagaaaaataccaggtattggagtttcaacagaggaaatgctgtgtcatattcgatctctcgtgtaatcttgcaaggttgttggagttttgtacccatgagattcctcaagcattcctctcagggcctgatacaaaccttcgaagactgaccgagttgattgtcttcattctgaactatataacttcagcatcagatgtcgagttttttgacttgtcacttagacggcatggtcaatctttggagaaagtaaaccgaggcatgatattagctcctctagtagggatcatt

SEQ ID NO: 1108 - DNA, 655 bp, Gossypium hirsutum
  Clone ID: GOSHI-09MAY01-C5030_5
attctattttgtttctatcaggataataaagaaacttgtcagtccatcaccatgatacttccatccaagtttcaagatgaaactgaaaaaagtgacaaatcttcaccacctttggatgtttcggttgcattccctcaagcaactccagcatctgtttttcctccgtctgtttctgattattatcgatttgatgatctatcccgcccggcgcggaagactctccgaatgaaagtaagagagtttatggaaaaagaagtagctcctataatggcggagtattgggagaaggcagagtttccattccaaattcttccaaagcttgctgatcttggaattgcaggctttaataccgagggttatggatcccctggtctctccatcactactagtgctattgcaaatgcagagattgctagagttgatgcaagtttctctacatttttattggtgcattctgtaggcatgcttactattgcatcatgtgggtcagaggaacagaagcagaagtatttaccttctttggcacagttaaagacgatagcttgttgggctttgactgagcctgaatatggaagtgatgctagtgctgtaaatacaactgcaagaaaggtagagggaggttggataattgacggacaaaaacgctggataggaa

SEQ ID NO: 1109 - DNA, 1513 bp, Gossypium hirsutum
  Clone ID: GOSHI-09MAY01-C5030_2
gttctgttttatctcgtctactacgttttccattttcgggccgatccgtagctcttatttcagcaccatgactgttcactcccagattcaagatgaaactggcagaagtgtcaagccttcttattttaactcgccacctttggacgtttcggtcgcattccctcaggcaactccagcatctacttttcctcctcttgcttccgactattatcaatttaatgatctattgagtcctgaggagcaggctctacgtaagaaagtaagagagtgtatggaaaaagaagtagctcctataatggcagagtactgggagaaggcagagtttccattccaaattgttcccaaacttggtgctcttcatatttctggtggtactatcaagggttatggatgcccaggtctctccctcactggaagtgctattgcaatggcagaggttgctagggttgatgcaagttgctcaacttttatcttggtgcactcatctctagccatgcttacaattgcattgtgtgggtcagaggaacagaagcagaagtatttaccatcattggcacagttaaaaactgtagcttgctgggctttgactgagcctgactatggaagcgatgctagttctctgaagacaactgcaacaaaggtagagggaggttggatacttgacggacaaaaacgctggataggaaacagcacttttgcagatgtgttggttatctttgccaggaataccacaaccaatcagataaatggatatattgttaagaaaaattcccctggactgacagctacaaaaatagcaaacaagattggagtgcgaattgtgcaaaatggtgatattctcttaaagaatgtctttgttcctgatgaggaccgattacctggtctaaactcatttctagatacaaacaaggtactggctgtttcacgagtaatggttgcgtggcaacctatcggcatatcgatgggtgtctatgacatgtgtgccagatacctgaaggagaggaaacagtttggtgctccattggcagccttccaaattaaccagcagaaacttgctcgcatgttgggtaatattcaagcaatgacccttgttggttggcgcctttgcaaattgtatgaagagggtaaaatgactcccggtcatgccagcttgggaaagtcgtggattacctcaatggcaagagagacagctgctcttgggcgggagttacttggtggcaatggaattttggccgattttcttgttgcaaaggcattctgtgatttggaacccatttacacatacgaaggcacttatgacatcaacagcttggtaactggtagggaaatcactggttttgccagttttaagccagcctcagtgagccagcgaagccgcctatgagaagtaccgtgtagactttcttcccttcgaacttgttacagtaaaagttgaataatgtaaaaaagaatcctaaacagagtcaatcaacttattacagtagaagttaaataaattattgcttctgttgcc

SEQ ID NO: 1110 - DNA, 1016 bp, Gossypium hirsutum
  Clone ID: GOSHI-09MAY01-C5030_1
ggcattaacgtctgggtaggtatttagtttctttttcagctataattaaagaaatttaatgtcatattcaggctttgactgagcctgactatggaagtgatgctagttctctgaagacaactgcaacaaaggtccatccacaatcttgtcttttggttttcacatctttttttaatatagctaatttcactcactggtcagcattctgaattttgtgtcttatcatgtttgctttcatctcaaacattcaggtagacggaggctgggtacttgagggacaaaaacgctggataggaaacagttcttttgcagatgtgttggttatcttttccaggaatactacaaccaaccagataaaaagtgaaacagcatacaagaaatagtgtttagcatttggtcttgcacacaaaagaatccattaatgatagacacgatcatatgttcactattaactaaagtatcagtattagcatatacagaatgataacccaggatcactttttcagttgagaacttatgttcatgaagtagtagaagcattcaaacctggtaataagtattaaacaatggtaaagcttgtatccagggaccaggcctctggtccccattgagttccacaattgttaaaattctaaacaaaggtggaatgatatatcattggttgcagacctttgaaactaccatgggctgtttactgaaatgatagcctagagagaaacattgagattgctaattgaaaggtgattagattcattgcctgctcttttttcttaaacacgggaagcttctgccttctgtttcagaattttagttaagaaagattctcttggattgacagctacaaaaatccaaacagattggatgcgaattgtaaaaatgagatatctctaaagaaagttttgtccgatgagacagattactgtgtgactctttaggatcaagcaagtactgtgttctccagatggtgatgcacctatggtttcaggggtataatgtgccgtctgagaaagaaattg

SEQ ID NO: 1111 - DNA, 535 bp, Gossypium hirsutum
  Clone ID: LIB3583-030-Q6-K1-C9
atgactgttcactcccagattcaagatgaaactggcagaagtgttaagccgtcttattttaactcaccacctttggacgtttcggtcgcattccctcaggcaactccagcatctacttttcctcctcttgcttccgactattatcaatttgacgatctattgagtcctgaggagcgggctctacgtaagaaagtaagagagtgtatggcaaaagaagtagctcctataatggcagagtactgggagaaggcagagtttccattccaaattgttcccaaacttggtgctcttcgtatttctggtggtactatcaagggttatggatgcccaggtctctccctcactggaagtgctattgcaatggcagaggttgctagggtcgatgcaagttgctcaacttttatcttggtgcactcatctctagccatgcttaccattggtgagatctatgatacatgttaacaacccacatttctctctatataggaggtctaatttctggtatcaccttctttttatcaataatagctttatg

SEQ ID NO: 1112 - DNA, 580 bp, Gossypium hirsutum
  Clone ID: LIB3584-030-P1-K1-C6
tagtgctgtaaatacaactgcaagaaaggtctgccgtcaaccttgtttatgggttttcgattgtctttgtgggtgtagcttattatactgctaaacattctaaaatttttgtttgtaccatgtttgctatcatataaaaaatttcaggtcgagggaggttggataattgacggacaaaaactctggataggaaacagcacttttgctgatgtgttggttatttttgccaggaataccacaaccaatcagataaatgggtaaatgaaatagtatgtaagaaagacattgaaaagaatttagcatttggtcgtaaacacaagcgccatctaatagtcaataaatacacatgcttgtatattcactagaaactaggaagtatttacaaacatatatagaatgaaaagccaaatcaacaattcagttgagaatttttactcaagtaccattaagggcttaatgatcttgaagaggtggaaatgttcaaacctggttatcatttcaagaaggggcgaagaagatatttagggctttttgtccattttgatttatgttagggatttaaagaacttaaatgaagtca

SEQ ID NO: 1113 - DNA, 845 bp, Gossypium hirsutum
  Clone ID: GOSHI-09MAY01-C5390_2
tcagggcatgaaagatcctgcattttatctggccaacataaaagtggtcgatgcacatgtcgtgtaaataatcgagattttagttcaaatgatgacccccctggtgctaggtctagtgtatccagaatcgttatgttagctgaggctttatttgaggtcctggatgaaattccccagcagtctatggttttattttcgcgaccgtccgtgtttccaattggttctgttcctgcccctaacgaagttgtggaatcccttcctgtgaaagtgtccaagtcccctaaacttaagaatgatgaggctgtgcaatgttacatatgtcttgtggagtatgaggagggggatagcattcggagattgccttgtaatcatgaatttcatagaacatgtatagacaagtggctcaaggagattcacagggtctgccctctttgtcgtggggatatatgcgaacctgatttgatgcctggggagaagtagagcttctggtttttataagagaggagcattggcaactgactttggttacaaaagggaaaaagaaagagaagagaagtgataattatatactattattattgaggatgaatgtgaatgagtttgtttaatatgccatctgtgatcagggtgatcaccttttggctgcacaataaaataatacaggaatgggttgggagtagtaaggggctattgaactttgtgatttgcagtgtaaggctgtgtgtaagccttcttgccttggggccacaactcagctcgaagaaagaaaggaaggggaagaaatttgattgttcatcttcaatgttgttaccaaagaaatattattaccaactcctcttctctac

SEQ ID NO: 1114 - DNA, 817 bp, Gossypium hirsutum
  Clone ID: GOSHI-09MAY01-C5390_1
ctccgattatcttcaatgattcagatggaagtggagagactctcgaaagcaacgctcgttttagcagagcgttaagtgttggaaggcttcgtgatcgtgttcttggtagagctcccacattctgccctttgcagcaggacatacaaattactcagcagcaattagctacctctccatccaccactgcttccgctcatgcttcctccgttatttcccacgatgaaattgaaacttctcgatccagagaagcccggtatcatgatttgctccaccatagatccaatttccttgaaaggcggagaagaatacgatctcaggttcgagctcttcaacggctaggaagccgttttgagaacttttcagggcatgaaagatcctgcattttatctggccaacatagaagtggtcgatgcacatgtcatgtaaataatcgagattctagttcaaatgatgacaccactggtgctaggtctagtgtatccagaatcgttatgttagctgaggctttatttgaggtcctggatgaaattcaccagcagtctatggttttatcttcgcgaccgtccgtgtctccaattggttctgttcctgcacctaatgaagttgtggaatcacttcctgtgaaagtgtacaagtcacccaaacttaagaatgatgaggctgtgcaatgtttcatctgtctgggggggcctgtggtgggcggatttcttatcgaatgttgtgaactacaaccaacctgatgggcgcatgaactataccggtttaccatactctaaactggatcaaagtatacaccaccggaaggctaatctacctt

SEQ ID NO: 1115 - DNA, 618 bp, Gossypium hirsutum
  Clone ID: GOSHI-09MAY01-C5360_1
gaaacaaacaaaagaaaaacctcaatatccaaaatccaaagccaatctcaaaaaacccatcaaaaaagaaaaaaataacaaatctcaattttctcaaccctttttccttgtggaagagtaggaaaaaaaaataaaaacatgcaagaagaccctcaagccaagtccttggaacctattgaagattatccaagaagtgatatggtgtttgggtggataaagcccaaacaagataaaaagagcagcaagtgtcttgtttacattcttgttattatggtcatccaaggatccatcctcttggttttagccaacatttttttacgtgcccgaacacctgatttcgagatcggctccgtcaaagttagaaacctcaagtatggtaattcatcggttccatcttttaacttcacactcgtgacccaagtcaccgttgagaacaccaatttcggagagttcaggtttgacaaaagtacggggactgtctggtgtgggtctgaagttgtggcgctaatgaaaatacctaaagggatagctcaagctagggcaactgaaaaaaagaaaggttctataatgtgaattccctctggttatctgatgccaaaaactttagggaaaatatgg

SEQ ID NO: 1116 - DNA, 608 bp, Gossypium hirsutum
  unsure (1)..(608): unsure at all n locations
  Clone ID: LIB3584-010-P1-K1-A5
tctttaaaacctcaatatccaaaatccaaggggggggggggaaaacccanacaaataggaaaaaactaacaaatctcaatattctcaaccctttttccttgtggaagagtagaaaaaaaaacaccatgcaagaagaccttcaagccaagtcattggaacctattgaagattgtccaagaagtgatgtggggggggggtggatagaacccaaacaagataaaaacagcagcaagtgtcttgtttacattcttgctattatggtcatccaaggatccatcctcttggttttagccaacatttttttacgtgcccgaacgcctgatttcgagatcggctccgtcaaagttagaaacctcaagtatggtaattcatcggctccatcttttaacttcacactcgtgacccaagtcaccgttgagaacaccaatttcggagagttcaggtttgacaaaagtacggggactgtatggtgtgggtctgaagttgtggggctaatgaaaatacctaaagggatagctcaagctagggcaactggagagatgaaggtttctataaatgtgagctcactctggttatcttgtgcaaagaacttaaggaaaaatttgagt

SEQ ID NO: 1117 - DNA, 246 bp, Gossypium hirsutum
  Clone ID: LIB3083-061-Q1-L1-F10
gtctggtgtgggtctgaagttgtggcgctaatgaagatacctaaagggatagctcaagctagggcaactgacaagatgaaggtttctataaattggtggccgggcatgaagctccgatcactggcggaaccatcgtttttgggaccaatctgctgttttcacggtttcaccctcatgcaaacccatgcaccgtgcaccattcctttatataaatcccagcaggaggcaacataatatcaacacagt

SEQ ID NO: 1118 - DNA, 1272 bp, Gossypium hirsutum
  Clone ID: GOSHI-09MAY01-C5300_1
cccagcgtccgattatagtctgagggggagcctcagcttctctctcccccgcgtccgatttcttcgccctttctttttctctaaccttccgcttgtcgtttctttgctttcgaggcctgaatgataatattagtaaaacagaccaaaaatcaaatccgctgaaatttttccctcaaagttccaccgtgaaatcaggaagtcatcagctttttagttcttttacacctggtgctgctataaatgattccggtttgctgcagcaaattattgtctcgtttctgatggtcattttgctctacgaaaatgtcattagaagaagttttgaaggttgtttttccttttttagatggtgtagaccttgcagcttgtatggtggtctgtaagcaatggagacacatagctaaagatgattacttttggaaatgtgtatgtgcaaagagatggccctccatttgcaaacgacccaatcctcctactgtaacctactataaactatatcaaacgttttacaaacggaagcatcagcgaacgctcctccctccaagactttcctttgatgatttggaattcttcattgacatttggactgaagataaattgattttctccgaagttgtccccggtcctgtcctccaaagaggaatcaagatcccacctgctggaatctgcgacatgcttaagtttcatcttcaaggccccgagtacaagatgatcttacctgttgacccgaggttcaccattccttggagccagactgtgagtgtttcagtgcttgtggggcggaaggactcaaacaaggttgcctgcataattaataaatcgatgtttgattacatagatcgtacagcttccagggctctagctttcgactaccttgtcttctctccctattatccctttatatcaggaatccgggcatggatctccttgcttttcatggaagacagaagcgatggtgtcatttgatgttttcggctttgagatggacttttgtgatgccgccaattcccaggaagaggtattgtggctggtagacatgcttgattggaaatgaatggtggaaagcttagtagccaggaccaggcacagggaagaactagagatgtaatgataataaactgtgccttaattgtggataggttgagtattgcatatgggttttaagctatatttcttggacaggtgtgagtattgcatgtgaattgtatttgaaagatgattggaagttatattttttagtggaaatacttcaaacccccttgcaaaaaaaaa

SEQ ID NO: 1119 - DNA, 640 bp, Gossypium hirsutum
  unsure (1)..(640): unsure at all n locations
  Clone ID: LIB3584-036-P1-K1-D1
cggaannnnnagggtcgaccccacgcgtgccgcccacgcgtnccgcgtacttctgtcatgtcgctaaaaaatctcaaatccaaaaactccattaacaaaccctgtgttagcatattcttaacaaaatcaaagccttttaagcagatttttatttttatttttctgtttcaccatgtctgatattacccaagaagcttggagaaaataccttattcaacttcaagttcaccctcttagaaccaaggcaattacagctgggtgtttagctggttgtagtgatttaatagctcaaaagatttctggggttaaaaggattcaattgagaagattgcttctcatcatggaatggagttgactgttttttctttcttgctctctacgtgtttgatgtttggatgccaagaaaattgccataggaacataaaatgaagaaagagaaattgaattctccctttgcagctttatggatttgcatattcaggaccatttggacactttcttcataaagtgatggatatcattttcaggggaaagaaaggaagtaaaattgttgcaaagaaggtaaaaaaggggtaatatgacttttagtccctgagcttggaaaataaagtccattttagtgcctgcatttttttttttg

SEQ ID NO: 1120 - DNA, 553 bp, Gossypium hirsutum
  Clone ID: AI727166.1
ctcaaatccaaaaactccattaacaaaccctctcttgtcatattcttaacaaaatcaaagccttttaagcagatttatatttgtatgtttctgtttcaccatgtctgatattacccaagaagcttggagaaaataccttattcaacttcaagttcaccctcttagaaccaaggcaattacagctgggtgtttagctggttgtagtgatttaatagctcaaaagatttctggggttaaaaggattcaattgagaagattgcttctcatcatgctttatggatttgcatattcaggaccatttggacacttccttcataaagtgatggatatcattttcaggggaaagaaaggaagtaaaattgttgcaaagaaagtgttgttggaacagatgacctcttcaccttggaacaattttttcttcatgatgtattatggattattggttgaaggaagaccatggggtttagtaaggagtaaagttagaaaggattatcctagtgttcaattgactgcatggaggttttggcctatatttgggtggataaactaccat

SEQ ID NO: 1121 - DNA, 784 bp, Gossypium hirsutum
  Clone ID: GOSHI-09MAY01-C5260_1
gttgtgcaattttaatttgattgttttctgaaaagaaatgagttgtgtctctacatctgcttcgtctgactcttccgtatcttcttccacttcttggttttccggcattgttaggggccgcctagacaagtcctcttccctaaagatggctggcagctcctcctcaggtggcggccttgcctccaataacgaaggacccatcaagggtaagaaccagttccgtggtgtgctcttcaagtatgggcctaagtccatccaggttgcattcaaaaccggtgactataagcaacaagttattttcattggtgggctgactgatggatttctagcaactgattacttggaacctcttgcagttgctttggataatgaaaaatggtcacttgttcaactacttatggcctcctcatactctggatatggaacctccagcttggaacaagatgccatggagatcgatcagcttattagttacttaatcaacaaagaaaattctgagggtgtggtccttcttggtcatagcactggctgtcaggatattgtgcattacatgcgcacaaatgcagcttgttcccgagcagtccgtgctgccattttgcaggctccagttagtgatcgagaatacagggcaacccttcctgaaacagctgccatgattgacttggctacaagcatgataaaggaaggtcgggttcagacttaatgcctaaggaagcagatccatcccctataactgcctatagatataactccctttgtgcctacatggggatgatgacatgtt

SEQ ID NO: 1122 - DNA, 1450 bp, Gossypium hirsutum
  Clone ID: GOSHI-09MAY01-C5200_1
gcaaaccttaagtcgagatttagctgctgcggtttcgcagattcatgactttgtactgtccctaggagacgaagcgagggcagttgatgatatatctttcgatggcaatggattaagccataaaattggcgagttctccgtcacctacaataaggttctatgcagcaacgtaaggtgggacgattttgttctcgatctttcttcggtcttagtcaaagctagtgaattaagattcaatgtgcttggctacaagggtaatgaagttgaaataaatagtccggattgcatagacaaggttgctttaccggagaataaggtgacacaaaacggttcattgggaggaatatatcaaaatggatgtgcccacatttcaagtccgacttctaatcctgaggttcctgatgacggaaacttggtctcggactttgaatcaaaacaattgagcaaattctcgttggaagagttcgaggaactgaagttggagaaagaaagcttggcgatggatctttctcgatgtaccgaaaacctggagataaccaagtctaaattacacgaaaccgaattgcttctaacagaagctaaatctcaattggcttctgctcagaaatcaaacagcttggctgagacacagcttaagtgcatggcagagtcgtatagatcactcgaaacgcatgcagaggagttagcgactgagctgaacattttccgggtaaaaaccgaaacttttgaaaatgagcttcaagatgaaaagaaaggtcatcatgatgctttagctagatgtaaagaacttgaagagcatttgcaaagcaaggaaatctgctcggtttgttcttcagcagccaatgttgaccgcacgagcaagcaggagaaagaattagcagctgcggcagagaaattagcagaatgtcaagaaaccatattccttctcggcaagcaattaaaagctttccgccctcaaaccgaaacgaagggatcgccgtacaacgagaggataccaggtttccatgaggatgaaaccgttaccagcagcattaacttgcatgatctaaaccaggcagagatagaaacagctggttcggggaatgcaagcagatcgtgtgcagaatcacccatggagtcatcatttaacaccccatgcagcccttcagatactgaagcaaaccttttgagatcaccaatcaactcgaacaactcaaatcacaggtctaccatgtcaagctccgagtcttcctcgtctacaccgacaccggagaaacaatctcgaggctttagtagattcttttcctccaaagcgaagaacggacattaatccggcaagtcgataggtgcataatagtattttgttggactttgaatgtgaatttgtaagtaatgactgtatatggttttcgtgtgacatctatggttttaaagctggttaatatattttgaatattattttatgcgacct

SEQ ID NO: 1123 - DNA, 630 bp, Gossypium hirsutum
  Clone ID: LIB3584-034-P1-K1-G1
gtttgtttcaagtgtatggtcgaagcaacataattgcttcttgagtaaaccaatcatcggtaccatgtggtctgtagtttaagcaccacccgatttagtatcgtttctgttgaacacaggagaaagaattagcagctgcggcggagaaactagcagaatgtcaagaaaccatattccttctcggcaagcaattaaaagctttccgccctcaaactgaaacgaaggggtcgccgtacaacgagaggataccaggtttccgtgaggatgaaaccattaccagcagcatcaacttgcatgatctaaaccaggcagagatagaaacagctggttcggggaatgcaagcagatcatgtgcagaatcaccaatggagtcgtcatttaacaccccatgcagcccttcggatactgaagcaaaccttttgagatcaccaatcaactcgaacaactcaaatcacaggtctaccatgtcaagctccgagtcttcctcgtctacatcgacaccggagaaacaatctcgaggctttagtagattcttttcctccaaagcgaagaacggacattaatccagcaagtcgataggtgcataatagtattttggtggactttgaatgtgaatttgtaagtatgact

SEQ ID NO: 1124 - DNA, 418 bp, Gossypium hirsutum
  Clone ID: LIB3165-013-P1-K1-C6
gttttccttcccatcataccaactttctcctttgtatcattatctccttccatctcctgcccttttctccaaccagcttcttcctgaaaaccatgttaattggactcaaaccccagaggctcacgtttactctgctgatcttcctggtaactctctgccatggaaaattttctcttcattatcttcttttcctttaccttgttaatttatgtaccagaaattagttccatgccatggtttttcttttttttctttttgtcctatacattaggggtgaggaaggaggaaataaaagtggaagttgaggactcaagatatcttataattaggaccgaggccatcgatgactcaacaaaaccagccatggacttcaagaggaaattccggctgcctggttccatagatattgatggaatat

SEQ ID NO: 1125 - DNA, 225 bp, Gossypium hirsutum
  Clone ID: LIB3165-007-P1-K1-H10
agaaaagtttctttccactctatatggcgtctcccttcccatcataccaactggctgctttgtatcattatctcactccatctcctgcccttttctccaaccagcttcttcctgaaaaccatgttaattggactcaaaccccagaggctcacgtctactctgctgatcttcctggggtgatggaaggcggaaataaaagtggaagccgaggactcaagatatctt

SEQ ID NO: 1126 - DNA, 417 bp, Gossypium hirsutum
  Clone ID: GOSHI-09MAY01-C6900_1
gaaaaaccggggcggacgcaggcgtccgcccacccttccggagatcgtatcctaatcacggatcaaaagagagatacggctgcagtcttgctagaggtcatagagtatgtccaatttttacaggagaaggttcaaaaatatgagggttcttaccagggatggagttcagagcccacgaaattaatgccatggagaaacagtcattggtgtggtcagagttttgttgatcaaccgcacgctattaaaaatgatcctgggctgcggtcaacattttctgggaagttagatgagaataacatcaatatcaccccctcaatgatcgcaagtgcattggatccatcagaagctgatccaatcagagataatgagcaagctgagttggctgtgcccattcaaggtgggcattcacttcagaga

SEQ ID NO: 1127 - DNA, 724 bp, Gossypium hirsutum
  Clone ID: GOSHI-09MAY01-C6920_1
tttagctcagcagtggtacaccattaagtcctggcagcagtttttgggaacggattatcaacggcgtgtgttgtaaatttgggtgctcaagtatcatcagttatttgcattgaggatggagtggctctacctaatacagagaagactttaccatttggtggagaggatatatcaagatgtcttctttggacccagaggcaccatcagacatggccacaaattcgtactgatattttgacaaagcctatagatctattgatgctgaacaggttaaaagagtcctactgtgaaatcaaggagggtgaacttgatgctattgctgtagttcattcttatgaggatgccatgcctgcaggatctcataagacgaggctaactgctctgaatgttcctcctatgggtttgttctacccaacgcttttgattcctgatttatatcctccaccaccccgttcttggtttcatgactatgaagatatgctggaagaaacatggcatattgaattcccaagaagatctgacatgccagacggtctttatcctggcagtaatgttggtttacaaatgtgggataactatccatttgtctcaatgaaacctaagaaagaagagaaggttggcctagcagaagccataaccagcagtattctttcaactggtcgcatagacttgcaaagaaaattgttttgtagcatacaattgattggtggagtggctttaactg

SEQ ID NO: 1128 - DNA, 384 bp, Gossypium hirsutum
  Clone ID: GOSHI-09MAY01-C6580_1
gtctaccaacctatgtaattcgcttcctttaaactgttcttaattggatgatgtagaattttatggatatatacgctatcttcaagcttccgccttactttcgtttcttcagtctcagctagaccctccgcgggcgggtgtatcactgcaacaaaactctgcagcgtgctcgttgcaaatctggatctaccccgtcataaacacgacgctattctgtgactcagcgcctgcgtctaacttacgcctgcggtgaacgagccctggggacctaacccggtacccccaccctattgggcggccagcatccgatcatcgtttctgcctgcccaatgagcttcgccgtttcttccccgacttacggatgaaggctactgctcgacatcc

SEQ ID NO: 1129 - DNA, 415 bp, Gossypium hirsutum
  Clone ID: GOSHI-09MAY01-C6540_1
cttccctcgctgtgaatggtacagtaaaacaacccaaggtgggaaaaggttgcaaaaggaataaccgagcccgtacgatcccttctcttctctgcgtcaaaaaccacatacatattcaacgagggcggaaccaggttttccaccctcttcctcccgctatataaagccattttcacgaaagccaagctcgctcgtccagttttcatttttgtagtcaaaacagtgcctttctcctataaatatggggctttcttatttttctttcccttccaggcaccctgctccatgtctcgttgaatggattcccttctcgccccttcctccacgtcgtctttccctgctctgaacaacaatagcaacagtaggattgagcataactcgctgccatccaggttgggtttctttaatttgagaa

SEQ ID NO: 1130 - DNA, 621 bp, Gossypium hirsutum
  Clone ID: GOSHI-09MAY01-C6510_1
aatttcccttatccccattataacagagatctccgctcaatcgaatcctgaaaaccaaagaaattttccatgccttgtccaagcggaatcctcctcttcctcatcctaatctccctcccagcttcttcattcgccgtagccgatgacgacaatctatccgcgtaccaagctcttcaacagtacgacttcccagtaggcatccttcccaatggcgtggttgggtacgaattgaacagggaaacgggcgagttttcagcttatttgagtggaacctgcaagtttgacattgattcataccaactcagttacgaatccaccataaaaggagtgatctccccaggcaggataacaaatttgaagggagtgagcgttaagatcctcttcttctggcttaacatcggtgaagtgatacataatggggaccagatggagttctccgttgggattgcgtcggctaacttccctattgacaacttttatgaatctcctcagggtgggtgccgatccaactgcaatggcttgaatgctttagcgtcttctatttaaggtaggttgtgatataactattagatgatttatgattggtactcgtttaggcacctgttcgggtatgtttatcgc

SEQ ID NO: 1131 - DNA, 1104 bp, Gossypium hirsutum
  Clone ID: GOSHI-09MAY01-C6440_1
cccacgcgtccgcccacgcgtccgcccacgcgtccgtcaccaccaccaacatagtccaacattttcataacaatggctgccatcacaaacgccgctgctacatcctccttcatggggacacgcttccccgacgtctacacaagttcagggagattcgtcgccaggtttggctttggcggcaaaaaagcagctcccaagaaagtctcgaaacgaaccccagaccgccctctatggtacccaggagcagtggcgcctgattggctcgatggaagtttggtgggtgattacgggttcgacccgttcgggttagggaaaccagcggagtacttgcaatatgatttggattctttggaccagaacctggctaagaatatggctggtgagatcattggaactaggaccgaagttgccgacgtgaaggcgacgccgtttcagccttacagcgaggtttttggtctacagaggtttagggagtgtgaattgatccatggacggtgggccatgttggctacgcttggtgcacttaccgttgaatggctcactggtgttacatggcaagatgctggcaaggtggagttagttgagggttcatcgtatctcggccaaccccttcccttctcgatgacaacattgatttggatagaagtattggtgatcggattcatcgagttccaaaggaacgccgagcttgacccggagaagaggctgtaccccggaggaaagtactttgatcctctcggcctagccgccgacccggagaagaaagcaaccctacaattggctgagatcaagcatgctcgccttgccatggttgctttcttggggtttgctgtccaagctgctgcaacaggcaaaggccctctcaacaattgggctactcacttgagtgacccccttcatactaccattattgacactttcacctcttaaaaaaagccatattcctttgcttttatgtagattttgctcaatgtactattatgttaacattgttaagaaaaacttgcgtatgttaataggtatctgatcggtttagatgtggttggtatgataatttatttttattatttacacattattacatgttatctagattctatattg

SEQ ID NO: 1132 - DNA, 306 bp, Gossypium hirsutum
  unsure (1)..(306): unsure at all n locations
  Clone ID: LIB3165-036-P1-K1-G2
gcacgcgnccgcccacgcgnccgttacgcgnccgcccattcgnccgctcggggaaccccttcccttggcgatgacaacattgatttggatagaagtattggtgatcggattcatcgagttccaaaggaacgccgagcttgacccggagaagaggctgtaccccggaggaaagtactttgatcctctcggcctagccgccgaccccgagaagaaagcaaccctacaattggctgagatcaagcatgctcgccttgccatggttgctttcttggggtttgctgtccaagctgctgcaacaggcaaagg

SEQ ID NO: 1133 - DNA, 493 bp, Gossypium hirsutum
  Clone ID: GOSHI-09MAY01-C6410_1
cggaaggccggggggacccacgcgtccgctttttcattggaagcttcttttttaaagagagatcagtgattggaagcttctcttccaaagatggactatgtgtacggaccaggaaagaaccatctctttgttccagggccggttaacatcccggaaccagttcttcgagccatgaacaggaacaatgaggattaccgttcccctgccattcctgccatgacaaaaactcttcttcaagatgtcaagaaaattttcaagactactactggaactccctttttgattccaactacaggaactggtgcatgggagagtgcactcactaataccctgtcccctggagatcgaactgtatcttttctaattggacaattcagtctgctgtggattgatcaacaacaacgcctcaacttcaacgtcgacgttgttgaaagtgagtggggtcaaggtgctaaccttgacattctggcagaaaaacttgcagctgatcact

SEQ ID NO: 1134 - DNA, 814 bp, Gossypium hirsutum
  Clone ID: GOSHI-09MAY01-C6420_1
cttattaaaagccaacctctcattgtttttcccctcgtcgcacacccattccgactctggattacattcagcaagccttgcacaatggccaccatcacctctgccgctgtcgctatcccatctttcaccggccttaaagccggtgcaaccgcagctaaagttagcgccacagccaaggttgcagcctctccagtcccaaggggcagcatcaaggcctccctcaaagacgtcggtgttgctgttgcggcaactgctgcaagcgcaatccttgccagcaatgccatggccattgaagtcttgctcggcagtgacgatgggggtctggctttcattcccaaagaattcagcgtaagcccaggggagaagattgtgttcaagaacaatgccggattcccacacaatgttgtgttcgatgaggacgaaatcccaagcggcgtcgacgtatccaaaatctccatgcctgaagaagagctactcaatgccaaagacgagacttacgctgttaccttgactgagaaaggaacctacagtttctactgttctcctcaccagggtgcaggtatggttggaaaagtcacagttaactgagttatacatttatcttttcaacccctttgtgctttgtatgtatcatctcacacatctcttctactttttgagcactagagttttgagtattggggatggatgaggtgatcttgaaaaatcaactatgatgcttttgtatcttcctatcttgtactttaaatttgtctcatatttgcttgtaaccggattttagttttacccttcaacatcttagctctggttaccc

SEQ ID NO: 1135 - DNA, 319 bp, Gossypium hirsutum
  unsure (1)..(319): unsure at all n locations
  Clone ID: LIB3120-024-Q1-K1-G1
ntcgccacgcgtntcgccacgcgtntcgccacgcgtnctgccacgcgtnctgccacgcgtnctgcgacgcgtggcgccacgcgtgcgcacgatgagctctgccgctgtcgctatcccatctttcaccggccttaaagccggtgcaaccgcagctaaagttagcgccacagccaaggttgcagcctctccagtcccaagggtcagcatcaaggcctccctcaaagacgtcggtgttgctgttgcggcaactgctgcaagcgcaatcctttgccacaatgccatggccattgaagtcttgctccggcagtgacgatggggg

SEQ ID NO: 1136 - DNA, 692 bp, Gossypium hirsutum
  Clone ID: GOSHI-09MAY01-C6650_1
ctaaatctacaacttcacttttctagagaaacttacttggatgcaaggggaaataaagcacaccccacgcgtccgatttcttgaattctcctctcaaccccctaaccaaatcatccatttcataaatattaatccaccaaaagaattatccattcagttcaaagacaccatgacatctacacctactcaagaaaacactcaagtagaaggatcccacgaacccacagtagaagcacccccatcggaagaagatattaagaaatggggcacgcacgtcatgggatccccagcagctcctagtgcccatccagacaaccagaaggcggctttatggaatgctagtgatcaccaacaaatctatgagctgccctatgtcgtttattcccctgcagaaagaccaagccataatccttttgaacctgtgattaacatgttcaatacctggagtaggaagaccgagtctatagcacgcaacatctggcacaaccttaaaactggaccgtctgtatcggaagcagcatggggtaaattaaacctgacagccaaagctataacagagggaggatttgagtctctgttcaagcagatttttgcaactgatacggatgaaagggttaaggaagacattcgcctggtatctctccacaacaacaggccctgttgcgggtacgctctatttatcaacggctcgg

SEQ ID NO: 1137 - DNA, 315 bp, Gossypium hirsutum
  Clone ID: GOSHI-09MAY01-C6660_1
gcgcccactcgttcggaacgccttcttcttcgcgttgcctctgcagtccactaaggaggtgcgaaccagatcttaatgaattcaagaagctctgttgcatccacagtttcctgccaatcgggaaacaaggacgactttctgttcgggattttggctagcttgcttccaagtttcctaggaacccttgttgcatacgttaactttcagttgtttaaggtcaatggacggagcctctcttcatcttatgctcatattgtaatctttacaactgtagcctctacacgctctttaaagtaatcttcgctattttttaaa

SEQ ID NO: 1138 - DNA, 470 bp, Gossypium hirsutum
  Clone ID: GOSHI-09MAY01-C6600_2
cccacgcgtccgcccacgcgtccgccaggcttttacttatcaaaataaacccatcttcttcattggcaggcaatcaaaaagccaaaaatcatggcactgagaatgtgggcttctactactgccaatgccctcaaaatttcttgcgctaccaccaaagcccctgttttctccctctccacatgcttttccactgtcttggatgggttgaaatatgctgtatcacatgaatgggtgaagcacgaaggtccagtagctaccattggcatcactgaccatgctcaggaccatttaggagaagtagtgtttgtcgagctgccagaaccaggtggttcagtgagcaaaggactagggcttggagctgttgagagtgttaaagcaaccagtgatggcaactcccctatctctggtgaaatcgttgagggtaacttcaagcttactgaaactcctggcctgatcaatatacgtccata

SEQ ID NO: 1139 - DNA, 628 bp, Gossypium hirsutum
  Clone ID: GOSHI-09MAY01-C6600_1
gatttgcagcccatcaacagagaaatcaaaagacaaaatagccaataacaatggcactcagaatgtgggcttcttccactgccaatgcactcaaaatctcttgttcctccaaacctaatgtttcccttgctttctcactctctagatgcttttccactgttttggatgggctgaagtatgctaattcacatgaatgggtgaagcatgaaggtcctgtggctaccattggcatcactgaccatgctcaggaccatcttggagaagtagtgtttgtggagttgccggaaccaggtggttcagtgagccaaggaaaagggtttggagcagtggaaagtgttaaagcaacaagtgatatcaattccccaatctccggcgaagtcgtggaggttaactccaagctgtccgaaactccgggcctgatcaactcaagcccatatgcagatggatggatgatcaaagtgaagccaagcagtccatcagagttagaatcattgatgggtccaaaggaatacaccaaattctgtgaggaagaagatgcttcccactaagaaaccattgtacccttattttcaaactttgtgttcaagaaataaggtttattgcaattttaatgttatggctatttatc

SEQ ID NO: 1140 - DNA, 601 bp, Gossypium hirsutum
  Clone ID: LIB3825-023-Q6-K6-F5
ctgtataattgcataaatttgactgaaaccattgaggagtttgaattatcatggagttcccttattgagaagtataatcttagtgcacatgattggcttcaatcattatatagtgctcgagctcaatgggtccctgtctattttcgggattccttttttgctgcaatatctctcaatcaaggatttgatggctctttttttgatggttatgtgaatcaacagaccacgattcctatgttctttagacagtatgaacgagcaatggagaattggtttgaaagggagatcgaagctgattttgacagtatttgcacgacacctgtgctgcggacaccatctcctatggagaaacaagcagcagacctatatacacggaaaatattcacaaaatttcaagaagaactagtcgaaacatttgtttatactgctaatagaattgatggggatgaaactatcagcacatttagagttgcaaagtttgaggacgtcaacaaagcatacatggttacattaaactaccctgaaatgagagctaattgtagttgtcaaatgttcgagtattctggcatcctttgtagacatgttttaacggtcttcactg

SEQ ID NO: 1141 - DNA, 544 bp, Gossypium hirsutum
  unsure (1)..(544): unsure at all n locations
  Clone ID: LIB3585-048-Q6-K1-E4
cccacgcgtncgcccactccttctcttattcatacagaattaactagcaatagataactgttacactatgggtgattgaaactgattacacacactatgccctacaccggacctgcgcacaccatcacctatggagaaacaggcacttgatctatatacaaggaaaattctcacaaaatttcaagaagaactagttgaaacttttgtttacactgctaatagaattgaaggtgatggagctatcagcacattcagagttgcaaagtatgaggatgtcaacaaagtgtacatggtaacattaaactaccctgaaataagagctaattgtagctgccaaatgtttgagtattctggcatcctttgtagacatattttaacggtcttcactgtgacaaatgtacttacattaccaccacattacattctgaaacgatggacacgaaatgcaaagtctggngttggaactgatgaatgtggtgccgacttgcatggtcaggagtccttggcatcaaggtataatagtttgtgtcgggaagcaatcaaa

SEQ ID NO: 1142 - DNA, 1318 bp, Gossypium hirsutum
  Clone ID: GOSHI-09MAY01-C6150_1
gcaaagtgtggctctcttttccaggccgcgagcctctttcgccctccaccaccaacgacaacaacgacgaagatgttcgccaattttaaagcttcaagttctgtcctcctgttttcccggatctccctctatttttccaccaacttgttcttcgaatcaactctcacaatccccttccatcatgtctctaacaattaaatctcacttcgcttctcgtacttacctcagcttcaccactaaacccagcagattcacgggttataacactaagatccgaccaaattctatttaccattttaatcctttaagattaacttattaccaacccaaaaaaatgcaagcccccgtccagtattctccggctcccttgatcaagagctcgttgatcgagcctgatggcggggccctcgtcgatctggtagtcccagagggcgaaaggggagcgaagacgattgaggccgagtcattgccgaaggtgaggctaaccaaaatcgacgtggagtgggtgcatgtaatcagcgaaggctgggctaatcctttgaaaggatttatgagggaagatgagtatttgcaaagcttacattttagttctctgagattgaaagatgggtatgttgtcaacatgtcacttcccattgttttggctattgatgatgagactaaggagagaatcgggtcttcttcccatgttgggttggttggacctgatggagacttgatcgccattcttaggagcattgaaatctacaagcataacaaagaagaaagaatagctagaacatggggaacaactgcaccaggtttgccatacgtggaggaagtcattactcctgctggaaactggctcattggaggtgacctagaagttttgaaacctataaaatataatgatgggcttgatcactacagactttcccccaagcaactcagaaaggaattcgataggcgtaatgctgatgctgtttttgcttttcagctaaggaatcctgtgcataatggacatgcactattgatgaatgattcctcggagacgacttctggaaatgggtttcaagaatccaatcctcttacttcatcctttaggtggtttcaccaaggctgatgatgtgcccttggatgttcggatggagcaacacagcaaggtcctagaagatggagtccttgaccctgagactaccattgtggccatttttccatcacctatgcattatgcaggtccaacagaggtacagtggcatgccaaggcaaggataaatgctggggctaacttttatattgttggccgggattctgccggaattggttaccccaacagaga

SEQ ID NO: 1143 - DNA, 519 bp, Gossypium hirsutum
  Clone ID: GOSHI-09MAY01-C6170_1
cccacgcgtccgcccacgcgtccgggaaaaagaaaaagtgggttttatttttcgatgaaaatgagtaaagcatcaattgttttactctattttggcttcatattcatccattgtgaagctaaatcgatcagagaaaagcctcaagcttttgagtccttcaatgtcagttatatacagaatttagggagctgttcttactcggtggtttttacaacgagctgttcatcaactagttacactcgagatcaaatcagtattgctttcggtgatgcctatggtaaccagatatatgtgccgaggttggatgatccagcgtctagggcatttgaacaatgttcttcagataagtttgagattaaaggaccatgtgcgtatcagatctgctatgtttatctctaccgaactggaccagatggttcgaagccggagcaggtgaagatttatggctataattcaagggctgttacattttactatgacaccttcattccaagtgacactttggtatggatttaatta

SEQ ID NO: 1144 - DNA, 414 bp, Gossypium hirsutum
  Clone ID: LIB3145-034-Q1-K1-H6
cccggcccgagcgacgcgtccggcataagccagccaaccggtcctctagtgtccgttatatacagagtttatggagcggttgttactcggtggtttttacaacgagctgttcatcaactagttacactcgagatcaaatcagtattgctttcggtgatgcctatggtaaccagatatatgtgccgaggttggatgatccagcgtctagggcatttgaacaatgttcttcagataagtttgagattaaaggaccatgtgcgtatcagatctgctatgtttatctctaccgaactggaccagatggttggaagccggagcaggtgaagatttatggctataattcaagggctgttacattttactatgacaccttcattccaggttacacttggtatggatttaattattgcaata

SEQ ID NO: 1145 - DNA, 680 bp, Gossypium hirsutum
  Clone ID: GOSHI-09MAY01-C6160_2
aggtttctcattttcctaataatttcctcctttatttcaaaatttcctttcatcctcctccatcacatacgcaatggattaacgttattccaggaaacagaacggtccacctccgaggccgttaccgatttaccgcaagaacgatctctacctatcacccatcatgtacgatcttcaatgtacccgaggatcgtggtcaacccgccgctcacaggtgttgcccctcccaccactcgcgcctcttctttccaccagaattcttcgccttcctcttcctcgggattgggcattagggttgctttgaaacagaatatcgatacacctcgctcagtgtctccaagttggatattcctcgaagcaattttcagtttgatttcgagtttgagaggaaaattttggctgaagcagaaaaagaaaacatgaattggagtaagcttggcttgaaaaacctttcttacaagcctatcgaaacttcttcttcaacggtacgctttagacctgtctttgattaacgttgtaacctgtctgttcgatggttatctgtgatgacattttttaggattttgttttaatgagattggttcatattgggtgagctttaaagggtttctctttgaagaaacagaacaatgatttgaatgtacatggtgcagactcaaatcctggagagcaaatacatt

SEQ ID NO: 1146 - DNA, 677 bp, Gossypium hirsutum
  Clone ID: GOSHI-09MAY01-C6160_1
taaattttctttcatcctctccgatcacattcgcaatggattacgatttcaggaacagaacgggtccaccgtacgaggcgcagatcccgatttaccggcaacaacccacttcatcgtcatctacccatccgatgtacggatcttcaatgtacccgaggatcggtggtcaacccgccgctcacagtgttgcccctcccaccactcgcgcctcttctttccaccagaattcttcgccttcctcttcctcgggattgggcattagggttgctttgaaaccagaatatcgtattacacctccgcctcagttgtctccccaagttggggatattcctcgaagcaattttcagtttgatttcgagtttgagaggaaaattttggctgaagcagaaaaagaaaacatgaattggagtaagcttggcttggaaaacctttcttccaagcctatcgaaacttcttcttctacgggtgcaaactcagatcctgtggtgagcaaatacattgcctctggactcagccgagaagcagtgaccctcgcagttgcaaattacggcgacaatccaaccaaggttcgggaatttgtcaccggttacaacctactgcgagaaatggggttctcatcaaacaatgtggctgaagccttactcatgtatgacaatgacacagacaaggcattggct

SEQ ID NO: 1147 - DNA, 367 bp, Gossypium hirsutum
  Clone ID: GOSHI-09MAY01-C6100_1
gaaggaactggcacaagccctaatgctgatctaagatatatatatctcatgaacagcagtattgctgggcttgagaaggctgacgtattccttttggttgctacccagccaagggttgaagctgctatggtaaatgccagaattcgtaaaacagttcgagcatcaaatgctaaagttgcctatattggtccgccaaccgaattcaactatgattgcccccaccttggttctggccccctcacacgtaataacgaagagggaaaaacccatacttgattgacatacaacccaagtttctagaggtctactctggccttaaatgaggagcttttttatgacccggcttttaaattttactgattccttc

SEQ ID NO: 1148 - DNA, 217 bp, Gossypium hirsutum
  Clone ID: LIB3189-003-P1-K1-E10
tattggtccgccaaccgaattcaactatgattgccagcatcttggtactggcccacaaacactgacagaaattgctgagggtcgtcattctttttgctcggccatctcaaatgccaaaaacccagccatcattgttggtgctggcctgtttgagagggacgacaaagatgcaatttttgctgctgttgaagccattgcgaagaatggaaatgtcatc

SEQ ID NO: 1149 - DNA, 665 bp, Gossypium hirsutum
  Clone ID: GOSHI-09MAY01-C6090_1
cccacgcgtccgcccacgcgtccgtaagcagcgagtcgggagggagacagagtcgagtcgactcgagtgaagctactcgctgtttcaatcaaactttcaaatcttttgaagccaaacctaatccatcagactttctttttcttgcatgtcctaaaggagatagatttttgtatcatttaagaaaagaaaaaagatctcaacaagttcacagcagcatttcaacaatgaacaggatttttgcaacaaaagctggctcaaatgtttatagattgagaattccttggaggccactttctaatgatgctgccccactattatctagccaaaatgctggaaaccctgaaaaagagagtgaagctaaacaatatgacattgcaattgttggaggtggcatggttggcctggccctcgcttgttccttagctagtagaccgttaacaagacacttgaatgttgccatcatcgatagcaatccagctttggggagaaaacacttcattaagaaagaagacctccctgacccaagggtcagtacaattacacctgcgactatatctttctttaaagatattggtgcttggcaatttgttgagcagcatccacttgcctactttgataagatgcaggttcggtactatactggtttaagctactcaaaattcaat

SEQ ID NO: 1150 - DNA, 1383 bp, Gossypium hirsutum
  Clone ID: GOSHI-09MAY01-C6060_1
caaacatgacatcttgccatccatcttatggccgtaaggatcttcttgttgattgttgcccaccaggattccagttaccgctacccttcgttgatttccagtttcccgatccccagtccccattaagaatccaccgcccagcccatgctgtcgatgtcgactacatcgctaaatatgacaaggcattgtccataatgaagtcgctaccacaccatgaccctcgaagtttctcccgtcaggcaaacttgcactgtctcttctgcaccggagcctacgaccaacaaaactccaatgctccgctcagtatccaccgcacatggttgtttttcccatggcatcgaatgatgatatacttccacgaacgtatcctcggtagtctcatcggagacgaaacgtttgctttgccatattgggcttgggacatccctcaagggatggtgatacccgatatgtacaccaacaatagttcatctttttatcatacaatgcgcgacgtttctcatcttccaccacaaacggcggatttaaactatgtttcggacacaaaactaatccctgaagatcaaatagatataaatcttgcatttatgtatataaccaaatggtgtctggagcaagaaagaccgaactgttcagggggtgtacatataaagctggaaaggaaggttactgtaatggaccaggcacaatagagcttgcccctcacaacgctttgcacacatggatcgggagcagcttaaaccctggaagggaagatatgggtaagttttactctgcagcaaaggaccgtattttctacgcacaccatgcaaacatagatcgcctatgggaagtttggagggaagctcataaacaacaattggatatcaaagatccagattggctcgactctttcttttacttctatgatgagaatttgaggctcgtgagggttaaagtcggtgatgttgtggatacaatcaaactgggttattcttatgaacaggttcaccgtccgtggttgaatatgcgtcccaagccttcttacccaccaaaactagctcgtcaaacgttgaaaacgaaagagaagaacaaattagaaatgttgtcaaggacccatgtttcgtcctccgagttggatactcatggtcgagctctggacgctagcttgacagtaaaggttaggaaccattggaggaagatggagaaacaacaggataaggtcctggttgtgcccgggattgaagtgaagggagatgcatatgttaagtttgatgtgtgtgttaacttgattgatcagttcaagaatccacccaaagttcagggaatttgcggggacctcccctcccattcccggcggcggaccccggatgaatatcattgaaccttaaccttggaattttc

SEQ ID NO: 1151 - DNA, 683 bp, Gossypium hirsutum
  unsure (1)..(683): unsure at all n locations
  Clone ID: AI728976.1
gcacacatggatcgggagcagcttaaaccctggaagggaagatatgggtaagttttactctgcagcaaaggaccgtattttctacgcacaccatgcaaacatagatcgcctatgggaagtttggagggaagctcataaacaacaattggatatcaaagatccagattggctcgactctttcttttacttctatgatgaaaatttgaggctcgtgagggttaaattccgtgatgttgtggatacaatcaaactgggttattcttatgaacaagttcaccgtccgtggttgaatatgcgtcccaagccttcttacccaccaaaactaactcgtccaacgttgaaaacgaaagagaaaaaccaattngaaatgttgttcaggaaccatgtttcttcctcccaattggaaactcattgtcgaactctggaagccagcttgaaattaaagttaggaaaccatgggaggaagaaggagannnaaaagaaaaaggttctggttttcccccggaattaaattaaaggagaaagccccccttcaatttggaagtttttttttaacctgaaatgaattatgtccagaattaaccccacgtttcctggaaatttatgtgggacgtcccctcccatttccgggccgggggagacccggaaagaaaaaaaatataacctttcccttgggaattgtt

SEQ ID NO: 1152 - DNA, 622 bp, Gossypium hirsutum
  Clone ID: GOSHI-09MAY01-C6010_1
ggaatggctattattataatctaatctttcaccgtgtcatcaaagggttcatgatgcaaacaggagatccattgggagaccgcactggtgggcagtctatttggggaagggaatttgaggatgagtttcataggaagtggacgacatgacaggcctttcacagtgtcgatggctaatgctggccccaatacgaatggctcacagttctttataaccacagtggctactccatggttggacaataagcatactgtatttggtagagttgttaacggaatggatgtggtgcacggtattgagaaagtgaagacagacaaagctgacaagccatatcaagatgttaaaatcttaaatgtgactgtgccgaagtcttaagagttgcttgccgtggtgaattatgtcttggatattgtttgacctgcattaacaattggccatgagaagctggttggtttgtttagtccattttagaacgttcattttaccaatgttcagctttcatattggttctaatttgtttagccagcaagtcaagattattgtggagcactttcacattgccaggtataccagactagaacatgtttggaatcagaatacttttcccttatcaagcgggcat

SEQ ID NO: 1153 - DNA, 615 bp, Gossypium hirsutum
  Clone ID: GOSHI-09MAY01-C6020_1
gaacattcgaaaagttctcattatcctaatcagttcttgtttgactatgtatttggctttttgaaatattttgacaggcatttttggcattacaaaagttcaaaagtcatcagctatcttttatcttaaactataatcttgtaggcttttttccttggatattacagttaatgtttgcctgtttttctggtcaaatttacttgctagtgctgattgtttttgaaaccaatagtactcttatttgttgcatttattcaattccttgctgctggttgcattactaccaaggctgcctgacgttttcatacatgtgttccaatttctccttttcttttctttcaagttctggacctaagtgtaagttcctacaagaggaacaagcagatccttccacagaccactcataatcttctgttggaacggcgacttataccaccgccctcatcttcaatggttgtttctccattttcttatcaaaactgatataaatgtatgcattattcaatccctgataagttaccagtcaactatggcctctctcaaaccagtttgaaacaactcattcttattttcaataatccagctactgtttcatccaaactcttgaattcacac

SEQ ID NO: 1154 - DNA, 668 bp, Gossypium hirsutum
  Clone ID: GOSHI-09MAY01-C6370_1
gctggacgcccgcgggcccggttccgggttcccggcacgacccacgcgatccgttatgatggtcggagaaactcaccgtcttaatccgacggtccatgttccaccatggcctaacctcgacgatgatcaaacggccgagatttactctccactcaactacaatgcagccgatagtcacttcaacaacaacggcggcaacccggttcatttccatgaagcgttagcagcgttacaacgttacttgccgtcgaacgaaccggactttgtctacccagattccgatcttccggttctcgaaaacgcggattctccggtcgacgcttactcgtgcgatcatttcaggatgttcgagttcaaaatccggaagtgtccacgtggccgagcccatgactggaccgagtgtccgtacgcacatcccggcgagaaagctcgccggagggatccgaggaagtatcattactccggcactgcttgtgctgatttcaggaaagggaactgccggaaaggcgacggttgtgagttcgctcacggcgttttcgaatgttggctccacccagctcggtaccggaccgaactgtgtaaagatggaccaggttgtaagcgtaagggttgtttctttgctcatagtctagaccagcttagggtcggagctccgccagttctggctc

SEQ ID NO: 1155 - DNA, 358 bp, Gossypium hirsutum
  Clone ID: LIB3582-014-P1-K1-A1
cccacgcgtccgcccacgcgtccgcccacgcgtccgcccacgcgtccggaaaaatatgatggtcggagaaactcaccgtcttaatccgacggtccatgttccaccatggcctaacctcgacgatgatcaaacggccgagatttactctccactcaactacaatgcagccgatagtcacttcaacaacaacggcggcaacccggttcatttccatgaagcgttagcagcgttacaacgttacttgccgtcgaacgaaccggactttgtctacccagattccgatcttccggttctcgaaaacgcggattctccggtcgacgcttactcgtgcgatcatttcaggatgttcgagttcaaa

SEQ ID NO: 1156 - DNA, 734 bp, Gossypium hirsutum
  Clone ID: GOSHI-09MAY01-C6310_2
atcatagcactctttcttgcatagcatgcaaccgttaagcagagaagatatgatgttgcacgccatgaaatctataataacctttatgcaaacctacttacaaacgacctgacgggctattatgcaacacaagaaactgaacactactgacatcttgacttgacaacagctttcccaagaggatttgctttcgaagttatccaagtctactctggcccgccatcgattgtgtataagttcaggcactgggggtataaggaaggtcctttcaaaggccatccccctactggggaacttgttcaactttatggaatatcaatttttgacgctgacgatgagatgaatatcttgaaggtggagttcttttttgatcgtggggagctgcttggaggtcttatgaaaggtgataaattgactagtggaactgaccaagcggctttgagctgcccattcttgaggaacacagggtagcctagcgttgatgggtatgcatgaattgcagcgtttagctttgatgggaatgcatgaatttagtgtttgagaaataaaactgatggatcattacataatatagaatagtgagcttccatttacttctgctgattcacttatgcctgccatctatatgtatctgtagaaattgagatgtacaagcacacgagcataacatggcctggttgtatttttcaggacgaatatagtttcggtttctacatattgattcttgctgaaaa

SEQ ID NO: 1157 - DNA, 657 bp, Gossypium hirsutum
  Clone ID: GOSHI-09MAY01-C6310_1
cccacgcgtccgcccacgcgtccgcccacgcgtgcgcttagaaccttttcttgcacgtgaaaatggattcttcactcactgatcagcagcaagacaagtaccgttcttacttgcatggagaaggtgaaaagaataccaactggaagcttggtgctcctccaaactatgacactgttaacaagctctttgaagaaggccgaaccaagatatggcctcctgcatcactagaagagaaggtccagaaccttgtgaagacatgggaaatggaaatgttcaataaaatatccttccctgactacaaatcagtgaaactacagaattatacagtcagcgtgaatgggaggaaacctttgagtttagaagagaagaggaagctgggaggaggctataattcctttatgcaaacctccttaccagaggacctgaggggctataatccagcacaagaaactgaacactcctcacatcttgccttcacaacagctttcccaagaggatttgctttggaagttatccaagtctactctggcccgccatcgattgtgtataagttcaggcactgggggtataagggagggcctttcaaaggccatgcccctactggggaactgttcaacttatggaatatcaattttgaggttgacgatgagatgaaaa

SEQ ID NO: 1158 - DNA, 849 bp, Gossypium hirsutum
  Clone ID: GOSHI-09MAY01-C6330_2
tcacctcgcctaaaaaaataagtacaccaatgggagcaacgaagaacatctggaccgccatggaagcaaaccatgctaaacaaagccacaacggcaattcaaccttcgatgatcattcaatccttcactctaatctctcagttgataccgcccttccttttccccttatggtccctcgcgtcatcgccttgtgcaaggatctgtttcggaaatgggctaagttgaacgattcttgcttctccgtcgacactgtatcaggcggcatcacgaatcttctgctgaaggtttctgtcaaggaagaaaatggagaatatgtgtctgtaacagttagattgtatggacccaacactgaatatgtcatcaatcgggaacgtgagttacaggcgatcaaatacctctcggctgcaggatttggtgccaagttgcttggtgtatttggaaatgggatggtacaatcttttatatatgcacgtaccttaactccagcagatatgagaaagccaaagctggtttctgaaatcgcgaagcaacttcgaagattccatcaagtggaaattccaggttctaaagaacctcagctatgggttgacatcttcaagttctttgagaaagcatctactctccagtttgaagatactgataaacaaaggacatatgagttaatttcgttcaaggaagtgcataaggaagttaaagagctgaaggaactgacaacccttctcaattcttcagtggtgtttgcttacaatgatttgctttctgggaatttgatgcataatgatgaacaagaaaagctctacttgatagactttgagtatgggtcttacaatttcagaggcttttacattt

SEQ ID NO: 1159 - DNA, 1267 bp, Gossypium hirsutum
  Clone ID: GOSHI-09MAY01-C6330_1
gcttggtgtatttggaaatgggatggtacaatcttttataaatgcacgtaccttaactccagcaggtaagcatcagagagataaactccgggagtaggactttcacatgaagttgtgttcttaagacatcagttatttgagagggtttatgccttcgagcatcttagtctcatgttctgtgctggcggcatcagtaataaagttctctgcctcttgaagcttttacggtattatagatatttggcctaggtggtatgattaaatagtctacaaggcattgacttctgtggcaactaatttctacctttaatactgacaattgttattttaactgaaggtattgttcggcccgcaagctgcgtgctaatatacttttacctattttccccttgccagatatgagaaagccaaagctggtttctgaaatcgcgaagcaacttcgaagattccatcaagtggaaattctaggttctaaagaacctcagctatgggttgacatcttcaagttctttgagaaagcatctactctccagtttgaagatactgataacaaaggacatatgagacaattcgttcaaggaagtgcataggaagtacagagcttgagtggtgttgctcacaatgattggcttctggaaatgatgcataatgaggaacaagaaaggctctacttgatagactttgagtatgggtcttacaagtacagaggctttgacattggaaatcacttcaatgaatatgctggatatgactgtgactatagcttgtatccgagtaaagatgaacaatatcattttttcaggcattatttagaacctgaaaaaccccgccgcgtcccagaaaaagaccttgaagctctgtatgtggagactaatacgttcatgttagcttcacatttatattgggcgttatgggccttaatccaggcaaggatgtcacccatcgattttgattatctcgggtatttcttcttgcggtacaatgagtataagaagcagaagagaatgtgtttctcccttgcaaaatctcacatatctggttctggaaaagcataagactctgatggcgttcgcacgaatagccagtttctgtatgtcatggatttgcatgttttgagtattttgattccgtgtgtgttggtattcttggaaaatattcttccctaatttggatacctttatgagaaggaaacttaaaaacaagatcgaaagaattaagcatttccgggtcacccccggtttagcaggcaggtgactggcctagatgt

SEQ ID NO: 1160 - DNA, 854 bp, Gossypium hirsutum
  Clone ID: GOSHI-09MAY01-C6280_1
cggacgcgtggggcacatatttctatttcccactctcttttttgctctcagttaacaacaaaatccgtaaatggctaccactgcttctccaatggcgactcagctgaagagcagctttacgtcgtctgttacaagaggactggtagtccccaggggcatttcgggatccccgttcaaagtatcttccggaaagaccaggaccccttgcttcactgtcaaagctgttcaatccgacaagtcaacatttcaagtaatccaacccatcaacggcgaccccttcattggaagcctggagactccaatcacctcaagccccttaattgcatggtacctttccaacctcccagcctataggacggcagtgaacccacttctgaggggaatcgaagtgggtctggctcacggcttcctcctggtgggtccattcgttaaggccggccctctaaggaacactgcggtggcgggtcaagctgggtccttagccgctgccggtctggttgtgatcctcagcatttgcttgacgatgtatggcgttgcgtcgttcaaagaaggtgagccatcgatagcaccgagcctaaccctgactgggaggaagaaagagccagaccagttgcaaacggcggatggatgggctaagttcactggagggttcttctttggtggaatctctggtgtcacttgggcttacttcctcctgtatgtccttgaccttccttactactttaagtagagcatcatttgatctatgttttacctgggtcccttttttaatgtaaatctttgtatccaggacgatcctttgggaacgaatatcaattatatcaagtgattgtcactctaattttaagttattt

SEQ ID NO: 1161 - DNA, 373 bp, Gossypium hirsutum
  unsure (1)..(373): unsure at all n locations
  Clone ID: LIB3165-050-Q1-K1-C5
tcgnccacttttattattattttttctcaattaattttaaaaccccttaatggggtcccctgggggttcaattgtgactcaactgaagaacaacttaatgtcgtctgcatacaaaaggacttgtaaaccccaggggcatttcgggatccccgtttaaagtatcttccggaaagaccaggacccctagcttcactgtcaaagctgttcaatccgacaagtcaacatttcaagtaattcaacccatcaacgtcgaccccttcattggaagcctggagactccaatcacctcaagccccttaattgcatggtacctttccaacctcccagcctatatgacggcagtgaacccacttttgaggggaatcgaagtggg

SEQ ID NO: 1162 - DNA, 439 bp, Gossypium hirsutum
  Clone ID: GOSHI-09MAY01-C6240_2
cccacgcgttctctcaaagttcactacttgtgtgcagacaaaaatggcttttgctgggtttttcttgttgggtttactttcaatggtctcagctgttcatggatatggtggtggatggactaatgctcatgctactttctatggtgggagtgatgcttcaggcacaatgggtggtgcttgtggttatgggaacctgtatagccagggatatgggacaaacaccgcagctttgagcacagctctgttcaacaatgggcttagctgtgggtcttgctatgagattaagtgtgtgaatgatggcaagtggtgcctgcctggttccattgtggtcactgctaccaatttctgccctccaaacaatgctctcccaaacaatgctggtgggtggtgcaaccctcccctgcaacactttgacctttctcagcctgtcttcaacaca

SEQ ID NO: 1163 - DNA, 540 bp, Gossypium hirsutum
  Clone ID: GOSHI-09MAY01-C6240_1
cccatgctaacgcccacgcgtccgcccacgcatccggagcaaatataaaaaatgctggggtggtcttgtcgggtttactttcaatggtctcagccgttcatggatatggtggtggatggactaatgctcatgctactttctatggtgggagtgatgcttcaggcacaatgggtggtgcttgtggttatgggaacctgtatagccagggatatgggacaaacaccgcagctttgagcacagctctgttcaacaatgggcttagctgtgggtcttgctatgagattaagtgtgcgaatgatggcaagtggtgcctgcctggttccattgtggtcactgccaccaatttctgccctccaaacaatgctctcccaaacaatgctggtgggtggtgcaaccctcccctgcaacactttgacctttctcagcctgtcttccaacacattgctcagtacaaagctggaattgtgcctgtttcttacagaagggtaccatgcaggagaaagggagggataaggttcacaatcaacggccactcctact

SEQ ID NO: 1164 - DNA, 1405 bp, Gossypium hirsutum
  Clone ID: GOSHI-09MAY01-C6210_2
agttaatgagactgaaatttttttttttgaaagctgcctttgcaatcattttcggcggttttctctctctctctatcagaccatgaattcataatcatcgtcgtcgtcgtctccttcatcgatatatctctttcgaatacgtttagaggaaaaaggaaaaggaaaacgggtacatacatggcgtttcaccatagcagcacccacctttctcaagaccttcctctccttcactttaccgaccagcaacagcaacagcaacaacccaaccaagcccagcaaggcgaccaacttcaggaaaccgccgctcccaattggttaaactccgcccttctccgtccccaacagccgcaaccaccgcaaccccacccgcacttctccgaccctaactttcttaaccttcatactactacaactgcttccgactccaccgcggcttcccaagctcctaacccgatgctctcccgttcatcctcttcgcttcttcatcgaaaccacagcaacgtcatcgacgacgcggctgcggcggcagcagctgcggtggcagcagctgcggtaggaggaggtgttatggccgtggaatcgggtgatttgaagaacagcatcagcgagactatgaataataataagagcgaaggcgtggtggtggagagtggaggaggaggaggcggagatgggattgtgaattggcaaaatgcgagatacaaggcagagattctagctcacccattttacgagcaactattgtcagcacacgtggcgtgcctttggatcgccacgccagtggatcagcttccgaggatcgacgctcagctggctcagtcgcagcatgtggtggctaaatactcagctctcggtggagggtcgcagggcttggttagtgatgacaaagaactcgatcagttcatgacgcattatgttctgttgttatgttcgtttaaagaacaattacaacaacatgttcgtgtccatgcgatggaagcagtgatggctcgctcgcggggggagcaatccttacagagcttaacaggtgtttccccaggggaaggaacaggtgctacaatgtcggatgatgatgatgaccaagtcgacagtgatgccaacttgtttgatgcaagtttggagggtccagattcattggggtttgggcctctggtcccaacagagagtgaaaggtctttgatggagcgtgtgaggcatgaactcaaacatgaactcaaacagggttacaaggagaagatcgtggacataagggaggaaattttgcgcaagagaagggcaggaaaacttcctggtgacacaacttcggttttaaaagcttggtggcagtcacattccaagtggccataccccactgaggaagataaggcaaagttggtacaggaaacaggtttacaattaaaacaaa

SEQ ID NO: 1165 - DNA, 1092 bp, Gossypium hirsutum
  Clone ID: GOSHI-09MAY01-C6210_1
ggtcccaaactctgcaagctaacacctggcaaaatacgaggtgcaaggcagagatattagcccaccctttgtacgagcagctactgtcggcgcacgtgtcgtgtcttaggatcgccacgccggtggaccagctcccgaggattgacgctcagctggatcagtcgcagcacgtggtggccaagtactccgctctcggcggcgcagcccagggcttggttgcggacgacaaagaactcgatcagttcatgacgcaatatgttgtattgctatgttcgtttaaagaacaattgcaacaacatgttcgggtccacgcaatggaagcagttatggcatgctgggaaattgaacaatccttacagagcttaacaggagtttcaccgggggaaggtacgggggcaacaatgtcagatgatgatgaagaccaagtggagagtgatgcaaatatgtttgatgcccgcgccgccggtcctgattcaatgggatttggccctctcattccgacagagactgaaaggtctttgatggagcgtgtgagacgggaactcaaacacgaactcaaacagggttacaaagagaagattgttgacataagggaggaaattttacgtaagagaagggcaggaaagcttccaggggatacgacgtcggttttaaaagcttggtggcaggcacattccaagtggccataccctactgaggaagataaggcaaggttggttcaagaaacagggttacaattaaaacagataaacaattggttcatcaatcaaaggaagagaaactggcatactaatccatctacttctaccgccttgaagaccaaacggaagaagtaaaggtaactattgcaggtgccttgtcgtccttgcaaataagtaatgcagcagaggttcatgtaaatggttagacaatcacaacatcgttgaatttgcaaccatataggctttaaagtggaacagatttttggtttcaatatgagaaaaagggcaacacagagtacgagattgtaatttaatcgtgccatcttgaagatatggcgtagttcgaggcacgccagtttggtgatatatgctggccttgctacgctgttag

SEQ ID NO: 1166 - DNA, 376 bp, Gossypium hirsutum
  Clone ID: LIB3048-037-Q1-L1-B5
tccccaagtctgcaggctttcacctcgcaaaatagggggtgcaaggcagggatattagcccacacttgtgtctaatttatacggggcgacgggcgtgtcctgtattacgatcgccacgccggtggaccagctcccgaggattgacgctcagctagatcagtcgcagcacgtggtgactttatactccgctctcagcaagcagcccacagcttggttgcagacgacatataactcgatcagttcatgacacaatatgttgtattgctatgttcgtttaaagaacaattgcaacaacatgatcagttccacacaatggaagcagttatggcatactcggaaaatgaacaatccttacagagctttacatgattttcac

SEQ ID NO: 1167 - DNA, 346 bp, Gossypium hirsutum
  Clone ID: LIB3585-048-Q6-K1-G6
tgatgaccaagtcgacagtgatgccaacttgtttgatacatgtttggatggtacagattcaatggggtgtggacgtttgatcccaacagagagtgaaaggtctttgatggagcgtgtgaggcatgaactcaaacatgaactcaaacagggttacaaggagaagatcgtggacataagggaggaaattttgcgaaaaagaagggccggaaaacttcccggcgatacaacatcggttttaaaagcttggtggcagtcacattccaagtggccttaccctactgtaagtgctacttcaccaagatctctttaattaaactctaaatgttaactaatttttcttttgcat

SEQ ID NO: 1168 - DNA, 697 bp, Gossypium hirsutum
  Clone ID: GOSHI-09MAY01-C6230_1
ccataacaagggatggaaaacacacgccatccctctcaccactaaaccccaaccatcgtttatcatggcttcctcaactctctcccctgcagctccttggcagctatgctccagcaagagtggcatgttctgcccatcacgagcgtttcttgtgaaaccagcgaggacccatatggtcaaaaacgaaaagggaatgaggatcacatgccaggccactagcatccctgctgatagagtgccagacatgggcaagaggcagctcatgaatctgcttctgttgggggctatttcactcccctcaggtttcatgttggttccttatgcagccttctttgtgccatctgggggacggggtaccggtggtggcaccgttgccaaggacgcaatcgggaatgatgtaattgctgaagaatggctcaagactcatggccctggggaccgaaccctgactcaaggattgaagggagacccaacctacctagtggtagagaaagacagaacccttgcaacatatggtataaatgctgtgtgcacacaccttgggtgtgttgttccgtggaatcaagccgagaacaagttcatatgcccctgccatggatcccaatacaacgatcaaggatgagttgtgagaggacctgccccccttgtccttggcattggcacacgctggtgttgaagacgggaaggtagttttttt

SEQ ID NO: 1169 - DNA, 421 bp, Gossypium hirsutum
  Clone ID: LIB3149-053-Q1-K1-D12
gataaatttacgtcccaagatctacatcgataacaaacagcatggtccactactcgttcagagcgcagattaactagagtaggcatatagtctccatgatgctctgcaaactgtgatagtgatctctgagggttactgtgaattccagagcgtaccgtgcaaattgattaaatcgggatgtcataataagtagttaggattcgagctagtgctttgcaatatattgtatgcactcttgacccacaatcaactccttggagttcccgtggaatcaagccgagaacaagttcatatgcccctgccatggatcccaatacaacgatcaatgaagagttgtgagaagacctgcccccttgtccttggcattggcacacgctggtgttgaaaacgggaaagtagtatttgttccatgggtggaaac

SEQ ID NO: 1170 - DNA, 1425 bp, Gossypium hirsutum
  Clone ID: GOSHI-09MAY01-C7930_2
ccccctcattctgagaaccctcatatggatactactcctcctcttgataacccggatggcatgggtagttcacacatagatattcaacaagatctcaactctcatatggatactccccctcatactgaaaaccctaatgatatgggcagtccacatatagatattcatcaagatctgtttccagattactatggtggaacagcttctgctccggctccggcttctgccctggattctgctccgtctgagccaaaacttgaatttgagggaaatgataaccataatggaaataatgatagtgctcctgtaattaaagataataattcccctccaccagttccacctggtagtagtggggaaggattaccttatgccccacccccagctgaaactgaagatacgaatagcggtcttgatttgtctttcttagacaatgaaacgggaagagcggaattcgacaactacctcagttctttggatgaaatccttgctcagcctttctctgaagaaccattttcccatccagcagagatgcaaaactcgtttgcaggagacagcgaaatggctgaagctcgaaggaaactatcttcccccccccgtgcgccctcccctccgcggacgcgcggcaaagaccttgaagaacttgcgagtctagcatccaaactccgaaaagaccccactcttactgccgagcaactcgcgaagctgaagttaatagaagagatcccatcattttgcgaggtgttcctcgaaaacagggaagtaatggaacaggcagataagttctttagaggccttgacgacaacagggccaaggtctcttccctgaaacaagaatacagcgagttaaaacaacaggtaacaaacctagagtctgaggtagattcgaacacaatgaccgtgcaagatatcgacaaccagatagcacagctcaaagcacatcgagccgagctcacgaaactgatagacaagaagaaaagagacaaggatgaattgacatataaccaaaagttggtggcaaactcgataccgaaagtggtgcatgaggttcagctggctaatgctaaaaaaccagaatgggaggtaaagaaggaaaatgcattaaagcgtgaaggtgaaatactagctaaatttgctcctttaaaaggggtttccctttgaaagaaattatgtggtatcatatcattggctggtgggaatatcttgaacaccatagggatgggactagttttatatttatttagtggtaatttaataacagtggtagctttgctgagactgcaatttggtagtgtattgcttttgaggattgttgtaacttggtaactttggctagtgccccctttgtacttttgaaccgtcaaaactcagtaattactgtttctagttttaactttttgtaataatgtcaaaatttgatatttt

SEQ ID NO: 1171 - DNA, 783 bp, Gossypium hirsutum
  Clone ID: GOSHI-09MAY01-C7930_1
gggttcgcggacgcgtgcggagaaccctcatatggatactactcctcctcttgataacccccatgacatgggtagttcacacatagatattcaacaagatctcaactctcatatggatactccccctcatactgaaaaccctaatgatatgggcagtccacatatagatattcatcaagatctgtttccagattactatggtggaacagcttctgctccggctccggctcctgccctggattctgctccgtctgagccaaaacttgaatttgagggaaatgataaccataatggaaataatgatagtgctcctgtaattaaagataataattcccctccaccagttccacctggtagtagtggggaaggattaccttatgctcctatacattggccaaatgctggtgatatttggacctggaaagtggggaggagagtcaacagtgctggcttctatggtgatagatttctccatcttcccgaaagtcttcgaaaggcaaatagtccaaaagtctttgcgagcaagccagcacttgaacgttttatccggttgaatttcccagatgcagatgttaatgcgttctttgcttcatttgtttggaagatccctgccgttgtggaatctcctactaaagtggcagctgcgcctgcatcaccagctgaaggaacagaagatgatcagcatgaatgtgtcacataaggtctccgtagaacccataggaagagggctccccctcctcccccattcagtactccgagttccatctaagcaccatcagcacc

SEQ ID NO: 1172 - DNA, 370 bp, Gossypium hirsutum
  Clone ID: LIB3166-045-P1-K1-B2
ggatcagccaaaactaagcgaccaactcgccagcgtggtaaagagtctgccccacccccagctgaaactgaagatacgaatagcggtcttgatttgtctttcttagacaatgaaacgggaagagcggaattcgacaactacctcagttctttggatgaaatccttgctcagcctttctctgaagaaccattttcccatccagcagagatgcaaaactcggttgcaggagacagcgaaatggctgaagctcgaaggaaactatcttcccttctcgatatggatttcccttcattgatttgcttcaaagaccttgaagaacttgcgagtctagcatccaaactccgaaaagaccccactcttactgccgagc

SEQ ID NO: 1173 - DNA, 681 bp, Gossypium hirsutum
  Clone ID: GOSHI-09MAY01-C7920_1
ggaattcgggattccaggccacgacccacgcgtgccattatttctttatccaaacagagaaaagacccagggaagccaacttaccggaaacctgaaacgatggcgtttcgtttgagcaacaacttagttggaatcctcaacttgattaccttcctcctctcgatccccatccttggcgccggtatctggctgagacgagaaggcgtaacagaatgcgaacagttcttggacacgcccgttatcataatcggagtcttcctcatgttggtctcgctcgcgggactaattggcgcgtgctgtcgcgtgacttggctactctggctctacctggtcgtcatgttcctcctcatcgtcctcggcatagccttcaccatcttcgctttcgtagtgacgaacaaaggtgcgggacaagtattatccgggaaaggttataaagaataccgacttggagattactcaaactggttgcagaaaagagttactgataacaagaattggaataagattaaaagctgtttggctgatagtaaagggtgtaccgatttccatgataaatatctcaatgctgctctcccagagttttaccagcctcacttatctgccgctcagtcgggttgctgtaaaccatcaaacgattgccagctcaattacgttgggccaactaactggacaagggggagt

SEQ ID NO: 1174 - DNA, 434 bp, Gossypium hirsutum
  Clone ID: GOSHI-09MAY01-C7850_1
ttcaacttctcgagcaccatatctacccttttataaattaaaacaattctaattgaatatcccctctccatcgtcatattcccatttctctctcccaaaattctctctctttgactctttaatatgaggtgttgaccttccacaggatttctgtaaggattatatagcgttttgcccgacccggaaaatgcccatggaccgaaccctacaatcggagagcatgagatcgccgactgtactctcaatcgaatgtctaaaagggagctcaaaagctgacgaatggaccgcagacatgctccagactggcgatattgttgaagagattcgtattggatccggttcaggacttgcccataaggcaccttttaaaggcggcaggagcggagttcagagggttcttcatagctcctataagaacaaagagacctcaattc

SEQ ID NO: 1175 - DNA, 1541 bp, Gossypium hirsutum
  Clone ID: GOSHI-09MAY01-C7840_1
tggactcggggggcacggccaccataaaataagaaaattaagaggccggatttcaaaaccctttctctttaaaatatagagaaaagagggaccaaagtgaaaatcgaaatatagatttgattttcaatctgcattttcagggtgtggaacaatgggtgcaggtggcagaatgtcggttcctccaagtcaaaggaaacaagaatcgggctcaatgaaaagagtccctatatctaaaccaccatttactctcagtgaaataaaaaaagccatcccaccacactgtttccaacgctcacttatccgttcattttcctatctcgtttacgacttcattttagtctctatcttttactacgtagccaccacttacttccacaacctccctcagccactatctttcgtcgcctggccaatttattgggctcttcaaggttcagtcctcactggcgtttgggttatcgcccatgaatgcggtcaccacgcttttagcgattaccaatggatcgatgacactgtcggtctcatcctccattcatcccttctcgtcccgtacttttcgtggaaatatagtcaccgtcgtcaccattccaacactggttcccttgaacgcgacgaagtatttgttccgaagaaacggagcagcattagatggtgggctaaatacctcaacaatccaccaggtcgtttcgtcacaatcaccattcagctcactctcggatggcctctttacttagcattcaatgtagcaggtagaccttacgaaggattcgcttgtcactacaacccatacggtcctatctacaacgaccgtgaacgacttcaaatctacatttccgacgtcggtgtccttgctgtcacctatgggctgtaccgtctcgtgttagccaaaggtctagcttgggtcatttgtgtttacggtgtcccattgctcatcgttaatgcattcctcgtcatgatcacatacttgcaacacactcaccccgcattaccacactacgactcatccgaatgggactggttacgtggagccctcgcgacggtcgaccgagattatgggatattaaacaaggttttccataacataactgatactcatgtcgctcatcatttgttttcgacgatgccgcattaccacgcaatggaagcaactaaggcaataaaaccaatattgggagagtattattcatttgatggtacaccagtttataaagcgatatttagagaggcaaaggagtgtatttacgttgaaccagacgaaggtgagcagagcagcaaaggtgtattttggtttagaaataagatctaactttgccgatagcgttgcggttgccgatggtgatgcctttaggaatgtgttaaatttgttacattattgttaaggatttggggttttggcgtttgggttacatcaatttcagatgctttcgaatttggactttgtatggttctcatcgactttgttgatccctgcaaaattggttcgagctttcaactatcaaagtagtttttttttttatcaaatttattattggtgccgagtt

SEQ ID NO: 1176 - DNA, 617 bp, Gossypium hirsutum
  unsure (1)..(617): unsure at all n locations
  Clone ID: AI055433.1
tttactacgtagccaccacttacttccacaacctccctcagccactatctttcgtcgcctggccaatttattggactcttcaaggttcagtcctcactggcgtttgggttatcgcccatgaaagcggtcaccatgcttttagcgattaccaatggattgatgacactgtcggtctcatcctccattcatcccttcttgtcccgtactnttcgtggaaatatagtcaccggacgtcaccattccaacactggttcccttgaacgcacgaagtatttgttccgaagaaacggagcagcatagatggtgggctaattccctaaccatccccaggcgcgttggacaagtccctataattcacttcgtaggcctttccttaccatcagtgaccaggtagaccttacgaggactcgcttgtcactacaaccatacggtcctattacacgaccgtaacgacttaaatctcattcgactnnggtgtcctgctgtcaccatgcctgaccgctgntgtagcaaaggttacttggtcatgcgntacggtcccatgctatcgtatgcttctgtatgacactctgcacaactaaccgttacacctcactnatgatgggatgtctgacccc

SEQ ID NO: 1177 - DNA, 596 bp, Gossypium hirsutum
  unsure (1)..(596): unsure at all n locations
  Clone ID: AI054898.1
cctccattcatcccttctcgtcccgtacttttcgtggaaatatagtcaccgtcgtcaccattccaacactggttcccttgaacgcgacgaagtatttgttccgaagaaacggagcagcattagatggtgggctaaatacctcaacaatccaccaggtcgtttcgtcacaatcaccattcagctcactctcggatggcctctttacttagcattcaatgtagcaggtagaccttacgaaggattcgcttgtcactacaacccattacggtcctatctacacgnaccgtgaacgacttcaaatctacattcccacgtnncgtgtctttgctgtcacatgggctgtacggtcttcgtgttacaanaggtctacttgggtattttgggttaaccggggcccatggtccatcgntaatgcttncttcggcatgaacacatacctggcacacactcaccctgcataccacctacgactatccaatggaatggtaacttggagcctgcgacggtcgacgagatatgggatattaacaggnnntttcatacatactgatctatatcgtcatattgtttcgacatgcgcatacacgcatggagca

SEQ ID NO: 1178 - DNA, 368 bp, Gossypium hirsutum
  Clone ID: LIB3146-032-Q1-K1-F8
aactgatactcatatcgctcatcatttgttttcgacaatgccgcattaccacgcaatggaagcaacaaaggcaataaagccaatattgggcgagtattattcatttgatggtacaccagtttataaagcgatatttagagaggcaaaggagtgtatttacgttgaaccagacgaaggtgagcagagcagcaaaggtgtattttggtttagaaataagatctaattttgccgatagcgttgcggttgccgatgatgatgcgtttaagaatgggttaaatttgttacattattgttaaggatttggggttacttctattttagatgcttttgaatttggacttcgatggttctcatcgactttgttgatc

SEQ ID NO: 1179 - DNA, 957 bp, Gossypium hirsutum
  Clone ID: GOSHI-09MAY01-C7810_1
cccacgcgtccgcccacgcgtccgaaaaaaggcagagagccttcctgctctctctctccctcctccctcttctcatttggctagggtaatatacccatcatcgccggaccaccgctcctccaccgtagacggtggtcggggagacgcaaaatggtccccttagcctcgtttgaaacgcctttgaaggctaggctaccaaaactcaaagaatcgaaggaggccctcaacccccccttttgggtccgatgtcggcgatggaaaagtgttctccgacgcgcgaccacgagatccaggtgagcccctcccttttcttttttattctttgttttttatgcttaaaatagatatctaaaaaatgaaataaaatgaaaaaacgagaagataaaagaaacaaaaaatattaaaacaacgacctttctaatttttattttgcgttttgctttctaatctccgtaaaaaaaagaaagggattgatttcagctttttatagccgagttacactgatttgttctttgttttttcattttgtttgattcctttcgtttttttttttgcttgttgttttctctttgttcgtttctctgctgttggtatttgcttgcgtgtggaccttcattttgcaggtcgtgtcagaggctggtggttggtgccccgagccgtggtggcacacgtcgcagaggaggcagcggctgaaagtctgcagctaggttttttgctgctgaaaatttttagttggttgggctgtcttgggctttagggtttgtatttaattggctttggtttagtagtgggctgatggggtttgggtagtttgtaatttgggctaggtgactcttggactttatttttatttattgtatttggtgttttattttggtttgttggtatgggccaaaattggctgctacacctacaattcattaaagttagaaaaacatgaaatataaaaaaaaaatt

SEQ ID NO: 1180 - DNA, 420 bp, Gossypium hirsutum
  Clone ID: LIB3165-021-P1-K1-E11
catttggctagggtaatatacccatcattccttaccaccgctcctccaccgtatacggtggtcggggagacgtaaaatggtccccttagcctcgtttgaaacgcctttgaaggctaggctaccaaaactgaaagaatcgaaggaggccctcaacccccccttttgggtccgatgtcggcgatgaaaaagtgttctccgacgcgcgaccacgagatccaggtcgtgtcagaggctgatggttggtgccccgagccgtggtggcacacgtggcagaggaggcagcggttgaaagtctgcaactaggttttttgctgctgaaaatttttagttggttgggctgtcttgggctttaaggtttgtatttaattggctttggtttagtagtgggctgatggggtttgggtagtttgtaatttgggc

SEQ ID NO: 1181 - DNA, 398 bp, Gossypium hirsutum
  Clone ID: uC-gsflnu33B061g12b1
tcttcacgcgtccgcccacgcgtccgggctacgaaaactcaaagaatcgaaggagaacctcaacccccccttttgggtccgatgtcggcgatggaaaagtgttctccgacacgcgaccaagagatccaaggtatgggcgtgtcagacgcatggagggagcatatgctggtggtggtgcgcgaggcggccattggttggccgagtgtgctgttgaggcttgagggctgctgctgttttctcttctctgcagggggctaggatttgggctttagggtttgtatttaattgggttcggtggtctagtctgggccgggcataattgggcctatacaaggtgtgcttgattgaaaaagttactataatggaggaggaaagaggttctgatgggtgtggtcatg

SEQ ID NO: 1182 - DNA, 1099 bp, Gossypium hirsutum
  Clone ID: GOSHI-09MAY01-C7820_1
cccacgcgtccgcccacgcgtccgcgcacagttagtttgatgccgacatcactgaagctgcatggccgatggatgaaaaacgggctactgcgtttggtttaatgaagattgacgaagaaggacgaatcatcgaattcgctgagaaaccaaaaggcgaccagctaaaagctatgcaggttgatactacaattttagggcttgatgatgagagagcaaaagaaatgcctttcattgctagcatgggcatatatgttgtgagtaaagatgtgatgttgaatcttcttcgagaccagtttccgggagccaatgattttggaagtgaaataattccaggtgctacttccattgggatgagggtgcaagcttacctgtatgatggctactgggaggacattggtacgattgaggcattttataacgcaaatctgggaatcaccaaaaagccagtgccagatttcagcttctatgaccgttcgtctccaatctacacacagcctcggtatttgccaccatccaaaatgcttgatgctgatgttacagatagtgttatcggtgagggttgcgttattaagaactgtaaaattcaccattctgtggttggtcttcgatcttgcatctccgagggtgcaatcatagaagataccttactgatgggagcagattattatgagactgatgcagacaggaggtttttgtctgcaaagggcagtgttccaattggtataggaaagaattcacatatcaagagagccattattgacaagaatgctcgaattggagacaatgtgaagatcataaacagtgaaaacgtgcaagaagcggcaagggaaaccgatggatatttcataaagagtgggattgtgacagtagtcaaggatgccttgattcctagtggaactgtaatctgagaagattgcattatgatacagcaaaccaccattagtgtttctagatagagaaagtaatgcaatagcaaatcacttccactttatcccttatcatgtatattttgagctactgcggtataattattttaataaaatgaaatggagccgattatggccggccataaaatgaaataaagccggtaatggctggt

SEQ ID NO: 1183 - DNA, 460 bp, Gossypium hirsutum
  Clone ID: LIB3829-033-Q1-N6-H12
gggggggggggttttttttttttttttttttttttttttttttttttttttttttttttaaaaatttaccagccattaccgggtttatttcattttattaatataattatactacaggggttcaaatttattaatatattatactacagggggtgaggggggacatgataagggaaaaaagggaaatgatttgctattgcattactttctctatctaaaaacactaagggggggttgctgtatcaaaatgcaatcttctcaaattacagttccactaggaatcaagggatccttgattactggcacaatcccactctttataaaatatccatcggtttcccttgccgctttttgcacgttttcactggttatgaacttcacattggctccaattcgagcattcttggcaaaaatgggtcttttgatatgggagctctttcctataccaattggaacactg

SEQ ID NO: 1184 - DNA, 418 bp, Gossypium hirsutum
  Clone ID: GOSHI-09MAY01-C7560_2
tcctctctcattttctctcaatccaaacagaggaagaaaataaagcattagcaagaaaaaatggcttcctcaacactctcaactgtctctctccgttccccttcttatccttcacccactactactacagcccattttttcaaaaccccttctcttcaattccctctccgttccaccgccactactaccctcacccaccgtaccacattcctccgtcctctcaacgccaccgcggcacccgaaaaaatcgaaaacctcggcactgaaatctccaacttaaccctcgaagaagcccgaacactcgtcgactacctccaggacaaactcggtgtctccgccgctgcatttgcccctgcccccgtcgcggccccgcccccagatgccggtggtgccggaactccagttgttgaggaaaaga

SEQ ID NO: 1185 - DNA, 610 bp, Gossypium hirsutum
  Clone ID: GOSHI-09MAY01-C7560_1
gtcgacccagcgttcgtttagcagaaaaaaggcttcctgagggtggcaatctttctctcagttccccttcttatccttcacccactactactacagcccattttttttcaaaaccccttctcttcaattccctctccgttccaccgccactactaccctcacccaccgtaccacattcctccgtcctctcgacgccaccgcggcacccgaaaaaatcgaaaacctcggcactgaaatctccaacttaaccctcgaagaagcccgaacactcgtcgactacctccaggacaaactcggtgtctccgccgctgcatttgcccccgccgccgtcgccgtcgcagcaccagatgccggtggtgccgcagctccagttgttgaggagaagacggagtttgatgtggtgattgaggaagttcccagcaatgcgaggatagcggtgattaaggctgtgaggggtctgactagtttggcattgaaagaagctaaggaattgattgaagggctgcctatgaatattaaaggaggagtttctaaagaggaagctgacgatgccaagaaacagcttgaagaagctggtgctaaagtttctattgcttagatttaacatttt

SEQ ID NO: 1186 - DNA, 768 bp, Gossypium hirsutum
  Clone ID: GOSHI-09MAY01-C7490_1
cccacgcgtccgcccacgcgtccgcccacgcgtccgaggaaaatgtgcgatcgagaacgagattgggatttctgtctccgaaccgtatcgaacagtgcaagagactcgagtttcgctaacgatccagcctccgatccttctcttcttcacgccgtcaagaaactctgcgatttctgtagacaagaagagaaatcctctgaggatttggtcgctagggtttatcctcatatcaacaagctcttccaacgctctattgcttccctctctcaacctacctctcccaacggaattctcttactggtcattcttcaatttttccttgattttggagaggtggttctccatgatgctgaccctagtctgaggacatttttccgttcatgtttgagccgtgagttcgcagatcctgttgttgcagctgcaactcttgattttctaaatgtaaacaagaacaaacttcttttttctttccccaacttactacctcagtttttccctttgcttctgaagctgattgcatggaacggaggaaaattagagaagccatttctcaaggttcttccaggattggtgtcacctgggtcatttctccccctatttccatctttagtggactcgccaatcttggttgtcgctttggaaaaggtagaacgaagctcagggtcactaataggaagcagtatagcttctatccagaagagtgcggcttctgagatgctacttgcactcatggatgaagcctatacaggttctaccattggagatgga

SEQ ID NO: 1187 - DNA, 371 bp, Gossypium hirsutum
  Clone ID: LIB3166-038-P1-K1-G11
aaaccgtcgcaggaactttttgtttgcggaaagaacggaaaaagaaaggaaagtgagcgatcaagaacgagattgggatttctatcttcgaaccgtatcgaacagtgcaggagactcgagttcggctaccaaccaaccttccatccttctttttttcacgccgtcaagaaactctgcgatttctgtagacaagaagagaaatcctctgaggatttggtcgctagggtttatcctcatatcaacaagctcttccaacgctctacttgcttcctctctcaacctacctctcccaacggaattctcttactggtcattcttcaatttttccttgattttggagaggtggttctccatgatgctgaccctagtct

SEQ ID NO: 1188 - DNA, 1030 bp, Gossypium hirsutum
  Clone ID: GOSHI-09MAY01-C7450_2
cggccgcgtgggaaatgctagtactactattgttattccttttaatgctttttcgtatattttgaagggcttttttgagggtcataccttcataaagtacattggacacaaatatctaatatggacatttcaagatggatatttaaaatatatatatataaataaaaagtggagcaataatgtggttgatgatttgcatgtgtattattacttgataggtagcttgacacatcagagctcaacatcacaagttggatgccattgctgatgtttaaggtatcagtttcattgtttcggggattaaaatgtcataataaaagcagtgggtagagcagatgaaaagttatgctgggaatggaaaacggatttactcgttttttctaaagtaattaaatacaatccctgttcatgatcttacataatttttattcacaagcaattctagtctcaaagctgctgaggcagatagcaaaggcttggaatgccgagatcggataccgataatccatggtaaataaatccttacccactttcccaaactggaggatgatcttctcatgttctggtcctgccggttcgttctctggtgaagccaccaactgaaagtttttcactgaagcaattgtgactcgtccatggaagttcaagcaccaacactggagttgctcatgccaccttggagccttatttatcaacactagtccaccattcttttgatcagatacagaattctccatgctagctgatttcgaaagaaagctagttggggttgattgatatgggttcaactcagcttgggtggtggggtctaatcctcctggtgctattgaagttgctgggatggtgttcatattacactgcattctccttgggcccctagaagtcattaaaatacattattgttggtatttatgttgtttcgattcttcatttttcttaatgcacacgtattcagatatgggtcatactagctttaggaacatagacttgtatgaaaaagtgaacagcaaagggatttaatgcatgagct

SEQ ID NO: 1189 - DNA, 2145 bp, Gossypium hirsutum
  Clone ID: GOSHI-09MAY01-C7450_1
gggggggggtgtcaatttataccgacattagaaaagccctttttcattgatattattattcctctcttatgccaaatctattgtcgaaattttgctctacggctttagatctgcgagcaagaacggggttattttctgctccaagatgggggggggggggtctttatatctgggctcataaaaggttcgatttttaagcgttatcggttttagttcgagttctctgttgctaaaggaggtctccgtaattaggagttcttcacaggcaaagatctctaaaacagaattaggatgcagggatttaaggttttgttttgggaaaagtcatgataaaaacaaaatattttctcggaaaccaaacagtgtttgctttgatagtcaaatttcgaggtttagaaaagctgggctcagatttacgttgaaagctgtccagtctgatcccattcttgaatccaagtctcctgcaacttccaaatctcttgataggctaagattatttgttggtctgcctctagatgcggtttccgatggcaattcggtaaaccatgcccgggcaattggggcgggactgaaagctttgaaacttttgggtgtggaaggtgttgaattgcctgtctggtggggagtggtcgaaaatgagagggggaagtatgactggtcaggctatcttgctgttgctgagatggttcagaaagcaggtctgaagcttcacgtatcgctctgcttccacgcttcgagtcaaccgagaattccgcttcccaagtgggtaacgaagattggcgaatcccaatcaagtatcttctttgcggatcgttcaggacagcattatcagcaatgtctatcactggctgttgatgatcttgcagttcttgatggaaagactccggttcaagtctaccagggcttttgcgagagctttaagtccacattctcacctttcatgggttctaccatcacgggcatctcaatgggtcttggaccagatggtgaactccggtatccctcacaccacaagcctgccaagagtggcacgattactggagtcggggagttccaatgttatgacacaaacatgcttaaccttcttaagcaatatgctgaagcaaatggaaacccattatggggtctaggtggtccacatgatgcccctacttatgagcaggcaccgaactcaaatagtttcttcaaggatcacggtgggtcgtgggaaagtccttatggtgacttcttcctttcctggtactcaagcgagcttgtatctcacggcaatcgtctcctctctcttgcctcgtccatttttggtgatactgaagtcaatgtttatgggaaagtcccgttgatgcacttgtggtacaaaacccgggcacacccttctgaactgactgccggcttctataacacggcctcaagaaatggctatgaagcagttgcagagatgtttgcaaggaattcatgcaaaatcaacttgcctggaatggacctgtcagatgagcaccagccacacgatgctctttctagccctgaatcattacttgcacaaatccgaacaacgtgcaacaagcacagggttgaggttgccgggcagaacctggcctctggagctcctggtggtttagagcagattaagaaaaatatgttgggtgagaatccaatagacttgttcacttatcagaggatgggagctcatttcttctcgccggagcattttccttcattcactgagtttgtccgaagcctgagtcaacctgaattacatccagacgatttaccctcggatgaggcagaagctactgaatctgtacaaacgagttcggatccaaacatccacttgcagacagcttagcaagaggtaagagaacatagttacgtgtatattgtattcttgtaagtactaaattattgaatggggagaagattgtactattggactttctgtatacatctaagcaaatatttcctttttgctaaaggaccttagaatagtttggtgttcatgggtttttgaccccaataattaggggtctctttctagggatttgctcatgtttttctgggcccttttctcgcatatattgcctgtaagaggtacttagaacttggaagttttccaggattaatacaaattagttaaataaaaaaaaaaaa

SEQ ID NO: 1190 - DNA, 575 bp, Gossypium hirsutum
  Clone ID: LIB3825-006-Q1-K6-F6
gttgccgggcagaacctggcctctggagctcctggtggtttagagcagattaagaaaaattgttgggtgagaatccaatagacttgttcacttatcagaggatgggagctcatttcttctcgccggagcattttccttcattcactgagtttgtccgaagcctgagtcaacctgaattacatccagacgatttaccctcggatgaggcagaagctactgaatctgtacaaacgagttcggatccaaacatccacttgcagacagcttagcaagaggtagcttgacacatcagagctcaacatcacaagttggatgccattgctgatgtttaagcaattctagtctcaaagctgctgaggcagatagcaaaggcttggaatgccgagatcggataccgataatccatggtaaataaatccttacccactttcccaaactggaggatgatcttctcatgttctggtcctgccggttcgttctctggtgaagccaccaactgaaagtttttcactgaagcaattgtgactcgtccatggaagttcaagcaccaacactggaagttgctcatgccacct

SEQ ID NO: 1191 - DNA, 507 bp, Gossypium hirsutum
  unsure (1)..(507): unsure at all n locations
  Clone ID: LIB3543-028-Q1-K6-H6
tatctgnnttcataaaagtttgatttttaggtattattggttttagtttgagttttctgttggaaatggaggtctcggtaattaggatttcttcacaggcaaagatctctaaaacagggggggggggggggtttttttttttnngnnnnnnnnnaaaagtaatgattaaaaacaaaatattttcttggaaaccaccccccgtttgctttgatagtcaaatttcgaggtttagaaaagctgggctcagatttacgttgaaagctgtccagtctgatcccattcttgaatccaagtctcctgcaacttccaaatctcttgataggctaagattatttgttggtctgcctctagatgcggtttccgatggcaattcggtaaaccatgcccgggcaattggggcgggactgaaagctttgaaacttttgggtgtggaaggtgttgaattgcctgtctggtggggagtggtcgaaaatgagatggggaagtatgactggtcaggctatcttg

SEQ ID NO: 1192 - DNA, 672 bp, Gossypium hirsutum
  Clone ID: GOSHI-09MAY01-C7470_1
cacacttgcggttgcgcttcaagagtgttaagttccttcaaaatgctgacaataaccaccgcctgcgccttcgcctccatatctccaccaacaacacctaacctccaactagagtcaaccgccgtcacttgctgctcctcacttccctctccttatcttcattctcagtctcagattcggtggccactgctcgtggccttctccagatgcccccacctcgcctcactaacaggtattttttggtgagggctggggagtcccaatatgagagcctcggaataatcaacaccaaccctgtagcaaaaacttctgttgatagtgggttatcagacaaggggaaaaaccagactctgaaatctgctttggaattgaaggctatgggggcctgtgaaaggaattgctggatttggccttctattactcaaagagcttaccaggctgctgagatcattgcagctgttaatggtgtcagtcgtagttatatagttccagagtacagcttcctggatgctcgtggactgggagcatatgaaggcaaggaactggaagccatttcacaagtttatgaatcggatagcatatcttctacaatcaagccacctcctatagatgatggaacaccaaatgaaagtgtggcagatgtatttgtgcgtgtgacacaactcatgtcta

SEQ ID NO: 1193 - DNA, 723 bp, Gossypium hirsutum
  Clone ID: GOSHI-09MAY01-C7400_1
ttctcggagtgaatgtcgtgtctgatttgtggggttggttaacagaaaaagcacaaaggggacgtgcagagttgaaaagcagtgctgattaggtcagtggcgtcgggcgatggcggaagataaggcagagacacaagcgttcactcctggtcccggatatcggcaattcaaggggagagatgaattcccctccaacattttgcacggcacattagcttgtgccatctggattggatctatgcattttaacgtctccctcctccttttctccttcctcttccttcctttctccaaattccttttggtggttggagtgcttttgattttcgtcgttcttcctattgatcataacagtaaatttgggctgagattggccaggtatatatgtcagcacatgtccagttattttccagccactcttcacgttgaggacatcaacgacttccatcctggccgtgcttacgttctcggttatgccccacattcagtgttgccgatcggagttgttacgttggctgaacgtacaggtttcatgcctcttcccaaactgaaatgccttacctccagccctgtattctacacaccatttttgaggcatatatggacgtggttgggtgcttcaccacccacaaggaagaacttttgctccctgttggaagctggttatacttgtatagtagtgcctggaggagtgcaggagacattccttatgccgcatgattc

SEQ ID NO: 1194 - DNA, 623 bp, Gossypium hirsutum
  unsure (1)..(623): unsure at all n locations
  Clone ID: AW187812.1
gcggtgttgaaagcggcggcgattgtgtcaggagctggcggacgatggtggaagaaagggaggagaaaaagacgtatgcggctggatctggttatcggcaattcaatggaagaaatgaattctcgtccaacgttttgcacgggatattagcttgtgcgatgtggattggagctttgcatttcgacttctacctcatagttttctccctgctcttccttcctttctccaaattccttttggtggttggattgttgttggttttcgctgttgttcctatcgatcataacagtaaatttgggctgaggttggccangtatatatgtaggaatatgtccaattattttcccaccactctccacgttgaggacattaacgacttccancctgatcgtgcttatgtttttggttatgagccacattcagttttgccaattggagttgttacgttggctgaacgtacaggtttcatgcctcttcccaaactgaaatgccttaccaccagccctgtattctacactccattcttgaggcatatatggacatggttgggtgcctcaccanccacaaggaagaacttttgttccctgttggaanctggttatanttgtatcgtattgcctggc

SEQ ID NO: 1195 - DNA, 515 bp, Gossypium hirsutum
  Clone ID: uC-gsflmaxxa070f05b1
gatttgttgcgttggttaacagaaaaagcacaaaggggacgtgcagagttgaaaagcagtgctgattaggtcagtggcgtcgggcgatggcggaagataaggcagagacacaagcgttcactcctggtcccggatatcggcaattcaaggggagagatgaattcccctccaacattttgcacggcacattagcttgtgccatctggattggatctatgcattttaacgtctccctcctccttttctccttcctcttccttcctttctccaaattccttttgttcgtcctcttcctttattcttttttatgtatggcttttatgcttctgctggtaaaagaaaaagagaaagttaaaacggcgcacaaaatttatctttgattcaatacacaggggtggttgggagtgcttttggattttcggcgttcttcctattgatcataacaagaaatttgggctgagattggccaggtatttatgtcaacacatgtccagttttttttccgcccctcttta

SEQ ID NO: 1196 - DNA, 454 bp, Gossypium hirsutum
  Clone ID: GOSHI-09MAY01-C7430_1
gagctgtcttttttccctccaacaatcctttttcaaacaaaacataacaacaacagcggcggcattaataataatcacaaatatctcgcaccaaaacccaaataacccacctgcttcctcatgccttattcatcatcatcatcatcagcaatggctagcaaattggctttcactttgatgcctcctcgtttcttcactgcgactattcaaaaacccgtggtttgtttctcttcttcttcttcttcttcttctatcagggttcaacccagtgggaagcatctatgttttcgacgccgattgctcttactacccctcaaggctactgccgatcaacaaggtcaggtcgaagaagatgaagttgttgatagtaaaattctgccttactgtagcatagacaagaaagagaagaagtctttgggtgaaatggaacaagagtttcttcaagccctacaag

SEQ ID NO: 1197 - DNA, 423 bp, Gossypium hirsutum
  Clone ID: GOSHI-09MAY01-C7790_1
gccttatcctaatcctctctgcaattcaaagaagaagaaaaatggcttcttcagctctctcaacactgtctctccgcttacccacttcctctaatcctacgaacccttcccatttcaaagccccttccctccaattccctctccgttccctcactcctcctaacctcacccaccgttccaccgccctccgcgccacggccgcccccgaaaaaatcgaaaaacttggcaccgaaatctccaacttaaccctcgaggaagcccgcacccttgttgactaccttcaagagaaactcggcgtctctgccgctgccttcgctcccgcagccgtttcagttgccgcccccggtggtgccgatgccgaagcggctgttgtcgaagagaagaccgagttcgatgtggtgattgaggaggttcctagcaatg

SEQ ID NO: 1198 - DNA, 427 bp, Gossypium hirsutum
  unsure (1)..(427): unsure at all n locations
  Clone ID: LIB3165-021-P1-K1-B4
nccacgcgtnncgccacgcgtncgaaagaatgttaattttagaagaagaaaaatggctggtgttactctctcaacaacactgtctctccggttaccctcttatcctccacccacttactgttatcctacgcaccctgcccttttcaaaaccccttctctccaattccctccccgttccgccactcctactaacctcacccaccgttccaccggccttctgcctctcaatgccactgccgcgcccgaaaaaatcggaaaactcggcaccgaaatctccaacctaaccctcgaggaagcccgcacccttgtcgactaccttcaagagaaactcggcgtctccgccgccgctttctcccccgcagccgttccagttgccgcccccggtgttgccgatgccggagagactgttgtcgaagagaagactgag

SEQ ID NO: 1199 - DNA, 553 bp, Gossypium hirsutum
  Clone ID: GOSHI-09MAY01-C7720_2
gtcagaaaacatccacccacgcgtccgctcaaagccaggctgagcctatcaatctacaccacaggccacaacaatggctacttcactctcactctcaaacttcttctccttccttttacctcctaatccttctccacccaaagccccaccggctctcaacagcctttcactctcttcccaaaaacccaaaaatgctcctctctcatggtcagctccagaggatcaatcttcttctttatccactgaattgtcatcagttatgtgcccttctcttgcaaatgccaacacccttttcttcaaatcggcttacaatatccaggttattgtggatgacaatgaacctgaagaaagactgcttaacaggttcagaagagaggtcatgaaagctggtgttattcaagagtgtaagaggaggaggttctttgagaataagcaagatgagaagaagcgtaagtcacgcgaggctgctaagcgtaatcgtagaaggcgtccccaagcaagattttcacaaccaaacaagcaggaagtatctacaaagaaggggatgaggatg

SEQ ID NO: 1200 - DNA, 911 bp, Gossypium hirsutum
  Clone ID: GOSHI-09MAY01-C7720_1
cccacgcgtccgaaacaatttggatgacatagttatccaaaatgatcccaaattaatcttcgtatgttgatgtatgataaaaccagcaaagcaaagccaatagaattcccatccacaaacactccaccaatccgtaataatggctacttggctctctctttccaagttcctctcctcctttttgccttccattcctccaccaccaccgccgccgccgcccaaagcgcctcttctcaacaacctttcactctcatcccaaaagcccaaaagcactctcctttcgttgtcagctcaagaggatcaatctccttcatcatcaactgaattgtcatcagttatatgcccttcccttgcatattcgaatactcttttcttcaaatcagcttacaacgttcacgttattgtggatgataatgaacctgaagaaaagctgcttaacaggttcagaagggaggtgatgaaagctggtgttattcaagagtgtaaaagaagaaggttccatgagaataagcaagatgagaagaaacgtaagtcacgcgaggctgctaagcgtaatcgtagaaggttttattggttcttgatttgaggggaaaaaagagaagggctgaagaattcatatgaaatttaggcaaatttggtttcttttgtgaagcttgaaaaacaatgggtgcaatgataaatagagctagaaattgtgaattcagtttaattatgacttaatgctgatcacaagccgttttggttagatatttgtatgttagccatagaaaaaaaaactttgaagcttggtgaagaattcatatgaaatttaggcaaatttgatccccttagtgaagcatgaaggagagtacgtaggagaatagaaatgatgcaaagagaaataaagctagaaattgtgcattcagtatgtt

SEQ ID NO: 1201 - DNA, 600 bp, Gossypium hirsutum
  Clone ID: GOSHI-09MAY01-C7680_1
ccctctcgtccggggtcggtgaaagataatggctccacacccaccttttaaaccatcttcaattgctcccctgcctcttccttctcctttcacccaattttcttaccaaccaaacatgtttgatcctaccaaagaactgcccaaatcttatgtcagtttatcggatcacttaactggaggattcagtgattgtaatgacagttatgatcgtgccatgaactacggtcccaaagtgcaaaaaactgctcaaaactacgcaaattacagcagttggaacaccttggaagggaggttcgaagctgaaacattgatggcggacgatgagtccggaatttccagtcctcctttatggaaatccagtcctcaacatgaaaacaacgttaattaccggtgtctatcgccatcgtcgagagctcaagccatagctagaggccaaaaggagcttatggaaatggttagtaaaatgcccgagtcttgttacgagctttcgttgaaagatctcgtggaacatcagcctgtcgttgttgtggaaccgaagcaggagagtttcgcccaagggagaggttcaaattcgatcgatgaacgcaagtacaagaacga

SEQ ID NO: 1202 - DNA, 1522 bp, Gossypium hirsutum
  Clone ID: GOSHI-09MAY01-C7650_1
tgcccacgcgtccggttcaataatttgggtgacctgttgtgtaccatcactgggtttgactccttcgctttgcaacccaatgccggcgctgcgggcgagtatgccggactaatggttatccgtgcatatcatatgtcaagaggggaccatcaccgcaacgtgtgcatcatacctgtttcggcacatgggacaaatcctgcaagtgctgctatgtgtggaatgaaaattgtttctgttggaaccgattccaagggtaacatcaatattgaagaattaaggaaagctgctgaagctaacaaggacaagttgtccgctcttatggttacttatccttcaacacatggagtgtatgaagaaggcatcgatgagatatgtaagattattcatgacaatggaggtcaagtttacatggatggggctaacatgaatgcccaggtcggtttgacaagtccgggttttattggagccgatgtttgccatctgaatctccacaaaaccttctgcattccacacggaggtggtggacctggcatgggacctattggtgtcaagaagcatttggcaccatttttgccttcacaccctgtggtacccacaggaggtatcccagccccagaaaaatcagaccctcttggtaccatttccgctgcaccttggggctctgcacttatcctgccgatatcttacacttacatagccatgatgggatctaagggactcactgatgcttcaaagatagctattttgaatgcaaattacatggcaaaacgcttggagaaacactaccccgttcttttccgcggagttaatggaacagttgctcatgaattcattatagacttgagaggttttaagaatactgctggaatagagcctgaagatgttgccaaacgtcttatggactatggattccatgctcctacaatgtcgtggcctgttccgggcacgctcatgattgaacctactgaaagtgaaagcaaggcggagctggaccggttctgtgatactcttatctccattagggaagaaattgctgaaatcgagaatggaaaggctgatatccacaacaatgttcttaagggagctcctcatccaccatctttgctcatggccgatgcatggacaaagccgtattctcgggaatacgctgccttccctgcttcctggcttcgaactgctaagttctggcctactacaggacgtgttgacaacgtatatggtgatcgcaacgtcatctgcacccttcttccagtatcgcagatggttgaagaggctgctgcagccaacgcgtaggcctaggcctcatctatgttgccattgaagccaacgttttctttttccttcaacaaaaaaggggtgggggggggggggcccaatgtctttcttgttcatgtacataaactattcaccatttgcatatgttctaagctgtgactttcattttattggtccacttatgatcatctgcttcaataacccccccccccgggggccgcccaataaaaaaaagtaaatgcaattc

SEQ ID NO: 1203 - DNA, 541 bp, Gossypium hirsutum
  Clone ID: LIB3585-039-P1-K1-E9
caaagccgtattctcgggaatacgctgccttccctgcttcctggcttcgaactgctaagttctggcctactacaggacgtgttgacaacgtatatggtgatcgcaacgtcatctgcacccttcttcccgtatcgcagatggttgaagaggctgctgcagccaattcgtaggcctaggcctcatctatgttgtcattgaagccaacattttctttttccttcaacaaaaaaggggtggggggggggggtcccttggcattcaactacttgggctggactcatttaccagtggagacaatcctaagctggacataacgtattatggggccttcacagaagctcttaaaatccacaaccctaatagcactttggtaggatttttgggtggaacttaaggtttatttgcccaaaaaacactacagatcactgttgatatttctttcaacctacaaaaattagggttggtatgatctttcaagtctaacgccaaatcaagttttaacaactgagcaagttaaggctgcactaactgcctgcaatga

SEQ ID NO: 1204 - DNA, 545 bp, Gossypium hirsutum
  unsure (1)..(545): unsure at all n locations
  Clone ID: LIB3146-023-Q1-K1-H11
cgcttacattaagccatgatgtgggtcaaagtgtgactgnnactgacgcttcaaangatagcgtattgctgatatgctaaactatagtggcgagaaacggnnttggagaacctancctacctccgnnttcttttctcgttggtggtcnnaatggaacccagttgctcnnatgaattnncattgtggaccttatagaggggatttagagagacaccnnngctggaatttagaactctgaagaaaatgttgctannaacgtnncttatggaccttatggnnattccatggtcctttacaatgnntcatggcctnngttccaggcaccactttcatgattgaactccnnactgaaagtgaagagcaagggggcggagcttcganttaggttctgtgaatgcttcnttcatctccattagngnngaagaaatctgctcagaaatttgagaatggaannnaagctgatatcncnnacaacaatnngttctgaaggggaagctcnnctcatccaaccaatcttttgctcattgggtgaaatgcatggacaa

SEQ ID NO: 1205 - DNA, 748 bp, Gossypium hirsutum
  Clone ID: GOSHI-09MAY01-C7640_10
cgcctccaaagctttgtttcgtcagttgttcgagaaagatcatctacttatacttaccttcttgctgattgttcccaccctgataaaccagcgcttttgattgaccctgtagacaggactgttgatagagatttaaatttggttaaagaattggggctgaagcttatttatgctatgaacactcatgtacatgctgatcatgttactggaactggcctcatcaagggcaaggtgcctggtgtcaaatccgttatttcaaaggccagtggttccaaggctgatgtttttgttgaagctggtgacaaaatctcttttggggatctctttcttgagggtggaagttcacagcaactctacaagtcagtgcattcacagatttttacattaccgaaagagacattgctatatccagctcatgactacaaaggattctcagtaaccactgtgggagaggagatgctatataatccacgcttgacaaaggatgaggagactttcaaaaatatcatggaaaatcttaacttggcatatcctaagatgattgatgttgcagtgccagcaaatatggtttgtgggttgcaagatttggaacctaaagccgattgaggctttgctggacaccatccataagtgtgcacagattttagttgtattataattctggatcttaatatcactggatatgctaaataaaatggctagagaagccacgtgattgcaaggaatccataaattataaatatatact

SEQ ID NO: 1206 - DNA, 627 bp, Gossypium hirsutum
  Clone ID: GOSHI-09MAY01-C7640_8
ttctccctccttttctgtttctatcctgaccaaccctttaacaaaccctaacaaccttcaacaggccttcaattacgaatcgtatgaggtaacagagtaacagagagtagcagcaatggttcctaacctaagcagattcatgagatcaaggacttccttctgactgccagaaggaaagatgcatgctctgtaaagatcaagaagagcaaagattttgtcaagttcaaggcccgctgctccaagtacttgtacacactttgcgtgtcggatgctgagaaggctgacaagttgaagcagtcccttcctcgaggagcaaaacgtctagttcctgtgggtcttggagatgatgatcaatgcattgaagatgactttactgcctgacgtgaatcagtgtggcccgagttagatcagcttctgcgtgatgacgatgatgcaacaactgtttctaccccatacactgctgctgttttggaataccgtgttgtattttatgatcctgcaaatgcacctgtcaaggataagaactggaacaatgcaaatggccacactgtttatgatgctcaacatccatgcaggtctaatgtggctgtgaggaaggagcttcatactcctgcatctgatcgttct

SEQ ID NO: 1207 - DNA, 565 bp, Gossypium hirsutum
  Clone ID: GOSHI-09MAY01-C7640_7
cccacgcgtccggtcccccacggttcggccgcgagctctgatttttaggtgttcctgcagagtgaggaagctcccctgaaagcttcagttgaaaatgcctaagcaaattcatgagatcaaggacttccttctcactgctagaaggaaagatgctcgctctgtaaaaatcaagaaaagcagagatgttgtcaagttcaaggtccgctgctccaagtacttgtacaccctttgcgtgtctgatgctgagaaggctgacaagttgaagcagtctcttcctccaggtttgagcgtccaagacctgtgaaattaaaactgcccttagcttgtactaggcaatgaaaactagattttgacttttagtttattgcttgcatttcgaatcgttttgcaacgatcaaaagtttttataatggatttttatttggtgtttttttatggacgttagtaatgttattaaaaccctttatttattttagtattcgtgttctacatcttagttgggcacatattggataatcaaacatatgaaaaagaaaagaatcaatatattctgattcagtaaaaa

SEQ ID NO: 1208 - DNA, 532 bp, Gossypium hirsutum
  Clone ID: GOSHI-09MAY01-C7640_6
tcctcgcgtccgagcaaattgaagaatacgctgaaatcttcaatccaaaatgcctaagcagattcatgagatcaaggacttccttctgactgccagaaggaaagatgcacgctctgtaaagatcaagaagagcaaagatgttgtcaagttcaaggtccgctgctccaagtacttgtacacactttgcgtgtcggatgctgagaaggctgacaagttgaagcagtcccttcctccaggtttgagtgttcaagacctgtgaaaatatggcagcctcaggtttgtcacctgatttataggtgatgaaagctaggtttttagttttgggtttattgtatttctggtcattctgcaacagtgaagctcaattttctgtaattggatctatgtttttttgttgattaaggattttagtgatatatgcacttttcaattacaatgaatgttctttttaatgaaaaacacagaaaaatttgatgttgcttcgctaaaaatataaatattattattttacaattattaaatatatataatg

SEQ ID NO: 1209 - DNA, 833 bp, Gossypium hirsutum
  Clone ID: GOSHI-09MAY01-C7640_4
ccgatttgtaatcccttccaaaagaaaggattagctaatcggtcctcttctaccctccaagccgttgcagcatcttcttctttttttcatttttcttcccatttccttccaaccttctccctccttttcatgcttctatcctgaccaaccctttaacaaaccctaacaaccctcaacaaggccttcaattacgaatcgtatgaggtaacagagtaacagagagtagcagcaatggttcccaagttcgtgctactcctggtcatacaatgggttgtgttacctatgtcacgggagatggacctgatcaacctcagccaaggatggctttcacaggagatgctctgttgataaggggatgtgggaggacagattttcagatttttacattaccgaaagagacattgctatatccagctcatgactacaaaggattctcagtaaccactgtgggagaggagatgctatataatccacgcttgacaaaggataaggagactttcaaaaacatcatggaaaatcttaacttggcatatcctaagatgattgatgttgcagtgccagcaaatatggtttgtgggttgcaagatttggaacctaaagccaactgaggctttgctggatcatccataagtgtgcacagattttagttgtattataattctggatcttaatatcactggatatgctaaataaaatggctagagaagccacgtgattgcaaggaatccataaattatatatatactatatcatattggaatcatgtaaatatggtcgcttctatctgcatagaaataatccttacgtgtatcatgctaaataacatcgaaact

SEQ ID NO: 1210 - DNA, 573 bp, Gossypium hirsutum
  Clone ID: GOSHI-09MAY01-C7640_2
agttcggatgaatgtttctcccacagtttaaaacatcaatgacaagtattagtttatgcatctctctctttctccattggaaatgtcattcgttttattttttttatcttttgcaggtgcaaaagctaatgggttcaacaccattggatcttgccaagtttaatatggtaaagagtggagaaatgagccgtaatgctccttgtccatgtggttccaagaagagatacaaaaggtaatttggcacactatttcccagcgatctgtgttgctgtgagtagctcataacctggacgcagtgcttaagagattttatgtcctcaacccccgcgcgtccgtccagtgccagtgttgttcccttcaagtagcacaatttgttttatcttcttttcataagaagtttccctttgtgagctagttttcgttttgatacttatatgttgttggggtctaccttagtatctaactttacaagtaggtctattttgactatgaatttatattccgtccaaatttaatgatgtgagacaatctttaagtgttatgtcaataaaattttatatatttcaagttcaa

SEQ ID NO: 1211 - DNA, 1071 bp, Gossypium hirsutum
  Clone ID: GOSHI-09MAY01-C7640_1
cccacgcgtacgttcaaacccaaaccaccccattcagcggactcgacaatgctgcttaacgtgggtacttccgtaagagcagctactcgattttctcctttcattataacccattcttctccttcatctccttcttcgtttggcttcactttctctccaaagcaaaccgtctcttttactctacaatcatcgcaaatggcgtcttttactacgttatctcaatcgcctccaaagctattgtttcgtcagttgttcgagaaagaatcatctacttatacttaccttcttgctgattgttcccaccctgataaaccagcgcttttgattgaccctgtagacaggactgttgatagagatttaaatttggttaaagaattggggctgaagcttatttatgctatgaacactcatgtacatgctgatcatgttactggaactggcctcatcaagggcaaggtgcctggtgtcaaatccgttatttcaaaggccagtggttccaaggctgatgtttttgttgaacctggtgacaagatctcttttggggatctctttcttgaggttcgtgctactcctggtcatacaatgggttgtgttacctatgtcacgggagatggacctgatcaacctcagccaaggatggctttcacaggagatgctctgttgataaggggatgtgggaggacagattttcagggtggaagttcacagcaactctacaagtcagtgcattcacagatttttacattactgaaagagacattgctatatccagctcatgactacaaaggattctcagtaaccactttgggagaggaaatgctatataatccacgcttgacaaaggatgaggagactttcagaaacatcatggaaaatcttaacttggcatatcctaagatgattgatgttgcagtgccagcaaatatggtttgtgggttgcaaaatttggaacctaaagccaactgaagctttgctggatcatccataattgtgcacagattttattgtattataattctggatcttaatatcactggatatgctaaataaaatggctagagaaaccacgtg

SEQ ID NO: 1212 - DNA, 514 bp, Gossypium hirsutum
  Clone ID: LIB3825-033-Q6-N6-D5
gccccaataataaaggatatataatatatcatggggttgttttgttaaaatagttcggtaacttaggagggtatgtatgaaaaacacaaggtggtgcaaatagaaagaccacaatttttcatgattacaataagatatagtatatatataatttatggattccttgcaatcacgtggcttctttagccattttatttagcatatccagggattttaaaatccaaaattataatacaactaaaatctgggcacacttatggatgatctaacaaagcctcagttggctttaggttccaaattttacaacccacaaaccatatttgctggcactgcaacatcaatcattttaagatatgccaagttaaaaatttccatgaagtttttaaaagtctcctcatcctttgtcaagcggggattatataacatctcctctcccacaggggttacttgggaaccattgctgctactctctggtactctggtacctcacacgatttgtaattgaaggccttgt

SEQ ID NO: 1213 - DNA, 778 bp, Gossypium hirsutum
  Clone ID: AI055183.1
cttctagattttgcttattaaagctttgatttgatcgtttcctcgatctcatttaatatttttaaaattaatctcaaacccaaaccaccccattcagcggaattgacaatgctgcttaacgtgggtactttcataagatcagctactcgattttctcctttcattataacccattcttctccttcatctccttcttcgttttgtttcagtttctctccaaagcaaaccgtctcgtttactctacaatcatcgcaaatggcgtcttttactacgttatctcaatcgcctccaaagctattgtttcgtcagttgttcgagaaagaatcatctacttatacttaccttcttgctgattgttcccaccctgataaaccagcgcttttgattgaccctgtagacaggactgttgattgagatttaatattggttaaagaattgtggctgaagctttattatgctttgaacactcatgtacatgctgatcatgttacttgaactggcctcatcatgggcaaagagcctgatgtcaatccgttatttaaaggccagtggttccaggctgatgttttgtgtagcctgtgactaattctattttgggatctctttctgaggtcggctattctgatatacattggtgtgtacctatcatcgtactgtcatatatcatactatgtggtttaacggaatctttttatacggattggagactttttgtggtaatcaatttatattagtttcttattttacattaatttattaattagactagttatctccg

SEQ ID NO: 1214 - DNA, 405 bp, Gossypium hirsutum
  Clone ID: LIB3146-027-Q1-K1-A9
ccttccaaccttctccctccttttcatgcttctatcctgaccaaccctttaacaaaccctaacaaccctcaacaaggccttcaattacgaattgtatgaggtaacagagtaacagagaatagcagcaatggttcccaaatgttgagaatgcgcttgcgaagttcacatgggctaaagaagttcataagaagatggttacgctgaaagaggaaggcaagccgatgccaaagaactttgctgaggtgcaaaagctaatgggttcaacaccattggatcttgccaagtttaatatggtaaagagtggagaaatgagccgtaatgctccttgtccatgtggttgcaagaagagatacaaaaggtaatttggcacactatttctcagcgatctgtgttgctgtgagtagc

SEQ ID NO: 1215 - DNA, 436 bp, Gossypium hirsutum
  unsure (1)..(436): unsure at all n locations
  Clone ID: LIB3197-029-Q1-M1-G6
gcagcgccgatttctaatcccttccaaaagaaaggattagctaatcggtactcttctaccctccaagccgttgcagcatcttcttctttttttcatttttcttcccatttccttccaaccttttccctccttttcatgcttctatcctgaccaaccctttaacaaaccctaacaaccctcaacaaggccttcaattacgaatcgtatgaggtaacagagtaacagagagtagcagcaatggttcccaagttcgtgctactcctggtcatacaatgggttgtgttacctatgtcacgggagatggacctgatcaacctcagccaaggatggctttcacaggagatgctctgttgataaggggatgtgggaggacagattttcangtataatttcttgaaaatgttattngcagctatcgcanaaaaatggacgaata

SEQ ID NO: 1216 - DNA, 433 bp, Gossypium hirsutum
  Clone ID: LIB3147-056-Q1-K1-G5
gggtttcaaactgaaaaaagtctccaaaactttcaatccaaaatgcctaagcaaattcatgagatcaaggacttcctgctcacagctagaaggaaagatgctcgctcggtaaagatcaaaaagagcaaagatgtagtgaagttcaaggtccgttgctccaagtacttgtacacactttgtgtgtctgatgctgagaaagccgacaaattgaagcagtcccttcctccaggtttgagtgtccaagatctgtgaaaatagtgcttctccaagtctgttattcaattactaggccaagaaatctagattttgatttatggtttattgtatttcacgccatttggtgttcggaggatgtactttttcatgttcaattaaaccttggcactctttaaattaattgattgggagattgaacaaaagtgattttctgttg

SEQ ID NO: 1217 - DNA, 638 bp, Gossypium hirsutum
  unsure (1)..(638): unsure at all n locations
  Clone ID: LIB3543-054-Q1-K6-C11
ngaagtatgaacattttaacaaggttgcaaggtgggtgatgaactccttaccgagcagggagcaaagcgcatagttcctttgggtcttggagatgatgaccaatgcatagaagatgacttcactgcatggcgtgaattagtgtggcccgagttagatcagcttctgcgtgatgaagatgatgcaactgtttctaccccgtacactgctgctgttttggaataccgtgttgtattttatgatcctgcagatgcaccccttgaggataagaactggagtaatgcaaatggtcatgctacttatgatgctcaacatccttgcaggtctaatgtggctgtgaggaaggagcttcatgctcctgaatctgatcggtcttgcacccaccttgaatttgacattgctggaactggactttcatacgagacaggcgatcatgtcggtgtttactgtgagaacctggatgaagttgtagatgaagcattgagtttactgggcttatcacccgacacttatttctctgttcacactgataaagaggatggtacaccacttggtggaagttctttaccttcttctttccccccttgtactctgagaacagcactggcacgatatgctgatcttttgagctcgccaaaaa

SEQ ID NO: 1218 - DNA, 358 bp, Gossypium hirsutum
  Clone ID: LIB3147-040-Q1-K1-E10
cccacgcgtccgacacatggttggactgcgtgctttgaattttaggtgttcctgcagagtgaggaagctcccctgaaaacttcagttgaaaatgcctaagcaaattcatgagatcaaaggacttcctctcaacgctggaaagaaagatgctcccgtcgttgatctcgcgtaaagcaacaatgttttgaagtttaaagtccgttactacaagtacttgcctgcagagacacgggtcaaagccattaatgagatatgtgggcaagctaaattttcagatcttacgaacaactttttagttatactatacgacaatggttagcttatacatatagaaagcattgcaaagagatttgtggag

SEQ ID NO: 1219 - DNA, 309 bp, Gossypium hirsutum
  unsure (1)..(309): unsure at all n locations
  Clone ID: LIB3148-031-Q1-K1-H7
tccgttccagtgccagtgttgttcccttcaagtagcacaatttgtttatcttttttcataagaagtttcgctttgtgagctagttttgttttgatacttatatgttgttggggtctactttagtatctaactttacaagtaggtctattttgactatgaatttatattccgtccaaatttaatgcanaaaaaaaaaaaaaaaaaaaaaaattaaaaaaaaataaactataaaaaaaaaaaaaaaaaaaaaaaaaaaaaaaaaaataaaaataaaaaaaaaaaaaaancggggcggccgttttaaaggat

SEQ ID NO: 1220 - DNA, 278 bp, Gossypium hirsutum
  Clone ID: LIB3083-099-Q1-L1-A1
tctagaatccttactgagcaaagagcgggacgccttgtccctgagggccgtggaaattatgatcaatgcattgaacaccactttactgcatctcgtgaatcattgtggtccgagttaaatcagcttctgcgcgatgactatgatgcaacatctgtttctaccccatacactgatgctgttttggaataccgtgttgtattttatgatcctgcaaatgcacctgtcaaggataagaactggaacaatgcaaatggccacactgtttatgatgctcaaca

SEQ ID NO: 1221 - DNA, 1260 bp, Gossypium hirsutum
  Clone ID: GOSHI-09MAY01-C7660_2
acacaacataagttattctggtttttggtggttgcggcggcggcggcggcggggtttgggttccaatgcttaccttgattgttggatttgataccaaatctgccgctgctatttccaaatgcatgatcatgggggcatcagcatcgtcagtttggtataatcttagagtgccgcatcccacaaaggaagtgccaatcattgactacgatttggctcttcttttccagcctatgttgatgcttggcatcactgttggggtttgccttgagcgtcgttttcccttattggctcattactgtgctcatcatcatactcttcttaggtacgtcttcaaggtctttctataggggtattgaaatgtggaaagaagagacaattttgaataaagaactcaccaagccacaagaatcttttgttaattccaggggtgaattactgatagatacagagtacgaaccattggttccaaaagaagagaaatcaaaactgcaaatactgtgtttcaatctaaggtggaaaaggcttttggtactggctacagtttgggtacttttcacggttattcaagtcatcaagaatgatgtggttccctgtaccactttgtattgggtattgtttagcttacagttccccatagcaacactggtttttggatatgaagcaactaaattatacaaagaacataagaagagaatgagcactgggaatgctgaaacagtttgtggagcttcaattcaatggagtccattgaacattgcattttgtgcactttgtggcatcttgggaggcactgttggtggattgcttggttctggtggtggattcattttgggtcctctcctccttgaaattggtgtgattccacaggtggctagtgcaacagcaacattcgtgatgatgttctcttcatccttgtccgttgttgaattctatttgcttaagaggttcccaatgccctatgctttgtacttgatgggagtatctattttggctggtttctggggacagtatttcgtgagaaaactaataacaatccttaggagagcttcacttatagtgttcatcctatctggtgtcatctttgcaagtgctctcaccatgggagtcataggcattgagagaagcattcgaatgattcacaaccatgagttcatggggtttttagatttttgcagccgccaatgatcgttgactaagtaaggatgttgttggtcatcaccttgttgaccaatcccaacatattcaatgtctcgtaagaat

SEQ ID NO: 1222 - DNA, 961 bp, Gossypium hirsutum
  unsure (1)..(961): unsure at all n locations
  Clone ID: AI055721.1
agagcgttgacgtatactcnanctacagaatcnactaatacgntagttaccaanctcactatatagggaacaaaaagccctggagcnntccactcgcggtggggcggctccgcttctagaaaacttttgtggattcctcnnccgggcttttgcaggaaaattcgnnngcacgaaggcgggagccaaatgtggttcngnnttttggtattctcgctgctccgggttnnntttcgatangnncagttcttcttcttgttnnnttgttcaattccccaaaaannagcaaccaaccgaacgaacatnngaacctagaagctcnnaaatctcttaagaagtccccatttataatttatnnccaccactgaaanaagtttggcctggcattggagttgaacctggnnaggcttgtaatggcgaacggtgaatagggtttcttaggatcnagcatgtggtaccggtgggcggcgttggcggcggcggcatttttgttccaatgcttaccttgattgttggatttgataccaaatctgccgctgctatttccaaatgcatgatcatgggggcattagcattggcagtttgggataatcttatagagtcccatacgacacatgaaatgcccaatattttcgtccaaaattggtcttttttttcaccccattattgaagaccctggtaaacacttgtggggtttcgcttagagcggcgtttcccctttaggggcaattatggggcgcaaataatacacttttttaagaacacctttatagaggttttataatggggttttaaaatggtagaaaaagaaccactttgaaataaagaactcccctcctcaacaataatttgttgaatattcccgggggataatcgctgatacaccccgtctcacacctgtgtgtcacaaaaaaagagaataaacacgcgaataatctggtttaatatatgggggaagaggttg

SEQ ID NO: 1223 - DNA, 407 bp, Gossypium hirsutum
  Clone ID: LIB3149-046-Q1-K1-G3
gcttaagaggttcccaatgccctatgctttgtacttgatgggagtatctattttggctggctgctggggacagtatttcgtgagaaaactaataacaatccttaggagagcttcacttattgtgttcatcctatctggtgtcatctttgcaagtgctctcaccatgggtataaatttattaaagctcaatgattctgcattcttaaattttagcattacagaaggactaagttaataattttacttttttttccttttagttggtggaaactgataattgtttttattcatgtatattaaacaggagtcattggcattgagagaagcattctaatgattcacaaccatgagttcatggggtttttaaattgttgcagcagtcaatgatcgttgactaagtaagaatg

SEQ ID NO: 1224 - DNA, 342 bp, Gossypium hirsutum
  unsure (1)..(342): unsure at all n locations
  Clone ID: LIB3165-023-P1-K1-B9
acacaacataagttattctggtncctataaattgtagcngcagcnccaactggggggcgttggtttatgtgggagggccacaccctaacctgtcaaaatctaaagggcctatttccaaatgcatgatcatgggggcatcagcatcgtcagtttggtataatcttagagtgccgcattccacaaaggaagtgccaatcattgactacgatttggctcttcttttccagcctatgttgatgcttggcatcactgttggggttgccttgagccgtcgttttcccttattgcctcagtaacacccccaatattacacttatctgttggaccacgccttaacttttt

SEQ ID NO: 1225 - DNA, 466 bp, Gossypium hirsutum
  Clone ID: GOSHI-09MAY01-C7610_1
ctttaatcatcttattttggtataccctcttctttttttctttttttttctcagttcctcttcttgcaaagatggcagcatcgtcagcatgcttgctaggaaacggtctgtctactcacagaactaaatcgaagttgagtaaagacttttatgggaggaatattgtatttacccccgccatttcatcgttgggtcggaaatcgaatgccgtactcgtaaaggcatctttaaaacttaaacaacatgaaggaagaaggggattcttgaagtcattactcggaactgctggaattggagttccggctttactaggaaatggtaaagcgtatgctgatgaacaaggggtttcttcctcgagaatgtcgtattctaggtttttggagtatttggacaaggacagggttaaaaaagtggatttgtttgaaaatggaacgatagctattgtggaagctgtctctcctgagtt

SEQ ID NO: 1226 - DNA, 429 bp, Gossypium hirsutum
  unsure (1)..(429): unsure at all n locations
  Clone ID: LIB3165-018-P1-K1-F4
attcccgggctgtatcatcttattttggtataccctcttcttttttttttttttcttattttctctncttgcaaagatggcaccagcctcagcatgcttgctaggaaacggtctgtctactcacagaactaaatcgaagttgagtaaagacttttatgggaggaatattgtatttacccccgccatttcatcgttgggtcggaaatcgaatgccgtacttgtaaaggcatctttaaaacttaaacaacatgaaggaagaaggggattcttgaagtcattactcggaactgctggaattggagttccggctttactaggaaatggtgaagcgtatgctttttaacaaggggtttcttcctctagaatgttcttatttttagtttttaaatttttttatttcattatctggttatataaatttttttcttt

SEQ ID NO: 1227 - DNA, 677 bp, Gossypium hirsutum
  Clone ID: GOSHI-09MAY01-C7150_1
gctggaaccatcctcacaaacccctgattacctaatctcacccataacaccgccggcaccaccatcaccgccgccgccgcccacaaaacccaatcagtttctatccttgatatccaacagaccatcccttagagtgacttcagagttcgacagtgatagccgtgtgttctttcacaaagtgtcttttaagttgttcgatgaccttgctaagcttaaactatccttcgttaataacgttaaacgtgagatctcggagcctcttttggcgttaacttcgaagcatttgtctattcactatgatcctgaggaaaaaaatgctcttatcaagacatcttttgatgtgggtcctaaattgcagttcaaagctgctcatgatgttaaggcaaaacgaggcgaggttgcaatgattgcgaatgttgctgatcctggttatgccgttgaagtgtcgtctcctgttccatatattggcttgccgaaagcaacaattagattccctaccggtgaagttacacttgaggagagagaagatgaagaagtgccaagcaaaattgttgataaatgggattcttaaaggtccgattttgaatggggtcggtgcagcccattacacagatgaagaactgagactaagatactcatataaggatgaatcactgtcatttattccaagcatttca

SEQ ID NO: 1228 - DNA, 582 bp, Gossypium hirsutum
  Clone ID: GOSHI-09MAY01-C7110_1
atatggttccctgtttttttttcatttatttacttccccctgttacgtgctaacattagatttcagatccgacgccccctccgctctgctgtcttgtccgacatcgaaattccataccccggagctcaactctctcgctctccgccgacgcctgagaacgagagctcgtctctagaaaggtacgttctttgatcaaatccgatcccatcaattttatctctgcttacatcctcgcattttgcgaaaaccatgagctccaattatgggaaaggttcatctggttcgctaaaatccttcgatttcgatctcggcctcggatcgggccgacccaaatccctcaacgaccaaaagaacaaaacctcttcttccttttcatcttattcatcagcaacatctgcaccatcgaagcccgcatggcaacccaacaaaccgtcgtggacccatcaacccgccccgaatcaggccagccaagccgcgatatcgggtcccacttccatggtgggagacatctttgggaagagctggtcctcttcgggaggtaatagctctgggattggaattgttaacaagaaccctaatttg

SEQ ID NO: 1229 - DNA, 719 bp, Gossypium hirsutum
  Clone ID: GOSHI-09MAY01-C7120_1
cggacgcgtgggcggacgcgtagacatgggtgttgtaatcattgacggatcgacggtgagagccttcgtgactgacgaccaacagttcacgaagagcgtggatgagcgtttcgcagctcttgacctcaacaacgacggtgtcctctccaggtccgagcttcgcaaggccttcgagtctctgcgtctcctggagtcccacttcggtgtcgacgtcgccactccccccgacgagctcactcagctttacaactccattttcgagaggtttgattgcgatggcagcggcaccgttgacctccaggagttcagatctgagatgaagaagattctgcttgctattgctgatggattgggatcttgccctatccagatggttcttgaggatgatgaccaaagttttctgaagaaagctgctgatcttgaggctgctaagctcgatccaaaccatgctcaagcctcctgaatgatgctcccaggttgctgaacttgaatttatgcttttgtattttcttatcttttgcagctactttagcttgttggtatttggatccatccaagtatatatgaataaaagggttaacgctacgtttagccctcgagctttaggcgaatgtgaaatgcgtacttaaacttgaatttcatgatacatttcatccaacccttaattcggttaaaagtatgaacttatatgggtagcgtaagggtgagttgttgagatt

SEQ ID NO: 1230 - DNA, 240 bp, Gossypium hirsutum
  Clone ID: uC-gsflnu33B091e08b1
tccgacggtgagagccttcgtgactgacgagcaacatttcacgaagagcgtggatgagcgaaccgcagctcttgacctcaacaacgacggtgtcctctccaggtccgagcttcgcaaggccttcgagtctctgcgtctcctggagacccacttcggcgtccacgtcttcaccacctccgacacggtcaaaccctcagacacccccattttagagaggttggattgctatcgcctttgccc

SEQ ID NO: 1231 - DNA, 430 bp, Gossypium hirsutum
  Clone ID: GOSHI-09MAY01-C7090_1
gatatatactatagagatcaacaggggtttttcaacaatgattatctcacactaggggtggatcatgttcctctgttatctgggcggactgccctccagtgttatgaagatttcatgcttagttttgttaacaaatttgaatcctttattggaactgtaattgaagaaataagcatcggtcttggtccttctggagaacttagtgcaggtatcctgctcatccttttggtgatggtagatggaaattccctggcatcggtgaattccagtgctatgataagttcatgatggaggacttaaagatggctgcatgccgagaaggaaaacctcaatggggggacaaagggccacagaatgctggctgttacaacagtcttccatctggggtgcccttctttgaagagggaaaggagagctttctatctgatta

SEQ ID NO: 1232 - DNA, 579 bp, Gossypium hirsutum
  Clone ID: GOSHI-09MAY01-C7010_6
atcccctcttttcttcttgagtttcctttgtgaatcagttcaagctggcgattgaaaatcaagaacaccactgttcgtgaaatcaagcccaagaacagcaagataatgggagctggtgggcctgatgaagaacataataggtggccgccatggctgaaacctttactgaaagaacagttctttgttcagtgcaaacatcatgttgattttcacaagagtgaatgcaatatgttctgcttagatctgcgttaatggcgctctctgttctttctgcttagcgtatcacaaggcatcactcgctttatccaggttcagtaattatccctttaaattgctttcatggttcatgttgcgccaaatactatttacccttcttttcatttgagtttggactttttacaagcatctttatttaatttcctcagcatccacaacaggcgttggctaaaatttctctgcactttctctggtttgttaacagatatgggtggtcttcactaccaccatgtgataagagtatctgatatacaaaaatacctagacatatcttggagtccaaacttttataatcaacagtgc

SEQ ID NO: 1233 - DNA, 430 bp, Gossypium hirsutum
  Clone ID: GOSHI-09MAY01-C7010_5
ctctgctcgccgccttcacttctctctctctccctctctcgctctaatctcactcagcctgctaaaacagagcattaccctttcgagttcaagacttcaagctggcgatcgaaaatcaagaatccactgtccgtgaaattaagcctaagaacagaagaatcatgggtgctggtggacctgatgaagaagacaataggtggccgccatggttgaaacctttattaggagaacatttcttcgttcaatgcaagcttcatgctgattctcacaagagtgaatgcaatatgtactgcttagattgtatgaatggcgctctctgctctctctgccttgctcatcacaaggatcatcgctatattcagattaggaggtcctcataccatgatgtgacaagggtatctgagatacagaaatacccggatatttctgg

SEQ ID NO: 1234 - DNA, 626 bp, Gossypium hirsutum
  Clone ID: GOSHI-09MAY01-C7010_4
gcggaccaagccgtcccgctctcgctctctctgttttgccttctctgcttttcactgaaacgttaaaacagactcgttaccctttgagttttcccctgttgttttctttcaattacttcaagctggcgatcgataatcaagaacccactgtccgtgaaatcaagcccaagaacagaagaatcatgggagctggtgggcctgatgaagaagacaacaggtggcctccatggctgaaacctttgttaagagagcatttctttgttcaatgcaagcttcatgctgattctcacaagagcgaatgcaatatgtactgcttagattgcatgaacggcgctctctgttctttctgcttagcttatcacaaggatcatcgttacattcagattaggaggtcttcataccatgatgtgataagggtatctgagatacagaaatacctggacatatctggagtccagacttatgttatcaacagttgctaaggtcgttttcttcttatgagagggcacatcccatgcctggaaattgtttttcctatcacttgttagggtttttttttctatccttttaattttcttctctctttttttttcttggtttcatgtattgttttttctctaaatatt

SEQ ID NO: 1235 - DNA, 778 bp, Gossypium hirsutum
  Clone ID: GOSHI-09MAY01-C7010_3
ctctctctctctgctacgccgcctttgcttccctttctctgaataaaaaatcccaaactgaccaaaaaaaaacagagcatttagttttttctttcaattaagagttcaagctggcgatcgaaaatcgagaatccattgtccgtgaaatcaagcccaagaacagaagaatcatgggtgctggtgggcctgatgaagaagacaacaggtggccgccatggttaaaacctttgttaagggaacatttctttgttcaatgcaagcttcatgttgattctcacaagagtgaatgcaatatgtactgcttagattgtatgaatggcgctctctgctctttttgcttagctgatcacaagggccggcccctggttcagataagaaggtcttcataccatgatgtgataagggtgtctgagattcaaaaatacctagacatatctggagttcaaacatatgttatcaacagtgctaaggttggtttcatcaatgaaaggccacagccaaggccctggaaagggtgtcatcaacacctgtgaagtctgtgagcgtagccttgtcgacaacttaagattttgctctctcggttgcaaggtagttggcacttcaaaaggatttcccggaagaagaagaggctaatgggaatggcttcaaattcagaggattcatacagcagcagcagcagccatcgaaatatctcaggaacagcaccaacaacaacaatagtcaaagctttagcccattaacacccccaccaacattggttaattaccgaactgctaaa

SEQ ID NO: 1236 - DNA, 549 bp, Gossypium hirsutum
  Clone ID: GOSHI-09MAY01-C7010_2
gaacatcaaagaatttccacaagaagaaaaggcagctaggtatgaacatggcagcattagactctgaggattcatacagtagcagttgccatgagaagattaacaacaaagtgcagagctttagaccatcaacaccacctccaactcgaactgccaaacgaagaaaagggattccccacagagcaccgatgggaggattaatcatagaatattaagccaaagaaatgccgtaaaagatagtggtttatatccttttatatttaccctgctagtgttagtatcagtgttacgccatacatacctctctctactattatgtatattatatagaagtggaaatactaataatgataatgagccagcttttctaagtgagtgactatagacataagtttttggaaaatgctaaattgtaaatagggtctttctggttttagggcaagaagactaagagcaatgtgaaagacagggaaaataccatgtattgtactcctttcccaaggggatgtttatatcgtttgcctagatatgaattttgagttctaatct

SEQ ID NO: 1237 - DNA, 1083 bp, Gossypium hirsutum
  Clone ID: GOSHI-09MAY01-C7010_1
cggacttaggttcggtgtggacttcttttgatttagataagaacgacatatctccccttctcagtttttacattttagttctctcccgaaatctctcactcaaaaccaaaaaacaaaaacagagcatccactctttttttcttgagtttcctttgtaaattagttcaagctggcgatcgaaaataaagaaaccactgttcgtgaaatcaagcccaagaacagaagaataatgggagctggtgggcctgatgaagaagataacaggtggccgccatggttgaaacctttgctgaaagaacagttctttgttcagtgtaaacatcatgttgattttcacaagagtgaatgcaatatgttctgcttagattgcgttaatggcgctctctgttctttctgcttagcttatcacaaggatcatcgttatatccagataaggaggtcttcataccatgatgtgataagagtatctgagatacaaaaatacctagacatatctggagtccaaacttatataatcaacagtgctaagatcgtttttcttaatgaaaggccacaacccaggcctggaaaaggtgttaccaacacttgtgaggtctgtgatcgcagccttgtcgattccttccgtttctgctctcttggctgcaagattgttggaacatcaaagaatttccacaagaagaaaaggcagctaggtatgaacatggcagcattagactctggggattcatccagtagcagttgccatgagaagattaccaccaaagtgcagggctttagaccatcaaccccccctccaactcgaactgccaaacgaagaaaagggattccccccagagccccgatggggggtttaatcatagaatattaagccaaagaaatcccgtaaaagaaaggggtttaaacccttttatatttccccggctagtgttagtaccagtgttacgccaaacaaccctctctctactattagggatattaaaaagaagtggaaatactaataatgataatgagccggcttttttaaaaaaaaaaaaaaaaaaaaaaaaaaaaaaaaaaaaaaaaaaaaaaaaaaaaaaaaaaaaa

SEQ ID NO: 1238 - DNA, 426 bp, Gossypium hirsutum
  unsure (1)..(426): unsure at all n locations
  Clone ID: LIB3135-043-P1-K1-G7
cggacgcgtgggcgaaatctctcactcataaccaaaaaacaaaaacagagcatccactgtttttttcttgagtttcctttgtaaattacttcaagctggcgatcgaaaataaagaaaccactgttcgttaaatcaagcccaagaacagaaggataatgggagctggtgggcctgatgaagaagataacaggtggccgccatggttgaaacctttgctgaaagaacagntctttgttcagtgtaaacatcatgttgcacttcacaagagtgaatgcaatatgttctgcttgcattgcgtcaatggcgctctctgattctttttgttagcttattatcaggatcattgttatatcctgatattgtgcgtctttaatccatgtctttctaattatattcttttttacattaattactcttttcatattt

SEQ ID NO: 1239 - DNA, 1396 bp, Gossypium hirsutum
  Clone ID: GOSHI-09MAY01-C7320_1
cggaatggccgggccgacccacccgccccccctccctctcacagttcacttctgtgtttagtgtagccaggattttaaaaaaaacctccattaatggctgcactaaggagcttccttaggaaaagatgtttaacatgcgacgagctgatgatgacaaggaggctgatctccaccgaacccatcattgattccccttcttttgctcaaagactcagagatcttcccaaggatctccctggtactaaaattaagagggaggtttcgcagctaattggaagaacaccccttgtctttcttaataaagtaaccgaaggctgcggcgcgtatatcgctgtgaaacaggagatgatgcaacccacttctagtattaaagacagaccagcatttgccatgatcaacgatgcagaaaagaaaaacttaatctctcctggaaagacaactctcatagagccgacatccggtaacatggggataagtatggcattcatggcagccatgaaaggttataaaatggttctaactatgccttcttacacaagcttagagagaagagtcaccatgagagcatttggagctgatttaattctcacagatcccacgaaagggatgggtggaacagtgaaaaaggcttatgacctcttggagtccacaccgaatgctttcatgttgcaacaattttcaaatcctgccaacactcaggtgcactttgaaacaacaggtcctgagatatgggaggatactcttggtaaagttgacatcttcgtaatgggaatagggagtggtggtactgtttctggtgttggacagtacctcaaatcccaaaatcctaatgttcagatatacggagtggagcctgctgaaagtaatgtattaaatggtggcaaaccaggtcctcatcatattactggtaacggagttgggttcaagccagacatattggacatggatgtaatggagaaagttctcgaggttagcagtgaagatgcagtaaacatggcaagggaattggcattgaaagaggggcttatggttggaatatcatcgggggccaacactgttgcagcactcagacttgcaagaatgcctgagaacaaaggcaaattaattgtgactgttcatccaagttttggagagcgttacttgtcatcggtcctgttccaagaactaaggaatgaagctgaaaacatgcagccagttgcagtcgactaaatgccttttcaggggacatgttaggaagctcccccgggacaacaaaagccctgtctgttaataccaaatgtttccaccgaaacattggtatccattgttattatgaatccgctgtgcacccatttgttttagtttcaatgtttaactctgtctgaaatgaaatcagtaataattggaatttgcattg

SEQ ID NO: 1240 - DNA, 543 bp, Gossypium hirsutum
  unsure (1)..(543): unsure at all n locations
  Clone ID: LIB3829-021-Q6-K6-A11
cagtgcactttaaaaaccccgggggggggggggggggggaancataagataaagttgacatcttcntaatgggaatagggagtggtggtactgtttctggtgttggacagtacctcaaatcccaaaatcctaatgttctttttttttttttggagcctgctgaaacttttggggggggggggggcaaaccanntcctcatcatattactnntaacccanttaaattcaaaccanacatattgnacatggatgtaatgganaaagttctcgaggttagcagtgaagatgcagtaaacatggcaagggaattggcattgaaagaggggcttatggttggaatatcatcgggggccaacactgtttcagcactcagacttgcaagaatgcctgagaacaaaggcaaattaattgtgactgttcatccaagttttggagagcgttacttgtcatcggtcctgttccaagaactaacgaatgaagctgaaaacatgcaccccgttgcagcccattaaatgccttttcaggggacatgttaggaagctt

SEQ ID NO: 1241 - DNA, 403 bp, Gossypium hirsutum
  Clone ID: GOSHI-09MAY01-C7260_4
gcgccaaggtgaagatccctcgcggccggtcctactggtacaacagctatggatcagttgttacaggtgaccaggatcccaagactcggtacccagttgtggttcgattcaacaaagttaattacgccaatgtatctaccaacaactacgcattggatgagattgaagaagttaaatgagtcactgtttcattttgtaataattttgggtttcaatgatcctatggctaatatatatatcgtcttcccccctctatctggctttgagcttgtttctaccaaaaacgacgtgtacaatactatcatctttctcttgaggtctctcatttattaatgccttactttcctataataaaaataaaaatttataataataatatgtaaaaaaaaactatatttttttt

SEQ ID NO: 1242 - DNA, 505 bp, Gossypium hirsutum
  Clone ID: GOSHI-09MAY01-C7260_3
cccacgcgtccgggaaaatccaaatttccctttcacaatttttctgccacactatcccttggttacagacacagaaaagatcagagcgtggagacatggttagctgctgcaacatggcatcggctgcttcaggtttcttgctaacacccaatgtttctgcagggacttctaagaccaacaacaacaacatggtgtttttcccatccaagaccaacaacacctcaaggcttgttgtgagggcagctgatgaggaggcttcaccaccaccaccctctccaaccccagcaaccaccactgcaccacctgaagggggtgaagctcctaagcctaagccaccaccaataggaccaaaaagaggcaccaaggtgaagattcttaggagggagtcctactggtacaacagctatggatcagttgttacagttgaccaggtcactctttctctctttcttcttccagctccatttgcatgcatgcatgcatgtatgaaggaactatggatcta

SEQ ID NO: 1243 - DNA, 612 bp, Gossypium hirsutum
  Clone ID: GOSHI-09MAY01-C7260_2
gtgcataggtgtcagcttcctagtggatgtataacgtaaaaaggagtccactttctcaatatgagataaaattcattgataaatttttttttaaaaatattccaaataattcaaggcctctcaatcattccttttctttttctttttcatttgcttaaaacgatcgagccacagttttaagcttagcggagagagagagagagagagatgggtagctgcagcggcatggcatcggctgcctcggggttcttgttaatgcccaatctcaccggcactgctgcttctaagactaataacatcagcatgctcttttccccttccagaaacaactactacaatagctcaaggctcgtcgtaagggcggctgaggaggaggcttcgccaccagcaccaacaccagcaaccaccactgcgccaccagaaggtggtgaagctcctaagcctaagccaccaccgattggaccaaaaagaggaaccaaggtgaggatccttagaagggagtcctacaccccaagactcggtacccggtggtggttcgattcaacaaagtcaactatgccaatgtatctaccaacaactatgcactggatgagattgaagaagttaaatgag

SEQ ID NO: 1244 - DNA, 605 bp, Gossypium hirsutum
  Clone ID: GOSHI-09MAY01-C7260_1
ctttttctttttcatttgcttaaaactatagagccacggtttagcagagagagagagatggggagctgcagcggcatggcatcggctgcctcggggttcttgttaatgcccagtctcaccggcactgctgcttctaagaccaataacatcagcatgctcttttccccttccagaaacaactactacaatggctcaaggctcgtcgtaagggcggctgaggaggaggcttcgccaccagcaccaccaccagcagccaccactgcgctcaccagaaggtggtgaagcccctaagcctaagccaccaccgattggaccaaaaagaggaaccaaggtgaggatccttagaagggagtcctactggtacaatggctatggatccgttgttacagttgaccaggaccccaagactcggtacccggtggtggttcgattcaacacaggcaaccatgccaatgtatctaccaacaactatgccctggatgagattgaagaagttaaatgagattagtccatcaagtctttgtaattttatgttgtattttgtatcgtattacaacctcacaattcatatactaatgtaatgtatatctgcctttcaaatctaa

SEQ ID NO: 1245 - DNA, 1086 bp, Gossypium hirsutum
  Clone ID: GOSHI-09MAY01-C1990_1
cccacgcgtccgggcgttcattctatcgaatatcggtgggacttattcatggacaggggaaccatataccggagcatggctggtgaaaaaagccggttcaacgtctttgaatcatcggaacatgatacgaaacttcgattggttggatccgagcttgcagcaagattgcaagaagcattaacgaatttgggaaatcggcattcgttgcgttacgaaagggtttaaagagtcagataaaaagggttgcacgagaatctctaacgaccattgcgtggctcggttgcgaaatctcgaaaagttcgaatagccttcgatattcagcttgtgagatcttactaggtgaagttgagaaatttttacatccaggaatggaccttgaagaaaggcttctagcatgcctatgcatatataactatgcttcgggaaaagccctcgcgtcccccctcccgtccgcggagggtgtacgagaatcgcttcggagattttcaaatgtaatctggatggctgatgaactacatagagtagctgatttctacttgcctaataaatcgcgtatttcttgcgttcatacacaaatagtagaagtgagtcacaaatacagtggagctgtaaatgccttaatttactacaaaggaatgctttatagtggatactccgatggttcaatcaaggtatgggacatcaaaaggcaatcagccacactcttatgggacattaaggagcataaagactcagtgacatgcttttcactctttgaaccaggagagacccttttaagtggttctattgataagaccattagagtgtggcaaatggttcataacaaattggaatgcattgaagttatagccacaaaagaaccagttcaaaagctagacacatatggtcaaatgatatttatgatcacccatgcccaccatcttaaggttattgattcattaagaacaaccaacagcatatgcaaaaccaagagtgtgaaatgcatgaagatggttcaaggaaggatttatgcaggctgtaccgattcaagtattcaggaggtttctttatccagcaaccatcaaagagagatcaaagcagctgtta

SEQ ID NO: 1246 - DNA, 501 bp, Gossypium hirsutum
  Clone ID: LIB3583-024-P1-K1-G10
agcaattatcggcgttcattctatcgaatatcggtgggacttattcatggacaggggagcgcatgtgccgtagcatggctggtgaaaaaagccggttcaacgtctttgaatcatcggaacatgatacgaaacttcgattggttggatccgagcttgcaggatatggtaaccgatttgtggtgcagcaagattgcaagaagcattaacgaatttgggaaatcggcattcgttgcgttacgaaagggtttaaagagtcagataaaaagggttgcacgagaatttctaacgaccattgcgtggctcggatgcgaaatcttgaaaagttcgaatagtcttcgattttcagcttgcgagaacttactaggggaagttgagaaatttttacatccaggaatggaccttgaagaaaggcttctaacatgcctatgcatatataaccatgctttcgggaaagggattaagtaactgattcatttcttgggggtgttcgagaatcgcttt

SEQ ID NO: 1247 - DNA, 616 bp, Gossypium hirsutum
  Clone ID: GOSHI-09MAY01-C1930_6
gccccctcgcggccgcgggctcgtgggcgttcgtttcggcttacgctcgattacctcacgaggagagaaaatggccagagtgttgcccaactgtgagcgaggaataccagaagtcagttgaaaaggctaagaggaagctcagaggtctcatcgctgagaagaactgtgctccactcatgctccgtctagcgtggcactcagctggaacttttgatgttaagaccaagacaggaggtccattcggaaccatgaagcatcctgctgagctcgcacatgctgctaacaacggccttgatttcgccgtcagacttctcgagccgatcaaggagcagttccctaacctcacctacgctgacttctatcagctcgctggtgtcgtcgccgttgagattactggtggacctgaaattcccttccatcccggaggagaggacaagcctaccacacctgaggccgtttcctgagctaccaggttctgatcactgagcagtttaatgctaaacgtctcatgactgacatgtgctttctgtgccaacttggaggtgcccaagatagccggtttgagacatggctccacccttattttgaatttcttagactttgcgaaaatgagctt

SEQ ID NO: 1248 - DNA, 1064 bp, Gossypium hirsutum
  Clone ID: GOSHI-09MAY01-C1930_4
cccacgcgtccgccctgcttgtgctcaactcgtgtccatcgcgtggctttcctatcttcatttcttcacactctccgacgaaagaaaccagagaaaaatgaccaagtgttacccaaccgttagcgaggagtaccaaaacgccgttcaaaaggctaagaggaagctaagaggtctcatcgctgagaagaactgtgctccactcatgctccgtctagcgtggcactcagctggaacttttgatgtcaagaccaagaccggaggtccattcggaaccatgaagcaacctgctgagctcgctcatgctgctaacaacggtctcgatattgcagtcaggcttctcgagccgatcaaggagcagttccctatcctttcatacgctgacttctatcagcttgctggtgttgttgctgttgagatcaccggtgggcctgaaattccattccatcctggaagagaggacaagcctcacccaccacctgagggtcgtcttcccaatgctactgagggagctgatcacttgaggcaggtgtttagtaatcaaatgggtcttagcgaccaggacattgttgctctttctggtggccacaccctgggaaggtgccacaaggagaggtctggatttgagggaccatggactaccaaccctcttatcttcgacaactcttacttcaaggagctcttgactggagagaaggacggcctgttacagttgccaactgacaaagttctcctttccgaccctgttttccgtccattggttgagaaatatgcggctgatgaggatgctttctttgctgattacactgaagctcacctgaagctctctgagctaggatttgctgatgcataagctgatgattgcataagaggaagaagccaacaacacaatcctacacagacgttttaggttttgttttctctctaaagttggcttaaggaatgaatttgggtggttttttttgggaagattccggagacaagttattctcgacaatttcttctaaaatcatattccccatcttggtcattgcaaaaaaaaacaaatcatcttgtgctattgagat

SEQ ID NO: 1249 - DNA, 1349 bp, Gossypium hirsutum
  Clone ID: GOSHI-09MAY01-C1930_3
ttcattcgtttcttctcacgctcgattaccttacaaaaaggttattttcgatttgagttcggatctgaattttgaaactttttagatttgatttcaatgttcttctgttaatacgaatttactttcattttaaaaaaacccagagaaaatgaccaagtgttacccaactgtgagcgaggaataccagaagtcagttgaaaaggccaagaggaagctcagaggtctcatcgctgagaagaactgtgctccactcatgctccgtttagcgtggcactcagctggaacttttgatgttaagaccaagaccggaggtccattcggaaccatgaagcatcctgctgagctcgcacatgctgctaacaacggcctagatatcgccgtcagacttctcgagccgatcaaggagcagttccctaacctcacctacgctgacttctatcagcttgctggtgtcgttgccgttgagattactggtggacctgaaattcccttccatcccggaagagaggacaagcctcacccccctcctgagggccgtcttcccgatgctaccgagggtgctgatcacttgaggcaggtgtttagtcatcaaatgggtcttagcgaccaggacattgttgctctttctggtggccacaccctgggaaggtgccacaaggagaggtctggatttgagggaccatggactaccaaccctcttatcttcgacaactcttacttcaaggagctcttgactggagagaaggctggcctgttacagttgccaactgacaaagttctcctttccgaccctgttttccgtccattggttgacaaatatgcagctgatgaggatgctttctttgctgattacactgaagctcacctgaagctctctgagctaggatttgctgatgcataagctgatgatgattgcaaaaataggaagaagccaacgacacagatgttttaggttttgttttctctctaaagttggcttaaggaatgaatttggggaggtttccgagacaagcttttttcgataattttattctaaactcacattccccatcttcttgttcgtagctgttgcattttctttcttagtggatgctccatagatatgtttggtgaatgcattccttgaagtagacgttgtgttgaaacttgttatccgttgttggaattatttgcggagtataaattaaatgatacaccattgatgaaaataactggaaaagaggtcagtgactcgatatgcttatttcagtatcaaattggttacttgagaaccgttataatcggttaccactcgtttgtagcaatgttaccccacttttctgttggagcaaagatccgtttcccatgct

SEQ ID NO: 1250 - DNA, 850 bp, Gossypium hirsutum
  Clone ID: GOSHI-09MAY01-C1930_2
gaaagaacgaagaaaaagggcggcagagtgctctcatcgtagagagtaaaaggacgtagtaatcaatccataacctgaagaaatcgtgattcgccctcgcttgactttccatttcctcgccgtcgtcttagtcaaccgagttgtaaaaggaaagaaaccagccgccaccaccaccaccaccaccatttcctaaagcgttaaaaatggcggagcaagctgttaagcttcggtgccaacgaatcggctgcaatgctaccttcaccgaagacgataatcccgagggttcctgcactttccacgcttccggtcctatttttcatgatggaatgaaagagtggagttgttgcaaaaaaagaagccacgacttctctttattcctagaaattcctgggtgtaagacaggtaagcacacaaccgagaagccagtgttgaataagccagtagctactaagacgattccaacttctagtcctgctgttactctttccaccagtgcaacatcaaaagaatcctgccctaggtgctctcagggtttcttttgctctgatcatggttcacagcccaaagtaccgaaccctaccccagctgtactggctaagagcagtgcggatgttaaggagtcttctcctccaccaaagaagatagttgacataaaccagcctcagacttgcaaaaataaaggatgtggtaaagttttcaaagaaatagagaaccatgagtctgcatgtacttaccatcccggacctgctgttttccacgatcgagtgagagggttgaagtgctgtgacatttatgtgaaggaatttgatgagttcatgaccattccaccatgcaagaagggatggcacga

SEQ ID NO: 1251 - DNA, 1141 bp, Gossypium hirsutum
  Clone ID: GOSHI-09MAY01-C1930_1
tctcccacgcgtccgcccacgcgttgctcgtgccatttcgtggtttaagggatttttttcattcgtttcttctcacgctcgattaccttacaaaaagagaaaatgaccaagtgttacccaactgtgagcgaggaataccagaagtcagttgaaaaggccaagaggaagctcagaggtctcatcgctgagaagaactgtgctccactcatgctccgtttagcgtggcactcagctggaacttttgatgttaagaccaagaccggaggtccattcggaaccatgaagcatcctgctgagctcgcacatgctgctaacaacggcctagatatcgccgtcagacttctcgagccgatcaaggagcagttccctaacctcacctacgctgacttctatcagcttgctggtgtcgttgccgttgagattactggtggacctgaaattcccttccatcccggaagagaggacaagcctcacccaccacctgagggccgtcttcctgatgctaccaagggttctgatcacttgaggcaggtgtttagtgctcaaatgggtctcagtgaccagcacattgttgctctttctggtggccacactctgggaaggtgccacaaggagaggtccgggtttgagggaccatggactaccaaccctctcatctttgacaactcttacttcaaggagcttttgtcgggagagaaggaaggccttcttcagctaccaactgacaaagttctcctgtcagatcctgttttccgtccattggttgaaaaatatgctgccgatgaggatgccttctttgctgactacaccgaagctcacctgaagctctctgagctaggatttgctgatgcataagctgatggttgcggaatagaatgaagccaacaacatttgcctccacaaaatgaatgtattgggttttgtcatctctcagtagtttatgggcagttgttgcttgatgaatatgggtatttgcagttttattttgttgaacatgttgaattgagtttgtgggagatttcgatggactaaaaagctctttcgtaataaataatatacaatttattccatatcaaatcaaaaaaaaaaaaatcataattaagtttaactcaatataataaatactggcttgctcttaatg

SEQ ID NO: 1252 - DNA, 611 bp, Gossypium hirsutum
  unsure (1)..(611): unsure at all n locations
  Clone ID: LIB3829-030-Q6-K6-C7
cggtccggnaatccgggtcgcccagcgccgaaaaagaccaggtcccaccgtacgaggagtaccaaacgccgttcaaaggctaagaggaagctaagaggtctcatcgctgagaagactgtgctccactcatgctccgtctagcgtggcactcagctggaacttttgatgtcaagaccaagaccggaggtccattcggaaccatgaagcaacctgctgagctcgctcatgctgctaacaacggtctcgatattgcagtcaggcttctcgagccgatcaaggagcagttccctatcctttcatacgctgacttctatcagcttgctggtgttgttgctgttgagatcaccggtgggcctgaagttccattccatcctggaagagaggacaagcctcacccaccacctgagggtcgtcttcccaatgctactgagggagctgatcacttgaggcaggtgtttagtcatcaaatgggtcttagcgaccaggacattgttgctctttctggtggccacaccctgggaaggtgccacaaggagaggtctggatttgagggaccatggactaccaaccctcttatctttgacaactcttacttcaaggagctcttgact

SEQ ID NO: 1253 - DNA, 534 bp, Gossypium hirsutum
  unsure (1)..(534): unsure at all n locations
  Clone ID: uC-gsronu33B159g10b1
gtctccctttttttttttttttaataaacagtaaaatatatgtactagtaacaaagaaaacagaaaagaattcaaccaaaaaaactagttacacggaagaatctataaacccaatccaaagaaataataagatgcaaaatctcgaaatctcaatgaacaatactgcatagctaacatgtcaacctaaggtcaagcagtaggtggagctggtggggctgatgtnagttttgttgttaccaccgccgccgccaccgccattgttttcccatggtctaacagtgaacaacaccacaaataagacgatcaccagcaacagtatgatagcataacaagtccatttccgggtgtttttctggtaattcctagctgtttgaagcntctcagttcctcctctcacaaatgaattagccctattcacatggctctcgatatcatccaattgctctccttgagcctgaaccagcaccgncatgtcaagaaacttgatgcatttcctgagattcttctccataacctagcagcatcatgcctttc

SEQ ID NO: 1254 - DNA, 508 bp, Gossypium hirsutum
  Clone ID: uC-gsflnu33B084c03b1
ttcttgcgtacggtaaaaccatcaataatcaatagagtgcaagtgggaatgagcactatgagttcattgtagaatatgcatacactcaacacttgactgtcagaagattctgacgatgaaagggcccaagcccctgaactgattggctgtgctcaagaggcactgaaggacctggtgcctaggaaagtgaaggatatatggctgaaactggccaaggacttggttggccaaaaagatgccaaaaacaggggggaagtgcagctggcgctactttactggcctgttgatacagaacgatgaatcaagatcccatgtgaccttgtgcttttattaacatcattggagatggcccttaagactgcaactgctgcaaaggagggtgacagtatcattcatacaatgactacgaatagagagatattcaatgcattgtcgggatcaccggtgggcctgaaattccatttcatcctggaagagtggacaagcctcacccaccacctgagggtcg

SEQ ID NO: 1255 - DNA, 423 bp, Gossypium hirsutum
  unsure (1)..(423): unsure at all n locations
  Clone ID: LIB3493-001-P1-M1-D4
tggagttgntgcaaaaaaagaagccacgacttctctttattcctagaaattcctgggtgtaagacaggtaagcacacaaccgagaagccagtgttgaataagccagtagctactaagacgattccaacttctagtcctgctgttactctttccaccagtgcaacactcaaaagaatcctgccctaggtgcgttaaggggttctctcgctctgatcattgtncacaaggctatattgaccgcaccctacgcccagctgtactaggctattcataacgctgacattctatcagacttgctggtgttgttcgctgttgagatcaccggtgggcctgaagtnccattccatcctggaagagaggacaagcctcacccaccacctgagggtcgtcttnccaatgctactgagggagctgatcacttgt

SEQ ID NO: 1256 - DNA, 419 bp, Gossypium hirsutum
  Clone ID: uC-gsronu33B031e03b1
ctggttcttctgagtcatctctgagtgaatacacaaatgtcgattctattgaagaacgtgaccgatggatacagtaatgccaatagcttggccgatgctgagactaccaaggttactgctgaagcgagctgtgctccactgagaggaagcctatcgatgaggtgagatgggacttttgatgttaagaccaagacaggaggtccattcggaaccatgaagcatcctgctgagctcgcacatgctgctaacaacggccttgatatcgccgtcagacttctcgagccgatcaaggagcagttccctaacctcacctacgctgacttctatcagcttgcttgtgtcgtccccgttgagattactggtggacctgaaattcccttccatcccggagagaggacaagccttacccaccacctgag

SEQ ID NO: 1257 - DNA, 450 bp, Gossypium hirsutum
  Clone ID: uC-gsronu33B018f12b1
tttttgtacatcgcgtggctttcctatcttcatttcatggtactctacgacgaaaggctcgtttttgatctgagtttggaacctgatatggagattgaagatatgatttgaatgttttttttgtcaaaaccagaaaaaaatgaccaattgttacccaaccgttagtgaggagtaccaaaacgccgttcaaaaggctaagaggaagctaaaaggtctcatcgctgagaagaactgtgctccactcatgctccgtctagcgtggcactcagctggatctattgatgtcaagaccaagaccggaggtccattcacaaccatgaagcaacctgctgagctcgctcatgctgctaacaacggtctcgatattgtagttaggtttctcgagccgatcaaggagcagctccctatacttttatacgctgacttctatcagcttgctggtgttgttgc

SEQ ID NO: 1258 - DNA, 407 bp, Gossypium hirsutum
  Clone ID: uC-gsronu33B018c01b1
cggtcgcgtgggcggacgcgtgggcggacgcgtggggttttggaaattgttgatatgatttgaaattttattgtttatttgaaatttttttttgatgctgtagaaaccagagaaaaatgaccaagtgttacccaaccgttagcgaggagtaccaaaacgccgttcaaaaggctaagaggaagctaagaggtctcatcgctgagaagaactgtgctccactcatgctccgtctagcgtggcactcagctggaacttttgatgtcaagaccaagaccggaggtccattcggaaccatgaagcaacctgctgagctcgctcatgctgctaacaacggtctcgatattgcagtcaggcttctcgagccgatcaagcagcagttccctatcctttcatacgctgacttctat

SEQ ID NO: 1259 - DNA, 383 bp, Gossypium hirsutum
  Clone ID: LIB3165-008-P1-K1-B2
ggagtaccaaaccgccgttcaaatggctattaggaagctaagaggtctcatcggtgagaagaactgtgctccactcatgctccgtctagcgtaagcttctcttttttctatcgtctgatttgaaatttggtattgagatccgtgaagctgataggccttacggtgatgggtggggacaggtggcactcagctggaacttttgatgtcaagaccaagaccggaggtccattcggaaccatgaagcaacctgctgagctcgctcatgctgctaacaacggtctcgatattgcagtcaggcttctcgagccgatcaaggagcagttccctatcctttcatacgctgacttctatcagcttgctggtgttgttgtgttgagatcacc

SEQ ID NO: 1260 - DNA, 362 bp, Gossypium hirsutum
  Clone ID: LIB3272-059-P1-N1-B1
aaatgatgaagagctaatatgaaatttaattaatgtccacaatggggaagaaagcaaatgcaagagctacaaacgacgattaatgacacaagatggggaatgtgacttcagaagaaattgtcgagaataacttgtctccggaatctccccaaataaaaccacccaaattcattccttaagccaactttagagagaaaacaaaacctaaaacgtctttgtaggattgtgttgttggcttcttcttcttatgcaatcatcagcttatgcatcagcaaatcctagctccgagagcttcaggtgagcttcagtgtaatcagcaaagaaagcatcctcatcagccgcatatttgtcgaccaatggac

SEQ ID NO: 1261 - DNA, 304 bp, Gossypium hirsutum
  Clone ID: LIB3166-016-P1-K1-A10
accacgcgttcgaatttactttcatttaaaaataacccacagaaaatgaccaagtgttgcggcaactgtgagcgaggaataccagaagtcagttgaaaaggctaagaggaagctcagaggtctcatcgctgagaagaactgtgctccactcatgctccgtgtagcgtggcactcagctggaacttttgatgttaagaccaagacaggaggtccattctgtaccatgaagcatcctgctgagctcgcacatgctgataacaacggccttgatatcgccgtcagacttatctagcccatcaaggag

SEQ ID NO: 1262 - DNA, 282 bp, Gossypium hirsutum
  Clone ID: LIB3149-050-Q1-K1-G11
gttgcggaatataatgaagccaacaacatttgcctcggcggaatgaatggggtggggtgtgtcatctctcagtagtttatgggcagttgttgcttgatgaatatgggtatttgcagttttattttgttgaacatgttaggtatgcagtattgttcattgagatttcgagattttgcatcttattatttctttggataggtttatagattcttccctgtaactagttttttttggttgaattctcttctgttttcattgatactattacatatattttactgt

SEQ ID NO: 1263 - DNA, 357 bp, Gossypium hirsutum
  Clone ID: GOSHI-09MAY01-C1920_22
cccacgcgtccgtgttcacaagctcatgcacctagaggaactgattgatattttccttgcacacgattggccgctcggcatcactgattatgggaactggcaacgtcttgtttgctgcagaaaaacagattcaaaggtgagatccagcaaggaactcttggaagcaaacctgctgctcagctgctcgaaaaaactcagaccatcgtattggttttcagctcacttgcactgcaaattcaccgctcttggtgaacatgaagagggtggtcgagtgacaaatttcttgcactcgataaatgccttccagggcgcaagttcttgcaagttgttgatattgatctgatctaagaccttatg

SEQ ID NO: 1264 - DNA, 748 bp, Gossypium hirsutum
  Clone ID: GOSHI-09MAY01-C1920_16
catcagtcttttcaaatccccttcctttcccatagttggaaatttaaatcctctctccttcactttcccaattcttcaccatctctttctcttcaaatttttcctctctcatccgttttcttctcttccttctcaatcgtttatgttttttttatatggaaatcacttgcttcatccatagattttgggttttcagccctaggaaatattgtttcggttcgtcttttcaaatctatggatgtctttgtggttgttcttgttgcatgctttgggaatgaaagaaactctggctctgcaagatttcaacagcaatggcctctcttttgcagtcaatctctattacattgattcttatcccaaaaagacacgctattcccttcatcgtattgcacgggtttcctcttttcccattctctgtgcctttcaattttaatgttcatatgcactcttccatggcttaaattcgttatttattgccctaaaacttgagataaatggggattagatgccagtttaacctgatacacatatttcttttatggacataatgcttaaggttcaactaagacgacataacttcatttctagtgaaattgtttaagcaattgtgcctttgtataaattgttaaaattctgttaaatgtacgggttaaacatggttcttcttatcagggaatttgtttgacatagggttatgctgataacgcttctgcataatatggtgactagtctagcagtctgtggaatc

SEQ ID NO: 1265 - DNA, 743 bp, Gossypium hirsutum
  Clone ID: GOSHI-09MAY01-C1920_15
cccaaggtgtcctgaagcctggtgctcatgctgctgatggatgggttactgaatgcagccaaaataaaccacacaatggtgatctggaacttgggctcatcattttaaacaaaaccttgggcttgtgggtgggccctttaatttgaacaagaacaagctcaattaacatctgtagatcaaatgagagggggaaatatagaaagtttggctgcaattcagcagactaagatgcttgcacatacactctctcaaaacagtgatcctaaatttcagcatcaacaattcacaattttcttcaatttgtatcccagatgagctcgtggtgcacttatcattgacgataaccaggtcaaaccagcatcagagaactgggcaacagaatatcagcaacagtacaatggaggtgcttcttgggctgatgaatttgctcatgatgaggcaagtagagatcttgtggaagctaaagaagctcatagattaatatgtcctgataatcagtcataaattccttttagcagttagacagtttcctcctttttttcttctgccttgcctacgtagactaaaatggaactaacatcactgaccttaagtagtaatctcattcaccaacctaggtggttgaaactagttttgatgatttgagaatgtcccagatgataatgatggtttggttagtgctattatctatatatctactataatttagcaaataaagtgtgaatgactaatgattctgtatt

SEQ ID NO: 1266 - DNA, 716 bp, Gossypium hirsutum
  Clone ID: GOSHI-09MAY01-C1920_14
attgtgatattggaatcacttgcttcatccatagattttgggttttcagccctaggaaatattgtttcggttcgtcttttcaaatctatggatgtcggtgtggttgttcttgttggatgctttgggaaagaaagaaattctggttctgcaagatttcaccagccatggcgtctcttttacagtcaactactttattattcatattctctattacattgattcttatcccaaatagacacgctattcccttcatcgtattgcatggctattgcagcaatgatgcgtgctcaggaagccaatcctaccaatctggaagtacttcttgctcttggtgtgagtcatacaaatgttttgcccagcgtgctcggaaatcgggaacggtcggaggcccgctcacactatccgtataccatcttggcataatggcttgcatattttgagtatggcatgtatagcattataatcattttgtatatatggtcttatgatatggctatggagtggtatggaaatgcttggtaatgattagccattggaatggctaatcatgatcatatttggtgttatgtatgctaaattgctagctaattcatggaaaccatgaaataggtaaaatttaccataaaatagattcagacagcagcagtgatgtgagtttgaaaaatcattaaaaatagtagagatacaattaaatgatgaataaatatggaattgag

SEQ ID NO: 1267 - DNA, 613 bp, Gossypium hirsutum
  Clone ID: GOSHI-09MAY01-C1920_13
cagatttttattttacttatttgatctgtaaaatatatgaaatccttttcttcatcgtagagtcatttcagttatgaatctttagttcacctttgtctttagggttttagggtttattggtttgagtgtaagccgcttcctctaatgttactgtgggatagtttgcttatgttgtgaatgctgtgattacaagagtgtctttttgcatatgatttccatgactgcagtgattatattttggacttagagtgttacatacggtgaattactagatgcttatctctaacattacatttgtaaatgttattgttatattctggtgttaatcgaagtgttttctgccatacaggttgctagattattcaatgaagctgctcagatgtctcctgaggatgttgatgtacacattgtccttggtgttctgtataatttgtcgagtgaaaatgataaggccattgcatctttcaaaactgctttgaaacttaaacctaatgattattctctttggaacaagcttggtgtaacacaagccaacagtgtgcagagtgctgatgcaatattagcttatcaacaggcactagatttgaagccaaaccatgtgcgtgcttgggca

SEQ ID NO: 1268 - DNA, 685 bp, Gossypium hirsutum
  Clone ID: GOSHI-09MAY01-C1920_12
aattccttctcttctcctttaatccctaaatttttatccccaagttcccaacccatttgccaccgaagacaccgaccggaccacctggtgcatcgccctcgactaacccctctgttgcgtcgccgtcgtcgtcggtctctactgccacagccaatcgcaatgatgcgtgctcaagaggccgatcctatcaatctggaagtacttcttgctcttggtgtgagtcatacaaatgaattggaacagactgctgctttaaagtatctgtatggatggttacgtcatcacccaaagtatggtactcttgcgccacgaaagctgctggtttttcatactttgacatatgcactagatttgaagccaaactatgtgcgtgcttgggcaaacatgggtatcagttacgccaaccaggtttgagtttttgttggatgcatggtccaggattagctgaattcatgcatagtgacgacttgtttgagctaattgctgatcttaaagtgtacattctatcattattttgttctatttgtattttgttagatttctggtgtagtatgataagtccggtattttgtttgattgttattgataaactttttatttggtgggatatatatttatatcatagatgttattcttcttttcaatattttgataatgaattttaattttttttattaaacaaaaa

SEQ ID NO: 1269 - DNA, 561 bp, Gossypium hirsutum
  Clone ID: GOSHI-09MAY01-C1920_11
ttgtagaaaaaatgtaattcactgattagatatctctgtactggctattgcagcaatgatgcatgctcaggaggccgatcctgccaatctggaagtacttcttgctcttggtgtgaatcatacaaatggcactagctttgaagccaaactatgtgcgtgcttgggcaaacatgggtatcagttacgccaaccaggtttgttatatccttcattgtcttgacattcatgaaaagggaactgcatttctttctttatgtcttcatttccttttgcatatttctgagatggtcaatccttctaaatcaaaatttatgggtatgtgatcagaaattaaatcaccttgttttcaatatataggtctcaacatattttggaaaaataattcgttcgaaataacactaatctcgatggaaagatgaaagcttatttgattggtcagtaatagatttttatggtctaaaatgaaacccataccggcctgggtatatcccattctcggaatatcccgattccccacttttttttcctaagtctctttaccttctttgtctttaattcctc

SEQ ID NO: 1270 - DNA, 1225 bp, Gossypium hirsutum
  Clone ID: GOSHI-09MAY01-C1920_7
gcgttcggggtcaatgaattctcaagttgcaggggggggggggggcagaagatttggtcgtcaagttggtggggggctttgggataagcttgtctgataactgggcaaattcatatgatgagttcctcagcggtcggacgcttcatggggtgtctatgtattttctgatatgaatccatatgttggggatgagaatcctttaaaagaatgtcaagagctattcaggaaaggacttttgagtgaagcagtgcttgccctagaggctgaagttatgaaaaatcctgagaatgctgaagattggagattgctaggaataacccatgctgaaaatgatgatgaccagcaggctattgcagcaatgatgcatgctcaggaggccgatcctaccaatctggaagtacttcttgctcttggtgtgagtcatacaaatgaattggaacagactactgctttaaagtatctgtatggatggttacgtcatcacccaaagtatggtactcttgcgccgctggagcttgctaattctttgtattatgctgatggtgctgcaactacctgaagcattttaggtgcaagatgtaaaaaagcactttcttgagtaaattaagcactagatttgaagccaaactatgtgcgtgcctgggcaaacatgggtatcagttacgccaaccatgtttgttaaatcctgcaatgttctctcattgtcttggtattcatgaaaagggaactgcatttcttagtttattatcttcatttccttttgcatatttctgagatgctcaatccttctaaatgaaaatttactagcatactcagggtccacaaatttactatgtcacactaaaaggggaaaaataaatcttcagtaattagttctttggaaaatatgctctgcaagaaatatttgttctgtatgaaccatggttcttggattgagttttgaagtgctgcatgttgaatgggttcaggaaatctataaatgttttgtatattttatttatgtctcaacaacatgaagtatgtaattttgttaaacggggtatgggatggttgatagcgaaggataatgtttgttaggtgaggaaaacaagaaaagttaaccgagattagtgtttttgaagacaaggtggtataattactgaacacattagcaaaaagaattcgttcaaaataacactaatctcgatggagagataaaagcttatttgattggttagtaataaat

SEQ ID NO: 1271 - DNA, 908 bp, Gossypium hirsutum
  Clone ID: GOSHI-09MAY01-C1920_6
cgataaaattggaacgatacagagaagattagcatggcccctgcgcaaggatgacacgcacaaatcgagaaatggtccaaatttttatgtctcctgaggatgctgatgtacacattgtcctcggtgttctgtataatttgtcgagagaatatgataaggccattgcatctttcaaaactgctttgaaacttaaacctaatgattattctctttggaacaagcttggtgcaacacaagccaacagtgtgcagagtgctgatgcaatattagcttatcaacaggcactagatttgaagccaaactacggtcgcgcgggggcaaacatgggtatcagttacgccaaccagggtatgtatgaggagtcgatccgatattatgttcgagcactggcaatgaatcccaaggctgataatgcatggcaatatctaagaatatctttaagctgtgtctcgcggaatgatatggtggaagcttgtgattccaggaatcttgagcttttacagaaggagtttcctctatgaatagaatatgatttcgaatttttaagtaggatgggtatcatgactaactgaaacaggggcaaaatgttactgtcaaaaatcaattcaaaaagctgtagatgctgatgtacccctgacagtttgcagctagggccatgctggtagatggtatctggggggaacgaataatgttttgtatattttatttatgtctcaacgccatgaagcatgtaattttgttaaacggggtatgggatggttgatagcgaaagataatgtttgttaggtgagaggaaagcagaaaaagaaattatggactagtgattagctgcaataagctactttttctctcacttaaatgtaattgctgattgttgaaaatggtacggaatgacgaacaactggtct

SEQ ID NO: 1272 - DNA, 1105 bp, Gossypium hirsutum
  Clone ID: GOSHI-09MAY01-C1920_5
gaagtaaaatcccatcattgaccttcgagtgatccattttccattcacggatttcatacatgcggagcagtatttgaaagctccatatatctgcgcatattacaagcaaagctcatgatgctttaaaagaaaaactgcttgaacaagataggataacttgtttctaagataggataacttgtttctaatattctaattttcttcatttcattaaacgttcttgacttgatggttaataggttttccgtggacctgacgattgggccaatgaatttggtgctgaaagattgcaaaaagagtctgtcgatgatcaatgggtcaatgaatgctcaaagttgcatcttgatgactgggcagaagaatttggtcgtcaagttggtgggggggctttgggagatagttcgtctgataactgggcaaattcatatgatgactaagactggtagccttgaagaagttcactttataacctctcttaattctacatgaatgttttggatgtgaaaacttgtaggttcctcagcggtcggacgcttcaagggggggtctttggtattttctgatatgaatccatatgttggtcatcaaaatcctttaaaagaaggtcgcgagctagtgcgggaaggacttttgagtgaagcagcgcttgccctagaggctgaagttatgaaaaatcctgagaatgctgaaggttggagattgctaggaataacccatgctgaaaatgatgatgaccggctggtaatccactttgctctagtttgtcagagttggatagttcgtgtgtattcttacaccaaaagacattgtttttgtgtctccttaatactacaagaatttctattaagagatgtgactgcttgtctagctcagccatctgttcagcatctttggttatgattctttgcctggcaaggttgaccatttacctttctattccacctaaatctaaatcatttttaatcttgtctaatgccctgtgaataccatcatattttaggatctattttcttgtaccgctatattttgttttttttttggcttgatatagccatgttggtgtattttgcaaggttcatttcttatatatgaaaacttctactgg

SEQ ID NO: 1273 - DNA, 1346 bp, Gossypium hirsutum
  Clone ID: GOSHI-09MAY01-C1920_4
ttcctttatttatttccccttttattctctctgttgtttttccattctttgatctctgttaatcctctctttcgttttctttattctccttccctttcttgtcctttcgtaacaaaccctagacacttccgcgccatcaacaccttcgggcatcttaactccgatcaaagttttgggtcaccgaatgccaaaaaaaaaaaaaacacagaaagacgctacactaggttttctctgccttttctggtttttgtgattttttgaaattctctgcttcatcggagctgctttgagaattcaaaatttcttcaatttgtatccaagatgagtagtggcgaacttatcattgatgataatcaggtcaaaccagcatcagagaaccgggcaacagtatatcagcaacagtacaatggaggtgcttcgggctgatgaatttgctcatgatgaggcaagtagagatcttgtggaaggttttccgtggacctgaccattgggccaatgaatttggtgctgaaagattgcaacaagagtctgtcgatgatcaatgggtcaatgaattctcaaagttgcatgttgatgactgggcagaagaatttgatagtcaagttggtgagggggctttgggagatagttcatctgataactgggaaaattcatacgatgagtaagtgtggtagccttgaagaagttcactttgtaacctctcttaattctacatgattgttttggttgtgagaacttgtaggttcctcagcgattggacgcttcaagggttttctatgtattttctgatatgaatccatatgttggtcatcaaaatcctttaaaagaaggtcaagagctattgagcaaaggacttttgagtgaagcagtgcttgccctagaggctgaaattatgaaaaatcctgagaatgctgaaggttggagattgctaggaataacccatgctgaaaatgatgatgaccagcaggtaatccactttgcatgctagtctgagcaggccgatcctgccaatctggaagtacttcttgctcttggtgtgaatcatacaaatggcactagctttgaagccaaactatgtgcgtgcttgggcaaacatgggtatcagttacgccaaccagtccagaacaaagctcgacatgcaagattgtcgtcaatgggttaagagcaggatggaagacagaggagccaaaccttgtgaattttctcaaacagctccacctcacaaaccctttgattcttactttttctggttctcctcgaaccctcagattgtatcttttttggaattactagatcttccttatgttcttgataatgcatcggactccagggatactccttcgtca

SEQ ID NO: 1274 - DNA, 725 bp, Gossypium hirsutum
  Clone ID: GOSHI-09MAY01-C1920_1
gttggttgacacatatttcctagatccagcaaggaactcttggaagcaaacctgctgctcacccgccacgaaaactcagaccatcgtattggttttcagctcacttgcactgcaaattcaccgctcttgttgaacatgaagagggtggtcgagtgacaaaatttcttgcactcgataaatgccttccagggcgcaagttcttgcaggttgttgatattgatctgatctaggaccttatgaggttcagtacgatgaagaatggctggcaataacacggaaattgaactgtctttcctttgaccttccgacgtggagacgttgggtaggagaacaaagctcgacatgcaagattgtcgtcaatgggttaagagcaggatggaagacagaggagccaaaccttgtgaattttctcaaacagctccacctcacaaaccctttgattcttactttttctgggtctccccgtaatcctcagattgtatcttttttggaattactagatcttcttatgttcttgataatgcatcgactccaggatactcctccttattgcctcaaaggatgattcagcgaagaattcccatgaagatgagatgatctagaagatgatgcagaacgatatgaaaatcgtcctcatgatgtgaatatatttctatcacaaaaggttattatgcaaaagattgtggcatatcttgcttacttgagcttactgttgtaagtgcaac

SEQ ID NO: 1275 - DNA, 616 bp, Gossypium hirsutum
  unsure (1)..(616): unsure at all n locations
  Clone ID: LIB3829-019-Q6-K6-B12
aaaacactggcctngacaagctttcatgatgacattcaatcattccggccatccctgttttctgatccaagtcattccacaagttcacaatgttccatggcaaagtattatgggggatgggcaacacctagtatatacttcttggagtttgctggggttgtgaagtttggcaatatcggtatcgttggactttccggaatttacaatattgttgatatttaatctgatccgggaccttatgaggttcaatactatgaagattggctggcaataacacggaaattgaactgtctttcctttgaccttccgacgtggaaactttgggagaacatagcttgacatgcaaggttgtcgtcagtgggttaagaacaggatggaagacagaggagccaaaccttgtgaattttttcaaacagctccacctcacaaaccctctgattcagtttcaaacgctactttttctggttctctccgtaatcctcagactctatctttcttgaaattgctagatcttccttatgttcttgataatgcatcggactccagggatactcctgcttcattgcctcagaagggtcttgaaggaggcctctaggctttatgctgcaagttgggc

SEQ ID NO: 1276 - DNA, 659 bp, Gossypium hirsutum
  unsure (1)..(659): unsure at all n locations
  Clone ID: LIB3543-051-Q6-K6-A7
ggnaactgattgatattttcctttcacacgatgggccgttcggcattgctgattatgcgaactgcaacaacttgttcgctacaaaaaaacctttcaaagatgagatccagcaaggaactcttggatgcaagccagctgctcagctgctcgaaaaactcaaaccatcctactgtttttcagctcagttgcactgcaaattcaccgctgttgttgaacatgaagagggtggtcgagtgacaaaatttcttacactcgataattgccttccagggcacaagttcttgcaggaccttatgaggttcaatacaatgaagattggctggcaataacacagaaattgaaccgttgttcctttgaccttccgacgtggagactttgggtgagaacacagcttgacatggaagattgtcgtcaatgggttaagagcaggatggaagacagaggagccaaaccttgtgaattttctcaaacagctccacctcacaaaccctctgattcagtttcaaacgctactttttctggcaattggtctggaagtgcagaatggatatggtttaacagaaacaacaccttgcattgctggtcgacaacctcattataattgnttgacatgagaaaatatgaaaacttgatgaacacttccattcagccagcacaaa

SEQ ID NO: 1277 - DNA, 575 bp, Gossypium hirsutum
  unsure (1)..(575): unsure at all n locations
  Clone ID: LIB3543-050-Q6-K6-E7
cggacgcgtgggttcttggggtatgctgtggttgtgaagtttggcaatatccgtatcggtggactttctggaatttacaatgcgcgtaattattgtttaggacaccatgaaaggccaccttataatgacaatactatcaggtctgtgtatcatgtttgggagtacgatgttcacaagctcatgctcctagaggaactgattgatattttcctttcacacgattggccgctcagcatcactgattatgggaactggcaacaacttgtttgctgcaaaaaaaacatttcaaagctcacttgcactgcaagttcaccgctcttgttgaacatgaagatggtggtcgagtgacaaaatttcttgcactcgataaatgccttccagggcgcaagttcttgcagatatttgatattgatctgatctaggaccttatgaggttcagcacgatgaagaatggctggcaataacacggaaattgaactgtgtctttcctttgaccttccgacgtgnagacgttgggagaacaaagctcgacatgcaagattttcgtcaatgggttaaagaacaggatgggagac

SEQ ID NO: 1278 - DNA, 576 bp, Gossypium hirsutum
  unsure (1)..(576): unsure at all n locations
  Clone ID: LIB3584-034-P1-K1-H10
cccacgcgtccgcccacgcgtccgcccacgcgtccgctgtttgaaaagttcagaattggaacagactggtgctttaaagtatctgtatggatggttacgtcatcacccaaagtgttacatgctccatctttgtaaccttaggctgctaaaaagattctccaaataacatgttgcacctagttggaccttagaagacaaactagctcttctattaagctccatgtaattagttatttgatttgttgaagctatttgttaatttacatatacccttgatcatctctttcaaaatgccttttttaatgcattcagatcttgcatatgcagtttgatttgtttagcctctgttactgagattgtccatttaaaattatttgatgataaacttacctttgcctgtggtggccatattttcagcactattgaatntagtcatttggtctatgtctggatctttaggcactagctttgcctgtggtggccatattttcagcactattgaatntagtcatttggtctatgtctggatctttaagcactaacttttgagccaaactatgtgcgtgcttgggcaaa

SEQ ID NO: 1279 - DNA, 420 bp, Gossypium hirsutum
  Clone ID: LIB3197-056-Q1-M1-D9
attttctgatatgaatccatatgttggtcatcaaaatcctttaaaagaaggtcaagagctattcaggaaaggacttttgagtgaagcagtgcttgccctagaggctgaaattatgaaaaatcctgagaatgctgaaggttggagattgctaggaataacccatgctgaaaatgatgatgaccagcaggtaggagaacaaagctcgacatgcaagattgtcgtcaatgggttaagagaaggatggaagacagaggagccaaaccttgtgggttttctcaaacagctccacctcacaaaccctttgattcttactttttctggtaaataataggttctccccgtaaccctcagattgtatcttttttggaattactagatcttccttatgtttttgataatgcatcggactcaagggatagt

SEQ ID NO: 1280 - DNA, 723 bp, Gossypium hirsutum
  unsure (1)..(723): unsure at all n locations
  Clone ID: LIB3828-003-Q1-K6-F12
gctaaattaaccattagtgagcttaaaatgatctatcaaagtgttaaattcattgttcaatgtgatgttatttnnnnnnnnnnnnnnnnnnnnnnnnnnnnnnnnnnnnnnnnnnnnnnnnnnnnnnnnnnnnnnnnnnnnnnnnnnnnnnnnnnnnnnnnnnnnnnnnnnnnnnnnnnnnnnnnnnnnnnnnnnnnnnnnnnnnnnnnnnnnnnnnnnnnnnnnnnnnnnnnnnnnnnnnnnnnnnnnnnnnnngnnnnnnnnngngnnnnnnnnnnnnnnnnnnnnntatgctaatgtattgagtatattaagttgtgcaatttgatgttatatgtggcgttaatgttgacttgttattgcatattttattattaatttgacgttatatgtgtcattcattaacttttgtttcttttttctcaggtttgagtttttgttggatgcatggtccaggattagctgaattcatgcatagtgacgacttgtttgagctaattgctgatcttaaagtgtgcattctatcattattttgttctatttgtattttgttagatttctagtgtagtatgataagtgtggtattttgtttgattgttattgataaactttctatttggtgggatatatatttatatcatagatataaaaaaaaaaaaaaaaaaaaaaaaaaaaaaaaaaaaaaaaaaaaaaaaaagggccggcccccctaaaagaaaccaa

SEQ ID NO: 1281 - DNA, 623 bp, Gossypium hirsutum
  Clone ID: LIB3825-008-Q1-K6-H3
gatcatgggtcaatgaattctcaagttgcatgttgatgactgggcagaagatttggtcgtcaagttggtgagggggctttgggataagcatgtctgataactgggcaaattcatatgatgagttcctcagcggtcggacgcttcaaggggtgtctatgtattttctgatatgaatccatatgttggtcatcaaaatcctttaaaagaaggtcaagagctattcaggaaaggacttttgagtgaagtagtgcttgccctagaggctgaagttatgaaaaatcctgagaatgctgaaggttggagattgctaggaataacccatgctgaaaatgatgatgaccagcaggctatggcagcaatgatgcgtgctcaggaggccgatcctaccaatctggaagtacttcttgctcttggtgtgagtcatacaaatgaattggaacatactgctgctttaaagtatctgtatggatggttacgtcatcacccgaagtatggtactcttgcgctgccggagcttgctaattctttgtattatgctgatgaggcacgtttgggctaatttctgcctagcacaccacaatgagaagctccttgatgatgacgctgcacttcacgattttggt

SEQ ID NO: 1282 - DNA, 556 bp, Gossypium hirsutum
  Clone ID: LIB3582-019-P1-K1-A5
ctcatatgggttgtatcatcttttcctctatttatcttctttcttatctttcaatggtaaagtgatgcattggtgtgttatacagctctcttatagggttgaattatttacttgctccatctttgtaaccttaggttgctaaaaagatgcttcaaataacatgttgcacctagttggaccttagaagacaaactagctcttctattcagctccatgtaattagttatttacttcagtaagatttattgtttaatgcatcaaacatagtaagcttcattaagcttacttgtattgtttaatgtcattgtagatactcagaaggttagacgattggctcgacactctaatcatactatctggctcaatttggtaatttttggagcgtttatttcagattataaggcatgtatatcattaatgttttagtttatgtaaatattatggatgatcttttgtgtaaatggtcaacttatataatacatgagaatgaagtatagttactatgctaatatgaatgatatgtattaaggaaatgttgtgattgaggtacctttga

SEQ ID NO: 1283 - DNA, 545 bp, Gossypium hirsutum
  Clone ID: uC-gsronu33B076g03b1
cccacgtttccgttcacgcgtccgcccacgcgtccggctttgataaaggttcagattattgctcgggacaaaataccgcagacttccgaaaatatatgttatttatgcaaacatttcttagtaagatgagattaaaattttggagtgtcaaacaaataatactgtttgaaaagttcagaattggaatagactgctgctttaaagtatctgtatggatggttacgtcatcacacaaagtatggtactctttcgccacccgagcttgctaattctttgtattatgcatatgtaagtacactagggtataattctttgtttttttggttagtttttttcttttggaacaatgccttgatattgcaatcttggtttgagtgtaagtcgcttcctctaatgttactgtgggatagtttgcttatgttgtgaatgttgtgattacaagagtgtccttttgcatatgatttccatgactgcagtgattatattttggacttagaagtttacatatggtgacaggatataattttccttaagattactagaag

SEQ ID NO: 1284 - DNA, 529 bp, Gossypium hirsutum
  Clone ID: LIB3825-010-Q1-K6-D10
actatctcgtgctttgagtagtctttacatgcatgtcaccttttagcctgcttttcttgcataacacaattaatgagctaaacatacaggaacaagctcaggtaacgtctgtagatcaaatgagagggggaaatatagaaagtttatctttacatgcatgtcaccttttagcctgcttttcttgcataacacaattaatgagctaaacatacaggaacaagctcaggtaacgtctgtagatcaaatgagagggggaaatatagaaagtttggctgcaattcagtggactaggatgcttgcacatacactctctcaaaacagtgatcctaagtttcgggttatttaaaactgtttggataaatacttgcaatgtgtcaagatagctcttaatgatatcatcgttactatgcatgagttaatatatgcacttatgtactgtatgttttggggcatgcagaattcaaaatttcttcaatttgtatccaagatgagtcgtggtgaacttatcattgatgataatcaggtcaaa

SEQ ID NO: 1285 - DNA, 738 bp, Gossypium hirsutum
  Clone ID: GOSHI-09MAY01-C1850_2
aattcatcataacgtaaaagggtttttcgattcacaatgggagaggtcagttaaccaccaatttattctcatttcccccatctcttttaatctcgttttattttttttttgccgttccatttccttctatttctagttcatgacttacaccagggatttaaattgcggtcgcggtcgcgttttcggtcgcgtcgcgtttgtcgcggtcgcggacataacggactcctattgcggtcactgcggtatcgcggtcgtgaattttacattacttattgtgtattgcgggtatagcgggtttcggcagtaacggtttcggacggtgccgttaccgctatataacggccgctatttcggtaacggaccgctatttaaatccctgacttacacaccatctctttatctgggatctttattgcactttgggatatttcagaacatgcaaggggatggaaacttaaggtttgatggttaaagtttatatattatggaattctttggtacatatggccaaattgaataagggattaggtcaattgattgacatcagagcttggtaaagtttctacttgaaataggtaggtatgtgcctctcaacctatttgtcagttgcagtatatctgaatttgacatgaatttgcagctggaaacactccttgtttgctgtatgtagagtgtttgtaaggaaacaaatgaacaatgagctgaggcaaactctcttttcttactatggaattcttc

SEQ ID NO: 1286 - DNA, 562 bp, Gossypium hirsutum
  Clone ID: GOSHI-09MAY01-C1850_1
cccacgcgtccgcccacgcgtccgcagcactctatccacggaatacccattcagcgtgtgtgagtttcaactttacccttctccctctttttcgttctcacgtctgaagcaacttctttttttcattcttcccatttccttcgaaacttctcctctttttcattgtcacgtctgaatcatcttctttttttcattcttcttcctatttccttccaaccatctctctctttttcatgcttctatccagtgatttaaattgcggtcgcggtcgcgttttcagtcgcgtcgtgtttgtcgcggtcgcggacataacggacgctattgcagtcactgcgggtatcgcggtcgtgaattttacattacttattgtgtattgcggttatagcgggtttcggcagtaacggtttcggacggtgccgttaccgctatataacggccgctatttcggtaacggaccgctatttaaatccctacttctatccttaccaaccctttgacaaaccctattgtttagttttattttttccctttgctttcgtctagcttcctgtgaaggctaaag

SEQ ID NO: 1287 - DNA, 402 bp, Gossypium hirsutum
  Clone ID: GOSHI-09MAY01-C1840_12
cttcttcctttttttttttttttcatgcactccaggtgtttaggaaaagtccggtatggtttttggttctaagctgtggaggttgggtatttggttaaagtagttttgaaggggtttcgaattctgggtttaattcgtcttggtggggggtagtacccaggtttagacaaattgtggacatcacggctatacacggagtttctcgggatcttattcatgtccgtactgtacgacgtaagggttgtgtgaacgaaagcaacccttcgccgcacggtgggcgtggagctttgccttctgaaggtggtagtccttccgatctcctcttccttgctggtggtggtattgccttttagagtttcagctgtatatatatagatatcttttaatcctccatagatatat

SEQ ID NO: 1288 - DNA, 1066 bp, Gossypium hirsutum
  Clone ID: GOSHI-09MAY01-C1840_9
gtttctcattatagatatcatcccttcttccttcattttcatttcatcccataggaatattcttcttcctttttctacatatactctaggtgtttgataaaagtccgatactgtttttttttgaagcgtggaggttgggtatttggttaaggtagttttgaaggggtttcgaattctgggtttaattcgttttggtgggggtaatacccaggtttagacaaattgtgggcatcacggctatacacggagtttctcgggctcttattcatgtccgtactgtacgacgtaagggttgtgtgaacgagagcaacccttcgccgcacggtgggcgtggagctttgccttctgaaggtggtagtccttccgatctcctcttccttgctggtggtggtattgtcttttagagtttcagctgtatatatatagatatcttttaatcttccatagatatataaaaaaattccattggaggaagcttttttagatcgcttataagaagaaaagaaatagtagcaaagatgatgcttaggattaagagggttccgactgtcgtttctaattaccaaaaggatgaagcggacgatactgctcgtcgtagcgctggctgtgggaagaattgccttaaaagctgttgcataccaggagcaaagcttcctttatacgctttcaagaaggtgtgcatggagcgtgaagaagatgtgcgggggatggagaacacagagtctccagttgcatttcttgactcacttgttcttggagagtgggaggatcggatgcaaagagggctctttcgctatgatgtcactgcctgcgaaaccaaagtgattcctggtgaatatggctttattgcccagctaaacgagggtcgccaccttaagaagaggccaactgagttccgtgttgataaggtacttcagccctttgatgggaacaaattcaacttcaccaaagtcgggcaagaagaggtgctcttccagtttgaagcaagtgaagatggtgaagttcagttctatccaaccgctcccattgatgtcgaaaattcttctagcgtcgttgccattaacgt

SEQ ID NO: 1289 - DNA, 448 bp, Gossypium hirsutum
  Clone ID: GOSHI-09MAY01-C1840_8
gaccaacccttccccgcccgcccgcccgcgcgtccgattcacccaggtgtggtggccataaacgttagtcctatggaatacggacatgtgctgttgatccctcgaattcttgaatgcttgcctcagaggatcgaccgtgagagctttttgcttgcgctctatatggcagctgaagctgggaatccgtactttagattgggttacaacagcttgggtgcatttgctacaatcaatcacctgcacttccaggcttactacttggctgtggcctttcccattgagaaagctcctaccaagaagataacctctctgaatgatggagtcatcatctcagagcttttaaagtatccggtcagaggtgttgtctttgagggtggtaacactcttcaagacttgtctgacgcagtgtctgaggcgtgcatttgccttcaagataacaacatagcat

SEQ ID NO: 1290 - DNA, 841 bp, Gossypium hirsutum
  Clone ID: GOSHI-09MAY01-C1840_6
cccacgcgtccgctataaagaagaaacctttatttttccccaaataaatttggggggtttggaaaaatccattttacattaaacccttttttattttcaattcagtaaaagaaaacccaaattttgttgttagaatctacaccgtatatacatatcaaattgttgaacccattagatttttcatattttttatcaaagaaaaccgactcttgagcaattcaccatagccactagctttccccttaagtttctcattttctcacagctacagccacatcatctcatatctatatatatatatcatcccttcttcctcctttttcatttcatcccctaggaatattcttcttcctttttttttttttcatgcactccaggtgtttaataaaagtccgatattgtttttttttctaagctgtggaggttgggtatttggttaaggtagttttgaaggggtttcgaattctgggtttaattccgtttggtggcgggtagtacccgtgggggtgatacccaggtttatgcagatggaatccataacacctatacaactagtatctcgggctcttattgatgaccaaactgttcgctcaacacgattgtgaaaacgagatcaacacacaggtgttacaggaagaatagagcatgtgccgccgaatgtccatggactgtctatctgcgatatcatcctgtatataggccagatttccagaggcacaagtgaacacatatcgacacgtgcttatgctctctcgaaacatgctaacgttttgcataccaaggagctttgccacagatttaagcaggtgggtgccaacgtgactgttgactgtgttcattc

SEQ ID NO: 1291 - DNA, 968 bp, Gossypium hirsutum
  Clone ID: GOSHI-09MAY01-C1840_5
gcactcccttgctctcccccacatttcatttcatcttttttctcttatcttttaagcttaaatcttttgtgcagatttccttatctttagttcaactttgtcccttttatatcagtgtctacacatagaaatagatcatggcaaaagtagatgaaccacagccacatccaccaaaggagcagctgcccaacatttcttactgcattacaagtccacctccatggcccgaggccatccttcttggtttccaacattatcttgtgatgcttggaacgacagtgatcattccaacttcacttgttccccagatgggaggtggaaatgaggagaaagcaaaggttatccagactctactctttgttgctggtttgaacacattattgcagtcactggttgggtctagattgcctgctgtgatcggagggtcttatacctttgtcccaacaacaatctcaattattctggctggtcggttcagtgacagctcagatcctattgagagatttaaaaggataatgcgggcgactcaaggtgccctcattgtagcttccactcttcagattgaccttggcttcagtggcctttggcgtaatggtgcgaggtttttaagtccactttcagtcgttcctttggtatctctagctggttacgggctgtacgagtttgggtctcctggggttgccaaatgtgtggagattgggactcaaagagggctctttcgctatgatgttactgcctgtgaaaccaaggtgattcctggtgaatatggcttcttgcccagctgaatgagggtcgtcaccttaagaagaggccaactgagttccgtgttgataaggttcttcagcccttcgatgggaacaagttcaacttcaccaaggttgggcaagaagaggttctcttccagtttgaagcaagtgaagatggtgaagttcaattctaccctaagtgctccattgatgctgagaaat

SEQ ID NO: 1292 - DNA, 1473 bp, Gossypium hirsutum
  Clone ID: GOSHI-09MAY01-C1840_4
gtccttccgcgccccgtccgtacggcccgactggggttccaacctcggagctcaccatctccggcaacctcctctactcccccttttgaggctcgtatcgtacggatgaagtagaaaaaagaaattaagaaaaaaaaaacatcatcaacaaggagaagcatattcactctctttctctccctttcgttttcatagttctgtgtcaagtgcttgtctttgagccaaaaaaaaaaaaaagctaactcagaagaaggcacgagggccaccagctttctttacttaactactacctatttcttacaactgttgcctgcaatccttccaaaaacccaacttctccttcactcccctcttatctatatatctccttttcttcttcttcttcctctcctcaccaaggaaatcacaatttagcttctaactttgcctctttttttttcttttcatctgcaaatctggtcctttttttctgatgctggagagtttgggtattagatttaaattagtttgaagggctttcgagttctgggttttccattttggggtaacacccaggttagtcaaattgtggacatcacggctatacacagagtttaccggcctcttcttattcatgcccgatctgtacgacgtaagagttgtgtgatcgagaggaaccctgcgccgcacggcgggcgtggagctttgccttctgaaggcggtagtccttccgatctcctcttccttgctggcggcggtgttgtcttttagagtttcagtagttggtataggtagcttttagtataaaaaaaaagaaaaaaaaattactatcgaggaagcttatttagatcgctcgtaagaataatttggtggtggtggtggtgtttttcgtagtcgacgttgttgttctttgtgggttttcattttatttgaatttttattggacaaagaaagaagttgtagcaagatgatgctcaggattaagagggttccgactgttgtttcgaattaccagaaggatgagacggaagagactgctcgccgcagcagtgggtgtggaaagaattgccttagaagctgctgcatcccaggagcgaagcttcctttatatgctttcaggaaactgaacaatattgagagtgaaaaagttgtgcttggaattgagaacaaagaaccccctgttgcttttcttgactcgctcattcttggggagtgggaagatcggatgcaaagagggctctttcgctatgatgttactgcctgtgaaaccaaggtgattcctggtgaatatggcttcattgcccagctgaatgagggtcgccaccttaagaagaggccaactgagttccgtgttgataaggttctccagcccttcgatgggaacaagttcaacttcaccaaggttgggcaagaggaggttctcttccagtttgaagcaagtgaagatggtgaagttcaggtctacccaagtgctcccattgatgctgagaattc

SEQ ID NO: 1293 - DNA, 2005 bp, Gossypium hirsutum
  Clone ID: GOSHI-09MAY01-C1840_3
gcgacgccccacgcctacggttgaatctttgggtggccactaggtgtttggtaatagaactcagagagtttggatatttggtcaaggtagtttgaaggttggttatttgaatttcgggggtaacacccaaggttacacattgtggacatcacggctatatacaaagtttctcggtctctttttcatgtccgagctggacgacgtaagggttgtgtgatcgagagcaacccttcgccgcacggcgggcgtggagctttgccttccgaaggcggcaatccttccgatctcctcttccttgctggtggtgggattgtcttttagagtttgggtaccctatttttagctagcttattagtctgtaaaatattactatcgaagaagcttgtttttcgttgtttttttggggttttctttatttgatctcttattggataaataaagaagagaagtagttgcaaagatgattcagctcagtattaagagggttcctactgttgtttcgaattatcaaaaggatgaggcggaagagactgctcgccggagcggtggatgtgggaagaattgccttagaaactgttgcattccaggagcaaagcttcctttatatgctttcaagaaggagagtgaaaaagatgcatttgaaagtgataacaaagagcctccggttgcttttcttgattctctcgttcttggggagtgggaggatcgcatgcaaagagggctctttcgatatgatgttactgcctgtgaaaccaaggtgattcctggtgaatatggctttattgcccagctgaacgagggccgccaccttaagaagaggccaactgagttccgtgtagataaggttctccagcccttcgatgggaacaaattcaacttcaccaaagtcggacaagaagaggtgctcttccagtttgaagcaagtgaagatggtgaagttcagttcttcccaaatgctcccattgatgttgagaatcacccaagtgttgttgccataaacgttagtcctattgaatacggacatgtgctgttgatccctcgaattcttgaatgcttgcctcagaggatcgaccgtgagagctttttgcttgcgctctatatggcagctgaagctgggaatccgtacttcagattgggttacaacagcttgggtgcatttgctacaatcaatcacctgcacttccaggcttactacttggctgtgccctttcccattgagaaagctcctaccaagaagataaccactttgaatgatggagtcatcatctcagagcttttaaactatcccgtcaggggtcttcccgttgtggccgctcgcgccctgcccgcccggccggacacagtgtctgaggcgtgcatttgccttcaagataacaacatagcgtacaatggcctcatctctgattgtggaaagcgcatcttcctcctccctcagtgttatgctgagaaacaagctcttggggaagtgagcgtagagcttttggacacccaagtgaacccggctgtgtgggaaattagtggtcatatggtgttgaagaggaggaaggactatgatgaggcgtccgacgaaaatgcttggaggctacttgcagaggtatctctctctgacgagaggtttgatgaagtgaatgcacttatctttgaagccattggcggtggcaaagatgcaattgaaaatgttgaggagcctgataccaaagctcaatctattgaaaaagagaatggcatcaccgaaacttcccaccatgctatggtggctgggacacaacaatgccttgttctgcagtagcatttcattaatagaaccctgtaccttgcaggtactgtttccacaatatcagtttagttggaatttctatggattatggctggcactggtagcctaaataagcaaactcagtttgcactgttgctatcgactttgttagaaactgctatatgcttattggcttcatgatgtactacttgtttggatcatgaaaaatacaatttaatgtttgctatt

SEQ ID NO: 1294 - DNA, 1134 bp, Gossypium hirsutum
  Clone ID: GOSHI-09MAY01-C1840_2
tctttcgcccacgcgtccgcccacgcgtggggggggggggggggcacccttccggtcagtcctattgaatatggacacgtgctgttgattcctcgaatccttgaatgcttgccccagaggatcgaccgtgagagcttcttgcttgcactttatatgacagctgaagctgggaatccatatttcagattgggttataacagcttgggtgcatttgctacaatcaaccaccttcacttccaggcttactacttggctgtgccctttcccatcgagaaagctccaacgaagaagataaccactttgaatgatgaagtgataatctcagagcttttaaactatccggtcaggggtcttgtctttgagggtggtaacactcttcaggccttgtctgacacagtctctgatgcctgcatttgccttcaagagaacaacataccatataatgtcctcatctccgattgtggaaagcggatctttctccttccacagtgttatgctgagaaacaagctctcggggaagtgagtccagagcttctggacacccaggtgaacccagctgtgtgggaaattagtgggcatatggtgttaaaaaggaggaaggactatgatgaggcgtctgatgaaaatgcttggaggctcctggctgaggtttctctctctgatgagaggttccgggaagtgaatgcactcatctttgaagtcattgccagtggcgaagatggcattgaacatgatgctaagagtctgcctaaggagcccgatcctaaagctgaatccactgaagaagaaagcaccatcaccaaaacctcccaccgcgctatggtgggtgggacacaagaatgcgttgttctgcagtaggaactggcattccacaaacagaaccatgtttcatccatgttatagtttctactaagcccgtttggcatgtatgattgtgtatggcagtggtagcctaaataaagcaaacatagtttgcggtggtgtaagtttatcattaaccttggacttgttgatttgatgatgtattatgattggatgatgtaaaataccaaataatgtttgtgtattttgagctgtcaagtatatttcttttaaaaaaaaaaaaaaaaaaaaaaaaaaaaaaaaaaagggcgg

SEQ ID NO: 1295 - DNA, 1935 bp, Gossypium hirsutum
  Clone ID: GOSHI-09MAY01-C1840_1
ccccgcgtccgcggccgcgtgggtttggggtcctttttcttattttcccgtactttctctagtgtttcattcttttaatgttttagttacctcctttaggatttgggatctgggtagttctcagctttagtagtttacatttgctgattctcagaagttgtgttttttttttggggggtatagagaaatagatcatggcaaaagtagatgaaccacagccacatccaccaaaggagcagctgcccaacatttcttactgcattacaagtccacctccatggcccgaggccatccttcttggtttccaacattatcttgtgatgcttggaacgacagtgatcattccaacttcacttgttccccagatgggaggtggaaatgaggagaaagcaaaggttatccagactctactctttgttgctggtttgaacacattattgcagtcactgtttgggtctagattgcctgctgtgatcggagggtcttatacctttgtcccaacaacaatctcaattattcttgctggtcggttcagtgacagttcagatcctattgagagatttaaaaggataatgcgggcaactcaaggtgccctcattgtagcttccactcttcagattgtccttggcttcagtggcctttggcgtaatgttgcgaggtttttaagtccactttcagtcgttcctttggtatctctagttggttttgggctttacgaatttggctttcctggggttgccaaatgtgtggagattggactgcctcagctaattcttatagtatttgtctcacagtacgtgcctcatgtgataaagtctggaagaaatgtctttgatcgatttgctgtcttgttttcagtggtgattgtttggatttatgctcatttactcactgtgggtggagcttataatggtacagcaccaaaaacacaaacaagctgtagaactgatcgttctggtctaatagatgctgctccatggataagagttccttatccctttcaatggggagcgccatcatttgatgctggtgaagcctttgctatgatgatggcttcttttgttgcccttgtagagtccactggggcttttatttctgtgtcaagatatgcaagtgcgactccaatgccaccatctattcttagccgtggtattggttggcagggagttgcaattttggtgtcgggattgtttggaactgccaatggttcctcagtttctgtagagaatgctggccttttagccttaacacgagttggcagccgaagggttgtccaaatctcagcagggtttatgattttcttctctattcttgggaaatttggagcagtctttgcttcaattccagcacctattattgctgcattgtactgcctattctttgcatatgttggtgctgggggtcttagttttcttcagttttgcaacctcaacagcttccgtacaaaatttatattaggcttctctgtttttatgggcttatctgtgccacagtacttcaatgagtataccgcaattaatggctatggtcctgttcacacaagcgcaagatggttcaatgacattgtaaatgtgccattctcatcggaagcgttcgtagcgggatgcttggcatatttcctcgataacacattgcaccgcaaggacagtgggattaggaaggacaggggtaagcactggtgggacaagttccgatccttcaagggtgattcgaggagtgaagaattttattccctccccttcaacctaaacaaatatttcccatctgtgtgagatataatggaggtattgtcattttaagttgtaaaatctcaattgccctttgtggacgacatcattactatttaattccatgttaattgtattacacgctatagcagttggtgtttccctttataagaacacttcacatgactaattcccatggagacgtggg

SEQ ID NO: 1296 - DNA, 447 bp, Gossypium hirsutum
  Clone ID: LIB3197-047-Q1-M1-B9
cggacgcgtggggtttacatttgctgaggctgagaagttgtgttttttttttggggggtatagagaaatagatcatggcaaaagtagatgaaccacagccacatccaccaaaggagcagctgcccaacatttcttactgcattacaagtccacctccatggcccgaggccatccttcttggtttccaacattatcttgtgatgcttggaacgacagtgatcattccaacttcacttgttccccagatgggaggtggaaatgaggagaaagcaaaggttatccagactctactctttgttgctggtttgaacacattattgcagtcactgtttgggtctagattgcctgctgtgatcggagggtcttatacctttgtcccaacaacaatctcaattattcttgctggtcggttcaatgacagttcagatcctattgagagatttaaaa

SEQ ID NO: 1297 - DNA, 472 bp, Gossypium hirsutum
  Clone ID: uC-gsronu33B141b08b1
cccacgcgtccgagtttgggtattagatttaaattagtttgaagggctttcgagttctgggttttccattttggggtaacacccaggttagtcaaattgtggacatcacggctatacacagagtttaccggcctcttcttattcatgcccgatctgtacgacgtaagagttgtgtgatcgagaggaaccctgcgccgcacggcgggcgtggagctttgccttctgaaggcggtagtccttccgatctcctcttccttgctggcggcggtgttgtcttttagagtttcagtagttggtataggtagcttttagtataaaaaaaaaaaaaaaaaggaaaaaaaaaaaaaaaaaaaaaaaaaaaaaaaaaaaaaaaaaaaaaaaacagccaaccaaaaaaaaagaaaacaaaacaaacaaacccttgggggggccccccttttttttttttttttttttttggctttggttgggg

SEQ ID NO: 1298 - DNA, 422 bp, Gossypium hirsutum
  Clone ID: uC-gsflnu33B133e12b1
actactctgacaaggaggaaggactaatatgaggggttcttttaaaaagctttcaggttacttgcacaaatatatctctctgacaagaggtttgatgaattgaatgcacttatcgtttaacccattgtctgccgctgagatccatttgaaaatgttctggagcctgataccaaagctcaatctattgaacaagagaatggcatcaccgaaactccccaccatgctatggtggctgggacacaacaatgccttgttctgcagtagcatctcattaatagaaccctgtaccttgcatgtactgattacacaaaatcagcattacgctggaagatattatagaatatagatggcacttggccgcctaaataagcaaacttatttttgcactgttgctatcgccttcgcagaaactgctatatgct

SEQ ID NO: 1299 - DNA, 262 bp, Gossypium hirsutum
  Clone ID: LIB3148-038-Q1-K1-H3
cccacgcgtccggtaccttgcaggtactgtttacacaatttcagcttagttggaatttctatggattatggctggcaccaagagcctaaataagcaaactcagtttgcactgttgttatcgactttgttgaaactgctatatgcttttggcttcatgatgtactacttgtttggatcatgaaaaatacaatttaatgttcgctattattatcattaaaaaaaaaattcctgatcccgatgctaaaaaacctgaagattggga

SEQ ID NO: 1300 - DNA, 851 bp, Gossypium hirsutum
  Clone ID: GOSHI-09MAY01-C1810_2
aataaataataaaaagaaaccctaaaaccctaaccccgtctcactcaaccaaatcaatggcgttgatgcacaatggggacggagcgggaatgtgacaaaaaggtcaaacaagtacttaaaagaagcacttttccaacggctttttaaggaaggcggctcggaaattacgtgcggcagcagcttaatcacttcctcaagagctccaagcgtgtctacaaatgggaagtaaacgagactctcaagaagcttcgccaccgtaagctctatttccctgctctcaagctgtctgaaatgatggcgactaagcggggcatgaataaaactgttagtgatcaggcaatccatcttgatttggttgccaaagctcaagggattcctgctgctgaaaattacttcgtcgatcttcctgaagcattgaaaaaccatctaacttatggtgcccttctcaactgttactctaaggaattgatgactgaaaaagctgaagctctgatggaaaagatgaaggaacttaaccttcctttaagctctatgtcttataatagtctcatgactctttacacaaagattggccagcctgaaagggtactagaaattatacaggaaatgaaatcatgtagtgtcataccagattcatatacatacaacgtttggatgagggctctggctgctatgaatgatatttctggagttgaaagagttatcgaggaaatgaagagagatgctgaggatgctgatgattggacaacatatagcaatatagcatcaatttatgttgatgccggcttgtttgagaaggcagagaaggcacttaagggaattgaaaagagaaatgcccacagaaatctttc

SEQ ID NO: 1301 - DNA, 729 bp, Gossypium hirsutum
  Clone ID: GOSHI-09MAY01-C1810_1
ccggtccaaccacaccgtccgttttttcttggccggacccatgggggctgctatgaatgatattcctggggtggaaggtagttatcgaggaaatgggcagagatgctgaggatcctgatgattggacaacatataccaatataccggcggtttatgttgatcccggcttgtttgagaaggcagagaaggcacttaagggaattggaaaagagaaatgcccacagaaatctttctgctttccagtttctaattacattgtatggccgaattggaaatttgcatgaagtttatcgaatatggcgttcattgaggctctcttttcacaaaacagccaatataagctatctgaatatgattcaggtattaataaacttaaaagatttacccggagctgagaaatgctttagagaatgggaatcggattgctctacttatgatatccggattgcaaatgtcttaattggagcttatgccaaggaaggcttgctaaaaagctctaaaaactgaagagaaggcccgtaaaaaaggggcaacctaatggccaaacttgggaaattcttttgggattattatttgaaaattggagacaccagcctggctgttgattgtgttggccattgccatttcccctgggcagaagaagattggcgaaaatgtgggtccctcccccctgaagcctttggggaaggggtgaacctctccttttaaagccatttgaaagaaatgtgg

SEQ ID NO: 1302 - DNA, 807 bp, Gossypium hirsutum
  Clone ID: GOSHI-09MAY01-C1800_3
gcctctttttttttttctaatgatacgatgatgacaaagcagaggccttgattactacaatcctaccgtcttccactctcgaagatcctcacaaattccatctccaaatcccagcccaaagctaaaaactatgtttcttgtcgattggttctacggcattcttgcttccctcggcctctggcagaaagaggctaagatcctctttctcggcctcgataatgccggtaaaaccaccttgcttcacatgttgaaggacgagagattggttcagcatcagccaactcaataccccacatcggaagaacttagtattgggaaaatcaagtccaaagctttcgacttgggaggtcatcagattgctcgcagggtctggaaagattactatgcttaggtggatgctgtggtgtacctggtagatgcctatgataaagagaggtttgcagaatcaaagaaggaactggatgcactcctttccgatgaggccctcgccaatgtcccgtttcttattctaggaaacaagatcgatataccctacgctgcctcggaggacgaggtacgttaccatctcgggctcacaaactttaccaccggcaagggtaaggtaaacctggcagactcaaacgtccgtccactagaagtatttatgtgcagcatcgtccgcaaaatgggttacggcaatggcttcaagtggatgtctcaatatatcaaatagagaaaatggtctcaaagatgcagtaggaaagatcttacagggtgccaaaccccaaattccataactcccaacttaaagggggggacaaagaaact

SEQ ID NO: 1303 - DNA, 994 bp, Gossypium hirsutum
  Clone ID: GOSHI-09MAY01-C1800_2
tttagaataacaagagttattgttctttttttctttttttttttccaatattagccctcccagtgcctccctctctttttcttgattttggggtaaaaatttgatccttttcttctatgatatgaagtggatgatgccttgaattgcaacgatatctcaccgtcctccactctcagatcgtcgcagttttctagctcgacccgtttgtattttccggagacccgaaatccgacccggaggttgaaacgatgtttctcgtggattggttctacggcgttcttgcttccctcggtctatggcagaaagaggctaagatcttgtttctcggcctcgataatgcccggtaaaaccacactgcttcacatgttgaaagacgagagattggttcaacatcagccaactcagtatcccacatctgaggaacttagtatggggaaaattaagtttaaagcttttgacttgggtggccatcttattgctcgccgggtctggaaagattactatgctaaggtggatgctgtggtgtacctggtagatgcctatgataaagagaggtttgcagaatcgaagaaggaactcgatgcgctgctttcagacgaggccctcgccaatgtcccgtttcttatcctaggaaacaagatcgatataccctacgctgcctcggaggatgagttacgttaccatctcggcctcaccaaactttaccacgggcaagggcaaggtaaacctagcagactcgaatgtccgtccactagaggtatttatgtgcagcattgtccgcaaaatgggatatggtgatggcttcaaatggatgtctcagtatatcaactaaggtaacgatccgtgaaatgcgattgtatgatgttacagccttccaagctctgatcccatctgatcactcctgacttcaggaaaaaaaagggttgtgttcatcaaacctgttgaaccagttcctaagtgggtttttacgtttgatgtatttggttttggatct

SEQ ID NO: 1304 - DNA, 1047 bp, Gossypium hirsutum
  Clone ID: GOSHI-09MAY01-C1800_1
cccacgcgtccggcctttacttccttgaaaatcagctgaccgtatttacctcccctagctctcttgctctatggatttttagtcaaatttgatagtcattttcttctatgatatgaaccaaatccagggtttgatttgaattaagacgaccatctttcacgatttcgagctcgacccatttcgattctcggtatacccagacccgaaccgtattaaaacgatgtttcttttggattggttctatggtgttcttgcttcccttggtctatggcagaaagaggctaagatcttgtttctcggtctcgataacgccggcaaaaccactttgcttcatatgttaaaagacgagagattggttcaacatcagccaactcagtatcccacatcggaagagcttaatattgggaaaatcaagttcaaagcttttgatttgggtggtcatcagattgctcgtcgagtctggaaagattactatgctaaggtggatgctgtggtgtacctggtagatgcctatgataaagagaggtttgcagaatcgaagaaggaactcgatgccctgctttcagacgaggcccttgccaatgtcccgtttcttatcctaggaaacaagatcgatataccatacgctgcctcggaggatgaattacgttaccatctcggcctcacaaactttaccacgggcgaggggaaggtgaacctagcagactcgaatgtccgtccgctagaggtatttatgtgcagcatagtccgcaaaatgggatatggggacggctttaagtggatgtctcagtatatcaagtagggtaatggctagaaagatgcattaagacgatctcagacttccaagccccaatttcaggtataaaaaaaatgtattcttttaaactgtttgagctgacccctaggggggttttaaatttggttctatttggtgttggatgtaaataggaagggaggttatattctcactgtggcagcgtatctctggtactgtagttgtctcaatgaacttccatatcttcttactataatgagtttgttttccct

SEQ ID NO: 1305 - DNA, 554 bp, Gossypium hirsutum
  unsure (1)..(554): unsure at all n locations
  Clone ID: LIB3583-061-P1-K1-B5
cccacgcgtccgaacattacttccttgaaaatcagctgaccgtatttacctcccctagctctcttgctctatggatttttagtcaaatttgatagtcattttcttctatgatatgaaccaaatccagggtttgatttgaattaagacgaccatctttcacgatttcgagctcgacccatttcgattctcggtatacccagacccgaaccgtattaaaacgatgtttcttttggattggttctatggtgttcttgcttcccttggtctatggcagaaagaggctaagatcttgtttctcggtctcgataacgccggcaaaaccactttgcttcatatgttaaaagacgagagattggttcaacatcagccaactcagtatcccacatcggaagagcttaatattgggaaaatcaagttcaaagcttttgatttgggtggtcatcagattgctcgtcgagtctggaaagattactatgctaaggtagcttaaaagctcaaagtaaatgcttttcactaacatgatggttattagttntagtgatacagcattcact

SEQ ID NO: 1306 - DNA, 119 bp, Gossypium hirsutum
  Clone ID: LIB3149-003-P1-K1-H5
tttggtgaaacaaattaataaaggtcttcttctaacttcttgggggggtttaataatgccggcaaaaccactttgcttcatatgttaaaagacgagagattggttcaacatcagccaac

SEQ ID NO: 1307 - DNA, 497 bp, Gossypium hirsutum
  Clone ID: GOSHI-09MAY01-C1820_4
gggcggacgcgtgggcgccgctaggggggggggggatttcttccggtgcggggagcagcaaccatggttctcaagacggagctttgccgatttagtggtgccatgatataccctgggaaaggcatgagatttgttcgtggtgattcccaggtcttactcttttccaattgaaaatgcaggcggtacttccacattccgcttgctagccttcaaaacttacatggacggccatgggcaggaagcttcacatgaaggacgttgcccaatatgccgtgaagaatagaagacgtgcatccaataatccttactcccgatccattgttggtgcctccttagaggttatccataagaagataagtgagaaacccgaagtccgtgatgctgccagtgaagctgctctccgagaaatcatggaaagaaagaaaagaagaaagactatgaagctaaggaaaagatgaaagataataataataatgatgatgtacgagatgaatatg

SEQ ID NO: 1308 - DNA, 868 bp, Gossypium hirsutum
  Clone ID: GOSHI-09MAY01-C1820_2
cccacccgcgcgtcccgctagggtttcaagaaaacagggatttcttccagtgcgaagagcagcagccatggttctcaagacggagctttgccgatttagtggtgccaagatataccctgggaaaggcatcagatttgttcgtggtgattcccaggtcttcctcttttccaattcaaaatgcaagaggtacttccacaaccgcctgaagccatcaaaacttacatggacggccatgtacaggaagcaacacaagaaggacattgcccaagaagctgtgaagaagaggagacgtactgcaaagaagccatactccagatccattgtgggtgccaccttagaggttatccagaagaagaggagtgagaaacctgaagttcgtgatgctgccagggaagctgctctccgagaaatcaaggaaaggatcaagaagactaaggatgaaaagaaggcaaagaaggcagaagtagcagcgaagcaacagaagacacaaggcaagggtaaccttccaaagggtggtgcacccaaaggtcccaagcttggtggtggtggtggaaagcgataagtttacctggttattatctgtttttacataggtagtatgttgattttgaaggcatttgtatggactgaatggccatcggccgtgtatctttttttgctttttatgcgttatcattaaaccttgaactctgtattgaagatgagtgatcaagttattttatgcttgactttgtttttcagcctacgtacccggacttagacggtgaagaatgccattcatactgcatagttttgtagccgatgcacactaaaattattcttacgtcagagtttatatatattatattagaattttttatattttatc

SEQ ID NO: 1309 - DNA, 749 bp, Gossypium hirsutum
  Clone ID: GOSHI-09MAY01-C1820_1
gacccacgcgtcgccgctagggtttcaataacaaaggaacagagcagcagcagcagccatggttctcaagacggagctttgccgatttagtggtgccaagatataccctgggaaaggcatcagatttgttcgtggagattctcaggttttcctcttttccaattcgaaatgcaagaggtacttccacaaccgtctgaagccatcaaaacttacatggacagccatgtataggaagcagcataagaaggatattgcccaagaggccgtgaagaagagaagacgtgcagcaaagaagccttactcccgatccattgttggtgccaccttagaggttatccagaagaagagaagtgagaaacccgaagtccgtgatgctgccagggaagctgctctccgagaaatcaaggaaagaatcaagaaaactaaggatgaaaagaaggcaaagaaagcagaagtagcggcaaagcaacaaaagactcagggcaagggtaacgttccaaagggtggagcaccgaaaggccccaagcttggtggcggtggtggaaagcgttaagttgctaaagttattatctgtttttccctagccagaaaaaaatagggttagtatgttttttttgaagccaattttatggacttaatggcattgatggccatgatgtttttgcatttatgcttgatcctatactatgaacccagtgttgaagttttgtgatgaagtgcttttatggattttgaatttattctttttc

SEQ ID NO: 1310 - DNA, 342 bp, Gossypium hirsutum
  Clone ID: LIB3148-023-Q1-K1-H12
cgagaaatcaaggaaaggatcaagaaaaccaaggatgaaaagaaagcaaagaaagccgaggtagcggcgaagcaacaaaagacgcagggcaaaggtaacattcctaagggtggtgcaccaaaaggtgccaagctcggcggcggcggaaagcgttgagtggctaggttattttcccctttttccctaccctgagaaaataggtagtattttcaaatttaatgaaagccttgtacggtatgaattggctttttggttatgttgatttttattttatgcttattatataccatgacctcatgttgaattcaagttatcaagtaattttatggattttttttcaat

SEQ ID NO: 1311 - DNA, 219 bp, Gossypium hirsutum
  Clone ID: LIB3197-033-Q1-M1-A6
cccacgcgtacgaagaaaacaggtaacatagagtagcagcgatggttctaaagacggggctttgtcggtttagtggtgccaagatatactccagggaaaggcatcagatttatccgttctgattctcaggtcttctttttttcaaactcaaaatgcaagaggtacttacacaaccgtttgagccatcaaaactacatggcagccattataggagcacat

SEQ ID NO: 1312 - DNA, 1173 bp, Gossypium hirsutum
  Clone ID: GOSHI-09MAY01-C1590_1
cccacgcgttcgcccaaaacagaggcagaaacgaccggcagagaaataaaaatgggaggctgggcaatcgcagtgcatggtggtgctggtgtagacccaaatctccctaatgaaaggcaagaggaagctaaaagactcctcaatcgttgccttgatattggaatctctgctcttcgttctaacctctccgccattgacgtcgttgaacttgtcgtgagggaattggaaacggatcctttgtttaattccgggcgtggatcggcacttacggagaaagggacggtggaaatggaagctagtattatggatggaccgaagagacgatgcggtgctgtttcgggtttaacgacagtgaagaatccgatatctcttgctcgacttgttatggataaaacaccacattcgtatttgggttttgccggcgccgaagagtttgcgaggaaacagggtgtggagttggtggacaatgaatatttcattacagaagacaatgtggggatgcttaagttagcaaaagaagcaaactcaatcctgttcgattaccgtatcccaaccctcaccacctgcggtggcagcgcagccatggaaaatcaattacaaatgaacggcttaccaatcagtctctacgccccagaaacagtaggttgcgttgtagttgacaaacaaggtcattgcgctgccgctacttccaccggtggattaatgaacaagatgaccggaaggattggtgactcgccgctgattggttcagggacttatgcttgtgacttagtggctgtttcatgtaccggtgaaggtgaagccattatacgaagcactttggctagggaagtagcggcggtgatggaatataaagggttgaatcttcatgaagcggtggattatgtgattaaaactagactagatgaaggcaaagctggtcttattgccgtgtcaaagaatggggaagtggcttgtgggtttaatactactggtatgtttaggggttgtgctactgaagatgggtttatggaagttggtgtctggtaaatttgtgtttggtttagatgctgggttcatattgaagtgaagcaataaatgtaataattgcatgttaagatcttgaatgtcttctaaggtctaaggtctaagtttctactatatcaatgaatcatgacaagtttgatgttcttc

SEQ ID NO: 1313 - DNA, 392 bp, Gossypium hirsutum
  unsure (1)..(392): unsure at all n locations
  Clone ID: LIB3135-025-Q1-K1-H5
gaattggaaggncccggcccagaccgacgcgtaacgtctaatagactattcggtgcttgattgggtataacgacagtgaataatcccatatcgggtgctggacttgttatggataaaacaccacattcttatatgctcttagcccgcgcctaagagtttgcgagtaaactacgtttgtagtctgtggacaatgaatatttcattacataagacaatgtggggatgcttaaggtagcaaaagaagcaaactcaatgctgttctattaccgcattctaacccttaccagctgtggcttatgcgcatacagagaaaatcaatcacaaatgaacgacttaccaatcagtctatacgccctagaaacagtacgtttcgttgtagttgacaaacaagg

SEQ ID NO: 1314 - DNA, 283 bp, Gossypium hirsutum
  Clone ID: LIB3148-007-Q1-K1-G2
accggggcggcccaagccttccgaattttttaagaatggattattgtaggctttatgaaggcctattttggatatacttgatgtgagcaatttcaggactctgactgaaattgggaagaaaaagaacaaggctatgatgtctggactctgctcgcaaaattgtatgaattatgaactgaataatataatcatgcatgcaattgagaagttgtaaactgactagatgaaggcaaagctggtcttattgccgtgtcaaagaatggggaagtggcttaaggggcgg

SEQ ID NO: 1315 - DNA, 452 bp, Gossypium hirsutum
  Clone ID: GOSHI-09MAY01-C1540_6
agccttccgcccacccttccggatttttttgggagaaggggatgtctgtgtctttgaactgctcagatcaagggaaatcgtgctcaaagttactgtatttcgtgtactggaaagcggtggactaatgcaccggtctcaatgaatgcctgctaagttaagccatcatagattatagagagctggaaatttcaggaatgtcaaaaactatgtcaagtaactccggccgcgcgggtgacggtgtaaccaatctggttccataagaaattagctgctgtgcatgtttagctgcttaagataatggatactaaaattctctggcttgactaggtttgttagtagatttctccgatgtagttgatgttgaacccgattgggaaaatgtgttttagacttgatgttatggtctgcttggttggtttgaaattgaaattttcattcctcttgttgctttc

SEQ ID NO: 1316 - DNA, 1111 bp, Gossypium hirsutum
  Clone ID: GOSHI-09MAY01-C1540_3
cccacgcgtccgcccacgcgtccgcccacgcgtccgggaagcagaagatgaaaggggagacccagatctgaaagctctttttttcttcttctctgtgttgagtgttttttctttttcaagttgtttgtttcctctgtctaatcacttcgaattatattcatatttatatgtatgtatgtacataaactttgaaatttcaaaaaagaaaacccccgtctcactcaagctgaaactcaacatcattatatgatctgaccttttatccaaaatgccacgccctttttttcataagcttattctctctaccaccctccaagaaaagaaactgaggatccccgataacttcgttaagaaattcggggacgaactttctgttgctgccgctctcactgttcctgacggtcatgtttggcgtgtaggaataaggaaagccgacaacaaggtttggtttcacgagggttggcaggagtttctagagcggtaccatatccgtgttggctacgtactggttttcagatatgaatggaattcttgtttcagtaaaaccgtatccatttgaagaacttgaagatgacgaatgcatctctccggcactgcagaatttgttttctgcgtctaaagttaataactgcatgaactggagtggtgaaatcaattttcgtgcgttaaagggcatgaatagccaatcttttcgaggtgcagtgctaccaaaaccaaacaagcctgggaggaaaaagcagaagtttgatcacgctgaaccggattcatccgttggacgcgaatatgatgtgtatacaaactttagattatacgaaagtgcttcagcccgaaagagaaccgtgacaacggaagaaagagagagggcaattaacgcagccaaatcgtttgagccgatgaaccctttctgcagagttgtcttacgaccatcatatctataccggggatgtattatgtacttaccatcatgctttgctgagaagtatctaagtggggtttcgggatttattaaacttcagcttccagatgggagacaatggcccgttcgatgtcgctatagaggtggcaaagccaagtttagtcagggatggtacgagtttacgttggagaataa

SEQ ID NO: 1317 - DNA, 1062 bp, Gossypium hirsutum
  Clone ID: GOSHI-09MAY01-C1540_2
aacaacttcaagataatgaatgcatatctccagcactgcagaatatgtttggtggctctaaacttagcaactgcataaactggggtggtgatgtcgcccgcctcaaccccaaggctgtgaataatcaacctattcgaggttcaggtgctatgaaaccagaaccaaaaaagcgtgggaggaagcggaagtttgatcctaacgtgcaggattcatctgctggacgtgaagatgatgctgacatgcgccttaggtgctatgaaagtgcttctgcccgaaagagaaccgtgacagctgaagaaagagagagagcaatcaatgcggccaaagcatttgagcctactaaccctttctgcagggtcgtcttgcgaccatcatatctgtacaggggatgcattatgtacttaccgtcgtgctttgctgagaagcatctaagtggggtttctggattccattaaacttcagcttcctgatgggagacagtggtctgtacgatgtcgttataaaggaggcaaggctaagttcagtcagggatggtacgaatttacattggagaataatttgggagaaggggatgtctgtgtcttcgagctgctcagatcgagggaattcgtgctcaaagttaccgtatttcgtgtaagggaaagcgctggactaatgcaccggtctcaatgaaacatgccgccccgagttaaaccagctaacatatagtgaacatatccttccagatgatgtgaaaccgatccgggtcaataagagcatgccatttcgatgtccataaaaagcttttaatggggggaagacttttagttgcgtagaagagtaaatacaaaatttgtctcttgtggggtttgattaggactgtaaatagagcaatgaaggtgatgatgacgttgaactttgagggaaggaaaatggggtgttgggctttgatttttgtggtctgtttttgattggctttaaattttcattcactgcttttggcttgaattcctcatgttgtagtttttatgctactttttaagttgggttaattatactcgggcttattaaactattagtaat

SEQ ID NO: 1318 - DNA, 1471 bp, Gossypium hirsutum
  Clone ID: GOSHI-09MAY01-C1540_1
cgtccgcggacgcgtgggctctgttgaatatctttttcattttttcaaaaaaattctctattttccatgtgtaagcactcaacagagtcttatgatttgatccagtgatatataaatatatatatagtagaattagatatatatacagcgaaaaaagctcaaaaaagcaaaatcattatatgatctgacaatttctgccaaatgccacgcccttttttccataagcttattctctccactactctccaggacaggaaactgaggatacctgataactttattaagaaattcagggatgagctttctgttgctgccgctctcaccgttcctgatggtcatgtttggcgtgtaggaataaagaaagttgacaacaaggcttggtttaaggagggttggcaggaatttgtcgaacgttactatatccgtgttggctactttttgattttcagatatgaagggaattccgctttcagtgttagcatatttgatttgtacaactctgaaataaactatcaaacaaatgctcttgttggtactcaatacaatctcggaagacaatatccatttgaagaacttgaagatgatgaatgtgtctctccagcgctgcctaatttgtttggtgggtccaaacttaactgtataaactggagtggagaagtcaaccatcacgcacctaagggtgttaataatcaacctattcggggtatggcttttcattactgtatttgaacttaaaaagattctgctaatgaagtgaaatggcattcttcaggtgcagagctaccaaaactgaaaaaaccagggaggaaaaagcagaagtttgagcctagtgaagaggattcatctcttggacatgaagatgacatgcaaatgcgtaatagattttatgaaagtgcttccgccaggaagagaattgtgactgctgaagaaagagagagagcgattaatgcagccaaagcatttgagcctactaaccctttctgcagggtcgtcttgcgaccgtcttatctatacaggggatgtattatgtacttaccatcgtgctttgctgagcaacatctaagcggggtttcaggattcattaaacttcagcttccggatggtagacagcggcctgttcgatgccgttatagaggaggcagggctaagttcagtcaaggatggtatgaatttacattggagaacaatttgggggaaggagatgtctgtgtctttgaactgctcagatcgagggaatttgtgctcaaagtcaccgtatttcgtgtaatggaaagtgctggactaatgtaccggtcccaatgaaatgccatctctctgcgaagttgggccatcttagattatatggttgcaaagttcaggaaagtctggtgtgggcttagggtaaactttgggccatttgggccaaatgtatttgggttaattgggctgtgcaaatgggtttggggcccggggaacaattgggtattacata

SEQ ID NO: 1319 - DNA, 341 bp, Gossypium hirsutum
  Clone ID: LIB3146-019-Q1-K1-B7
ggtatatgctgtcttaaaccagtggcaaatacgtgcgcgcacattcgaaagcccgatcatagaggccaggagtcatcttctgaacacgtagatagattctgccgtgcgcctttgacgagatgaaaatgcttatgtccgtgtgcgatgcgcccctgctagtgaaagagtgatagctgctaatgcgggcttagaacttgagcgtattgaccatttgtggagggtcttgttgctaccatcatatcgatacaagagatgtattatgtacacaccatcgtgctctgatgagaaacatataagtggggtgtcggattccattaaacttcagcttcctgatgggagac

SEQ ID NO: 1320 - DNA, 650 bp, Gossypium hirsutum
  Clone ID: LIB3543-054-Q1-K6-E2
cccatactgaaactctttttttcttcttctctgtgttgagtgttttttctttttcaagttgtttgtttcctctgtctaatcacttcgaattattttcatatatatatatatacataaactttgaaatttcaaaaaagaaaacccaagtctcactcaagctgaaactcaacatcattatatgatctgaccttttatccaaaatgccacgccctttttttcataagcttattctctctaccaccctccaagaaaagaaactggaataaagaaagttgacaacaaggtttggtttcaggaaggttggcaggagtttctagagcgttactatattcgtgttggctacgtactggttttcagatacgaaggaaattctgctttcagtgttagtatatttaatttgtataactcggaaataaactatcagactaatgccctcgttggtactcaatacaatcacggaaaacaatatccgtttgaacaacttgaagatgatgaatgcatctctccagcacttcagaatttgtttggtgggtctaaacttaacaactgcataaactggggtggtgatgccaatcttcaaacttcaaagggtgtgaataatcaacctattcgaggtatggcttttcatttttatgcgatcgaacttaaaa

SEQ ID NO: 1321 - DNA, 931 bp, Gossypium hirsutum
  Clone ID: GOSHI-09MAY01-C1570_2
cccacgcgtccgcccacgcgtccgcggacgcgtgggttttttttttgggttgcaattatttggttttgttaatatttttttattaaattgagttttcctaatcgttcgttgacttgatttaagcagcttcggacaagaagattaagatcgggattaacggatttggaagaatcggacgtttggttgccagagttgctcttcagaggaacgatgttgaactcgtcgccgttaacgatcccttcatttccaccgattatatgacatacatgttcaaatacgacagcgttcacggtcaatggaagcaccatgatcttaaggtcaaagactctaaaaccctcctcttcggcgataaaacccgtcactgttttcggaatcaggaaccctgaggagattccatgggctgaagccggggctgagttcgttgttgagtcaactggagtgttcactgacaaagacaaggctgctgctcacttgaagggtggtgctaagaaagttgtgatctctggccctagcaaagatgcacccatgtttgtaatgggtgtaaacgagaaagactacaagccagagcttgacattgtttccaatgctagcagcactaccaattgtcttgctcctcttgctaaggttatccatgaccgatttggaatcgttgagggtctcatgactaccattcatgccattactgcaacccaaaagaaagtcgatggaccggtgctgtcaaggtatattttcaatctgattctgatcagtcccttcaacatcattcctagcagcaccggtgctgccaaggctgttggtaaggttcttcctgccctcaatggcaaactaactggaatgtcattccgagttcataccgttgatgtatcagttgtggatctcaccgttaggcttgagaaatctgcatcttatgatgagatcaaagctgctatca

SEQ ID NO: 1322 - DNA, 1035 bp, Gossypium hirsutum
  Clone ID: GOSHI-09MAY01-C1570_1
cccacgcgtccgcccacgcgtccgcccacgcgtccgcccacgcgtccgcccacgcgggcggcccacgcgtccgcccacccgtcctcactattaaaccttctgcttagcttaaaaaatcttgaatccgtactctcctacttccctcgttatcgtcaatggcttcggacaagaagattaagatcgggattaacggatttggaagaatcggacgtttggttgccagagttgctcttcagaggaacgatgttgaactcgtcgccgttaacgatcccttcatttccaccgattatatgacatacatgttcaaatacgacagcgttcacggtcaatggaagcaccatgatcttaaggtcaaagactctaaaaccctcctcttcggcgaaaaacccgtcactgttttcggaatcaggaaccctgaggagattccatgggctgaagccggggctgagttcgttgttgagtcaactggagtgttcactgacaaagacaaggctgctgctcacttgaagggtggtgctaagaaagttgtgatatctgcccctagcaaagatgcacccatgtttgtaatgggtgtaaacgagaaagactacaagccagagcttgacattgtttccaatgctagctgcactaccaattgtcttgctccccttgctaaggttatccatgaccgatttggaatcgttgagggtctcatgactaccgttcatgccattactgcaacacaaaagaccgtcgatggaccatcaatgaaggactggagaggtggtagagccgcttccttcaacatcattcctagcagcactggtgctgccaagggctgtggaattctgcctcatggaactctgaatgtatccgagtctacgcgatgatatcgggatctacgtagctgagaattctctatataatcaactgttcaggaatctgagcagctaggctttgggtcttaggaaatggcttgctttgtacaagtgacttgtccaagtgtgttacagactgtactgtctgcaaccatggtcgtctggatgatctcagtcc

SEQ ID NO: 1323 - DNA, 360 bp, Gossypium hirsutum
  Clone ID: uC-gsflnu33B006f04b1
tccacgcgtacgtccacgcgttcgatcgtattgaacgctcttgagagcaagtacaagccaagctatagaggggatggagaagaggaaaagagatcgtgcttaacggattacattacacgtcttgaaagcaaatacaagccgggttatggagggaacgatgttgaggtaaagactgctaacgattcattcattaccaccgattacatgagatacatcgtgaaatactatagcgttcacggataatggaagcaccatgatcttaaggtcaaagactctaaaacccttctctttggtgaaaaacccgtcactgttttcggaatcaggaaccctgaggagattttcatgggctgaagccgcggc

SEQ ID NO: 1324 - DNA, 340 bp, Gossypium hirsutum
  Clone ID: LIB3135-038-Q1-K1-A12
ccacgcgttcggccacgcgttcggccacgcgttcgcccacgcgtacgtccacgcgtccgagggtggtgctaagaaaggggtgatctctgcccctagcaaagatgcacccatgtttgtaatgggtgcaaacgagaaagactacaagccagagcttgacattgttttcaatgctagctgcactaccaattgtcttgctccccttggtaaggttatccatgaccgatttggaatcggtgagggtctcatgactaccgatcatgccattactgctacacaaaagaccgtcgatggaccatcaatgaaagactggagaagtggtagagccgctttcttcaacatc

SEQ ID NO: 1325 - DNA, 1040 bp, Gossypium hirsutum
  Clone ID: GOSHI-09MAY01-C1500_2
gccttaacgcttaaggttcttgtttcattttcattcactaacgaacatgaagaggactttcatgcacgaaaacccaagggacatatagaaagaaagcgttggtggttgtttaatacgttattgccgtaacaaaaccctagggacagattcttcaacaaatcaattaccaaatggaagaatattcaaaaggaaacctagaggtagaggattcccagaatgtacaggtgcatgaagaagaaaacaaggacgaatttggtgtagtaaatggaggggaagatgattccagttcaagtagtagcagttcggacaaggaggataattcagaggagaaactggtttctgagtcagttgaggagaaagtggtttctgagtcagttggggtttctttgactgaagataccgagccatcagttgagaaattgggagactctgatgttgctgaattggatgataaagaaacagaagagaacgtttcaccatctttagagttagaccacactaatgctaaagaaacagaggagttgtctgctgctgataccactgtagtatccgaactctcaacagatgtggaatcaaaggaaacgggacaggatgatactaatgactccacggttggtggagctgtgcttgttgcagaccaaggaatcacggacgataatggtgggaatccatcaggttcccctgaattgtcttctaaccaaaatgttgaagattcattggaagcagcaaatgttcctcccgttgagaccagagatgctggtgaagttgaagacaagcctgtcatgcatgaaagcatagaaaatcagactattctatctgtgggtaatcgttcggtgcagccaacttcttggaagagttgctgtggactttttgaagttctaaggcgctctgacagataaattcaagtttggggaaaaaacttaagcagaatctcaagttcttggtggagtttataggttggtatgatgtgtttattttaatttttctccagcattttctgcaaaaataatgggtgagaagataagttgaagtggtttgag

SEQ ID NO: 1326 - DNA, 1253 bp, Gossypium hirsutum
  Clone ID: GOSHI-09MAY01-C1500_1
cctgccggcaccgggcccatttccaggtccgacccaggcgtccgccctcgcgttctcccacgcgtccgcttaacgctgaaggttcttgtttcattttcattcactatcgaacatgaagaggactttcatgcacgaaaacccaagggacatatataaagaaagcgttggtggttgtttaatacgttattgccgaaacaaaagcctagggacagattcttcaacaaatcaattaccaaatggaagaatattcaaaaggaaccctagaggtagaggactcccagaatgaacaagtgcatgaagaagaaaacaaggaagaatttggtgtagttaatggtggggaagatgattccaattcaagtagtagcagttcggacaaggaggataattcagaggagaaactggtttctgagtcagttggggtttctttgacggaagataccgagccatcagttgagaaattgggagactctgatgttgctgaattggatgataaagaaacagaagagaatgtttcaccatctttagagttagaccacactaatgctaaagaaacagaggagttgtctgctgctgagaccactgtagtgtccgaactctcaccacatgtggaatctcaggacacgggacaggatgagactaatgactccaccgttggtggagctgtggttgttgcagaccaacgaatcacggacgataagggtgggaatccatcaggttcccctgaattgtcttctaacctaaatgttgaagattcattggaagcagcaaatgttcctcccgatgagaccagagatgctggtgaagttgaagacaagcctgtcatgcatgaaagcatagaaaatcagactattctatctgtgggtaatcgttcggtgcagccaacttcttggaagagttgctgtggactttttgaagttctaaggcgctctgacagataaattcaagtttggggaaaaaaacttaagcagaatctcaagttcttggtggagtgctttattttaattttttttccagcattttctgcaaaaataatgggtgagaagataagtggagttggttggggaatgaaattagggttttcttcgttgggatgtgcgattgccatacgtggagtgtttgaatttgtatacagtaatatatgtgatgatactgtgatttcaatgtcatttcttgggttttgccttttagaatggtttaagattaacaacacactttgtagtaacaatttcaattatgactttgaatcgtttgtt

SEQ ID NO: 1327 - DNA, 714 bp, Gossypium hirsutum
  Clone ID: GOSHI-09MAY01-C1520_3
gttagggacttttgactataaaggagctggggttgcttttgatggatttgctgcatgccttgctggaactgcaatctcaaatgggttgatcatgatgaggaagaaaatggatcccagctttgaaacacctaacaagccacctcctaccttgttgaatgccttcacttgggctactcacatgggggttagcagcaatttgaggtaccaaaccttgaatggggtcgagtttttgttggctaagggacttcctcccctggcatttaagtcatcagtggtggttctgagatgcttaaataatgtacttggaggaatgacatttgtaatactagcaaaatttactggatctcagagtgttgaacagaagccaccaaacataaacaaggagaagaagtcggtggacggtgacagtttggacaacagtcagtcgacttttaagtgatttttacccccttttgtttacttttttgtcgtagctttttctctgcctatctctgtaactaggatgtagcatgtgatcataatgtttggaataagatccaagtcagtctccggatttgatgtcataattcatgagggtggatgagatgttttctgttgcattttcttagtgatttttgtagaaagtgtcttccttgaattgaaatcacttggacagtgatgcttagcagcaaatagttgccttggaaatgaaaagcaggatttgtcttgtctttc

SEQ ID NO: 1328 - DNA, 694 bp, Gossypium hirsutum
  Clone ID: GOSHI-09MAY01-C1520_2
ctttgtatatcttggctcccccttttcatcatcatcttaccttagtcacatttttctctcaacatctcttttaatcatatataataattcttatctaaaatgaaagattctgtgcaggtttagatttaacactttgcagagttgagttttgaggaaacaagttcgaccaaatcactgaagcgatccatcaaatggctgctatggctcggtatcttttctcggacctgccgagacaatcacctaacatgactgatacctgccgtctcagatcacaaccacctcatgttgtttccttcccaagaaaccaaccgttccgttttcagtgttctcagatgtccattcccaagctacgtatttcatgcggcggaggagacggtggaaaccatggagttggtggtagcggaggtggtggcacaggaagaggtggcgggtccaattccagcgatgatccatggaagcgttttggcattctgggtcttttcctaagtggatggagagacagggttgcagcagatccgcagtttccattcaaggttttaatggaagagttggtgggagtcactgcttgtgttcttggagacatggcttcacgtcctaattttggtcttaacgagctcgacttcgttttctcaactctcgttgtcggttccattatgaatttcactcttatgtatcttttagcaccaacagcttc

SEQ ID NO: 1329 - DNA, 1388 bp, Gossypium hirsutum
  Clone ID: GOSHI-09MAY01-C1520_1
ccgggtcgatctaccgtccgcgcattctccatctctgtctttactttctttggttttttcttgcatcatcaaaccttgttctcttctgctctttttacgataatcaaatttcctaaaaagaatcaatccgtgcgggtttagtttaactcttttgcagagttgattttcgattgttcagatggctgccatcgctcggtatcgtttctcggacctgacgagacaattccctaacacgagcggtgctcgccctctcaaatcacaaccaccccatgttgtttccttccctcgaaaccaaccgttccggtttcagccttctcagatttccattcccaaacttcagttttcatgcggcggaggagacgacggaaaccatggggttggtggtaacggaggtggtggtaaaggcgatggcggttccaactccaacgatgatccatggcagcgctttggcattctgggtcttctcctaagtggatggagagacagggttgcagcagatccgcagttcccattcaaggttttaatggaagagttggtgggtgtcactgcttgtgttgttggagacatggcttcacgtcctaattttggtcttaatgagctcgacttcgttttctcaactcttgttgtgggttcaattttgaatttccttcttatgtatcttttagcaccaacagcttccgcagcttcttcaagtctcccttccatctttgcaaactgtcctcaaagtcatatgtttgaaccaggtgcttttaccttaatcaaccgtttcgggacttttgtctataaaggaactgtgtttgctgctgttggactggctgctggacttgtcgggactgcaatctcaaacgggttgatcacgatgaggaaaaaaatggatcccacctttgaaacacccaacaagcctcctcctaccttgttgaatgccatcacctgggccattcacatgggtgttagcagcaattttaggtatcaaaccttgaatgggatcgagtttgtgttggaaaagggacttcccccccttgcatttaagtcatcagtggtggtcctgagatgcttaaataacgtaattggaggaatgtcatttgtaatactagcaaggatgactgggtctcagagtgttgaacagaagccagcaaacatagacaaggagaaggagatgttgatggatggtggtgtcaatatggagaacaatcagtcgacttttaagtgatttttaccctttttttgtttttttctcgtccttggctgttttttggcattttctttgcctgactctgtaacttggacgtagcatgtgatcacaatgtttgtaataagatccaagatgtctcagtttgaagttatagttcatgtgatcataatattttgggtttaaaacacatagatgc

SEQ ID NO: 1330 - DNA, 344 bp, Gossypium hirsutum
  Clone ID: LIB3189-014-P1-K1-C10
attctggtttagatttaacactttgcagagcctggtttttgaggaaacaagttcgaccaagtcggtgaatcgatccatcaaatgggtgctatggctcggtatcttttctcggacctgccgagacaatcacctaacatgactgatacctgccgtctcagatcacaaccacctcatgttgtttcctttccaataaaccaaccgttcctgtttcagttgactctgattttctttcttaattttcgtatttttttcgtcgttttttgtctttttgattccatgtttttttttatttactttttatttttttttatattgttttgtttttgtgttttttttaattactt

SEQ ID NO: 1331 - DNA, 319 bp, Gossypium hirsutum
  Clone ID: LIB3189-011-P1-K1-D9
cggatacccggtcgaccacgcgtccgatacgatctaacattctggtttagatttaacacttttcagagttgagttttgaggaaacaaggtgcaccaaatcactgaagcgagcgatcaaataactgctatggctcggtatcttttctcggacctgccgagacaatcacctaacatgactgatacctgccgcctcatatcacaaccacctaatgttgtttccttaccaataaaccaaccgttccgttttcagtgttctcagatgtccattccctagctacgtatttcatgcgacagaggattccatgtaaaccatgctgta

SEQ ID NO: 1332 - DNA, 911 bp, Gossypium hirsutum
  Clone ID: GOSHI-09MAY01-C1480_1
ggccatgtctatgatggggactattccattaaagcgcatggacagcagaagccagttggagtgtcttaagagatgtatggatcttatcgggaatggtgcctctgtttttttctttccagaaggcacacggagtaaggatgggaagttaggtgatttcaagaaaggtgcattcagtgttgcagcaaaaactagggtgcctgtcgttcctataaccttaattggcacaggcggaatcatgcctgcaggaatggagggtgtcgtaaattcaggatctgtgaaagttattattcataaaccgatcaaagaaactgatcctgaaatattacgccaaatagctagaaacacgattttagatacacttaagcttcgaggctgagaaagtggccactgtgacatcttttggttttagggttcatacttaatcctttattgctgatttgaggaacgtggtaggaaggttttataattccaaattagcaccgttttagtaatatgtgatcggttactggctttagttgcttccatttcacacgtaacggacttggagggatcccgtgtttgtggcagatgattttatgcggtcgcaacgctaacagtttaacaatggagttggccaaactacagcttgaagttggcatcaaaatgtttctgttcatatcatgtattgcatttccagatattgtatgggaaagtcccaacacaaaattttgctgtcccttgatagaacttggttaagattatgtgttagtttctcatacgatattgtatgagaaactaatattgtatgggaaagtccaacacaaaattttgctgtcccttgatagaacttggttaagcttatgtattagtttctcatacgatacttgcaattggaggctataaatttacaaccgtgaaggggtcatattctc

SEQ ID NO: 1333 - DNA, 543 bp, Gossypium hirsutum
  Clone ID: LIB3829-022-Q6-K6-E5
taactcattggaagaagcttgaagttcatcagcaagactgccatagtggtttttcccattattgggtgggccatgtctatgatggggactattccattaaagcgcttgtttttgttgtaagccagttggagtgtcttgggggggggggggatcttatcgggaatggtgcctctgtttttttctttccagaaggcacacggagtaaggatgggaagttaggtgatttcaagaaaggtgcattcagtgttgcagcaaaaactagggtgcctgtcgttcctataaccttaattggcacaggcggaatcatgcctgcaggaatggagggtgtcgtaaattcaggatctgtgaaagttattattcataaaccgatcaaagaaactgatcctgaaatattacgccaaatagctagaaacacgattttagatacacttaagcttcgaggctgagaaagtggccactgtgacatcttttggttttatggttcatacttaatcctttattgctgatttgaggaacgtggtaccgaaggttctataattccaa

SEQ ID NO: 1334 - DNA, 609 bp, Gossypium hirsutum
  Clone ID: GOSHI-09MAY01-C1440_3
aacattgaaaagagcctagctgaggcatttcaacctttgggcatttcggattggaactcgctcttttggatcgctcaccccggtggtccagccatattggatcaggttgaggcgaagctagcccttaaatccgaaaaactccgagccacgaggcacgtgctttcagaatatgggaacatgtcaagtgcttgtgtgctgttcatattggatgagatgaggaagaaatcaaaggaagatggacttggaaccacgggtgaagggctcgagtggggtgtcctgtttgggttcggaccagggctcactgttgagaccgtggtgcttcatagtatctctgcttaaacaaggttttaatgttcatgttggctagccctggctgcactacaatttgctttgcatttttatttattttattttcctttttattaatgaaatttgggatttgtatggttatttgaaagagagtaaagctctcacatatggtgtttaacgcctgtagaatttatgtgccaccttatattttatgatatggtgtttaacgcctgtagaatttatgtgccaccttatattttatggaaataataaattgccttttttttaggtgaaaaaagg

SEQ ID NO: 1335 - DNA, 1508 bp, Gossypium hirsutum
  Clone ID: GOSHI-09MAY01-C1440_2
cttatcacccttagccaccaccacaactgctgtcagttcctctgttgctgtgtgctaactcttgggttgttttttctttttccttttgttgaagctttaaaaaaaatggtgacagtggaggaagttcgtaaggcacaacgcgccgaagggccggccaccgtgttggcgatcggtacgtcgactccaccgaattgtgtggatcagagcacgtaccctgattactatttccgtatcacaaatagtgagcacaagactgagctgaaagagaaattcaagcgcatgtgcgaaaaatcaatgatcaaaaagcgttacatgtatctaacagaagagattttgaaagagaaccccaatgtatgtgaatacatggcaccatcactagatgcaagacaagatatggtggtagttgaggtaccaaggctaggcaaagaagccgccaccaaggctattaaggaatggggtcagcccaaatccaagatcacccacctcgtgttttgcaccaccagtggtgtcgacatgcccggtgccgattaccagctcactaagcttttgggccttcgcccgtcggttaagcgcctcatgatgtatcaacaaggttgtttcgctggtggtactgtgctccgtgtggccaaggacttggccgagaacaacaagggcgctcgcgtgcttgttgtttgctcggaaatcaccgcggttactttccgtgggccgagtgatactcacttggatagtttagttggccaagcgttgttcggtgatggtgctgctgctgttatagtaggtgcggatccattggctgaaatcgagaagcctatgtttgaactcgtctcggcggcccaaacgatcttgccagacagcgatggtgccattgacggtcaccttcgtgaagttggacttacatttcaccttctcaaggatgttcccggcctaatttcaaagaacattgaaaagagcctagctgaggcatttcaacctttgggcatttcggattggaactcgctcttttggatcgctcaccccggtggtccagccatattggatcaggttgaggcgaagctagcccttaaacccgaaaaactccgagccacgaggcacgtgctttcagaatatgggaacatgtcaagtgcttgtgtgctgttcatattggatgagatgaggaagaaatcaaaggaagatggacttggaaccacgggtgaagggctcgagtggggtgtcctgtttggtttcggaccagggctcactgttgagaccgtggtgcttcatagtatctctgcttaaacaaggttctaatgttcatgttggctagcccaggctgcactaccatttgctttgcatttttatttattttattttcctttttattactgaaatttgtgatttgtatggttatttgaaagagagtaaagctctcacatatggtgtttaacgcctgtagaatttatgtaccaccttatattttatggtaataataaattgccttttttttaggtgaaaaaaatgaagggcaactg

SEQ ID NO: 1336 - DNA, 759 bp, Gossypium hirsutum
  Clone ID: GOSHI-09MAY01-C1440_1
ccccccgcgtgcccttatcacccttagccaccaccacaactcttgggttgtttttctttttccttttgttgaagctttaaaaaaaatgctgacagtggaggaagttcgtaaggcacaacgagccgaagggccggccaccgtgttggcgatcggtacgtcgactccacccaattgtgtggatcagagcacgtaccctgattactatttccgtatcacaaatagtgagcacaagactgagctgaaagagaaattcaagcgcatgtgcgaaaaatcaatgatcaaaaagcgttacatgtatctaacggaagagattttgaaagagaaccccaatgtatgtgaatacatggcaccatcactagatgcaagacaagatatggtggtagttgaggtaccaaagctaggtaaagaagccgccacaaaggctattaaggaatggggtcagcccaaatccaagatcacccacctcgtgttttgcaccaccagtggtgtcgacatgcccggtgccgattaccagctcactaagcttttgggccttcgcccgtcggttaagcgtctcatgatgtatcaacaaggttgtttcgctgggggtactgtgctccgtgtggccaaggacttggctgagaacaacaagggcgctcgcgtgcttgttgtttgctcggaaatcaccgcggttactttccgtgggccgagtgatactacttgatagttagttgccaagcgttgtcgtgatgtgctgtgtgtatagagtgcgatcatgct

SEQ ID NO: 1337 - DNA, 415 bp, Gossypium hirsutum
  Clone ID: LIB3146-043-Q1-K1-D3
cccacgcgtccgcaaatagtgagcacaagactgagctgaaagagaaattcaagcgcatgtgcgaaaaatcaatgatcaaaaagcgttacatgtatctaacagaagagattttgaaagagaaccccaatgtatgtgaatacatggcaccatcactagatgcaagacaagatatggtggtagttgaggcaccaaggctattaaggaatggggtcagcccaaatccaagatcacccacctcgtgttttgcaccaccagtggtgtcgacatgcccggtgccgattaccagctcactaagcttttgggccttcgcccgtcggttaagcgcctcatgatgtatcaacaaggttgtttcgctggtggtactgtgctccgtgtggccaaggacttggccgagaacaacaagggcgctcgcgtg

SEQ ID NO: 1338 - DNA, 1414 bp, Gossypium hirsutum
  Clone ID: GOSHI-09MAY01-C1460_1
tctttcacgcgtccgcccacgcgtccgggcatttactgctactgtgttatcatgggctatcctcgagtatggagatcagatggcggcagtgaatcaactggaacctgctcaacaatctctcaagtggattactgatttccttataaatgctcatcctaaagacaacgttctctatattcaggtgggtgatcccgacttagatcataaatgttgggaaaggcctgaaaacatgaaagagaagaggcctctcacacaggtgaacataactgttccagggacagaggttgcagctgagactgctgctgctatggcttcagcatctctggtgtttaagacatctaactcggcatactcaagcacacttcttaagcatgccaagcaactttttaatttcgcggacaaatatccagcttcttatagtgagaacatcccagaagttgctacatattacaattcaacagggtatggagatgagctcttatgggcagcaagctggctctatcatgcaacaggtgatcgatcgtaccttgactatgcgactggtgaaaatgggaaacagtttgcttcatggggaagtccaacctggtttagctgggataataaaaatgcaggaacccaggtcttgctttccaggttaagcttgtttggtgccaaaggagtctctgggaactctggcctcggaaactataggagctctgctgaaggtgttatgtgtggtcttttgccaaagtctccctcagccacatccagcagaacagatggtggtcttgtatggatcagtgaatggaatgctctgcagcaccctgttgcctctgcatttttagctgctctttacagtgattacatgcttacatcacagactgcaaaaataacctgtggtgaccattcattcaaaccgtcggatcttagaaagtttgccaaatcacaggctgattatgtattgggcaaaaaccctttgaaaatgagctttctgttggggtatggggataagtacccacaatatgtgcatcatagaggagcttcaattccagctgatgcgactactggttgcaccgacggcttcaagtggcttgattcaactcaaccgaatcctaatgtggctgttggaggccttgtgggtgggcctttccttaatgaaacatacatcgattcccggaacaactcaatgcaagccgagccgaccacatataacagtgccctcattgttggccttctctcaagtttggtcactacctcatctgcagttaaatccttcacctaaaagtaaaagtagccatagcctgtaactgattacacttttgtacctatatgcagctgtatcaataccacgtttccctataaaacgtgttcttcaagtattttgttctacacaggtgaacttagatgcgggtcgcctgcaccaagtttttgtcgt

SEQ ID NO: 1339 - DNA, 894 bp, Gossypium hirsutum
  Clone ID: GOSHI-09MAY01-C1410_1
gtggcatcagatcctagtgatgctaatacaaacagtactactttgttctcggatgatacagatgagaggtcccggaagagctctaatccagagatgggaatttcaactcatcaagaagatgaatctgctgctgctactgtcgagcctcctcagtctgattcaccagaatgccgtcctgatgttcctggaataagtgaccgtcgaacagggcagttttcatctgttccaaagaagagtgagctaaagattggcgagtcatctgccttctttacttatgtgaagtcaagtgcagtaaaaaccagcagtactcaagtggcaacccctaatcatgaaagtgctgctcaaaataagatcagtgaggagaatctcccgcaacctggtgaacaagtggttactgataccagagtacatgagaacggtgaaacatgggaaaacaactcacaaggtgatgactttcgtagcagcagtagtgttccggattccctttccttggagaggtcttcgacccctgcatcaatggagttctcacaacaaagggattttaaggaagacaagttttctccggcacttgtgcctctagaaatgaaactcaacatgatgtatccggtttacctacacaaagtgcttatctacactacatgccgggagttctaaatcaagttatgatgccatcatcgacccagttgtttcagaacaacctccatgacatccataatcatactagttctcctgtggtccctcaatacaatcatcttcaacaatgtcttccccatcctcatgtaagtgggatggcatcgtttccatactaccctgttaatatgtgcatgcaaccgggtcagatgccaactggtcactcgtggccatcatttggaaattcatcttccaatgaagtgc

SEQ ID NO: 1340 - DNA, 601 bp, Gossypium hirsutum
  Clone ID: GOSHI-09MAY01-C1430_4
ccgtccggcccttttccttctgtccttggaaactaaggttatggcttctccctcgttcttttttgctacctttctgttgcttctctctacggttcacccaaagcccccaaagttgcaatttggacttagttgattgctgtggagcaactttcagacgtcaagcttaactctcggatccttcaggattcaattgtaaaacaagtaaatcaaaaccccaaggctggatgggaagctgcactgaatcctagattttctaattacaccattggtgagtttaagcaccttcttggagtaaaaccaacacctaagaaagaacttctgggcgttcctattttaagtcatgacaaatccttgaaattgccaacttcttttgatgctagaacagcttggccacaatgtacctcaattggaagaattctcgatcagctgaccctttgccttggcgcccctgtggttcttccggggcttttggagctgttgaatcactatctgatcggttctgtatccattttgacatgaacatatctctgtctgttaatgatcttcttgcatgctgtggctttctatgtggagatggttgtgatggagggtatccaatctc

SEQ ID NO: 1341 - DNA, 650 bp, Gossypium hirsutum
  Clone ID: GOSHI-09MAY01-C1430_3
tctttcgccccgcgtccgcccactcggggcacgtctgggggtggcaactacaaaggatggtctcaactcaagatactaccctccctttaatccccacttctcgttgctcctttcttcaacctcggaaatgaagaaaatggcgactcctctgctttttttcgctacctttttggtacttcgcgccacggggcacccaaaggtgattgctgtgggacaaccttctgaggtcaagcttaactctcgaatccttcaggattcaattgtcaaactagtaaatgaaaatcccaaggctggatggaaagctgccctgaatcctagattttctaattacactgttggtgagtttaagcacattcttggagtcaaaccaacaccgaagaaggaacttctgggcattcctattataaggcatgacaaatccttaaagatgccggccaattttgatgctagaacagcttggccacaatgtagcacaattggaagaattcttgatcagggtcactgtggttcttgctgggctcttggtgctgtagaatcactatctgatcggttctgtatccattttggcatgaatatatctttgtctgttaatgatcttctcgcgtgctgtggctttttatgtggaagtggctgtgatgggggggttccaa

SEQ ID NO: 1342 - DNA, 796 bp, Gossypium hirsutum
  Clone ID: GOSHI-09MAY01-C1430_2
cttaaatcattgttcttcagaacttttgccaattatctgatctatttctccctcctcctctccctttaacttcatctaataacaactacaagggaaggtctcaactcaagatacaaccctccctttaatccccgcttctctttcctttgccctttcccttctgtcctcggaaacgaaggttatggcgtctcccccgttctttttcgctacctttctgttgcttctcgccacggttcacccaaaggtgattgctgtggggcaaccttctgacgtcaagcttaactctcggatccttcaggattcaattgtcaaacgagtaaatgaaaaccccaaggccggatgggaagctgccctgaatcctagattttctaattacaccgttggtgagtttaagcaccttcttggagtcaaaccaacaccgaagaaggaacttttgggcgttcctattttaactcatgacaaatccttgaagttgccagcttcttttgatgctagaacagcttggccacaatgtacctcaattggaagaattctcgatcagggtcactgtggttcttgctgggcttttggagctgttgaatcactatctgatcggttctgtatccattttgacatgaacatatctctgtctgttaatgatcttcttgcatgctgtggctttctatgtggagatggttgtgatggagggtatccaatctctgcatggagatactttgtacgcagtggtgttgtcactgaagagtgtgatccatactttgatgatattggttgttctcaccctggttgctagcctgca

SEQ ID NO: 1343 - DNA, 773 bp, Gossypium hirsutum
  Clone ID: GOSHI-09MAY01-C1430_1
ggaggtctcaactcaaaaacaaccctccctttaatccccgcttcgcggtcttttgccctttcctctgtccttggaaacgaaggttatggcttctccctcgttcttttttgctacctttctgttgcttctctctacggttcacccaaaggtgattgctgtggagcaactttcagacgtcaagcttaactctcggatccttcaggattcaattgtaaaacaagtaaataaaaaccccaaggctggatgggaagctgcactgaatcctagattttctaattacaccattggtgagtttaagcaccttcttggagtaaaaccaacacctaagaaagaacttttgggcgttcctattttaactcatgacaaatccttgaagttgccaacttcttttgatgctagaacagcttggccacaatgtacctcaattggaagaattctcgatcagggtcactgtggttcttgctgggcttttggagctgttgaatcactatctgatcggttctgtatccattttgacatgaacatatctctgtctgttaatgatcttcttgcgtgctgtggctttttatgtggaagtggttgtgatgggggggctccaatctctgcttggcgattctttgtacgcagaggtgttgtcgtaaccggatagcctttcaccaaaaccttgttcgagagttacagatcaggaattgtctaaaagcttattctaaagaagacatctaacggcttaccatatcatagtttcatgaggaatgtatcggggtccattaagt

SEQ ID NO: 1344 - DNA, 553 bp, Gossypium hirsutum
  Clone ID: LIB3829-021-Q6-K6-A6
ttcgggcgcgtggggttacttcttgccacggtcaccaaggtatgtggggcaccttctgggtcaactaacttgaatcttagatcaatgcaaacagtatgaaaaccccaagccggatggaaagctgccctgaatcctagattttctaattacactggtggggagtttaagcacattcttggagtcaaaccaacaccgaagaaggaacttctgggcattcctattataaggcatggcaaatccttaaagatgcctgccaattttgatgctagaacagcttggccacaatgtagcacaattggaagaattcttgatcagggtcactgtggttcttgctgggcttttggtgctgttgaatcactatctgatcggttctgtatccattttggcatgaatatatctttgtctgttaatgatcttctcgcgtgctgtggctttttatgtggaagtggttgtgatgggggggttccaatatctgcttggcgatattttgtgcgctccggtgttgtctctgaggagtgtgatccgtactttgatgatattggctgttctcacc

SEQ ID NO: 1345 - DNA, 580 bp, Gossypium hirsutum
  unsure (1)..(580): unsure at all n locations
  Clone ID: LIB3825-027-Q6-K6-A8
ctccggtcctggaactaagttatggcttctccctcgttcttttttgctacctttctgttgcttctctctcggttcacccaagcccccaagttgcaatttggacttagttgattgctgtggagcaactttcagacgtcaagcttaactctcggatccttcaggattcaattgtaaaacaagtaaatcaaaaccccaaggctggatgggaagctgcactgaatcctagattttctaattacaccattggtgagtttaagcaccttcttggagtaaaaccaacacctaagaaagaacttctgggcgttcctattttaagtcatgacaaatccttgaaattgccaacttcttttgatgctagagcagcttggccacaatgtacctcaattggaagaattctcggtgagttatgtgctggtttattaaattttgccaactttaaacaaattggactgatgatttccttctttttatgatgaaatcaattcttgggtcaatttcaatattaaagatcaggtaactcattttcatttctctcaatttttatatctggntcttgtataattaaattctgagtatgctt

SEQ ID NO: 1346 - DNA, 336 bp, Gossypium hirsutum
  Clone ID: LIB3272-051-P1-K1-D1
gggacatccgataaaattggaacgatacagagaagattagcatggcccctgcgcaaggatgacacgcacaaatcgagaaatggtccaaatttttgtaactcattttcatttctctcaatttttatatctggttcttgcataattaaattctgagtatgcttagctgagcttatgctttggggtcactgtggttcttgctgggcttttggagctgttgaatcactatctgatcgggtctgtatccattttgacatgaacatatctctgtctgttaatgatcttcttgcatgctggggctttctatgtggagatcgttgtgatggagggtattcaatc

SEQ ID NO: 1347 - DNA, 913 bp, Gossypium hirsutum
  Clone ID: GOSHI-09MAY01-C1420_1
caggcctctgccttattgctgttcaactcctcagatcgcctgagctattccgagatcatgacacaattgaacttaacggatgctgacgtaattagacttttgcattcgttatcttgtgcgaagtataaaatccttaacaaggagccaagcacaaaaaccatctcttccactgatcattttgaattcaactccaagtttactgataaaatgaggaggatcaagattcctcttccccctctggatgagaagaagaaagtaatcgaagatgttgacaaggatcgacgatatgccattgatgcctcaattgtacgtatcatgaagagtcggaaagttctgggtcaccagcagttggttatggagtgtgttgagcaattgggccgcatgttcaagccggatttcaaggccattaaaaagcgaatagaagacctgattactcgagactatcttgagagggacaaagataaccccaatacattccggtatttggcatgataacctagtcattatcccgtaatgaagcggtgactgttgccgctgcaaataactcgaagcggctggatatgatcggttcgtgacgaaagttgcatacacataatgagatgctgctgagattcttgtacagtaggagccaggtatggccaagttctataaactgtgaaattcgaatctgaatctgaatcaaaaccgaaatcggaatcaatctcatatcatcgtggtttcttattaccccaaaatcccattttatgacttagtttatgcttatttgttttgcctcctctgttcccccaaccaagccaagaaaaaggaaaaaagagtgtattttagtaaactcaaagctccatcatgaatgtaagtttaaaatagtttggttttttcccccgattatgttgaatgcagccagctgttttatgtt

SEQ ID NO: 1348 - DNA, 532 bp, Gossypium hirsutum
  Clone ID: GOSHI-09MAY01-C1770_1
agagacagagccttgcgagaatgggtgctggaggaaacttctgaaaacatgcataggagttttggttctggatatccaggagatcctgaaacaaaggcttggctggcacatcataaacactcaatctttggattcccaacactagtccgcttcagttggggtacatgcacttcatattacaaggatatggttgaagtgttatgggaatctgataaggtggatgaagatgttggttatggcagcagtcggaagcaattgaaactaagtaatgttggtttcggcaaggcggcgaagcggaaaattgaagaaatagaatcaagtggtaaagggagatgtaagttcttccattctcgtaagcttgagcaactcactcatttctaggaatgcactttgattccatgacttggtttcttggttgaatccctttgatttactttgggatttattatatatgaatttctagatggcactcctcggccatgcatcttcttcttccgtatgcgccatggattcctaattacgattgtagaac

SEQ ID NO: 1349 - DNA, 817 bp, Gossypium hirsutum
  Clone ID: GOSHI-09MAY01-C1720_1
gttctacttggcttcagaggactggtcatcctattatcaatttcaatcaaacaggtccattacctgaaccatttattaagggcctaaccacagcaagtttgcaagggcgggctcagattgtccctgacattgaaagccctggaaatctggttttttatttggatggagcccacagtcctgaaagcatggaagcgtgtgcaaggtggttttctctttgcactagggatgataatcacctatctaacctgaattatcagccgcagcagcatatggatgaaggatctaagaaggatgccccccagattctgctattcaattgtatgtcagtgcgagatcctcagttgcttctgcctcgcttgatgaggacatgtgccagccatggtgtctgcttccagaaggctctctttgtgccaaacatatccgtgtatcacaaggttggatcccaggctttacccacagttgatcctcaagttgatttgtcatggcaatttggtcttcaaagagcatgggaaagccttatgcagagtgataaaggagtgaagcccagtaacacggaccaagcttgtgaagaagtgaaagatgatacaggaatgagggttacgagttttaaaaacagttctgttttttcttctctaccatcagctatcaaatggctcagggatactgcccagaaggatcgatttgtttgttttcaggtccttgtaactggttccttgcatctcattggtgatgtcttgagattaatcaagaaatgaggccaaatctccatatgcgctcgtagttcttcctacatcgttggtgtaacagacaccggttc

SEQ ID NO: 1350 - DNA, 550 bp, Gossypium hirsutum
  unsure (1)..(550): unsure at all n locations
  Clone ID: LIB3583-038-P1-K1-F4
aaaacccgaaagctaaaatcctagctttcaaagaacaagctttgctctctcttggtttgggatgatgaatatggctaatgaacctctctatttataagagagttcaaggacataattgtccaaaactttggcaaagatttgtggttgaaaatggacaccaacaaccatncactaatncactaccaccaacaacccactaccaacaacaacaatccactacccaatttaagccatttcttaacaccaaatacagtagtctcaaccccagtaacaagctcatcaccgaacaacattcaaaaccaagcacgaggcagtctaaaaccaggcaccatagcagccatagctgttgcagacttagctggtatatccattctcggcatgatcattctttacgtttatcaactcaagaagcttaaagatcatctcgacgatccaagcaccgcagcaacaagctgcaacgtcttaaaacaaccgaaagtcattgtctcgaaaacaaatgtggaattaagaacaaaaatgccaccatcaccaccatcatcatcatcatcat

SEQ ID NO: 1351 - DNA, 540 bp, Gossypium hirsutum
  Clone ID: LIB3582-025-P1-K1-F10
ggctaatgaacctctctatttataagagagttcaaggacataattgtccaaaactttggcaaagatttgtggttgaaaatggacaccaacaaccatccactaatccactaccaccaacaacccactaccaacaacaacaatccactaccaattttaagccatttcttaacaccttctctacaaatcagaaaaagaaacagattcagaggatccctttactgaagacctttactaggtttgaatactttcccaaatttcccattcatgatcatcgaatatgagatagaagaaatacaacacataatagtttccacccctggcctagcaaaccccatttgttccatttcacccttaaaaattctcattctacccgatcatatattttgctcatatctagtttcagtgccataaaccctttttttttccttattctcttttgttgaaaagtatgaaaaatctcataggccaatagcacattatcagatatcaatcgccccagcacaaaggcacttcgggcactgtcaatataatcctccaaaa

SEQ ID NO: 1352 - DNA, 725 bp, Gossypium hirsutum
  Clone ID: GOSHI-09MAY01-C1640_1
aaattctagaagtcctcctaccaggtctcaaaaacacaatgagacaggtcctctcttaggttgaaatgtctacctaaaaaggccacattttctcctttggtttcttttttttgttgttgttgtcttactcagaaaaactctggtttatcaaaagatataataacaatggtgaagcgtcagccttttctaaaggagccttctctagagcaacgactggaagaatcaaaaactatattagccaaatacccagatcgaattcctgtgatcattgaaaggtattcaaggacagacctcccagttatagagaagaataagatcctggttcctcgagacatgttggtgggtcagttcattcacattttaagtagcaggctacatttgagtcctggaaaagctctctttgtttttgtgcacaatacattacctcaaacagcaagtctcatggggtgtgtctataattctttcaaagatgatgatgggtttctctacatgtgttacagcactgagaaaacttttggctaaactctcctctgcatctttaatcttcaatgtaaaacattggcaaaatatatatacatatctatgtatgtattgttggaattgtttatagctcaattcaccctattgatctgtaaatgatgtaactatatttaactaaaaaaatgtttatatgacttgtatttgcatatttatgtttccttttttatgtaacatattggcactgc

SEQ ID NO: 1353 - DNA, 532 bp, Gossypium hirsutum
  Clone ID: LIB3582-025-P1-K1-E10
cccacgcgtccgctttttttttttttttttttttttttggtgttgttgtcttactcagaaaaaactctgggttatcaaaagatataataacaatggtgaagcgtcagccttttctaaaggagcaatcactaggtaaatattttgagtacctttttctttacctttagattatgattatgattatggttttttgtttttggttttgttttggttttgtttttgcagagcaacgactggaagaatcaaaaactatattagccaaatacccagatcgaattcctgtgatcattgaaagggattcaaggacagacctcccagttatagagaagaataagatcctggttcctcgagacatgttggtgggtcagttcattcacattttaagtagcaggctacatttgagtcctggaaaagctctctttgtttttgtgcacaatacattacctcaaacagcaagtctcatggggtgtgtctataattctttcaaagatgatgatgggtttctttacatgtgttacagcactgagaaaac

SEQ ID NO: 1354 - DNA, 681 bp, Gossypium hirsutum
  Clone ID: GOSHI-09MAY01-C1610_1
gccattcatttcctcacccaaggttttttttttttgagatcatcattggatacaacagatacctcgaaaaagaagtggaaaagttcatagaaaatttgaaatgggatcatcttcagggcaaagtagtggaagttatgatctttcattcaagatcttgttgatcggagactctggtgtcggcaagagtagtttgcttgctcgcttccgttcagcttctgcgcaagatccagctcccaccattggtgtggattttaagatcaagctcttaactgttggtggcaagagattgaagcttaccatttgggatactgccggccaggaaaggttccgaaccttaacaagctcttactacaggggcgcccatgggatcattcttgcttatgatgtaacacggagagagaccttcacaaatttgtctgatgtttgggccaaagaagtggagctctactctaccaatcaggactgtgtcaagatccttgtcggaaataaagttgaccgtgattccgaaagggctgtaactagagaagaaggcgttgcacttgcaaaagagcttggatgtacgttcattgaatgcagtgctaaaacaggacaaaacgtccaacaatgctttgaggacctttcactcaagataatggaagttcgtagtcttttggaaaagggtcgactggtggaaaggacaca

SEQ ID NO: 1355 - DNA, 512 bp, Gossypium hirsutum
  Clone ID: uC-gsronu33B179g07b1
tgtttccacgggatcatacttgtttatgatgtaacactgagagaaacattcacaaatttgtccgatctttgggccaaagaagtggagctctattctaccaatcaagactgtgtcaagatgcttgtcggaaataaagttgatcgtgtaagtctaatgttctctttccaattcatatctgcattttatttgacatatttatagattatatttgaaacccatatatcataattgcttcttctttttaaaattttagtcggactcgaatatcaatatcgaatataggtatatgttgaatatctaaatgttcaacaattagggttgatgtccgaagtattcataggccaatctttgttttttgatagaatgcctgtaactattcgtaatccctcttcaactcttaaataagaggataatacgcttcaatgcattcaaatcaagtccttctgtactgacaactgagctaaaacttaaccgacttcttcaaagatgttgaattgaatattttttaaaaa

SEQ ID NO: 1356 - DNA, 537 bp, Gossypium hirsutum
  Clone ID: GOSHI-09MAY01-C1630_1
caacatcgcttatcactctttgaggaaccaaacaagctagttattaaaagtacgctgtgaatcgcccaaacatgagccgacatcccatagtgaaatgggctcagagattggatgacgtcttcataactattgagcttcctgatgctcaggacgtgaagcttaaactagatcccgaaggaaaattcttcttctctgccaaaagtggagcggacaaaatcccctatgaagttgatttggatctgcatgacaaagttgacgttgatggaagcaaggctagtgttggaaatagaaatatctgttaccttgtgaaaaaggccgagagcaagtggtggagcagattactgaagcaggaagggagacctcctgtgttcttgaaagttgattgggatcgatgggttgatgaagatgaggacgatgtggatactaagcccgcacctgatatggactttggggacttcgacttttctaagatgaacatgggtggtggtgaaggctttggtgcggttgaaggtgaagacgatgatgacagtgacactg

SEQ ID NO: 1357 - DNA, 1095 bp, Gossypium hirsutum
  Clone ID: GOSHI-09MAY01-C1180_1
tccaaatccacccccacccaaaatttcatggagattttgaggttgattttttattaggataaagttcagcgagatttgaatagttagagcttactcttttggttttgatctaattaattgagaatgtgaagttttcataggtttctccggaagaaaaaaaaagtgtttattttccatggaagagaaaaaaggctataaaggaaatttagtagtttcttcaaatcctaaagcacttcccaggagtagttttaggcagataactgcgataaggaatcatagaaatgttaagggtgcagcaggtcatgtagcgatatttttgctcaaagttgctgcattagaaacagttaggcgggtctcaaaggccaagtgtccctttttatggcgcggttttcaggctctgcaagttatttgctatccgccctttaactttgtccagaaatgggttccctttaagggtttggttaaaggaatgcagatgttgtcgaggccgctattggtgctttcaatcgcgacatcgctttctgatcaagaagagttagttggcgaagcctcggtgcgtagaagtggtcctctggtgaatacagaatcgcattccgaggaaccctctttgcagccggccttggatgcaagtaatcatgaagcttcccaaaatctggagtgtgaaagctggttgggtaaactccacaaggagctggaaaatcaaggaattagtttaccagagagcagaccttgacatagtagtgtttatgcagaatcaattatgaagatctacgtagattttatacagctgcaaatggtgactttgtagttttcctatcatcgattaaaaagacaatcaaatggagggagacatatagaattctttctccagaagagcttgagacatgggcgaacatggtattctggcatggatatgatctcatgcaccgaccttgtctcatagtacggcttgggctagcttgctcctgcttgccatctcatgacaggcctcgttttgctcaggcagtcagtatgtttttagcccctgtagtgctgtttacgtttccattttgctgccatttgaaatttaatgagacttcctctgttattggtttc

SEQ ID NO: 1358 - DNA, 472 bp, Gossypium hirsutum
  Clone ID: LIB3585-020-P1-K1-G8
cccacgcgtccggaaatgggttccctttaagggtttggttaaaggaatgcagatgttgtcgaggccgctattggtgctttcaatcgcgacatcgctttctgatcaagaagagttagttggcgaagcctcggtgcgtagaagtggtcctctggtgaatacagaatcgcattccgaggaaccctctttgcagacggccttggatgcaagtaatcatgaagcttcccaaaatctggagtgtgaaagctggttggataaactccacaatgagctggaaaatcaaggaattagtttaccagagagaatcaattatgaagatctacgtagattttatacagctgcaaatggtgactttgtagttttcctatcatcaattaaaaagacaatcaaatggagggagacatatagaattctttctccagaagagcttgagacatgggcgaacatggtattctggcatggatatgatctcatg

SEQ ID NO: 1359 - DNA, 1542 bp, Gossypium hirsutum
  Clone ID: GOSHI-09MAY01-C1150_1
caacaacagcattagccttccactaatatcttccatccctctttgagttctccaacacatcaaatcatggtgttatctaagacagcatctgaaactgatgtctcagttcactccacttttgcctctcgttatgtccgaacctcactgcccaggttcaaaatgccagaaaactccataccaaaagaggctgcttatcagatcatcaatgatgaactgatgcttgatggcaacccaaggttgaaccttgcctcttttgttactacatggatggagcctgaatgtgataagcttataatggactccattaacaagaactacgttgacatggatgaataccctgtcaccactgagcttcagaatcgttgtgtgaacatgatagcacatcttttcaacgcaccattgggagagtcagaggcagcagttggtgtgggaacagttgggtcatcggaggcaatcatgttggctggccttgctttcaagagaaaatggcaaaacaagcgtaaggctgaaggcaaaccttatgacaagcccaatatcgtgactggagccaatgttcaggtttgctgggagaaatttgcaaggtactttgaagtggagttgaaagaagtgaagcttagagaagggtactatgtgatggatcctgtcaaagcagtggaaatggttgatgaaaacaccatctgtgtagctgcaatcttgggttcaaccctcaatggagaatttgaagatgtcaagcttctaaacgatcttttaattaaaaagaacaaagaaactggatgggataccccaattcatgttgatgcagctagtggtggatttattgcgccatttttgtacccagaacttgagtgggactttaggctcccccttgtgaagagtattaatgttagtgggcataaatatggtcttgtttatgctggaattggttgggttatctggaggagcaaagaaaacttgcctgaagaactcattttccacattaactatcttggagctgatcaaccaactttcactctcaatttctctaaaggttctagccaagtcattgctcagtactaccaactaatccgtttgggatatgagggatacagaaatgtgatggagaactgtcatgaaaacgccatagtccttaaagaaggattggagaaaacagggcgttttaacatcgtgtcaaaggacaatggggttccactggtggccttctccctcaaagacaacaagcgccatgacgagttcgagatatcggagatgttgcgtcgcttcggttggatcgtgccagcctacaccatgccagccgatgcacagcacatcactgtgctccgtgttgtgatcagggaggacttctcccgcaccttagccgagcgtctcgtcattgacatccaaaaagtgctccatgagctcgataccccccccccggccccgcttccctttttccttttaatttttagtttttgtttctcgccatgtttgttttccccatttttttcaagcttcagcatgttgaggaaactagcttaaagactaccaatgaatgcatttgaatcg

SEQ ID NO: 1360 - DNA, 729 bp, Gossypium hirsutum
  Clone ID: GOSHI-09MAY01-C1170_2
ctatcctggttgtactaacatggcatattcaaaagctattcaagatggtgtagatgttcttgactgtcctgttcaaatgacaaaggatggaatacctatttgcttgggctctataaatcttatagagagcaccgacattgtccgaacaggctttagcaatcttacaacaactgtgccagagattatgcagagcggtcgcgtgggtacctacaacctgtcatggagtgatattaaaagtttgaaacctgtaatatcaagcccacagtcacagtacaaattgtttcgaaatccaaagttccaaaatgccgggacgtacttacagttatctgaatttttaagcatggcaaacaccactagctctctaaatggtgtcttaatcagcatagaggtcggttcttgccgttctatattttcctcattgtattggtgtttatgctgtagttttattttctactcacattattggaactaatgagggatgttaggacgttaggcacagtaattatgaatggtggctattgttttattttgtgccagggtggaactgttagcatggtagcttaatcgtgagaaacatatcagattgaatcataatcttacatggtagctgtgggttatgctatatggaatgtattgacctgaatggtcagaaaaacataaaacatattttaaccagtagccggcacctttatgaactgaagtactcaatatcttgtatctgcttaccat

SEQ ID NO: 1361 - DNA, 1558 bp, Gossypium hirsutum
  Clone ID: GOSHI-09MAY01-C1170_1
atctccaactacatctacttactgttttgctcacataagataaaatgcgacatatcggaacgtaacttcttggtacataatgaataaatgtagcaagtggagaccatcctggttgttctagtatggcctatacaaatgctatgcaaaatggagtgtatgtgcttgactgtccatgttcacaccccgcgcccgggaatacctatttgcttgggctctatcaatcttatggagagcaccgacattggtccgaacacgctttagcaatcttacaacaactgtgccagagattatgcagagcagtggaatatttacctacaacctgtcatggagtgatattaaaagtttgaaacctgtaatatcaagcccacagtcacagtacaaattgtttcgaaatccaaagttccaaaatgctgggaagtacttacaattatctgaatttttaagaatggcaaacaccactagctctctaaatggtgtcttaatcagcatagagaatgctgcttaccttgcaaagcagggatttggtgtgactgatgcagtgcttaaggccttgaacgaagctggctacgataaacaaacaactcaaaaagttatgatacagtccagtagtagctctgttttaatgaaattcaagggtaaaaccaactatcagcttgtctacaagattgacgaagatattggtggtgctcaaagttcaacaattgatgacattaagagatttgctagtgctgttgtcattagcaaggactctgtgtttccagaaaattcagcattcctcgctcgtgcgacagatgttgtatcaaggctacaagctgctaatctctctgtacttgttcaaaccttcagtaatgagtttacatctcaagcatgggacttcttctctgatgcaactgttgagatcaattccttctatgcgggagccggcattaatggtgtcattacagacttcccaaagacatctgatagataccggagaaaccgatgcttgaagagaggcaacaagacacccatttacatgagtcctgtgcagcctggcagccttttgcaactagtcacaactgattacttgccaccagctgaagctccaaaaccctacctgactgagtcagatgttgtcgagcctcctttgcctcccgtcgccaaaacaacctcgacttctactccatcgggcactgtagcagcggccccagcaccaaacggacagcctaaagttgctgcctctatcattgtaccacttatggctgtgcttcttgccatgtattactgttttgaaatctgataagagtcggccttgctctcaattttttataaatcttgttgcttggatatcgagtaggttgaaggttttgctgcaggagtgcatgcccgtggcaaagaccagtttttcttagttgtctcccctccaaacagcagtgttaattccttttaccttataattttgtaggtatgttcattcttctcattgtcttcctttttctaaaagaacaattcttgagagctacatatctttaatggatgcatttcctatttgatttgtgttttaaaaagaagaattcgc

SEQ ID NO: 1362 - DNA, 406 bp, Gossypium hirsutum
  Clone ID: LIB3147-058-Q1-K1-F6
cccacgcgtccggaagctccaaaaccctacctgactgagtcagatgttgttgagcctcctttgcctcccgttgccaaaacaacctcgatttctactccatctggcactgtagcagcagccccagcaccaaacggacagcctaaagttgctgcctctatcattgtaccacttatggctatgcttcttgccatgtattaccgttttgaaatctgataagagtcggccttgctctcaattttttataaatcttattgctttggatatcgagtaggttgaaggttttgctgcaggagtgcagtgcccgcggcaaagaccagtttttcttagttgtcttcccctttttctaaaagcacagttcttgagagctacatatctttaatggatgcattccctatttgatttgggt

SEQ ID NO: 1363 - DNA, 364 bp, Gossypium hirsutum
  Clone ID: uC-gsflmaxxa047a08b1
cttgttttttattgtatcgaattgttttctttttgatggtggttttctttcttttgggtgggattagattctagagtctttaatcctttcacaaaatagaaacataacatgttgaaaataaaagttgcctaagcatagattgaagtttgtacattatattgagtaggttgaaggttttgctgcaggagtgcagtgcccgtggcaaagaccagtttttcttagttgtctcccctccaaacagcagtgttaattccttttaccttataattttgtaggtatgttcattcttctcattgtcttcctttttctaaaagaacaattcttgagagctacatatctttaatggatgcattttctatttgat

SEQ ID NO: 1364 - DNA, 1137 bp, Gossypium hirsutum
  Clone ID: GOSHI-09MAY01-C1160_1
aatttccagcgcgggttttcatcaaccctttgtcgtctccgtacaagaccttgcttagaagaaaaatgtcaaccttccctgactctttcactcaactcgccgacgactccttagactcttttgactctgttccacaccaggatgaagacggtgccggctacgccggatacgacccttctcagcaattcgactctttcgccgaccactcggatcatgccaagggctccactgatgatgtgtttgcatcagattcatacacaaatggggtaggttttggccaagattttggcggatcggacggcccggttttgcctccgccggcggagatagagcctgaggaaggtgttgctctcagggaatggagaagggagaatgcgattcggttggaggagaaggacaagagggagaaggagttattgagccaaataattgaggaagctgatcaatacaaagttgagttttataagaaaagggaggtgacctgtgaaaacaacaaggccaataacagagacaaagagaagatatttgtagccaatcatgagaaattccatgccgaagctgataagaattactggaaagcaatcgcggagctcattcctaatgaagtgccaaccatagagaaaagaagaaaaaaggaggagaagaagcctgccattgttgttgtccaaggtcctaagcctgggaaacctactgactgttcgaggatgagacagatactagtgaaactaaagcacaacacaccttctcacctgaagcactctccgccaccaccaccagcagctgctgctgcaaaagatcaagatgcaaaaactggtaatacttcttctgtcccagctgctcttccagtcacaagcacccctgaagctgtagtagctgcttagatagttttcattttaacttatcagcttctgtaataaaaaaaaaaaagtatctataagactatatcttgtgagtagactgatgtttagctggtcgtcatcctcagcagtagtagggtacatagttggttttatgaggttataaattaagagtttgtctatgcacgaaactttgtcgtttggatggaatgtagtaataatgtacgccgctattttactcaaattcggatatatctgatgcgagtatatgtgtggaatg

SEQ ID NO: 1365 - DNA, 365 bp, Gossypium hirsutum
  Clone ID: LIB3585-020-P1-K1-E8
cggacgcgtgggttgtgactggaagagcagctgggacagaagaagtattaccagtttttgcatcttgatcttttgcagcagcagctgcaggtggtggcggcggagaatgcaattcggttggaggagaaggagaagagggagaaggagttattgagccaaataattgaggaagctgatcaatacaaagttgagttttataagaaaagggaggtgacctgtgaaaataacaaggccaataacagagacaaagagaagatatttgtagccaatcatgagaaattccatgccgaagctgataagcattactggaaagcaatcgcggagctgattcctaatgaagtgccaaccatagagaaaaggggaaa

SEQ ID NO: 1366 - DNA, 1979 bp, Gossypium hirsutum
  Clone ID: GOSHI-09MAY01-C1110_2
tgctaatgtcattgcaaggatcccaaatggaaacagatgacccgacgacaagttacatgctgcaagcatgggccagactctgcaagtgtttgggacaagacttcctcccttacatgagtgttgtcatgcctccccttcttcagtctgctcagcttaagccagatgtaactattacatctgcagattcagataatgacatagaggactctgatgatgaaagtatggaaaccattacgcttggggacaaaagaattgggatcaagacaagcgttctggaggagaaggctacagcatgtaacatgctttgttgctatgccgatgagttgaaggaagggttttttccttggattgatcaggttgccccgactctagttcctcttcttaaattttatttccacgaagaagttagaaaagctgctgtttcagctatgccggagttattgcgttctgcaaaattagctgtggagaagggaatggctcaagggcgtaatgagacctatgtaaagcaattgtctgattacattattccggctctagtggaggcattgcataaggaacctgatacggaaatatgtgcaagcatgttagatgcattgaatgaatgcgtacagatctctggtcctctgctagatgaaagtcaagttagatctattgtggatgagataaaacaagtaatcacagctagtgctagcagaaaaagtgagagagctgaaagagccaaagctgaagactttgatgctgaggagggagagttgattaaagaggaaaatgaacaagaggaagaagtttttgaccaagtgggtgaaatcttgggaactttgatcaaaacatttaaagcctctttcctgcctttctttgatgagctatcttcatatcttacacctatgtggggcaaagataagacacctgaagaaagaagaattgctatttgtatttttgacgatgttgccgagcagtgtcgtgaggcagctttaaaatattatgacacatatcttcctttcatattggaggcttgcaatgatgagaatccggatgtgcgacaggcagcggtgtatggactgggtgtttgtacagaatttggtggacctgtatttaagccgcttgtaggagaggctctatcaaggttaaatgctgtaatctggcatcccaatgctttgcaacctgaaaatgtaatggcatatgataatgctgtttctgctttaggaaaaatatgcctgttccatcgtgacagtattgatgcagctcagattgttcctgcatggttaaactgcttgccgataaagggtgatctgattgaagccaaagttgttcatgaacaactttgttcaatggttgagaggtctgacagtgaagttttgggtcccaaccatcagttccttcctaagattgttgcagtgtttgctgaggttctatgtggtaaggatttagccacagaacaaaccgcaagtaggatggtgaatctactgaggcaacttcaacagactttaccaccagcagcattggcttcaactttatcatctttgcagccgcaacaacagcttgctttacaatccatcctctcctcctaggtaacattggctcgatactcatccgccttgtgcatcaatgcatatatttattttatataccaaattcttttcacggagaaggttcccttcgtttttgcatcatgttctttttactccctcggggattgaaatgaactttcctccctagatatataaaattttatagaatgtgtatattataaaagtatctatttatggaacaagaagcgagagtggtgattcgtgtggttggtgagcatattttttgtgtcaaaaaagtgcattgaggtttgagaagtcaaatgttcttgtagcagttttggtctaatgtgtcttcgtttcaaatttttcatagaatttggattgtaattctttcattatgcttgcaatttggatcataaaaaagaacaataatattatgtgttgtcggtt

SEQ ID NO: 1367 - DNA, 1167 bp, Gossypium hirsutum
  Clone ID: GOSHI-09MAY01-C1110_1
gcaatagcgatgagattggtgctcgatattgaggatgacgcagcgtgtcacactgcagaagttgaggatgatgatgctggagaaactagcaattacgctgtgggacaggaatgttcggatcgtctagcaatttccttaggtggaaatactattgttcctgttgcatctgagcaattttcaacttatttagctgctcctgagtggcaaaagcatcatgctgcgttgattgcccttgcacagattgccgagggttgttccaaggttatggttaaaaatctggaacaagtggtttctatggttttgaactcctttaaccattctcatccccgtgtgaggtgggcagctattaatgcaatcgggcaattgtctaccgacttgggtcctgttttgcagaaccaatatcaccaaagagtattgcctgccttagcagcggctatggatgacttccataatcctagagtacaggcccatgctgcttcagctgtgctcaacttcagtgagaattgcactccagaaattttaacaccttacttggatggaatagttagcaaattgcttgtacttttacagaatgggaaacaaatggtgcaagaaggggccttgactgcattggcatcagttgctgactcatctcaggagcacttccaaaaatactatgatgcagttatgccttacctgaaagctatcttggtgaatgcaactgacaaatctaatcgtatgcttcgtgccaaatccatggagtgtattagtcttgttggaatggctgttggaaaggagaagttcagagatgatgctaagcaggttatggaagtgcttatgtcattgcaaggatcccaaatggaaacagatgaccccacaacaagttacatgctgcaagcatgggccagactctgcaagtgtttgggacaagacttcctcccttacatgactgttgtcatgcctccccttctccagtctgctcaactgaagccagatgtgactattacatctgcagattcagataatgacatcgaggactctgacgatgaaagtgtggagaccattaccctcgaagcgaaaaagagaatatactctgtttgtacaacgaggtatactgggtttcgtgctttattctctgtggatttgattgatgaacttaaaaagttaccttgtgtacgctgggtttta

SEQ ID NO: 1368 - DNA, 666 bp, Gossypium hirsutum
  Clone ID: AW187425.1
ataaagggtgatctgataaaagccaaagttgttcatgaacaactttgttcaatggtaaagaggtcagacagtgaaattttgggtcccaaccatcagtatcttcctaagatagttgcagtgtttgctgaggttctatgtggtaaggatctacctacagagcaaactgcaagtaggatggtgaatttactgaggcagcttcagcaaactttgccagcggcaacattggcctcaacttggtcgtccttgcagccacaacaacagcttgccttgcagtccatgctctcctcatagtatatcggccagacattgacaggcatctatctttctggttttgaaggaatgcaatatccagtccatgtgttgaaagcatatttattaccaattctttttcctgataaggttcccattgtttatgcatgatgtcttactcgcaggcaggggatactttgaatgattgtgaataagtcttcagaccggttgaaatgaatctttacctggtacgatgtgtatattacaagtgtctatttttaacacggggtattgagtctgggaaacaaaataatgtcattttatggtttgcgaacatttttgcttcttttatgggtaattgcctgatgttttacggttgtcacttgtaccacctttggtgttcaaatgtttctacct

SEQ ID NO: 1369 - DNA, 278 bp, Gossypium hirsutum
  unsure (1)..(278): unsure at all n locations
  Clone ID: LIB3825-024-Q6-K6-E7
ttattttaaagatgcctcacgacactgttcggcaacatcatcaaaaatattatgacacatatcttcctttcatattggaggcttgcaatgatgagaatccagatgtgcgacaggcagcagtatatgggcttggtgtttgtgcagaatttggtggacctgtatttaagccacttgttggagaggctttatcaaggttaaatgctgtaattcaacatcctnaatgcttcgcaacctgaaatgttatggcatatgaataatgctgttctgctttgggaaaa

SEQ ID NO: 1370 - DNA, 463 bp, Gossypium hirsutum
  Clone ID: GOSHI-09MAY01-C1130_1
ctactcaagagctcatagagaaacttgtgctactgtgaatgtaaatgatggcacggatgtttgttcttctgtagagaatggagatctcgagtctgctatggtaaatcgtaaatcaaatgccatgggacgaaagaggaagagagaactggaggaaacatgtcaaaaggttggcagtgatggctctattagaagcccatgcgaagggctgaggccaagggctcggaaagatgcactccagcagttttgatgcagacaaagcatcctcagaggggctgcagacaaaagagacgaggaaaccttcaactcatgcccataggaagataatcatcgaaaaagggtctcatggatgtgacctggaaggctgccatatgagtttcaagacatatgaagagttgtggttgcacaaacgccatcggtgtccgtacgaaggcttgggaaagaagtttcgttcccacaaaatgca

SEQ ID NO: 1371 - DNA, 565 bp, Gossypium hirsutum
  Clone ID: GOSHI-09MAY01-C1120_2
ggctatgagtgagaagagaactgaggtgatggatcacaatcatcccccctctgatattttgaagcttgatcaaagtagttctgctggtgatctcaaattttatggcagcactatgcctgctccttatgatagtcttcaccagcatgacacatttgatgctagtcatccactgcctgcatctgttggtagttttctccctcagcatctgcagcctgttcagatgcatggatctaggtggtcagtagaagaagctacttctctggctaatagcttaaaaggtttgaaaatgttggagaatgggcatttaactaagagtcagatggaagataatttaggcttttctcatcctgctgctcattctgttgctatccaactgcccatcaatgttcatgctagtggtatgtactgcagtcggacaaaaatttcagaaactgtgatgccatccagaattaatgctattgtgtcatctgaagttgctggtgatgatttggctgctagaactacctcagcttcactagttggaatgcagaagaatcctattagccgcccggtcaggcatcttggt

SEQ ID NO: 1372 - DNA, 1150 bp, Gossypium hirsutum
  Clone ID: GOSHI-09MAY01-C1120_1
ggctctagctaatgtcattagggttgaccaaaaaatgtctgttttgattcaaaagcaaagaaatttcttattggtgctgagccctctgaagatgtcacattcagctcttctacctcactggcaacaaatggtgtggggcatgaaaccccttctgagaagtcagttaatattggaaatgtgcagccaatcccgcaacctagaatggttgaggaagaggatgatgatgatgaagtgattgttttccagccagctgtgagcgagaagagaactgaagtggttggtccaaactggcccccctctgaggctttgaagcatgatcgaagtagcgctccaggtgatgtcaaattttatggcagtaccatgtctggtcctcctgctagtcttcatcagcataatacatttgatgttagttctccactgcctgtatcttttggtagcattggccctaagcttcagcaacctgttcgtatgcaatcgtctggttggtcagtggaagaagctacttctctgcccacgcgcccgaaaggtttgacgatgctggagaatgggcatttaactaagcgtcggttgcaagataatgcaggcctgtctcatcctgctgctcgttcagttgctatccaacagcccatcaatgttcatgctagtggtatgtactgcagtcggacaaaaatttcagaaactgtgatgccatccagaattaatgctattgtgtcatctgaagttactggtgatgatttggctgctagaactacctcatcttcactagttggaatgcagaagaatcctattagccgcccggtcaggcatcttggtccgccaccaggttttagccctgttcctctaaaggcgctgaatgaatctgtttctgctgtagaattgaggaaccctccgatggatgattatagttggttggatggacatcagttggcatcatcattagaaggctctacgcgtgagagttctctctattatgcatctcatgctgatccccaacatgtaaataacagaagcaatggcttcactggaacggtaagctttcctttccctggaaagcaagctcctgcagtgcagtttcatatggagaaggataaaggctggcaggactaccatactcttgagcatcatcatgaacagaaatcgcatcaacagc

SEQ ID NO: 1373 - DNA, 513 bp, Gossypium hirsutum
  Clone ID: GOSHI-09MAY01-C1090_5
gcggcggtcgccgaaaaacccgggccccaagcccggccggaccggccgtcggtccaaatcttggtggtagtaccaaattttcaaatgagatgaggaagaaatcaagggaagatgggcttcagaccacaggagaaggattggagtggggagtgctctttgggtttggaccttgcctcactgttgagactgttgtgctccatagtgttgctgcttaaagttgatcacacatgccttttaagtgattggtcgggctccacttggcttgcagttttatcttctttctttgttcccttttttagatagaatcctatgaatttgcgtgtctattgttaaggactcgaagcctttgatggtgtgggcgggaagcttaacgcctattcagctcatgtatcaacttatattaaatttatggcaataataagttactttgcaaactattctacctcaggaaagaacacgcgctacactgatggattcaacaagagtataaccttgactctacaggaacagaag

SEQ ID NO: 1374 - DNA, 567 bp, Gossypium hirsutum
  Clone ID: GOSHI-09MAY01-C1090_4
attcaacgagtctatagccttggccgtcaggcccgggtaatctttgaaatttcatcgtgatggggagtgctctttgggtttggacctggcctcactgttgagactgttgtgctccatagtgttgctgcttaaagttaaacaaacatgccttttaagtaattggtcgtgctccacttggcttgcccctcgcgccccttcttttttccttttttagattatttaaatcctatgaatttgtgtgtttatgggtaaagactagaaccctgtgatggtgtgggcgggaagcttaacgcctattcagttcatgtaccaacttatattaaatttatggcaataataagttcctttgcaaactattctaccaaaaaaaaaaaaaaaaaaaaaaaaaaaaaaaaaaaaaaaaaaataaaaaaaaaaaaaaaaaaaaaaaagggttataaataataataaaaataaatatgggtgtgggtttttaaaagtatttaattttatttatgtggggtaccaaaatttaatattttttttattaaaaaaaaaggggtattgcctgtgaaaaacccttttttt

SEQ ID NO: 1375 - DNA, 671 bp, Gossypium hirsutum
  Clone ID: GOSHI-09MAY01-C1090_3
cccgggtcgacccacgccgttcgccccgcgcccgtccaatcccacgggagcggggggcctgtttgtagatcatcccggaaaaaagaatggtgaccgtgggaagaagttcgtaagggctcaaacgtgcccaaggccccttgccaccgtgttggccatcggcaccatcaaccccccccctttaattgtgttgatcagagcacataccctggacctgctgtgtctccgtatcacaaataggtgagcacgaaaacaccgagttgaaaggagaagttcaagcgcatgtgtgaaaaatcgatgatcaagaagcgatacatgtaccttacagaagagattttgaaagagaatcccaatgtatgtgaatacatggctccttcactggacgctaggcaagatatggtggtagttgaggtgccaaagctaggcaaagaagcagccaccaaggccattaaggagtggggccagcccaagtccaagatcacccaccttgtcttttgcaccactagcggtgtggacatgcctggggctgactaccagctcaccaagcttttgggcctccgcccctccgttaagcgcctcatgatgtaccaacaaggttgcttcgcaggggggacggtgctccgagtggctaaggacttagctgagaacaacaaagtgctcgtgtacttgttgtg

SEQ ID NO: 1376 - DNA, 636 bp, Gossypium hirsutum
  Clone ID: GOSHI-09MAY01-C1090_2
ccccgcgtccgacccgcgtccgccccccgcgcggccggcgtccgcgatgatcaagaagcgatacatgtaccttacagaagagattttgaaagagaatcccaatgtatgcgaatacatggctccttcactggatgctaggcaagatatggtggtagttgaggtgccaaagctgggcggagagagcagccaccaaggccattaaggagtggggccagcccaagtccaagatcacccaccttgtcttttgcaccactagtggtgtggacatgcctggggctgactaccagctcaccaagcttttgggcctccgcccctccgttaagcgcctcatgatgtaccaacaaggttgcttcgcaggggggacggtgctccgagtggctaaggacttagctgagaacaacaaaggtgctcgtgtacttgttgtgtgctccgagattactgctgttaccttccgtggacctagtgacactcacctagacagtctagtgggccaagcattgtttggtgatggtgccgcagctgttataatcggggcagaccccatgcccgaaatcgagaagcccatgtttgaaatagtctcagtagcccaaacgatcttgccagatagtgatggtgcaattgatggtcaccttcgtg

SEQ ID NO: 1377 - DNA, 1670 bp, Gossypium hirsutum
  Clone ID: GOSHI-09MAY01-C1090_1
ttttactcgtgggccggccgccggggccggcgcccgggctttttaccattcatagcatagcagcttagtccaactccacacccaccaccattggctgtttgtgatcatccgaaaaagaatggtgaccgtggaagaagttcgtaaggctcaacgtgcccaaggccctgccaccgtgttggccatcggcacatcaaccccgcctaattgtgttgatcagagcacataccctgactactatttccgtatcacaaatagtgagcacaagaccgagttgaaagagaagttcaagcgcatgtgtgaaaaatcgatgatcaagaagcgatacatgtaccttacagaagagattttgaaagagaatcccaatgtatgtgaatacatggctccttcactggacgctaggcaagatatggtggtagttgaggtgccaaagctaggcaaagaagcagccaccaaggccattaaggagtggggccagcccaagtccaagatcacccaccttgtcttttgcaccactagcggtgtggacatgcctggggctgactaccagctcaccaagcttttaggcctccgcccctccgttaagcgcctcatgatgtaccaacaaggttgcttcgcaggggggacggtgctccgagtggctaaggacttagctgagaacaacaaaggtgctcgtgtacttgttgtgtgctcggagattactgctgttacctttcgtggacctagtgacactcacctagacagtcttgtgggccaagcattgtttggtgatggtgccgcagctgttataatcggggcagaccccgtgcccgaaatcgagaagcccatgtttgaactagtctcagcagcccaaacgatcttgccagatagtgatggtgcgattgatggtcaccttcgtgaagttggtcttacatttcaccttcttaaggatgttccggggcttatttcgaagaatatagaaaagagcctggtagaagcatttcaaccattgggcatatccgattggaactcccttttttggattgctcatcctggtggtccagcaatattagatcaagtagaagccaaattagcactgaagccagagaagctacgagccacaaggcacgttctttcagagtatggtaacatgtcaagtgcttgtgttctatttattttggatgagatgaggaagaaatcaagggaagatgggcttcagaccacaggagaaggattggagtggggagtgctctttgggtttggacctggcctcactgttgagactgttgtgctccatagtgttgctgcttaaagttaaacaaacatgccttttaagtaattggtcgtgctccacttggcttgcagttttatcttcttcttttttccttttttagaatcctatgaatttgtgtgtttattgttaaagactagaagcctttgatggtgtgggcgggaagcttaacgcctattcagttcatgtatcaacttatattaaatttatggcaataataagttactttgcaaactattctaccaaaaaaaaaaaaaaaaaaattatatttagctaacaataaagaaaacaataaataagggatggaagttcgacctttgaaattttaaaaattaaaaacctttttttgttcctccaaaaatttttaataaagagaaatttttggggggtcctttttgaaggg

SEQ ID NO: 1378 - DNA, 388 bp, Gossypium hirsutum
  Clone ID: LIB3166-010-P1-K1-B11
ggacgctaggcaagatatggtggtagtttaggtgccaaagctaggcaaagaagcgggcgcggattgccattaaggagtgagaacaacaaatgtgctcgtgtacttgttgtgtgctcggagattactgctgttacctttcgtggacctagtgacactcacctagacagtcttgtggtgccaagcattgtttggtgatggtgcctcagctgttataatttttgcagaccccgtgcccgaaatcgttaagcccatgtttgaactattctcatcatcccaaacgatcttgccagatagtgatggtgcgattgatggtcacctttttgaagtttgtcttacattttaccttcttaaggatttttcggtgcttatctctaaaaatatagaaaat

SEQ ID NO: 1379 - DNA, 382 bp, Gossypium hirsutum
  Clone ID: LIB3148-014-Q1-K1-F7
ccgattggaactcccttttttggattgctcatcctggtggtccagcaatattagatcaggtagaagccaagttagcactgaagccagagaagctacgagccacaaggcacgttctttcagagtatggtaacatgtcaagtgcttgggttctatttattttggatgagatgaggaagaaatcaagggaagatgggcttcaaaccacaagagaagggttggagtggggagtgctctttgggtttggacctggcctcactgttgagactgttgtgctccatagtgttgctgcttaaagttaaacaaacatgctttttaaagtattggtcgtgctccacttggcttgcagtttttaaaaaaaaaaaattatattaatttatatatt

SEQ ID NO: 1380 - DNA, 342 bp, Gossypium hirsutum
  unsure (1)..(342): unsure at all n locations
  Clone ID: LIB3146-021-Q1-K1-F5
cgcccngattcccggtcgaccaccgtccgggaaaataagggaagatggacttacacaacagtgtaaggactggttggggagtgcttttgggttcagacctggcctactgttgaactgtgttctacataatgtgctgtttaaagaaaacaaacatgccttttaagtaattggtcatgctccacttggcttgcaaatttatctaatacttttatcctttcttaaattatttaaatcctattaatttttgtgtgtattgagcaagactagaacactttgattgtatggacggtaagcttaactcctattcaattcatgtaccaacttatattaaatttatggcaa

SEQ ID NO: 1381 - DNA, 236 bp, Gossypium hirsutum
  unsure (1)..(236): unsure at all n locations
  Clone ID: LIB3829-002-Q1-K6-B3
ttcatagcatagcagcttagtccaacagtccaactccacacccaccaccattggctgtttctgatcatccgaaaaagaatggtgaccgtggaagaagttcgtaaggctcaacgtgcccaaggccctgccaccgtgttggccatcggcacatcaaccccngcctnnaatttgtggtttnggnatttncccccnnnnnnnnnnnnnagnnnccccccccccccccccttttttttttt

SEQ ID NO: 1382 - DNA, 674 bp, Gossypium hirsutum
  Clone ID: GOSHI-09MAY01-C1050_2
ctttccctgcccgtgattgaacatcatgggctctgttgtggagaaatctgctttgataatctgtggcgactacatggaagatttcgaagtgatggtgcctttccaagtgctgcaagcctttggggttcgagttgattgcgtctctcccaccaaattacctggtcaaaaatgcttcactgccatccatgtgtccttgggatttgagcattactcagaactgccaggccatttatttacactgaattcgaacttcaatgaagtggaggtcggatgctatgatgccctggttattcctggcggccggttctcggagcacttcagcgttgacgagagggtcttgagcattgttaaagcgtttgctgaagcaggaaagcctattgtcaccacttgccatagccaactcattttggctgcggcagggcttttgaaaggcaagaaatgcactgcctttgcaagcatgaaaccagtgattgagctggcgggtggtatttggtgggagcaacctggaatcacatcaccttttgacattactgcttgtctcaaagatggaaacatcttgagttccataggatggccagcgcatgctgaaattctcaaaactttgtttgaatccatgggagcccgaattcatacaaccatggctaactcagtgcttttcctttgaggggactata

SEQ ID NO: 1383 - DNA, 1251 bp, Gossypium hirsutum
  Clone ID: GOSHI-09MAY01-C1050_1
cggaccggattcccgggtcgccccgcgttttccccgcgtccgcccagcgtccgcctggtcaaaatgcttcactgccatccatgtgtccttgggatttgagcattactcagaactgccaggccatttatttacactgaattcgaacttcaatgaagtggaggtcggatgctatgatgccctggttattcctggcggccggttctcggagcacttcagcgttgacgagagggtcttgagcattgttaaagcgtttgctgaagcaggaaagcctattgtcaccacttgccatagccaactcattttggcggcggcagggcttttgaaaggcaagaaatgcactgcctttgcaagcatgaaaccagtgattgagctggcgggtggtatttggtgggagcaacctggaatcacatcaccttttgacattactgcttgtctcaaagatggaaacatcttgagttccataggatggccagcgcatgctgaaattctcaaaactttgtttgaatccatgggagctcgaattcatacaaccaaggctaactcagtgcttttcctttgtggggactatgtagaagattatgaattcaatgtcccattccgtgcgctccaagcattagggtgcaaggttgatgcagttaccccaagcaagaagaagggagaaacctgtgtcactgccatccacgatgatgaaggagcccaagccttcagcgagaaacgtggccataacttggttattacagccaattggagtgatgtaagtgtttatgattacgattgccttgttgtgccgggtgggaggtccccagagttgctggtaatgaacgacaaagcagtcactctagtgaaggaattcgctgagagaaacagggtcattgctggtgttgggcaaggacaatggctccttgctgctgctggtgttctaaaggggaagagatgtgcaagcggggatggaatgaaggtaatggtgaagatgggtggaggggaattggaagagtctaaagggtgtgtctctgatggaaagctggtgactgctgttggatggcctgcccttccttatttcatatctcatttgtccaaacttcttggtttatctttgagctttgagtgaggccaagtttgggtcttttctgaaagaacaaggtttgaactatatgcatgaaagtactttatgtgagttcagcgaataaagttgaattttgatcacccttgtaactggttttgctatattataataagagcacctttaaggtt

SEQ ID NO: 1384 - DNA, 606 bp, Gossypium hirsutum
  Clone ID: LIB3829-028-Q6-K6-G11
gggctctgttgtggagaaactgctttgataatctgtggcgactacatggaagatttcgaagtgatggtgcctttccaagtgctgcaagcctttggtgttcgagttgattgcgtctctcccaccaaattacctggtcaaaaatgcttcactgccatccatgtgtccttgggatttgaggtaaaatgctttgctatttcatcatacatgtatggttagttcccaccagggtccagaaacaaaggtacgctgtttttgtttccagggcattgaatatgagagtttaaaatctttttccagcattactcagaactgccaggccatttatttacactgaattcgaacttcaatgaagtggaggtcggatgctatgatgccctggttattcctggcggccggttctcggagcacttcagcgttgacgagagggtcttgagcattgttaaagcgtttgctgaagcaggaaagcctattgtcaccacttgccatagccaactcattttggcggcggcagggcttttgaaaggcaagaaatgcactgcctttgcaagcatgaaaccagtgattgagctggcgggtggtatttggtgggagcaacctggaatcaca

SEQ ID NO: 1385 - DNA, 310 bp, Gossypium hirsutum
  Clone ID: LIB3543-064-Q6-K6-B1
ttattaatggaattacgtcctcaagttggaactttgtatcatcatccttttcgaaagagatcggtttcatcctgaatcctgatggcagattgttcggatggcctgcccttccttatttcatatctcatttgtccaaacttcttggtttatctttgagctttgagtgaggccaagtttgggtcttttctgaaagaacaaggtttgaactatattcatgaaagtactttatgtgagttcagcgaataaagttgaattttgatcacccttgtaactggttttgctatattataataagagcacctttaaggtt

SEQ ID NO: 1386 - DNA, 639 bp, Gossypium hirsutum
  Clone ID: GOSHI-09MAY01-C1040_7
agaaaagggcatggtggtgacatggtgcaaccaactagaaatgctggcacatccagccgtaggctgctttgtgacacattgtgggtggaactcaacccttgaagggctaagccttggcgtgccaatggtgggtgtgcccaaatgggctgatcaattgacgggcgcccacgcgttcgggatgcggaaactcggcttgagcatgttgttgtggataaagagaaggaagaaaagaaatggatgaagattaaggaggtgtcgcacgagtggtctttggtgaacaaacagaagcccatctggatgaggaagcctgaggagattaccaaggaagaatatgctgctttttacaagagccttacaaatgactgggaagagcatttggccttcaagcacttctcatttttggggctacttgtgttattatgttttttttattattttttttatttattttttttttttatttttatttttttttttattttttatattattttatatttattttttttttttttttttttttatattttatgttttatttattatggtattttttttttttattttttttttttattttttcttttttatttttttatttttatattttgttttcttttttttattattttcttttta

SEQ ID NO: 1387 - DNA, 1331 bp, Gossypium hirsutum
  Clone ID: GOSHI-09MAY01-C1040_6
gattaagctcttatgtgaggcgtgctacttatatcatggcacaacttgcgaaggagtatgatgtacctgaaattgcgctcagacttgtgtgtgaagggtcatgtgtcagactccaacaggaccgttccctttgtaacatgctcaaggagtaaatgttgcgcgcataacaagaccttgaaggttatccgcaagaacttggtaaagtaagtgcattgagctcttctttgaaatagcagagcacatggaagattacaacaagttttatgaggcattctcaaagaacctcaagcttggtatccatgaggactctcagaacaggactaaaattgccgaattgctccgctaccactccaccaagagtggtgatgagatgaccagcttgaaggactatgtgaccagaatgaaggatggccagaatgatatctactacatcactggtgagagtaaaaaggctgctgagaactctcccttccttgagaagctgaagaagaagggttatcaggtcctttacatggcggacgccatgggtgagtattgctgtcggacagctcatggaatttgtgggcaaaaagctggtgtcagctaccaaggaagggcttaaacttgatgagagtgaggatgagaagaagaagaaggaagctttgaaggaaaagtttgagggtctttgcaagcacatccttgatgaccttgcaaagaccctcaaggatgtgctgggtgacaaggttgaaaaggttgtggtttctgatcgcgtggttgactcaccttgctggttggtcactggcgagtttggttggactgccaacatggagagaatcatgaaggcccaagctttgagggataacagtatggcaggatacatgtcaagcaagaagacgatggagatcaaccccgagaatcccatcatggaagagctgagaaagagagctgatgctgacaagtatgacttgtctgtgaaggaccttggtctgctcctctgtgagactgctctcctcacctctggcttcagccttgatgatccaaacaccttcggcaacagaattcacaggatgttgaaacttgggttgagcatcgacgaggatgctggtgatgcagatgctgatgctgacatgcccccattggaggatgcagatggcgagggcagcaagatggaggaagttgactaaaatcttaaccattattttgatgccaacatttactagtatgatctctattttgaacgttcccttagcttttatggttttgcaacccacagaggttttggttattttgtcaaactcttaaaatgtagtttgtttttggaatatattatatggctcttttagtattttgct

SEQ ID NO: 1388 - DNA, 540 bp, Gossypium hirsutum
  Clone ID: GOSHI-09MAY01-C1040_5
cccacgcgtccgcaatcctgagaaccccatcatggaagagctgagaaagagggctgatgctgataagaatgacaagtctgtgaaagaccttgttctgttgctcttgcggacggccctcctcacctctgggtttagcctcgatgacccaaatacttttggcaacagaatccagaggatgttgaaacttgggttgagcattgatgaggatgcaggagatgctgatgccgactctgagatgccaccattcgaggatgctgatgccgagggcagcaagatggaggaagttgactaagctttttaacatgtttgtgaagagttcatttggtagtctcatttttagcttttaatataatattctggaaaattggtcaatgctgtgttttctttgtaatggtaaatgaatctttagtgctcgtaaatggaatctagtccactgccgtatgcttttatcaaatggtaatttttatgcttgtctactactaatgataataatacttataagtggagtgggggcgagattcaaacagaatatttttactg

SEQ ID NO: 1389 - DNA, 1146 bp, Gossypium hirsutum
  Clone ID: GOSHI-09MAY01-C1040_3
ccggcccgtccttacttgctggacccacgcagtgcggtggatctctcagaacaggactaaaattgccgagagttgctccgctaccactccaccaagagtggtgatgagatgaccagcttgaaggactatgtgaccagaatgaaggagggtcagaatgatatctactacatcactggtgagagtaaaaaggctgttgagaactctcccttccttgagaagctgaagaagaagggttatgaggtcctttacatggttgatgctattgatgagtatgctgttggacagctcaaggaatttgagggcaaaaagcttgtgtcagctaccaaggaaggtcttaaacttgatgagagtgaggatgagaagaaaaagaaggaagctttgaaggaaaagtttgagggtctttgcaaggtcatcaaggatgtgctgggtgacaaggttgaaaaggctgtggcttctgatcgtgtggttgactcaccttgttgtttagtgactggcgagtatgggtggactgcaaacatggagagaatcatgaaggcccaggctttgagggataacagcatggctggttacatgtcaagcaagaagacaatggagatcaacccggagaaccccatcatggaagagctgagaaagagagccgatgcagagaagaatgataaatctgtgaaggaccttgttctccttctcttcgagactgctctcctcacctctggcttcagccttgatgagcctaacacctttggcaacagaatccacaggatgctgaaactcggcttgagcattgacgaggatgcaggtgaaggtgaagctgatgctgatatgcccccattagaggatgctgatgctgaaggcagcaagatggaagaagttgactaagcaccactcttcttgttggaactttttactagtttttttttaattattattgaagttatccttaggtttaatattttgttttgtgcctttttgggaggttttgttagtgattttggagaaagttcttaatgataattgctgttctgtttctggtatatttatacattttatcggtgccttatctttggtgcttgcttagaatggttgcgtttgccatatgttttcttaaatggttattatacattgcttcatcaggtctttacttgaatt

SEQ ID NO: 1390 - DNA, 718 bp, Gossypium hirsutum
  Clone ID: GOSHI-09MAY01-C1040_2
cccacgcgtccgctgatatgcccccattggaggatgctgatgccgaaggcagcaagatggaggaaaagtttgagggtctttgcaaggtcatcaaggatgtgctgggtgacaaggttgaaaaggttgtggtttctgatcgtgtggttgactcaccttcctgtttagtgactggcgagtatggttggactgcaaacatggagagaatcatgaaggcccaggctttgagggataacagcatggctggttacatgtcaagcaagaagacaatggagatcaacccggagaaccccatcatggaagagctgagaaagagagccgatgcagagaagaatgataaatctgtgaaggaccttgttctccttctcttcgagactgctctcctcacctctggcttcagccttgatgagcctaacacctttggcaacagaatccacaggatgctgaaactcggcttgagcattgatgaggatgcaggtgaaggtgaaggtgatgctgatatgcccccattggaggatgctgatgccgaaggcagcaagatggaggaagttgattaagcctaacatgtttttataagatcagtagatttatcttacttttgaagcatctgttagcttgttttacattttgtttggtgcttttgcttttgttatgttgttgttagttattgtcgagtactcttaaatgataagtgctgtttttttctgggttatttaacaaa

SEQ ID NO: 1391 - DNA, 1947 bp, Gossypium hirsutum
  Clone ID: GOSHI-09MAY01-C1040_1
agcactggctgctggtgctgacgttagtatgattggtcaatttggtgttggtttctactcagcatacttggttgctgagaaggttattgtaaccacaaagcataatgatgatgaacaatatgtgtgggagtcccaagctggtggttcattcactgtcaccagggatacatccggagagaacattggtaggggtacaaagattactctgtttttgaaagaggatcagcttgagtaccttgaggagcgacgtttgaaggatttgattaagaagcattctgaatttattagctacccgatttcactttggattgagaagaccactgagaaggagatttctgatgatgaagatgaggaggataagaaggacgaagaagggaaagttgaggatgttgatgaggagaaagagaaggaagaaaagaaaaagaagaagattaaggaggtgtcgcacgagtggtctttggtgaacaaacagaagcccatctggatgaggaagcctgaggagattaccaaggaagaatatgctgctttctacaagagccttacaaatgactgggaagagcatttggccgtcaagcacttctcagttgaggggcaacttgagttcaaggctgtcctctttgtccccaagagggctccttttgatctctttgatacaaggaagaagcccaacaacattaagctctatgtgagacgtgtctttatcatggacaactgcgaggagttgattcctgaattcctcagctttgttaagggtattgtcgactcagaggaccttcctttgaacatctcaagagaaatgttgcagcaaaacaagatcttgaaggttatccgcaagaacttggtaaagaagtgcattgagctcttctttgaaatagcagagaacaaggaagattacaacaagttttatgaggcattctcaaagaacctcaagcttggtatccatgaggactctcagaacaggactaaaattgccgaattgctccgctaccactccaccaagagtggtgatgagctgaccagcttgaaggactatgtgaccagaatgaaggagggtcagaatgatatctactacatcactggtgagagtaaaaaggcagttgagaactctcccttccttgagaagctgaagaagaagggttatgaggtcctttacatggttgatgctattgatgagtatgctgtcggacagctcaaggaatttgagggcaaaaagcttgtgtcagctaccaaggaaggtcttaaacttgatgagagtgaggatgagaagaaaaagaaggaagctttgaaggaaaagtttgagggtctttgcaaggtcatcaaggatgtgctgggtgacaaggttgaaaaggttgtggtttctgatcgtgtggttgactcaccttgctgtttagtgactggcgagtatggttggactgcaaacatggagagaatcatgaaggcccaggctttgagggataacagcatggctggttacatgtcaagcaagaagacaatggagatcaacccggagaaccccatcatggaagagctgagaaagagagccgatgcagacaagaatgataaatctgtgaaggaccttgttctccttctcttcgagactgctctcctcacctctggcttcagccttgatgaccctaacacctttggcaacagaatccacaggatgctgaaactcggcttgagcattgacgaggatgcaggtgaagctgaagctgatgctgatatgcccccattggaggatgctgatgccgaaggcagcaagatggaggaagttgattaagcctaacatgtttttatatgaactctaatcagtagatttatcgtacttttgaagcatctgttagcttgttttacattttgtttggtgcttttgttagttattttcgagtacttttaaatgataagtgctgttttttctgggatatttatacagtttcttactgccat

SEQ ID NO: 1392 - DNA, 539 bp, Gossypium hirsutum
  Clone ID: uC-gsronu33B027f06b1
gtttgactcacgagcaagagaaagatgttgataaactcataactcgtttggttaccaaggaagaagcacatgttgcactgatggagctcatgaaatggagatcagaagggttagaaccactctatgctcaagccgttcaagttaaacaacgggactctgtgaccggaaaactgaagatcgctaacccccaaagcagtaggctggtatgggaaacttgtcttagcgagtacaaatcattgggaaaggttgcagtgaggcttatcttcttacatgcaacatgcatgcgggtttaaacgtaactggtctttgatgaagtggtatttgtgtacacagacactcacggataggccttgaaagggctcaaaaaatgatattcattgcagctcattcaaagctcggcagagggggattttgccaacgaggaagaaaagtacgcggatcttttatgacggcggtgagggatggcatcctaatggagtcttacagatgcacataagtgaaagctttttttctttaactctttgagattgaaactttag

SEQ ID NO: 1393 - DNA, 416 bp, Gossypium hirsutum
  Clone ID: uC-gsflnu33B088h09b1
tagaaggcccaggctttgagggataacagcatggctggttacatgtcatgcaagaagacgatggagatcaacccggagaaccccatcatggaagagctgagaaagagagccgatgcagacaagaatgataaatctgtgaaggaccttgttctccttctcttagagactgctctcctgacctctggcttcagccttgatgaccctaacacctttggcaacaggatccacaggatgctgaaactcggcttgagcattgacgaggatgcaggtgaagctgaagctgatgcttgatatgcccccattggaggatgctgatgccgtatgcagcaagatcctggaagtagctcttttctatccttgtcctttattacctttactaaatctttcctttccaccttttggttattttcttatct

SEQ ID NO: 1394 - DNA, 435 bp, Gossypium hirsutum
  Clone ID: uC-gsronu33B172b05b1
cctgatactggatttcagcggaaaataccttccaccattcaagtgtttgactcacgagcaagagaaagatgttgataaactcataactcgtttggttaccaaggaagaagcacatgttgcactgatggagctcatgaaatggagatcagaagggttagaaccactctatgctcaagcctaacacctttggcaacagaatccacaggatgctgaaactcggcttgagcattgatgaggatgctgatgccgaaggcagcaagatggaggaagttgattaagcctaacatgtttttataagatcagtagatttatcttacttttgaagcatctgttagcttgttttacattttgtttggtgcttttgcttttggtatgttgctgctagctattggcgagtactcttaaatgataagtgctgttattttctgggttatt

SEQ ID NO: 1395 - DNA, 704 bp, Gossypium hirsutum
  Clone ID: uC-gsronu33B028a10b1
tgtttaaggaagctttgaaggaaaagtttgagggtctttgcaaggtcatcaaggatgtgctgggtgacaaggttgaaaaggttgtggtttctgatcgtgtggttgactcaccttgctgtttagtgactggcgagtatggttggactgcaaacatggagagaatcatgaaggcccaggctttgagggataacagcatggctggttacatgtcaagcaagaagacaatggagatcatcccggagaaccccatcatggaagagctgagaaagagagccgttgcagagaagaatgataaatctgttaaggaccttgttctccttctttttgtgactgttctcctcaccttttgctttagtcttgattagccttacacctttgttatcttttttcacagttttctttactttcgctttagcttttattaggatgctttttaaggttatagctgttctttttattcttctctttgtatttttttttttcttttcttttttttattcttttacttattctttctttcttttttttttctattctctaaattttttttttatatttaattatattttttactcctacttatttcctcttttttcttctttatcttttcttttctttcttatttttttcttctattttatttctttttttctatgttatcttatcttttctatttattttttttttttttttattttcttctt

SEQ ID NO: 1396 - DNA, 412 bp, Gossypium hirsutum
  Clone ID: LIB3165-007-P1-K1-F4
aaattccggggcggaccacgcgtccgcggacgcgtccgcccacgcgtccgtactagtggtctcaggcttcctcatccaggtggggaagcctgaggagattaccaaggaagaatatgctgctttttacaagagccttacaaatgactgggaagagcatttggccgtcaagcacttctcagttgaggggcaacttgagttcaaggctgtcctctttgtccccaagagggctccttttgatctctttgatacaaggaagaagcccaacaacattaagctctatgtgagacgtgtctttatcatggacaactgcgaggagttgattcctgaattcctcagctttgttaagggtattgtcgactcagaggacctttctttgaacatcttaagagaaatgttgcagcaaaacaagatc

SEQ ID NO: 1397 - DNA, 369 bp, Gossypium hirsutum
  Clone ID: uC-gsronu33B061e09b1
agacaatggagatcaacccggagaaccccatcatggaagagctgagaaagagagccgatgcagagaagaatgataaatctgtgaaggaccttgttctccttctcttcgagactgctctcctcacctctggcttcagccttgatgagcctaacacctttggcaacagaatccacaggatgctgaaactcggcttgagcattgatgaggctgcaggtgaaggtgaaggtgatgctgatatgcccccattggaggatgctgacgcccaaggctgcatgactgtttgaagttactgaagcctaacatgcttcgttagcaactaatgtgaaccccacctgttatcccatgaaaactgtttgtaggcacccaagg

SEQ ID NO: 1398 - DNA, 372 bp, Gossypium hirsutum
  unsure (1)..(372): unsure at all n locations
  Clone ID: LIB3148-055-Q1-K1-A1
cccacgcgtccgcccacgcgtccgcccacgcgtccgcccacgcgtccgcccacgcgtccggccacgcgtccgcccacgcgtgcgcccacgcgtccggcattgacgaggatgcaggtgaagctgaagctgatgctgatatgcccccattggaggatgctgatgccgaaggcagcaagatggaggaagttgattaagcctaacatgtttttatatgaactctaatcagtagatttatcgtacttttgaagcatctgttagcttgttttacattttgtttggtgcttttgttagttattttcgagtacttttaaatgataagtgctgtttttttctgggatnnaaaaaaaaaaaaaaaaaaaaaaaanaaaaann

SEQ ID NO: 1399 - DNA, 719 bp, Gossypium hirsutum
  Clone ID: GOSHI-09MAY01-C1070_2
cctcgtgccggcacgaggttgggaaatagagcagtgcctgaggaggataatctccaaagttgtctcaatgcctattttggtcctgaagtaagccgaatcagagatcaagtggacagtctctgccaaagcattctcgaggatctatggagtggccttgaatcttccaaggtatctgtgaggttgaaggatctagttccctatctgcaggataaatgttatgaatgtgtgtcagctatattgaaagaactccaaactgaacttgatatcttgtacactgccattgggagtgaacacaatgaaggtaattcaatgtctccttctataattgttgagatatctctttttattgggagactcttgtttgcattcgagaatcactccaaacacattcctgtggttcttggctctccacgcttctgggtgaaatacacagctcctgcaatttttgagaagctgccttccttattgtggcaatctaaagctgtcaacggttctcctttctctgacagccttggaaggcaaatgctcactagttctcagaggcaaagttcatctcctactgctgcattgcttggtgcaaatgaaagtgcaagcccaaaacttgactatctttggaaggttatgcgagagctgtgtgttagagcttatagctgatggatgtcgtggtatctgatgagctttcagttattctctctcgggagcttggacaagatgatgga

SEQ ID NO: 1400 - DNA, 561 bp, Gossypium hirsutum
  Clone ID: AW186641.1
caatgcctattttggtcctgaagtaagccgaatcagagatcaagtggacagtctctgccaaagcgttcttgaggatctattgagttttcttgaatcttccaaggtatctgtgaggttgaaggatctagtcccctatctgcaggataaatgttatgaaagtttgtcaactataatgaaagaactcaaaactgagcttgatatcttgtacactgccattgggagtgaacctccttctataattgttgagatatctctttttattgggagactcttgtttgcattcgagaatcactccaaacacattcctgtgattcttggctctccacgcttctgggtgaaatacacagctcctgcaatttttgagaagctgccttccttattgtggcaatctaaagctgtcaacagttctcctttctctgacagccttggaaggcaaatgctcactatttctcagaggcaaagttcatatgctactgctgcattgctcggagcaaatgaaagtgcaagcccaaaactcgacgatctttggaaggttatgcgagagctgtgtgtaagagctta

SEQ ID NO: 1401 - DNA, 748 bp, Gossypium hirsutum
  Clone ID: GOSHI-09MAY01-C1060_1
cggacgcgtgggttttaattacacagccaaaaaacagagagctaacttgctctgttttttctcatcatctttctttctccccctaaattctcacttcatatatactttatatcaacgatgtcggtaaaagagtgcggcaatcacgggaaataccgccggaaaatcttccggcgaatcatcgccggcatcctaatcttcattataatcgttctgataacaattcttctcatatgggccatcctccgtcccagcaaacccaggttcatcctccaagacaccaccgtctacgctttcaacgcctccacccctaacctcctcacctccaatttccaagtcactctatcttctcgaaaccccaacgacagaatcggcatttactacgaccggctcgacgtttacgccacctaccagaaccaacaaatcaccctccgaacatccatccctccaacgtaccagggtcacaaagagatcaacgtttggtcacccttcgtcaatgggaattcagtgcctatcgcaccggaatattccgccagtttaggatccgatcagagtgccgggtcggttttcttgatgatcaagattgatggacgggtgagatggaagttgggacttttatttccgggaggtatcatctttacgttaggtgcccggcttttattaccttcggcagcaaaagtaacggcgtttcggtcggagataacgccattaagttacagttggtgactaaatgcagtgttagcgtgtaagg

SEQ ID NO: 1402 - DNA, 506 bp, Gossypium hirsutum
  Clone ID: LIB3584-053-P1-K2-E8
gacattgctcatatagatgacctacgagctcggtggtatttaatacaatttgatgttctccctctaaaatggtgacttcatatatactttatatcaacgatgtcggtaaaagagtgcggcaatcacgggaagtaccgccggaaaatcttccgtcgagtcatcgccggcatcctaattttcattctaatggtgctgataacaattcttgtcatatgggccatcctccgttccagtagacccaggttcatccttcaagacaccaccgtttacgctttcaacgcctggacaactaacctcctcacctacaatttccaagtcactctatcttctcgaaaccccaacgacagaatcggcatttactacgaccggctcgacgtttacgccacctaccagaaccaacaaatgacactgcgaacagccatgcctgcaacgtaccagggtcacaaagagatcaacgtttggtcacccttcgtcaatgggaattcagtgcctatcgcaccggaata

SEQ ID NO: 1403 - DNA, 475 bp, Gossypium hirsutum
  unsure (1)..(475): unsure at all n locations
  Clone ID: LIB3189-025-P1-K1-B5
gcgaagtctgcaaaatggatccgtaacctcgggaaaaggattggctctgagggctgggcacagggcggcttgatatatactttatatcaaccatctcactaaaagagttcgtcaatcacgggaaatacctccgcaaaatcttccggcgaatcatcgccggcatcctaatcttcattataatcgttctgataacaattcttctcatatgggccatcctccgtcccagcaaacccaagttcattctccaagacaccaccgtctacgctttcaacgccttcacccctaacctcctcacctccaatttccaagtcacctctatcttctcgaaaccccaacgacagaatcggcatttactacgaccggctcgacgtttacgccacctaccagaaccaacaaatcacccttcgaacattcattcctncaacgtaccaaggtcacaaagagatcaacgtttggtcacccttcgtcaatggga

SEQ ID NO: 1404 - DNA, 944 bp, Gossypium hirsutum
  Clone ID: GOSHI-09MAY01-C1010_2
gggaacgctgaagcgccttcatgcaccgccccaatattcccgatctgacccacgcgttcgctagtagctgacattttgcatctaaggatggcaaacaacaatgtgggctgagcggatcccattctcttccaatgttgctcatgcatgtaagctatgcacgcatgaacattacatcaaagctggccctggaatctgggatgtaacctcttattcttgttgctcaccggcaaatctttgccactactagccattggtgcttctgactttttcttagagcggaaaacaaggcctacgctgaccatgccaattcttttccagattttcttatgctcactgacaggggcaacagcaaaccaggttttttattttgtagggctgcaaaatactactgcaacgattgcatgtgcattgaacaatgtactgccagctgccacatttctcctcgcagccatttgctggcaagaagctgaggagattatgttagcttctaggctagctatagttattggttctttggtatgagtaggaggtgctatgtagctgtcattttaccaaggacacatcatcagcataagagaatcctgcattcactggaactatgccaataaaaaggctaattcaagtcccagccctagaggttcaaacttcttcctgagtcctttccttagaaaggccagagctagttgcttgagcactatggttcataatccaaggacaaacaagcaagagcttcccagctccttacacaagcactactctaatgagcttcatggcgagcattgtgtgtacaattatcggcatattttctgaccccaagccatctgcttggtcatagagctccagcatgaagcttatagcagctctttatgcgggaattatatgtaatgcagttgcattctgcgtaatgtcatggagcatccagaaaagaggtcctctctatgtct

SEQ ID NO: 1405 - DNA, 1396 bp, Gossypium hirsutum
  Clone ID: GOSHI-09MAY01-C1010_1
cccggtcgaccccgcgttcgccccccgtcccgcgggcttttccacggctagctttgtttctttaaggggcctgactatatacgtagtggtggtaatatcggctctaaagaattaaagaaacaatgttggctgatttcatgccattcttggccaatgttctgctgcaagtaggctatgcaggcatgaacattacatcaaagctggccctggaatctggaatgaaacctcttattcttgttgcttaccgtcaaatctttgccaccctcgccattgctccttttgcctttttcttagagcggaaaacaaggcctaagctcaccatgccaattcttttccagattttcttatgttcactgacaggggcaacagcaaaccaggttttttattttgtagggctgcaaaatactactgcaacgattgcatgtgcattgaacaatgtactgccagcagccacatttctcctcgcagccatttgcagacaagaagctgtggggataaagaaagcatcagggcaggctaaggtaataggtactttggtatgtgttggtggagctatgttgctgtcattttaccatggacacatcatcggcataggtgaatccagcattcactggaactatgccaataaaatggcaaattcaagtcccagccctagtggttcaaacttcttccttggtcctttccttggaatggccagtgctgttgcttgggcactatggttcataatccagggacaaacaagcaagagcttcccagctccttacacaagcactactctaatccccgcctccgccagcattgagtgtacaataatcggcatattttcagaccccaagccatctgcttggtcattgagctccagcatgaggcttattgcagctctttatgcgggaattatatgtaatgcagtagcattctgcgtaatgtcatggtgcatccagaaaagaggtcctctctatgtctcagtgttcagccctttgctgcttgtcattgtggctattctaagttgggccctgcttcgtgagaaactatatgtgggaactgttgtagggtcactgctgatagttggtggactgtatgctgtcctgtggggaaaagataaagagatgaaacagatgaaaggcaatgaaaaaggaggaggaggaggagagcaagtagtagtagaagaaggggcagtggaagtcactaaagctggtgacagagatcatgacttggagatgcagtcgcagcaaggcggcggcgcccgtggttaactagggcgtacggaatccaaaaaaaggaatgttaacatatatgtatgaatgtagaacgctgctgtgacaccccaccagagtgttttagtgggttttttttttaatgaggaaagaaagattattattaataatagctaaacata

SEQ ID NO: 1406 - DNA, 701 bp, Gossypium hirsutum
  Clone ID: GOSHI-09MAY01-C1020_3
cccacgcgtcccgcatgctattacttttctttttcatcatccatggctgaccgtgaccgtgaccctgaccgcaaccagcctcaagagattcagctacttcaccctccaccccactaccgtcaaacagaaccatcaagcacccagattgtagctgtcctcactctcctccctgtcggtggctcattgcttgctttggcagcgcttacactcaccggcaccctcatcgggcttagcatcgccatacccctcttcattatcttcagcccagttattgtccctgccaccatcgccatttccatggcggtggctggtttcttgtcgtcgggagcattcgggttgacggggctgtcttcgctcaactatgggttgaagcacatgataagggctaacgccggcgccggagttggaaaagggcaggcaaagagggggatgtgggacatggtagggtatgtgggacagaagactaaggatgtgggacagaacatggagaacaaggctcatgagggtggtggtgctgttaggacataaatggacatttcaattactgtcgtatatttgtattaagcttatatatttgctcgtcttcgtgtttgttactctaaacttattttatgtttattattatatatgcggtgtgttatatgaaatttggcatgaaaaaaaagaaaagaaaatatcaaaatgaagaaaatgtacggaat

SEQ ID NO: 1407 - DNA, 623 bp, Gossypium hirsutum
  Clone ID: GOSHI-09MAY01-C1020_2
cccacgcgtccgatgaaggaatactattacttttctttttcatcatcaatggctgaccgtgaccgtgaccgcaaccagcctcaagagattcagttacttcacccaccaccccactaccgtcaaacaggaccatcaaccacccaaattgtagctgtcctcactctcctccctgtcggtggctcattgcttgctttggcagcgcttacactcactggcaccctcatcgggcttagcatcgccattcccctcttcattatcttcagcccagttattgtccctgccaccatcgccatttccatggcggtggctggtttcttgtcgtcgggagcattcgggttgacggggctgtcttcgctcaattatgggttgaagcgcatgataagggctaacgccggcgccggagttggaaaagggcaggcaaagagagggatgtgggacatggtaggatacgtgggacagaacatggagaacaaggctcatgagggtggtggtgctgttaggacataaatggacatttcaattacggtcgtatatttgtattaagcttatatatttactcgtctttgttttgttacttttaaacttattttatgtttattattatatatgcggcgtgttatatg

SEQ ID NO: 1408 - DNA, 722 bp, Gossypium hirsutum
  Clone ID: GOSHI-09MAY01-C1020_1
ctttttcttcttttctcttaccatcatcataatcatgccgatcaacgatcaaaacagacccatggctcaaaagctctacgactcagctccgtcgtctcgccaggtggctaagttcttgaccgcctcgacgttgggcgcaacgctgcttttcttgtctgggttaaccttgaccgggacggtcattgccttgataatagctacgccgttgatggttatcttcagtccggttctagtcccggccgggataaccatattcttggtgacgacggggttcttgttttcgggcgggtgtggggtggcggcattaacggcgttgtcgtggatatacaattacgtgcaagggaaacacccaccaggagctgatcagctcgattacgcaagaaacaagctggcaagtacggctagggatatgacagagaaggctaaggaatacggacagtatgtgcagcataaagcgcaagaggtgactcaagggcaagcatcttgaatttagggttttaagaatgagggcgggtgtgtttgggtggtttgagatgttttatgctttgtttggttggtgtttctctttgcatgcattcacagatcatatgttttaagctttgtaatttgtaagggatggttattagcatagaatattctggtttctttgtcaataaaaatggaagaagattgtaaaaccagcatcacttcaatcttccttcttttttaaatattataaaaat

SEQ ID NO: 1409 - DNA, 509 bp, Gossypium hirsutum
  Clone ID: LIB3583-029-Q6-K1-B5
cccaccaggagctgatcagctcgattacgcaagaaacaagctggcaagtacggctagggatatgacacagaagactaaggatgtgggacagaacatggagaacaaggctcatgagggtggtggtgctgttaggacataaatggacatttcaattactgtcgtatatttgtattaagcttatatatttgctcgtcttcgtgtttgttactctaaaacttattttatgtttattattataaaaaaaaaaaaaaaaaaaaaaaaaaaaaaaaaaaaaaaaaaaaaaaaaaaaaaaaaaaaaaaaaaaaaaaaaaaaaaacccaaaaaaaaaaaaaaaaaaaaaaaagggggggcccttttaagggaacaaatttttattaccgggggttggaaagtaataatttttttttgggggccccaaaattaaattaaggggcccgtttttaacaaggtggggttgggaaaaacccgtgggtacccaaaattaagtcgtttgggaaaaatcccctttt

SEQ ID NO: 1410 - DNA, 311 bp, Gossypium hirsutum
  Clone ID: uC-gsflnu33B060g06b1
tcacgcgtccgcttttctttttcatcattcatggttgaccgagaccgtgaccggtgaccgcaaccagcctcaagagattcagctacttgaccctccaccccactaccgacaaacagaaccatcaagcacccagattggcgctgagctgactctgctccctgtgggtggatcattggtcgttttggcagccctaacactgaccctgccccttaatccgggctcatgtatcaccatacaccctataaatgcccttgagcagatgccatagcccctggcaccatcgccatgttaaaagcgacccggggacaccc

SEQ ID NO: 1411 - DNA, 1651 bp, Gossypium hirsutum
  Clone ID: GOSHI-09MAY01-C1380_1
tcttctcacgcgtccgcggacgcgtgggaataaaaaaagggaaaagaaaatcaaagttatttttctttcaattgagcccttcatttttctctcattttctttcttcccaaacaacaaagtttaaagaaaatgccaacagatacaagcaaacccatgaaattagaacgatacaatagctatattcgtaaagtccatagcacgaagctgttgaatgcttcatctaaatttctatttcgtgttacccttcttattgctttagttttgatcttgtttttcaccattaactaccctccactttcggataatacccacagtgcacctcaccatcaccaccgtcatagctttctttcaacttcacttttctccggttcttccctcgttggtggtgcggcgtgggagaaacaagtccgtcactcttcgactccacgtagagttaatgggttttccgttttggtcaccggcgccgctgggttcatcggttctcactgttcacttgctttgaaaaaacgcggcgatggggttttgggattggataattttaacgattattacgatccttcgttgaaaagggcgaggcagaatctgttaagcaaacaccaaattttcatcgtcgaaggggatttgaacgacggcccgttgttgacgaagctgttcgacgtcgtcccgttcactcatgtgcttcacttagcggcacaggccggtgtacggtacgccatgcaaaacccacagtcgtacgttaagtcgaacattgctgggtttgtgaacttacttgaagtagccaaagcggtgaatccacaaccggcgatcgtttgggcttcgtcgagctccgtttatggactcaacactgaaaacccattctccgaacgtgatagaactgaccgtccggcgagtctttacgccgcaacgaaaaaagccggtgaggaaatcgctcacacttataaccatatatacggcctttccctcaccggacttagatttttcaccgtttatggtccatggggaagacccgatatggcttacttctttttcactaaagatattcttcaagggaaacccattgatatctacagaacccaagatcaaaaagcggtggcgcgtgacttcacttacatcgacgacgttgtgaaaggttgtttaggagcgttagacacggcggaaaaaagcaccggtagcggcggaaaaaagaaaggaccggctcaattaagggtttacaacttgggaaatacttcccctgttcccgtcggccgattagtctcgattttagaaggattgctcaacacaaaagccaagaaacatgtgatttcgttgcccagaaatggtgatgtcccctacacacatgccaatgtcacgttagcttacaaggattttgggtataaacccaccacggatttagctgctgggttgagaaaattcgtgaaatggtacgtgagttactttgggattgaatcgaaacgctcaaaagaaacccaacatttcgatgaatccagttaagaacaagctttcatattttcatttccatggctgctgcccggtcctttttaatttttcattgttatttaatggttatattgatgtaaaaaagaaaaaccaaaaaaaggaaagggatcaaaattgttgctcctgtcgttcatgttgttttttgtgttttttt

SEQ ID NO: 1412 - DNA, 755 bp, Gossypium hirsutum
  Clone ID: GOSHI-09MAY01-C1350_1
caaattttgaggactgcaactggtgaagaaaccactgttttgggcctaacaaggctgaggcagtgttaggatctgggaattgtaatccccgaactctcgtaaaccctttttgcttcttttcctccgcctcctggttttttcttctcttttcttctcagttctcccaccgccgcggccgtcgattttcgccggatctgatccatatccagtgtcggattccgtgtcgaaaccgatacggcacccctaactgccgattccgtgtaacggagagatggcggagctggcagttgacaaacatgttaagtacatcttagctgttgaaaagaacaaggatagttttgaatcggtggtgatggaccatcttagaatgaatggtgcatattggggattaacagccctagaccttctggggaaacttgattctgttaatgtagatgaagttatttcatggatcctgaagtgccaacacgaatctggtggtttttctggcaatattgggcatgatccgcatatactgtatacgcttagtgccgtacaagtgcttgccctattcaacaagctagatgttcttgacattgataaggttgcaacttatattactgggttgcaaaatgaagatgggatccttttcaggcgacatgtggggtgaggtggataccggttctcttatattgccatctgttgcctttcaatattatgttgtctggataaaatcaatgttgagaaggctgttagctatattctgagttgcaaac

SEQ ID NO: 1413 - DNA, 777 bp, Gossypium hirsutum
  Clone ID: GOSHI-09MAY01-C1340_1
gagaactagtctctaaatttttttttactctaagcagaaattttatttatttatcgctacacacattaaatccaaaaatgtaataccaagaaaacggtaactaaaaacatggaagaattctcaactggtaccgaccctcgtgtgccggcggtcaagccggactctaagccgtcggccttcgagggagttccactcgaagctgcctccgctgctgtttcagaagatgccgaggtggataaggacttgctgtgtccgatttgtatgcagataattaaggacgccttcctcacgtcttgcggtcacagcttttgctacatgggggggggggacccatcttcgaaacaagagcgattgcccttgttgctctcaatttctcactaataatcagcttttccccaatattttgctcgataagcttttgaagaagacttcagctcgtcaaatatcaaaaactgcatcccctgtggaacagtttcgtcaggcgttacagcagggttatgaggttacaatcaaggagctggacagccttttgtccctccttgcagagaagaagagaaaaatggaacaggaagaagctgagagaaatatgaaaatactgctggatttcttacactgcttaaggaagcaaaaagttgatgaactaaatgaggtacaaactgatcttcagtttattaaagaggacataaattctgtggagagacatagaatggatttgtatcgtgcaagagatagatactctgtgaaattgcggatgcttggagatgactctagcacaag

SEQ ID NO: 1414 - DNA, 427 bp, Gossypium hirsutum
  Clone ID: LIB3585-022-P1-K1-G8
actctcaactggcaccgaccctcgtgtgccggcgggcaagccggactctaagccatcttcctgggaggaagttacactcgaagctgcctccgctgctgcatcagaagatgccgacagtgagatacatagacatcgcatgtagtccgatttcgtatgcagcatagattataggacgctctcttctcacgtctttgctggacacagaattttgctacatgtgtataattacccatcttcgaaacaagagcgattgtccttgacgctctcaatttctcactaataatcagctcttccccaatattacgctcgataagcttttgaagaagacttcagctcgtcaaatatcaaaaactgcatcccctgtgtaacagttttgtcaggcgttacaacagggttatgaggttaccaataaggagctggacaacct

SEQ ID NO: 1415 - DNA, 477 bp, Gossypium hirsutum
  Clone ID: GOSHI-09MAY01-C1360_28
cccacgcgtccgtggtaaataagattctaattcccggaattgcagccaggaagtttcatgccgtggatgttatatattctgatggtagaaaatcaaagctgtcaattgttttttatgctagcaagttgttagttgttagtgtttttaaataaagcaacatgttagtgagtttttcacaacccctctggcagctgctttattagtttgtgttataaaaatgattttgtctttattgaacaaaacgttgatttatttatacctttggttctattttttctttttacttctctcaggaaggtggtcgaaatctgttgtgaagttgaagtaaaaaccaagctatatgcatgcataagccttgcctgcactcctttcagaggttcttaagtatgtaccctttttttatgtgttgtttttgtggactatggactaaattttaaatttgagtgactgtctaaaaactagaatacctagttattt

SEQ ID NO: 1416 - DNA, 521 bp, Gossypium hirsutum
  Clone ID: GOSHI-09MAY01-C1360_23
tttagggagtatcaaaagtctatcaaaaagacagaatatgaaacaataaaaaaccagtggctgtgtatctctcctggacaggcaaaaagatttacaaaatttagagagaggaaaggccttatagagaaagatgtggtaaggacagacagatcgctctctttctatgatggggatgacaatccaaatgtgaatcttttacatgatattctcttgacctactctttttacaactttgatcttggttactgtcaggggatgagcgatctgctatctccaattttgtttgtgatggaggatgagtcagaatcattttggtgcttttgtggctctgatggaacgcccttgggcccaattttaattcgcgatcaaaatggcatgcaattctcagcttttctgcatttatctaagcatggttgggagttgctggacagaacctcttgcaccaaatatttcctagcagaatgactgcttgaaattattttttttgtttccgctggcattctgaaccagtttaaaaggga

SEQ ID NO: 1417 - DNA, 711 bp, Gossypium hirsutum
  Clone ID: GOSHI-09MAY01-C1360_22
cccacgcgtccgaaaagagaagaaaaggggaagaacatttgttcttcttttctcttcatcttccccaaattgctgaaacccctgaggagaaaagggagaaaggaattctttaaaatttcttcttttccttaactgtgagaagggaaatcgatggtgaaaggaaaggggaaaacttcatattttcttctatattatatatatattatctgtacttttacttttcttttcttttggtggtccgaatggatgaaataaaaaggaaggtcggctgcatggagggagaggccatggatttggcatattaaatagttgtttcttcatatgaagaagcttgacaggtgggagacggttaaagtggtaaaggcaaggagaaagtttgtgctcgtaacagcaatttggggaagaattcggtaagctatggttgtaggggttgataaatcgagtttagtagctaaaatattatgttcttcttactaagttccggtggtagtagtgaagtaaaaatttgacaattaaatgcttagatgactgctggaaactacagcttgaaagctcattattccagtatgtaaatactgatttgaatgtgctgtaatatgtggagcaattggtctgctgcatgtatgaaataaaataaaagaaaacaatagttgttaaatattagtttttggtgctgatcggaaaggttaaattcgttgttaaaggggatgt

SEQ ID NO: 1418 - DNA, 591 bp, Gossypium hirsutum
  Clone ID: GOSHI-09MAY01-C1360_19
cggaccggcactccgggtcgacccagcgttcgctgaaagactccgcaaaaacctgtcggacgagctgttggctttggacaaccagatgaaatcttccaaatgccaccatttattgaaggaaactgggacgccactattgatgccttcctcaatggtgatgcaacacaggatggtggaaacccgatggatctttggaactttgatgatttccctgccatggcggagggtgttttctgaacgaactttccataataactagtgttggtaaataaagcaacatgttagtgagtttttcacaacccctctggcagctgctttattagttggtgttataaaaatgattttgtctttattgaacaaaatgttgatttatttatacctttgtttttttttttttctttttacttctctcaggaatttggtcaaaatctgttgtgaagttgaagtaaaaaccaagctatatgcatgcataagccttgcctgcactgctttcagaggttcttagtatgtaccctttttttatgtgttttttttgtggactttggactaaattttaaatttgagtgactgtaaaagtgattgtgtctgaaa

SEQ ID NO: 1419 - DNA, 594 bp, Gossypium hirsutum
  Clone ID: GOSHI-09MAY01-C1360_18
gcaactctcagtatgatttcttttttctatgtttgttttggattaaatttatatatttctccctcgcgtccgaaatcttccatttttatcatgataagagaatgttgaatagatagtgcattgctttaaaattgtgataagaggcatatcagcgactccatggcaatggaggggttagcactaaattgcaatcatgaaaacaacaaaaacatgagaaacacaagatgttgttggttgctaacttttcttttctcttgtttctggttattgttgttgatgatgcattttaactccttttcctgacttgtcaggctatggtcgattcttggggcaagcctttctatgacgcctttagtgagtccgagagcgtgcagctatatgaggttctatatttttgctatttaacttttcattcctttttggcatgtgtggtgaatcaactattctcagtttctgttgctagaaagaacttatagttacatgcatctgtagtcaataataataacaaacaaataaaatagcgaacaagaaaagaagataaccatgctactatgataaatcatattacttgggacacaaatatgtctgaaccat

SEQ ID NO: 1420 - DNA, 611 bp, Gossypium hirsutum
  Clone ID: GOSHI-09MAY01-C1360_16
ctataatcaaatattcaaaaccctatttggttaacaatggaagttgaataaaacccagggtttttggctgcttccatgctcttttcttcttcatatctggaaaatattgctacctaattcagaagtacttctgggatgttgcttatggactcctcgacgaagatatctttcaatcgttgcattagagatggagatttggttattgtatatgagaggcatgataccatgaaagctgttaaagtgtgcgagaattcggttcttcaaaatcgtttcggtgtatttaaacattcggattggattggcaagccgtttggttccaaagttttcagcaacaaaggtggattcgtttacctattggctccgacaccggagttatggactttggttctaagtcataggactcagattctttatattgcggatattagctttgtgatcatgtacttggaagtagttccgggttgtttggttcttgaatccgggaccggtagtggctcattaacaacatcgtttgcaagggctgtgtctccaatgggacatgtgtatacctttgatttccatgaacagagggccgcctcagctagagaggacttcgagaggactggaataat

SEQ ID NO: 1421 - DNA, 644 bp, Gossypium hirsutum
  Clone ID: GOSHI-09MAY01-C1360_15
cggtccggccttcccgggttccccccgcgtccgccaaaaacgccgaaactctaggggagaaaatgggagaaggaaattctttaaaatttcttttccttgaccgtgagaagggaaatcggtggtgaaaggaaggggaaaacttcatgttttcttctataatatatttttctttgtctgtacttttcttttcttttgctggtccgaatggatgaaacaaaaagggaggtcacttgcatggagggagaggccatggatttggcatattaaatagttgtttcttcatattaagaagcttgagaggtgggagacggtcaaattggtaaaggcgaggagaaagtttgtgctcttaacataaatttggggaagaattcgatttgacaaaatcatcaacaaggaaatcccagctaccgtggtgtatgaagatgataagccaaacttatgtagcaactgttcgtgggcctacttcatcggtgactgatttcagatatatttatttttcgctcgaagcaaagcaaaagggaaagtaggagggttttgaggagagtgaaaaatggttggtcctacttcatcggagattgatatcagggtttttggttttcagattcaaagaatcactgtttcgttcagttgaaattatggatctg

SEQ ID NO: 1422 - DNA, 563 bp, Gossypium hirsutum
  Clone ID: GOSHI-09MAY01-C1360_14
gctatctctaattttgtttgtgatgaaggatgagtcagaacattttggtgttttgtggcactaatagaacgctttgggcccaattttaatcgtgatcaaaacgacatgcattctcagctttttgcattatctaaggcctctctctctctttcacagacgcacactcacacacacaaacatgcttaagtgatggatttattatggtttatgtcaaaatgaccaagacctttttccttgttctaaactttgggatatgactgtttaatggtaatctcatgctttatataacttccaacaacctcctgcccctgttgtcccttttggcatggggttaaattttctcctcatctattgtagaaaagggcaatagtgtttatgttcagaattcttgaccataagtttctgtataattaagaccgtttaactttgtaagtgtgtctgttggtcagagaattctggcaattgttttggagacttctttaattattaaaattttttattcttcttcatcgtgtgtagctccctaaaatttcagcctttgcgttggtgtaaagttaaaaagc

SEQ ID NO: 1423 - DNA, 1164 bp, Gossypium hirsutum
  Clone ID: GOSHI-09MAY01-C1360_13
gaaatctcaaaaccctgatataattttgttgatttccctttttgattcatcattcgaagcttgccaattgacaacagtaatctccctcgaagaatcatcaaggttttagcttttagggacatagctccccaggctcctacgcacattttaattattccaaaatcaaaggatggcctaactggtttgtctaaggatattgcttatggattcctcaatgaagatatctttcaatcgttgcattagagatggagatttgattattgtaaatgagaggcacgatactatgaaagctgttaaagtgtgcgagaatttgattcttcaaaatcatgtcggtgtatttaaacattcagattgggtcgggaagccatttggttccataactttcagcaacaaaggtggatttgtttacctattggctccggcaccggagttatggactttggttctaagtcataggactcagattctttatattgcggatattatctttgtgattatgtacttggaagtagttcctggttgtttggttcttgaatccgggaccagtagtggctccaacgggacatgtgtatacctttgatgtccattaacagagggctgcctcagctagagaggactgggcctagcgctttagtcactgtgggagtccgagatattcagggtgaggcttttccgatcagttttctaggttggctgactctgtatttctggacctaccgcaaccttggctaaccattccttcagcttgaaacatgttgaaacaagatggaactctgttccttctcaccttgcatcggacaagtgcaacttcatgtgaaacttagatttgactttacagatcacttgaaggtcaatgatgggaattccactacatgccctccacgcaagaggaggcagccttcaagtgaagcaagtgtgggggacaatgcaagttctccgtcagtcatggcttggccatctgccgaaacttgagggcataccggatatttgacattcgcaaggaagtgtttcttgaaaaaaaaaactctttaacaagttgcaatcaattcaaacactgagttttcatcctgctattatgattgattctttgctcactcagtgacacattcctgagtattcactttacaagttttcatcctattttttgccgggttttaaatcact

SEQ ID NO: 1424 - DNA, 933 bp, Gossypium hirsutum
  Clone ID: GOSHI-09MAY01-C1360_11
cccacgcgtccggatgatgtgtcgttaatgagtaaattgcattttatttgccaaatgacttgttattttagaagtacaaattgagtgttgctaatggtgagttttcgttagactcgttttgttattttcatgcttaaaatatatatattaaattagcattgatgtttcggtttcgatttaatggctgaaaatgttctttaaattttcaaggctacttactgtctggctttagctagattcgttcattgtaagtttaaatgctgctcggaaatagtgtaaaaattactgctatccaattttgtgcccctattatgctgtccaaaatttaaacaaattaatggttctattttcatgtcgattgagggctgtaaagacagtcccatttgttgcattatgctattcagttttgggaccaaataattgtgtattgctggattaaaaatcatggattgttgctgtgatgaactaataaatttcaatactattgagtgtgttcttgcgggatacaaatgccctgcacgttgctgtcttgtgctgtccaaaataggacaaattgaatgtgcttgtgagtgaggttttcaaaggaaactttgcaaaatctcatgtttaaatcctgaagtttgcatgcaggtaagctatggttgtaggggtttataaatcgagtttagtagctaaaatattatgttattcttactaagttcggttgttagtagtgaagtgaaaatttgacaattaaatgcttaaatgactgctggaaactacagcttgaaagctcattattccagcatgtaaatactgatttgaatgtgctgtaatatgtggagcaattggtctgctgcatgtatgaaataaaataaaagaaaacaatagttggtaaatattagtttttggtgctgatcaaaaaagttaaatttcgtgttaaatgggatgtaa

SEQ ID NO: 1425 - DNA, 987 bp, Gossypium hirsutum
  Clone ID: GOSHI-09MAY01-C1360_9
cccacgcgtccgcacttactccctccgttcattccatcttcctctcttctaatttttctgccctcttctttctgctttctttttctttctctcaatagagtttttcttttcctctcttccatttttgtttttgatctgtaaaattccatcgattgctggaaagagcaagagggttcttagagggggaattgaaatctaaatcgaaaatcgaaaaatgttgagggtaaaccgagtgataaaccgggcacgagcttcgatttcaaattgtcgatacctcctaagtcatgacccaaagatttccccttcacctcctcaacatttcgcttcaaaatcatccattcgcttcgtcgatatttacaagcttgcaagcaaggaacaagtcgagaaagaacgagcatgactggcagtgctgatgaattgaatagaggatattttggtgatatgtctgagctaaaacaacgcggtggggggatgagcgatctgctatcttcaattttgtttgtgatgaaggatgagtcagaatcattttggtgttttgtggcactaatagaatgctttgggcccaattttaatcgtgattaaaacggcatgcattttcagctttttgcattatctaagctggtggtgggtgttggctaaatagagacctctgcacagatatttcgagcagaatgactgcttgaattatttcttttgtttccgttggattctgtcgccctttaaaagatacttttggcttgcctggagtagcttagttcttacactaaaagcctgttggctcaacaagatgaacaagttcacagttttgagagacctcaattttgttgcaaaaaaccttggtgttgagtttttcaaaggtactcttgtggtataataatcttaccattactgatgatgtgtagagttgaatgaattttgtattattttattcaacaattagaataaattgtatttatctcttcgatattgaaaaaaaaaaaaaaaaaa

SEQ ID NO: 1426 - DNA, 807 bp, Gossypium hirsutum
  Clone ID: GOSHI-09MAY01-C1360_8
aactctgtaaaatctgtggaattcaaagctcaagctgagaagtctgcaaaaagaaagagggagtgccaatatcgaggaattcgacagcgtccatggggtaaatgggctgctgagatccgagacccgaggaaaggggttagggtctggctaggaactttcaatactgctgaagaagctgcaagagcttatgattcgtgaggcacgtagaattcggggtaagaaagcaaaggtgaacttccctgatgagatgccacgcacctctccaaaacgtgtgattaagacaaatgatgagaaaccacttcccatgtcaaatttgagccctgttgaaccaaatatcaaccagaatttcaattgcttgaacaaaccagagcaggtcttttatgataccatgggtttcgttgaagagaaggcaccaatggatccatttgcttatgtggacactgttcctgctgctgttgatgttggattgaaaccctttggccaatctgacaatacccccttgtatttcggctcagaccagggaagtacttcctttgactgttctgacttcggctggggagaacatggtgcaaagactccggaaatatcatctgctcttgaagctactatggacggtgatgattttctggtggatgcaaaccctaagaagaagctgaaaccaagctctgagaatgttatgcctattgaggacaattcagcagagagtttgtctgatgagctactggctttgggcgatcagatgaagtacccatttcttgagggcaactgggatgccacccttgatgccttactcaatggagatgcaag

SEQ ID NO: 1427 - DNA, 831 bp, Gossypium hirsutum
  Clone ID: GOSHI-09MAY01-C1360_7
gctggtgcgcccgctgcaagcgcgcccgcggacggaacctggccggaccgcacccgcccccatatgtgaatcttttacgtgatattctcttgacctactctttttacaactttgatcttggttactgtcaggggatgagcgatctgctatctccaattttgtttgtgatggaggatgagtcggaatcattttggtgttttgtggctctgatggaacgccttgggcccaattttaatcgtgatcaaaatggcatgcattctcagctttttgcattatctaagctggtggagttgctggacagacctctgcacaaatatttcgagcagaatgactgcttgaattatttcttttgtttccgctggattctgatacagtttaaaagggaacttgaatacgagcaaacaatgcgattgtgggaagtattgtggacgcattatttgtcggagcacctccaactgtatgtgtgcgtagctatcttgaagcgctatcgagggaagataatgggagagcaaatggactttgataccctcttgaagttcatcaatgagctgagtgggcagattgagcttgatgcgatcctcagggatgcggaagctttatgtttatgtgcgggagggaatggagctgcctgcatcccacctggaactgtaccttctttgccagttgacaatggtttattctatagtcagcaagatgatgaagtactgtaaattgattcaccattatgttttagtgtgaaacagattcattgaccttgtatttagctgtttttttaacaaaacattaatgcgaatggattggatgaatcataatataatttctttttcgttc

SEQ ID NO: 1428 - DNA, 875 bp, Gossypium hirsutum
  Clone ID: GOSHI-09MAY01-C1360_6
atttatagatgagtgatgaaacacagaagagccgacgcgcggtttttagttctcacttaacccgtttgcctccggcatcttcccactcatggcttcggagaaagaagctgcccttgctgctgctccctctgattctcctaccatatttgacaaaatcatcaacaaggaaatcccagctaccgtggtgtatgaagatgataaggtcttagctttcagggacatagctccccaggctcctacgcacattttaattattccaaaatcaaaggatggcctaacgggtttgtctaaggctgaggagaggcactgtgaaatccttggctgccttctttatactgcaaagcttgttgcaaaacaggaagggctggaagatggattcaggattgtgatcaatgatggccctaaaggatgccaatctgtgtatcacattcatgtccacctccttggagggcgccaaatgaactggcctccaggctaaataaagaagttatagttgatataggtatttcatgataacttcaataacgaaagccgacatgtgggctttcatcgatgatcaatggagtacgctcttgaatagggaaaactaatgaaccttgtgaaatgcattgcttggaatctcagcgtcgcccgtcgaacgttccccagctgtttgccgggctaatataatttaactggttttcagtgcatgagaaatatgaagtcttaggtctgtgaccaagatcttacatggagagatgaaatttgttagtagagcacctgcacttaataataggcataataaactgtttgaaaattttctaagggaaaaaaatgaaaaaaaaccaaagggaaatgaaaataaaaataggggtaaagatatttatattgtatat

SEQ ID NO: 1429 - DNA, 1135 bp, Gossypium hirsutum
  Clone ID: GOSHI-09MAY01-C1360_4
gtttaaggagaccttcacgctccccactttgccctctcccattttctcacctgaaaaaagcggacaattcttcatcgtagcgtcaggtaaatcgggtgataaaccgggcacgagcttcgatttcaaattgtcaatacctcctaagtcatgacccaaagatttccccttcacctactcaacatttccattcaaaatcatccattcgcttcttcgatatttacaagcttgcaagcaaggaaaaaatggagtaagattctaattcgaacgagcaattgcgctcaaggaagtttcctgccatggatgttatatattctgatggtagaaaatcaaagctgccgattgtttttgatgcaagtggcgttgatgctagcaagttggctgtccctgaagcatctttagtctgtctaccatttagagcaaactctcaggtatcttttatagactcttggctcttatgcttgaatcccattaaatgactgcttcttcgatttatgaggaaatctagtgatggagcgaataatgctcttcagaggcatattgttttttcatttggtgatcattattacttcagaaaggaacttaagattctgaaccttctaactgggtaatcaaaagtttcttttatcctaattaataacaaaactaatattcaagggatactagtgtcaaatgaaaataataatgtgctttgatggaaacatggtcctgtttgctgttttcttttagatttctgcaaccaagcaaagccttaggttttccattttgggtgagcgagtggaaaagtaaagaagtatccttatgctagtgtcagttttatttcaacttcactttcttgtattctagttttgtgtcagacttaagttatgtgcctatcaatatcctattgatattccttgcggatacttttggcttgcgtggagtagcttagttcttataccaaaagcctgttggctcaacaggatgagcaagttcacagttttgagagacctcaattttgttgtagaaaaccttgttgttgagtttttcaaaggtactgttgtggcataataatcttcccattactgatgatgtgtagagctgaatgaattttgtattattttcttcaacaattagaataaattgtattttcttttcg

SEQ ID NO: 1430 - DNA, 1049 bp, Gossypium hirsutum
  Clone ID: GOSHI-09MAY01-C1360_3
cccacgcgtccgcccacgcgtccgcccacgcgtccgaaaaaattaattttgcgtctaaatttctctaaaaaatctcgtaaatcccatactggaagtccaattcgccatgtgtggaggtgcgattatctccgatttcattccgcctgcgcggtcgcgactggtgacggcgaattatttgtggccggatctgaaaaaatcctgctctaaaaagtggtcgggtagaaagcactcgaagaagccggcggtcggctttgaagatgacttcgaggctgattttcaggtgtttaaggatgaggattctgatgttgatgacttcgatgatgatgttgatgatgttttggctgatgttaagtcctttgctttctctgctacaaagaaaccctctcctgctgtttctcatggttcaaactccataaaatctgtggaattcaatggtcaagctgagaaatctgcaaaaagaaagaggaagaaccagtatcgcggaattcgccagcgtccatggggtaaatgggctgctgagatccgtgatccaaggaaaggggttagggtgtggcttggaacttttaataccgctgaggaagctgcacgagcttatgatgctgaggcactgagaattcggggtaagaaagcaaaggtgaacttccctgatgagactccacgtacctctccaaagcatgctgctaaaatgaattcccagaaacctctttccgggtcaaatttgagttctgttcaatcaagtctcaacccagatttcagttactcgaacaaacttgagcagggctactatgataccgtgggtttcattgaagagaagtcactaatggatcagtttgcatatgcagaccctgttagagctgctgtagatgatgggttaaaaccctttgctgaacctgagaataccgcttcgtattttaactcagatcagggaagtaacaactttgacagttccgaccttgtctggggcgaacagggtgcccagactcctgaaatatcatcctctcttgaacctactctagaggtcaacgagtttctggacaacgcaaccctac

SEQ ID NO: 1431 - DNA, 1000 bp, Gossypium hirsutum
  Clone ID: GOSHI-09MAY01-C1360_2
tttttggaactttgatgatttccctgccatggcggagggtgttttctgaacgaactttccataataactagtgtttgtaaataaagcaacatgaatttggtcaaaatctgttgtgaagttgaagtaaaaaccaagctatatgcatgcataagccttgcctgcactgctttcagaggttcttaaggccggtgttgtgttatggaaattggtgcattatgttggcaatgtgcagcagcagaggcacgtgaagtcatatgcgtggcagagcaatgtgcagctgcatgggacaggacatagataagggtcatatggaaagtaggaaaattttacagtctttttctgatctgccctgccttccatttagggtcgtagagcatttggtggagcatggcgaagttattatcgacaaaggaacgtgtcgataaggtcgcccatgtatgatgggattttgtttggtagctgagggtctgaatgtcaagggatatatgatggaggggggggtcaagttaggtgcagtaggccccatttcccaccatcaaagagttgttaaaggggtagctgagccattggcaacccgcaaccacgggaagagagaatcaaaaatggtgaaatgaaaggaaggtatcgttaaaggggatctcgtgattgtgcatgaggagcataacatcgcttgcaaaatcagaccaccaccaccaccagcgtcgagggccctttcattgacaataatcatatataattgtgatcccattagttcttaatatcatttagatcatttttccctgtcttctacagccctacttttcgggaagccataaccactttgatttcaagggatgacttcacccatcaaaccttaccatatccaacaaatcgttccggaaagatgcattgggtgataaacagcttaatggttttaagtaagctatttattaaaatttctaaacaaataaaaacagtaaattagtctttttattattaaattgatgattttaatttttat

SEQ ID NO: 1432 - DNA, 1671 bp, Gossypium hirsutum
  Clone ID: GOSHI-09MAY01-C1360_1
acggtccggtaattcctgcccccgccgacccaccgtcgcatttatttcactacccaacaacccaaaagataaaaggaatcgtttacttgttcgtagcaatttatcgtcatttcaagctcaattctctgaaaatttttgtgctgaacttcttttttctctttgtaccaccatgtgtggaggtgctattatctccgatttcataccgccgtcgcggtcgcgacgattgacggccgatttcttgtggcccgatctgaaaaaatccgggttgaagaaggggtcgggtaagagatactcgaagcccgtgatcgacttgggcgatgatttcgagactgactttcaggagttcaaagatgaagaatctgatatagatgattatgatgttgatgatgttttggctgatgtaaagccctttgcttttaacgctacaaagaaacctgcttctgctgtatctcatggttcgaactctgaaaaatccatgcaattcaatggtcaagctgagaaatgtgcgaaaagaaagaggaagaaccagtatcgtggaatccggcagcgcccatggggtaaatgggctgctgagatccgtgacccaaggaaaggggttagggtctggttaggaactttcaatactgctgaagaagctgcgagagcttatgatgctgaggcgcggagaattcgtggtaagaaagcgaaggtgaacttccctaacgagactccgcgtacctctccaaagcgtgcggtcaagacaaattctcagaaaccactttccaagtcgaatttgagccctgttcagctaaatctcaaccagaattacaattacttgagccagcctgagcaggaatacttcgataccatgggtttcgtagaagagaagccactggtcaatcagtttgcatatgtggaccctgttcctacgtctatagatgctggatttaatcaatcagataatgcccccttgtacttcaattcggaccagggaagtaactccatcaattgttccgactatggctggggagaacagggtgccagaactcctgaaatatcatccattcttgaagcttctgtagtgggtgaagagtttcttgaggatgctaaccctagcaagaagctgaaaccaagttctgacaatcttatgcatgctgaagagaactccgcaaagaccttgtcggacgagctgttggctttggacaaccagatgaaatacttccaaatgccaccatttattgaaggaaactgggacgccactattgatgccttcctcaatggagatgcaacacaggatggtggaaacccgatggatctttggaactttgatgatttccctgccatggcggagggtgttttctgaacgaactttccataataactagtgtttgtaaataaagcaacatgaatttggtcaaaatctgttgtgaagttgaagtaaaaaccaagctatatgcatgcataagccttgcctgcactgctttcagaggttcttagtatgtacccttttttatgtgttttttttgtggactttggactaaattttaaatttgagtgactgtaaaagtgattgtgtctgaatttgtctatgtttgaatactgaaaaacatatgaatgttttaaactctgctatttgtttctcgcatgctctcttttagtgctttaacatgagtctgcaacttcttttggtct

SEQ ID NO: 1433 - DNA, 557 bp, Gossypium hirsutum
  unsure (1)..(557): unsure at all n locations
  Clone ID: LIB3828-027-Q6-N6-F3
caatatcgaagagataaatacaatttattctaattgttgaataaaataatacaaaattcattcaactctacacatcatcagtaatggtaagattattataccacaagagtacctttgaaaaactcaacaccaaggttttttgcaacaaaattgaggtctctcaaaactgtgaacttgttcatcttgttgagccaacaagcttttagtgtaagaactaagctactccaggcaagccaaaagtatcttttaaagtgtatcagaatccagcggaaataaaagaaataattcaagcaatcattctgctcgaaatatttgtgcagaggtctatctagcaactccaccagctgaaaaaagtagtacagttcaaaatcagagaccaaatctctgttcatgatattgatttacttggtttagccatttataaattctttgtcagaaaaaatagtgtcatgataccatttaatcttctttatgctgtttatgggcaagggnagaagtgggttagctggttataaactactttatgttgtttccttcccaggaatacanatgacatc

SEQ ID NO: 1434 - DNA, 760 bp, Gossypium hirsutum
  unsure (1)..(760): unsure at all n locations
  Clone ID: AW187386.1
gattactggttcgatgtttaaggaaacgctctctttcaaagacgctccccactttgccctctccccctctcccactttctcacctgaaaaaagcagacggacactccttcatcgcagggtcagcaaggaaaaaatcgagaaagaacgagcaagacttgttgatgaattgaatagatgatattttgatgatatgtctgagctaaaacaacatggtggtaagattctaattcccggaatagcagccaggaagtttcatgccgtggatgttatatattctgatcgtagaaaatcaaagctgctgattgtttttgatactagcaagttggctgtccctgaagcatctttagtctatctatcatttagagcaaactctcaggctatggtcaattcttggggcaagcctttctatgacgcctttagtgagtctaagagcgtgcagctatatgagattacacgcgaccttttattttactgccaacttcagctgttgagggtccgggaaatataatgatacaagctctactggatagacttgttcctttgcatcttcagcaactagtggaagattactgcaactgggttcaactccaaaagcaactgataaattagcttctttgttcatatcggctattaaactancaaaggtaaggccgagtaactcaataaatttgttatntcagcagaaaaagcattgttgagattcgcaaactcaataaattttgacatcttgggttaaaaagaattggaatctttatcgcct

SEQ ID NO: 1435 - DNA, 580 bp, Gossypium hirsutum
  Clone ID: AI730640.1
caaaaccctaattatatatttttgatttccctttttgattcatcaatcaaagcttgccaattgccaatagtaatctccctcgaagaatcatcaaggtcttgaaggaggcctctaggctttatgctgaaagttgggtaagggatattggtcctgatcttagaccaaacaattatgagaaggatgatgggactgaaggtaaatccaatggagataagaggagtacaggcacagaaccttcgacattggaggatattggtacttattttttcttctttttggtatcactctgaagaaagatagcatgatgtgccataattttcagcaacagaggtggattcctttacctattggcttcgacaccggagttatggactttggttctaagtcataggactcagattctttatattgcggatattagctttgtgattatgtacttggaagtagttccgggttgtttggttcttgaatccgggaccggtagtggctcattaacaacattgtttgcaagggccgtggcgccaacgggacatgtgtatacctttgatttccatgaacagaaggctgcctcagctaaaga

SEQ ID NO: 1436 - DNA, 580 bp, Gossypium hirsutum
  Clone ID: uC-gsflnu33B028c11b1
gctggtagcgcctgctggtagccgctgcggacagtaaccgggtgcgaccgcacgcgtccggttatttcttggtggacatgatgtatggaatgacctacatttgttgtacgatggattgccatgacaaccagttatggtatgagacacctagtttctgcagtctcgtccgtgtataacgacgggggacatgaagaatcgctgtggatatctatcgtaatgcacgtggagcacaatgactgtgaacacgctgaaggcatgccatttgggcacttgtgctttagctaatctggaggagttgctggacagacctatgcacatagattctgtgcagacagactgttcgaatcatatgatgcgctagctatgagacgtgatacagataaaacggggaccagaatacgagcactcgatgcgattgcggaaagtattgtggacgcattattggtcgaagcacctgcgactgtatgagtgcgtagctatcttgaagcgctatcgatggaagataatgggagagcacacggaatttgataccctggggaatttcatcaatgagctgattgggcaaattgagcttgatgct

SEQ ID NO: 1437 - DNA, 499 bp, Gossypium hirsutum
  Clone ID: LIB3582-030-P1-K1-D2
cccacgcgtccgcccacgcgtccgcccacgcgtccggcactggcaaataagattctaattcgcggaattgcagcaaggaagtttcctgccgtggatgttatatattctgatggtagaaaatcaaagctgccgactgtttttgatgcaagtggcgttgatgctagcaagttggctgtccctgaagcatctttagtctgtctatcatttagagcaaactctcagaggcatatcagcgactccatggcaatggaggggttagcactaaattgcaatcatgaaaacaacaaaaacatgagaaacaaaagatgtttatagttccgggttgtttggttctagaatccgggaccggtagtggctcattaacaacattgtttgcaagggccgtggcgccaacgggacatgtgtatacctttgatttccatgaacagagggctgcctcagctaggcatgttttatgacttcgagaggactggaataagcacttaagtcactatgggag

SEQ ID NO: 1438 - DNA, 544 bp, Gossypium hirsutum
  unsure (1)..(544): unsure at all n locations
  Clone ID: uC-gsronu33B002b05b1
cctttttcataccgcccacgcggccgcgactatggacgggggcaatgttgtagccctagcggtcgacaagacnggcaggagagacagggcaatactgagatactcactgcccgtgatcgactagggcgaggactttgagactgactttcaggagttcaaagatgaagaatctgatatagatgattatgatgttgatgatgttttggctgacgtaaagccctttccttttaacgctagaacgaaacctgcttctgctgtatctcatgggtcgaactctgaaaagcccatgcagttggatggacaagctgagaaatgtgcgacaagaaagaggaagaaccagtatcgtggaatccggcagcgcccatggggtaaaagggctgctgagaaccgtgacccaaggaaaggggccagggcctggttaggaactttcaatactgctgaagaagctgcgagagcttatgatgctgaggcaccggaaaatccgtggaaagaaagctaaggtgaactttcctaacgagactccgggtacctctccaagcatgca

SEQ ID NO: 1439 - DNA, 425 bp, Gossypium hirsutum
  Clone ID: LIB3584-002-P1-K1-D4
cccacgcgtccgagatggaactctgtgttccttctcaccatgcatcgaacaagtgcaacgttcatgtgaaactcttagatctgactttacagatatacggaccttggaaatactgctccgcacgtacgaagtccgtgaatggaaaatggatcactcgaaagtcgatgatggtaattccactgcatgccctccacgcaagaggaggcagccttcgagtgaagcaagtgtgggggacaatgcaagttctcctgcagttatggcccggccatctgctgaaacacgagggcatactggatatttgacattcgcaaggaagtgtgtttcttgaaaaaaaaaaaaaattacaagttgcaaacaattttaatcctactattatgattgagtcttagctcacttcagtgacccattccttgaggattctcttt

SEQ ID NO: 1440 - DNA, 362 bp, Gossypium hirsutum
  Clone ID: LIB3166-032-P1-K1-H8
caatcatgaaaacaacaaaaacatgagaaacaaaagatgtttatagttccgggttgtttggttctagaatccgggaccggtagtggctcattaacaacattgtttgcaagggccgtggcgccaacgggacatgtgtatacctttgatttccatgaacagagggctgcctcagctaggtaagcctaaatgtttattgtttgcaaaagtgcattgtgatgaaatatgacatagtaattgcttaggttaaacttgaatactgggttatcttgagttgatgtcttcatagatctacattttgttgccgtgatacttcattgtctctaattgtctcggtttacaaatctttattagtttcattagtg

SEQ ID NO: 1441 - DNA, 519 bp, Gossypium hirsutum
  Clone ID: LIB3582-017-P1-K1-G9
cggacgcgtgggcggacgcgtgggcggacgcgtgggctggttaggaactttcaatactgctgaagaagctgcgagagcttatgatgctgaggcacggagaattcgtggtaagaaagctaaggtgaacttccctaacgagactccgcgtacctctccaaagcatgcagtcaagacaaattctcagaaaccactttccaagtcaaatttgagccctgttcagccaaatctcaaccagaattacaattacttgaaccagcctgagcaggaatactttgataccatgggtttcgtagaagagaagccatcggtcaatcagttcgcatacgtggaccctgtttctacgtctatagatgctggatttaatcaatcagataatgcccccttgtacttcaattcacaccagggaagtaactcgatcaattgttccgactatggctggggagaacagggtgccaaaactcctgaaatatcatccattcttgaagcttctgtagagggtgatgagtttcttgaggatgc

SEQ ID NO: 1442 - DNA, 363 bp, Gossypium hirsutum
  Clone ID: uC-gsflmaxxa026f07b1
tcgatttatttcactacccaacaacccaaaagataaaggaatcgtttacttgttcgtagcaatttatcgtcatttcaagctcaagtctctgaaaatttttgtgctgaactccttttttctgtttgtactaccatgtgtggaggtgctattatttccgatttcataccgccgtcgcggtcgcgacgattgacggccgatttcttgtggcccgatctgaaaaaatccgggttgaagaagggttcgggtaagaaatacttgaaccccggtgatcgacttggcctataatttgaactctgttttaagggtttaaaaagaaaaaattccaattaaagattttttacgtgtttttttttttttgggatt

SEQ ID NO: 1443 - DNA, 452 bp, Gossypium hirsutum
  Clone ID: LIB3584-013-P1-K1-D5
gcgtgttgcttcaaaatcatccattcgcttcttcgttatttacacgcttgcaagcaaggaaaaaatcgagaagaacgagcaagactggcagtgctgatgaattgaatagaggatattttgatgatatgtctgagctaaaacaacatggtgccaggaagtttcatgccgtggatgttatatattctgatggtagaaaatcaaagctgctgattgtttttgatgctagcaagttggctgtccctgaagcatctttagtctgtctatcatttagagcaaactctcagctatggtcgattcttggggcaagcctttttatgacacctttagtgagtccaagagcgtgcaactatatgaggttctatattttttctatttaacttttcattcctttttggcatgtgtggtgaatcaattattatcagttttctgttgctagaaagaacttatagtta

SEQ ID NO: 1444 - DNA, 421 bp, Gossypium hirsutum
  unsure (1)..(421): unsure at all n locations
  Clone ID: LIB3146-014-Q1-K1-G7
cgaagaattcggggtaagaaagcaaaggtgaacttccctgatgagatgccacgcacctctccaaaacgtgtgattaagacaaatgatgagaaaccacttcccatgtcaaatttgagccctgttgaaccaaatatctaccagaatttcaattgcttgaacaaaccagagcaggtcttctatgataccgtgggtttcgttgaagagaaggcaccaatggatccatttgcttatgtggacactgttggattgaaaccctttggccaatctgacaatacccccttgtatttcagctcagacaggggaagtacttcctttgactgttctgacttcggctggggagaacatggtgcanagactccnganatatcatctgctcttgaagctactatggagggtgatgatttttggaagatgcaaccct

SEQ ID NO: 1445 - DNA, 399 bp, Gossypium hirsutum
  unsure (1)..(399): unsure at all n locations
  Clone ID: LIB3145-044-Q1-K1-B5
cccacgcgtccgcccacgcgtccgaggaaacgctcaatacaaagacgctccccactttgccctctccccttctcccactttcaaacttgaaaaaagcagacggacaatccttcatcgcagggtcagcttgcaagcaaggaaaaaatggagaaagaacgagcaagactggcagtgctgatgaattgaataaaggatattttgatgatatgtctgagctaaaacaacacggtggtaaggaatttggtcaaaatttgttgtgaagttgaagtaaaaaccaagctatatgcatgcataagccttgcctgcactgctttcggaggtttttaaatgatacaagctctactggatagactngnntctttgcttcttcagcaactagtgcaagaatacagcaactgg

SEQ ID NO: 1446 - DNA, 394 bp, Gossypium hirsutum
  Clone ID: LIB3145-050-Q1-K1-E1
attttcttcttcaaatcgggaaaaaatggttttctaattaaaaagaccttttgggtaagtcttttttttctcaattttctaccttaaatattgatgaaaatcattcatcttacattcttttctatttagatacattcatatattttaaatgaatttgggtctccctggtattttaagcgatagtttattcttaatagaaacttggatatgtggtaaatatttttgctttgggagtaaattttggtacagaaattgcatattagtccgacatcatctatgtattcaattgaatagttccgggttgtttggttcttgaatccgggaccgatagtggctcattaacaacatcgtttgcaagggctgtggcgccaacgggacatgtgtatacctttga

SEQ ID NO: 1447 - DNA, 238 bp, Gossypium hirsutum
  Clone ID: uC-gsflnu33B097b07b1
tcctccacgcgtccgatttatttcactacccaacaacccaatagataaaggaatcgtttacttgttcgtagcaatttatcgtcatttcaagctcaattctctgaaaatttttgtgctgaactccttttttctgtttgtactaccatgtgtggaggttctactctttatcttcactcttcctctctttctttcttttccttctcttctcattactcttttctttttcttcttcttccct

SEQ ID NO: 1448 - DNA, 296 bp, Gossypium hirsutum
  Clone ID: LIB3146-002-P1-K2-A11
cccacgcgtccgtccacgcgttcgcccacgctttcgcccacgcgtccggaactttcaatactgctgaagaagctgcgagagcttatgatgctgaggcgcggagaattcgtggtaagaaagcgaaggtgaacttccctaacgagactccgcgtacctctccaaagtgtgcggtcaagacaaattctcagaaaccactttccaagtcgaatttgagccctgttcagctaaatctcaaccagaattacaattacttgagccagcctgagcaggaatacttcgataccatgggtttcgta

SEQ ID NO: 1449 - DNA, 360 bp, Gossypium hirsutum
  Clone ID: uC-gsflnu33B146d02b1
ctctcgcgtccgcctaacgggtttgtctaaggctgttgagtggcactgtgaaatccttggctgccttctttatactgcaaagcttgttgcaaaacaggaagggctggaagatggattcaggattgtgatcaatgatggccctaaaggatgccaatctgtgtatcacattcatgttcacctcattggagggcgccaaatgaactggcctccaggctaaataaagatgttatagtttgatataggtatttcatggtagtgtgcattgtatgtttcatggtcctgatgatatcttcaataacgaaagccggtatgtgggctctcatcgatgatcaatggagtacgctcttgaattgggaaaac

SEQ ID NO: 1450 - DNA, 347 bp, Gossypium hirsutum
  Clone ID: uC-gsronu33B047a01b1
cccatgcgttcgaatttctctaaaaaatctcgtaaatcccatactttaaatccaattcgccatgtgtggaggtgcgattatctccgatttcattccgcctgcgcggtcgcgactggtgacggcgaattatttgtggccggatctgaaaaaatcctgctctaaaaagtggtcgggtagaaagcactcgaagaagccggcggtcggctttgaagatgacttcgaggctgattttcaggcgtttaaggatgaggattctgatgttgatgacttccattatgttgctgttcattttctctctctttattactatctcatctctttttctctcctttcccttctccatgagt

SEQ ID NO: 1451 - DNA, 280 bp, Gossypium hirsutum
  Clone ID: uC-gsronu33B134h07b1
tctttactcgtccgaccactcgtgcgcccacgcgggccgggtgaaccagtgtcggggaatccggcagcgcccatggggtaaatgggctgctgagatccgtgacccaaggaaaggggttagggtctggttaggaactttcaatactgctgaagaagctgcgagagcttatgatgctgaggcacggagaattcctggcaagaaagctatggtgaactttcctaacgagacttcgtggacctctgctaagcatgcagtcaagacatagtctgagaaaccactt

SEQ ID NO: 1452 - DNA, 1388 bp, Gossypium hirsutum
  Clone ID: GOSHI-09MAY01-C1300_1
cccgggtcgaacccacgcctgtccgaaaaaaatattaataactcaatcaaaattactctccaagaaacaaaattttgttatgcttaatatctttaatttgatctgtatctgttttaattctgcccttttttcgagtagttttttattcgccaaattgcccgaggcctatgcttttttgaatccaatcgtagattttatgccagtaatacctgttctcttttttctcttagcctttgtttggcaagctgctgtaagacttatctgatcttttcaattgttagaattttttttttcttgaatcacgcttgtcgttcgcttggccaccttccctcatctccctcccttccttccttccaattcttaattttctttttccttccaattcttcttcttttttttttcttttgggaataattcgaaaattgattccatttttccatgatttcaaggtattgttgaggctgcatatttgaatagcacttaggaaaaatattaagccgaacatgagcacaatagaagtgagggggccttctcttagagggtatcgacgaaggaaggcactcctggatctcaatgttcctcccactgaaatcagggaacaggagggtacttcgcagcaggctggatctgagcaactgactgctcaacccgtacagcctccaccacctgcaactattgatgttgaagctattgatgatgatgtaattgaatcttctgctatagcattcgcagcggctaaaaacaattctaggagaagccgtggaaggactgttgttgacgtagattcagggcggcttgctcggtcaactaataataacctgaacaggtgccggagacttcctccgtccccagtagttatcaattgtgatcggtatatcaatttggagagttcaccgcagtctatggtcaaggaaattacaaagccccagccacttcccaaggagccaaccttcacttgtccgatttgtatgggttcattaaatgaggagatgtcaacaagatgtgggcacatttcctgcaaggcatgcatcaacgctgcaatagcagcccagggaaaatgcccaacttgcaggaaaagagtgactgtaaaggaactaattagggtcttccttccatcagccagctgaaaatgagcttcatgcccaattagtgatggataactcaaactgcaattgaaaagggaaagaagcattgaattctgtgcatcagcggagctaatttttggatttttggaatctccaagatgcccaagctttaaactatatttctgcaaacaatccttttgacaagttatctgagcatgcttttcattgctttcttagatgcatgtgaatctgccagttgataacctcagcttcattattatttgaattaaatctagacttgac

SEQ ID NO: 1453 - DNA, 446 bp, Gossypium hirsutum
  Clone ID: LIB3585-022-P1-K1-D2
cggacgcgtgggcggacgcgtggggatgtctttttggaaggaaaatgaatcaaaggttgtgaaagggaattatatatgtactgttacgctgccatttttctaaagcattctgtttctgtcttgatactgggcttcaagatgttctttcaattatgtagccagctttctgaatgatattattcattcattcaaattaacttctgatgatggttgctattctatttcagggataattcaaactggaattgaaaagggaaagaagcaatgaattctgtgtatcagcggagctaatttttggatttttggaatctccaagatgcccaagctttaaactatatttctgcaaacaatctttttgacaagttatctgagcatgcttttcattgctttcttagatgcatgtgaatctgccagttgataacctcagcttcattattatttgaatt

SEQ ID NO: 1454 - DNA, 357 bp, Gossypium hirsutum
  Clone ID: uC-gsflmaxxa041b10b1
gaattcgaaaattgattccatttttccatgatttcaaggtattgttgaggctgcatatttgaatagcacttaggaaaaatattaagccgaacatgagcacaatagaagtgagggggccttctgttagagggtatcgacgaaggaaggcactcctggatctcaatgttcctcccactgaaatcagggaacaggagggtacttcgcagcaggctggatctgagcaactgactactcaacccgtacagcctccaccatctgcaactattgatgttgaagctattgatgttgaagctattgatgatgatgtaattgaatcttccgctatagcattcgcagcggctaaaaacaattctagga

SEQ ID NO: 1455 - DNA, 948 bp, Gossypium hirsutum
  Clone ID: GOSHI-09MAY01-C1330_1
tatcttcaacctgaatctgaaagatcaactgctcagcccttatcattgggtttaccaactgcgtcgaccttcgaggatgatattaacgatacatggcctgaccaaaatgaaagagatgatttcaatgtaccagaagactcctttgagcaggagatactgatgtggaagaaaaatgggaagctcgatcaatacggtttctctactgcagtagagaacaagttacggaagcctaatggtcagacaaaatggaaagaaccaataagatcagatattaagcattcaaaatcagatgatgatttgaatgctctcctacaggaagaggaggatcttgtaaatgcccataggaaacaagtggaggaaactatgaatattgtcaaagaggagatgaacctgctggttgaagcagatcaacctgggaaccagctggatgattatatatcgagattgaccactattctttctcagaaggctgccggtatcacacagttacaaactcgcctggctaatttccagaggcgcttgaaggaacacaatgtgttagtatcttcatccggctattgattacagaattgaagatagaagtcaaaactattcatttgacttctcccagatacattgctagtttggttaagagtctttggatttgtgattttttattttttacaatttttaagggagattctattgagaatttgatttggcagcagtttgctggatgattcagattcaccatgtgagctgcccttctttcttttccataatgctatcctcttttattttttttcccctttattttgtgatttttaaaaagaattaggcattaggcattttcatgccttttggtttgctattgtaaagttctgcagcattgtaactggaatcatcctatgtttcatttacaaaaaaggaaaaaagataaaaaggcactgcatgaattattacgtaacg

SEQ ID NO: 1456 - DNA, 646 bp, Gossypium hirsutum
  Clone ID: GOSHI-09MAY01-C1320_3
gtgggatcttccaacgaggatgatgataataacattgtgatgaaatggtttgaggaaaactaccccaaaaggaaccaagaattcgaggtttacagcatcgaagcaactgcaagcatcgatgtttcggattggttgatgatgaatgtaagagaagaagattacgttgtaatgaaagcagaagctgaagtggtggagaagatgatagaaaggaaaacaattggattggtggatgaattgttctttgagtgtaacaatcaatggcaagatgaagtgaagaagaagaagaagaagaagatgaggaaaaagaaaaggaagaagaataaaagggcttattgggaatgtgtagctttgtatggtaggttgagggatgaaggagttgcagtgcatcaatggtgggaatgaaaattaccaattaagtcacgattagaagacagatgctgtcttttcgtactatgaaactgcatctactgcttgtgtgtgtgtgtgtgtgtgtgtgtgtgatgttttaggagggtttatgtgggggagtttagatgtgatttttccccaaataaaaaccatattatctctttaagcaaggtggttgatgttgattgttgttttgatgttccttttcttaataataaagatgcagtgtggcaattta

SEQ ID NO: 1457 - DNA, 2803 bp, Gossypium hirsutum
  Clone ID: GOSHI-09MAY01-C1320_1
cggccgcgtggctctcactgctgccgtggtgtcctcagatcaagatctcttctgatttaaccttggttgagaaatggaggaaactttgctccatgggactttacatgctacgatctatgaagttgataggcttcatgatggaggtggaaacttcttcggcaagcttgtggcaaatgtgcaggagactattggcattggcaaaggagttccaaagatttatgcaactattgatcttgaaagggccagagttggacgaaccagaacaatagaaaatgaaacttccaaccctaggtggtttgagtctttccacatttactgtgcccataatgcttccaatgtggtgttcactgtcaaagacgacaatcctattggagcaactctgattggacgagcatatgtccctgttaaggatctcacagaaggggatgaagtggataggtgggttgaaatcctggatgaagacaagaatccaataaaaagcggtggtaccctcccggccgggcttcaatattttggtgtgacaaaggaccgcaactgggcccgtggtatcgtaagtcgtaagtttcctggagttccctatacgttttatccgcagagaaaagggtgtaaagtttctctgtaccaggatgcccatatcccagacggatttgtgcctaaaattcctcttgccggaggcaagaattatgagccacatagatgctgggaagatatttttgatgctatcaccaacgctaaacacatgatctacattactggttggtctgtttatactgagatcgctttggtgagagactcaagaaggccaaagcctgggggtgacatcactattggtgaattgctgaaaaagaaagcaagtgaaggtgtcagggttaatatgcttgtttgggatgatagaacttctgttggattgctgaagaaggatgggttaatggccacccatgatgaggaaactgaacaattcttcaaggatactgatgtcaactgtgtcttatgccctcgtaatccagatgatggtggaagttttgtgcaggaattacaaatatctacaatgttcactcatcaccagaagattgttgtagtggatgctgcaatgcctaatggagatccagagaaaaggagaattgtgagctttgttggaggtattgatctttgtgatgggagatatgacacacctttccattccctgttcaggaccttggacaccgctcaccatgatgatttccatcagccaaacttcactgatgcttcaatcaccaaaggtggaccaagggaaccttggcacgatatccactcccgactggaagggccaattgcctgggatgtcttgttcaattttgagcaaagatggagaagacaaggcggtaaagatgtgcttcttcagctgagggaacttgaagatgttatcattcccccatctccagttgcatttcctgatgaccatgaaacttggaatgtacagttatttagatcaattgatggtggggctgcttttggtttccctgagacacctgaagatgctgccagggctgggcttgtgagtggaaaggacaatatcattgaccgaagtattcaggatgcctatattaatgctatacgacgagcaaagaattttatctatattgaaaatcagtatttcctcggaagctcatttggctggagtcctgatgacatcaagcctgaggatattaatgctttgcatctgattcccaaagaactttcacttaaaattgttagcaagatcgaggcaggagaacggtttacagtttatgttgttgtccctatgtggccagaaggaatcccagagagtgcctcagttcaggcaatattagattggcagagaaggacgatggacatgatgtataaggatgtcattcaggctctcagagccaagggtagcgacgagaatcccagaaactatttaacatttttctgccttgggaaccgagaggttaagaagagtggagaatatgaaccttctgaaagaccagaccctgatacagattatgccagagctcaggaggcccgtcgtttcatgatctatgttcatgcaaaaatgatgattgttgatgatgaatacataataattgggtctgccaacatcaaccagcgatccatggatggtgctagagactctgaaatagccatgggagcctatcaaccatatcatttatcattaagggaaccagcacgaggtcaggtccatggtttccgtttgtcactgtggtatgagcaccttggcatgcttgatgacacattcctcgcaccagaaagtgaagagtgtgtcaggaaggtgaatcaggttgctgacaaatattgggatctctattcaagtgagtcacttgagcgagacttgcctggacacctactccgctaccccatcggtgtttctagtgatggatctgtcactgaattgcctggcatcgagttcttccctgacacaaaggctcgtgttcttggtgccaaatctgattatctgccacctatcctcactacttaggggatctttactttgttcttaagcaataataacttgtctagtttggtgttactggctttggtagtaacaataaaacttgtttttgtgcttgtgtcatagtctgcagagctgcagtgttgtgttggtattgcttttccgtcagctgtgataccgtgttgtgattttagtgctgactggtataataaaacttgtagcctccgggtatgtgttctgcggttattgttaattatctgttagttgttaccactttgcggaagcatttgagctgcagtttttggttgttgtgttagagactcttcatgatct

SEQ ID NO: 1458 - DNA, 661 bp, Gossypium hirsutum
  unsure (1)..(661): unsure at all n locations
  Clone ID: AI055542.1
aaaataattggtctgcactcacaangtcatggatgtgttaagctctaatagcatggagctatcacaatcattatcattaggaaccagccgaggtagttcatggtttccgttgtcactgtgtatgagcacttggcatgctgatacacattcctcgcccagaagtaagagtgttcaggaaggtaatcaggtgtgacaaatttgggatctcaatcaagtagtcacttgacgagacttgccggacacttaatcagctaccnatcgggtttctagtgatggatctggtcactgaattgcctggcgccgagttcttccctgacacaaaggctcgtgttcttggtgccaaatctgattatctgcncacctatcctcactacttaggggatctttactttgttcttaagcaataataacttgtctagtttggtgttactggctttggtagtaacaataaaacttgtttttgtgcttgtgtcagcagagctgcagtgttgtgttgctattgcttttccgtcatctgtgataccgtgttgtgattttagtgctgactggtataataaaacttgtagcctccgggtatatgttctgccgttattgttaattatttgttagttgttaccacattgcggaagcaaaaaaaaaaaaaaaaaactcaagactagtt

SEQ ID NO: 1459 - DNA, 524 bp, Gossypium hirsutum
  Clone ID: LIB3825-030-Q6-K6-G12
cgggagcatgaagccgacacctgtgagccgctcggtatgactcgggaaccgagaggtgagcagagcgccccatatgaaccttgtgaagacccggacctgatgcagatcatgccagagctcacgaggcccggcgttacatgatctatgttaatgctctaaatgatgatggaagatgatgaatacataataattgggtatggcaacatcaaccagcgaaacatggatggtgctagagactctgaaatagggcatggaagcctatacaaccatatcatttatcattaagggaaccatgacgaggtgaggagcatggtttccgtttgtcactgcggtatgagcaccttgaaatgcttgatgacacatttctcgcaccagaaagagaagagtgtgtcaagaaggtgaatcaaggtgctgacaaatgttgggatctctattaaagtgagtaacttgagcgagacttgtctggacacctacttcgttaccacatctgtgaatgtagtgatggatatgtcactgaattgcct

SEQ ID NO: 1460 - DNA, 534 bp, Gossypium hirsutum
  Clone ID: uC-gsflnu33B078a02b1
cctactcgttcggcagtatctcactgcttctaatggcctcagatttgatggccaaaatctttatggcaatggctttcacggagctcagcctacccaaagctgtgcgttttaaagtgatctaacttaagacattaaatgtatgagtatgtgagacagacgtaatctatgggattgcatgcatcaacctcaattctaatgatgatgcgaagtgcttttttatagccatgggagcctatcaaccatatcatttatcattaacggaaccagcacgaggtcaggtccatggtttccgtttgtcactgtggtatgagcaccttggcatgcttgatgacacattcctcgcaccagaaagtgaagagtgtgtcaggaaggtgaatcacgttgctgacaaatcttgggatctctattcaagtgagtcacttgagcgagacttgcctggacacctacttccgttccccatcggtgtttctagtgatggatctgtcactgaattggctggcatcgagttcttccctgacacaaagcttgtgttct

SEQ ID NO: 1461 - DNA, 392 bp, Gossypium hirsutum
  unsure (1)..(392): unsure at all n locations
  Clone ID: LIB3148-031-Q1-K1-A11
aaaggaaccaagaattcgaggtttacagcatcgaaacaacttgcagcatcgatgtttcggattggttgatgatgaatgtaagagaagaagattacgttgtaatgaaagcagaagctgaagtggtggagaatatgaaccttctgaaagacccgaccctgatacagattatgccagagctcaggaggcccgtcgtttcatgatctatgttcatgctaaaatgatgattgttgatgatgaatacataataattgggtctgccaacatcaaccagcgatccatggatggtgctagagactctgaaatagccatgggagcctatcaaccatatcatntatcattaagggaaccagcacgaggtgaggtccatggtttccgtttgtcactgtggtatg

SEQ ID NO: 1462 - DNA, 294 bp, Gossypium hirsutum
  Clone ID: AI728438.1
caataataacaaagtaaagatcccctaagtagtgaggataggtggcagataatcagatttggcaccaagaacacgagcctttgtgtcagcagagctgcagtgttgtgttgctattgcttttccgtcatctgtgataccgtgttgtgattttagtgctgactggtataataaaacttgtagcctccgggtatatgttctgccgttattgttaattatttgttagttgttaccacattgcggaagcatttgaacggcagttttcggtcgttgtgttaaaaaaaaaaaaaaaaaaaa

SEQ ID NO: 1463 - DNA, 277 bp, Gossypium hirsutum
  Clone ID: uC-gsronu33B111g01b1
ttctctttcgtgcggcagatcaccatcctgaggggaggactagaggaagttttggccaggaattacaaatatctaccatgttcactcatcaccagaagattgttgtagtggatgctgcaatgcctaatggagatccagagaaaaggagaattgtgagctctgttggaggtattgatctttgtgatgggagatatgacacacctttccattccctgttcaggaccttggacaccgctcaccatgatgattttcattagacaaacttcacttgtgcttc

SEQ ID NO: 1464 - DNA, 805 bp, Gossypium hirsutum
  Clone ID: GOSHI-09MAY01-C1270_7
tcgttcaagctgaatgcagagatcaggaaagctcgaccaggtccaagagccaaggaggctcgctctacttcaactatcatggaagcctgcctcaaccaacactacagagcaaggtcacattcattcaacgacttacactatgacctactaaatctgcaactacatcatcttgaaagcacacagtgccgttcacaaatatctgccgcactagttctaccatggtcgtactggtcgagtttggaatgtcacaaaacgtgccatcggtgtcgaagtcaacaagcaagtgggaaacaggattatcaggaagaggattcatgtacgtgttgagcatgtacagactttgaggggcgctgaggaattcaagcttaggaaggtgaagaatgatcaactcaaggcagaggctaaagcaaagggtgaggtcattaccacaaaaaggcagccagaaagggcctagacctggtttcatggtggatggtgctacacttgaaactgttacgcccatcccatacgatgtcgttaatgatctcaagggcggttactaaatctactctgttttttgtttgcggtattggtttggtttccttttttttttttttggcaaaacatcagtggtgaactgaattaaacatttggaagtgctgttttctttagtatattttgaagaggtactgaatcttcagagattttaaatgttatgatatcattttagaagattatggatatgcctatgataaagtgtagtatttggttttgcattgtgtttggtattatcattttgtcacagtccagtttaaaaccttactac

SEQ ID NO: 1465 - DNA, 736 bp, Gossypium hirsutum
  Clone ID: GOSHI-09MAY01-C1270_4
acgcctctctctctatcttctacaagccggcgagggaaggaaaacctgagagggtgaaaaatgccactggtcacggtctccgatctcggactagggatctgttttccaaacccttcagaaagaagggttacatcccattgtccacttacctcaggacctacaagatcggtgactatgttgacgtcaaggtaaatggcgccgttcacaagggtatgccccacaagttctaccatggccgcactggtcgtgtctggaacgtcaccaagcgcgccattggcgttgaggtcaacaagcaggttggtaaccggattataaggaagaggattcatgtcagagtggagcatgttcaaccttcaaggtgcactgaggaattcaagctgaggaagctgaaaaatgatcagcttaaggcagaggccaaggcaaggggtgaggtgattagcacaaagaggcagcctgagggcccaaaacccggtttcatggtcgagggtgcgatgttggaaactgttactcccattccatacgatgttgttaatgatctcaagggtggctactagatctactctgtttttttttgtcttgccgtttttggtttaccctttgcataacttaagtaagcctcgatagttattttggatgtgttgttttcgatttgtagttcatttgaagagttactgcttttgaaaagattttaatcttatcaatcatttgaatttagtgataaaaggaattccattcc

SEQ ID NO: 1466 - DNA, 727 bp, Gossypium hirsutum
  Clone ID: GOSHI-09MAY01-C1270_3
cccccgcgtccgcccacgcgtccggccactcttttcttcaagcgggtgagagagaagaaaatcttaagaggccgaagatgccagctggtcacggtctacgttctcgaacaagggatttgttcgccagaccctttagaaagaagggttacattcccttgtctacttacctcaggacctacaagatcggcgactacgtcgacgtcaaggtaaacggtgccgttcacaagggtatgccccacaagttctaccatggtcgtactggtcgagtttggaatgtcacaaaacgtgccatcggtgtcgaagtcaacaagcaggtgggaaacaggattatcaggaagaggattcatgtacgtgttgagcatgtacagccttcgaggtgcgctgaggaattcaagctcaggaaggtgaagaatgatcaactcaaggcagaggctaaagcaaagggtgaggtcattagcacaaagaggcagccagaagggcctagacctggtttcatggtggatggtgctacacttgaaactgttacgcccatcccatacgatgtcgttaatgatctcaagggcggttactaaatctactctgttttttgtttgcggtattgttttggtttccttttttttttttttggcaaaacatcagtggtgaactgaattaaacatttggaagtgctgcttccttgtgttttgagagtactgatcttaagatttatgtatgattcatttgagat

SEQ ID NO: 1467 - DNA, 741 bp, Gossypium hirsutum
  Clone ID: GOSHI-09MAY01-C1270_2
cggaatcccccgcgtccgcccgcccgtccgcccacccctccctctctctctctcttctacaagccggcgagggaaggaaaacctgagagggtgaaaaatgccagctggtcacggtctccgatctcggaccagggatctgttttccagacccttcagaaagaagggttacatcccattgtccacttacctcaggacctacaagatcggtgactatgtggacgtcaaggtaaatggcgccgttcacaagggcatgccccacaagttctaccatggccgcactggtcgtgtctggaacgtcaccaagcgcgccatcggcgttgaggtcaacaagcaggtgggtaaccggattatcaggaagaggattcatgtcagagtggagcatgttcagccttcaaggtgcactgaggaattcaagctgaggaagatgaagaatgatcagctcaaggcagaggccaaggcaaagggtgaggtgattagcacaaagaggcagcctgagggcccaaaacctggtttcatggtcgagggtgcgatgttggaaacggttactcccattccatatgatgttgttaatgatctcaagggtggctactagatctactctgttttttggtttattcttggcataacttaagtaagctttgttagttattttggatgtgttgtttacgttttgtagtttattttgaagagttactgcttctgcaaagattttaatcttatcaatcattttattttagagat

SEQ ID NO: 1468 - DNA, 2201 bp, Gossypium hirsutum
  Clone ID: GOSHI-09MAY01-C1270_1
cccacgcgtccgcccacgcgtccgccttgcccttatgacccttctctctgcttcacttcactctccttaactttctcatacaatacaaccaacagacaaaccaacaaacatggccgatgaaactccagcccagaatccccctatggcagcagcgccgccgcctccatcctctgccacggtgtccgactccgactcacctgctgttttagaaaaacaagacccttccccgccgtctcatgtaccagctgtgtctgtttctgttaccgaatctgcttctacgactatagctgaaaatgaagagcaggctccgccaccggaaccggcggcattggaacctgattcatcggataaagggtcagggaaagaggagctgcctccgacgccaccgccgcaagcagtggagtcagaatctgagccacctgttgtcaccgaggcaccaaaggaagaaaacccaccagctccagcagcagaaactgtagtgatatcggaatccgagccgcagcagccgcctgctccactgcagcaggaggtggttacggagtcggagtcactggcggcgatgatggagaaagaagagacgggagcaccagcagagcctactgcggcgggtactactactactactacaactagtgctcaagaagaggtggctgctgctgttgaagagaaaaaggttcctcaaaatctggcttctttcaaagaggaaagcaacaaggaagctgatctatccgattccgaaaggaaagctttggaagaactgaagcagcttgttagagaagcaatagactctaaccttttcaattcagaatccaaaagtgaagaaaacccagaaaaggaaaagaaacaagaatcaaaagaggtatccatttggggtattcctctcttaaaagatgaaaggagcgatgttatcctttggaagttcttaagggcaggggatttcaaagccaaagatgccttcgtaatgatcaaaaacacgatccggtggaggaaagagtttgggatcgatgagcttttggatgaagatcttggtgatgatatggagaaagttgtgttcatgcatggacaagataaggaaggccatcccgtttgttacaacgtttatggcgagttccagaataaagaatcgtaccagaaagcgttttccgttgaggaaaagcgaatgaagttcctgcgatggcgaattcagctcttggagaagagtataaggaagcttgatttcagtcctggtggtgtttccaccattttccaggttagtgatctcaaaaactcgcctggacctggaaaaaaggagcttagattggcaacaaaacaggctcttcaggttcttcaagataattatccagagtttgttgcaaaacaggtgtttattaatgttccttggtggtatctggcattctatacaatgattagtccatttatgacccaaagaactaagagcaagtttgtcattgcactgccatctaaatctgctgaaacacttttcaaatacataccacctgagcaagtgccaattcaatatggtggtttgagtgtggattattgtgattgcaatccagaattcagtgatgctgatcctgccactgagatgactgtgaaaccagggacaaagcaaactgtcgaaataacaatctttgagaaatgtattcttgtttgggaaatcagggtagttggatgggaggtgagctatggagctgaatttgtgcctgatgctaaagatagctacgcggtcatcattcaaaaaccgaccaagatgactgcaaaagatgaaccagttgtgtctcaaagcttcaaagttggtgaactgggttaagtattgctaactgttgacaacccaacttcaaaaaagaagaagcttctctacaggtttaaggttaaacccttctgcgactgagggtattactcgtactatgatttaatttattcttgtctaaattttgggcaaatcacttgttcatttttctttgtttttgcatctttgtgaggagcatggttgacagcaagttgctcatggttttgaaatttgttcttggcatgttgggttaccctggtgttgtgcattgtacatttctctggtgtatcatgtctatattgtggaaccttttacactgttatagatttgtaagaacacgagggattgtttggtttatgtaatctttttttcagattccataatttcaatttgatattaattttggacctat

SEQ ID NO: 1469 - DNA, 476 bp, Gossypium hirsutum
  Clone ID: uC-gsronu33B168e06b1
tcttttttaagagtataaggaagcttgatttcagggcgggtgtgtgtttccaccattgtgcaggttagtgatctcaaaaactcgcctggacctggaaaaaaggagcttagattggcaacaaaacaggctcttcaggttcttcaagataattatccagagtttgttgcaaaacaggtatgttctatgtctatccatatttaactatcctatatatataatgtgaaaatttgattgtatagtagattctctggagatgcattgatttgggtttcttgttctgttaggtgtttattaatgttccttggtggtatctggcattctatacaatgattagtccatttatgacccaaagaactaagagcaagtttgtcattgcactgccatctaaatctgctgaaacacttttcaaatacataccacctgagcaagtgccaattcaatatggtggtttgagtgtggattattgtgattgcaat

SEQ ID NO: 1470 - DNA, 452 bp, Gossypium hirsutum
  Clone ID: LIB3585-011-P1-K1-H5
cgacccacgcgtacgcccacgcgtccgctatcttctacaagccggcgaggaatgtgaaaacctgagagggtgcagagtgccgggtggtcacggtctccgatctcggactagggatctgttttccagacccttcagaaagaagggttacatcccattgtccacttacctcaggacctacaagatcggtgactatgttgacgtcaaggtaaatggtgccgttcacaagggtatgccccacaagttctaccatggccgcactgttcgtgtcttggaacgttaccaatctcgccattttttttgaggtctaacaagcaggtttggtaactcgaaccttttcaattcagaatccaaaagtgaagaaaacccagaaaaggaaaagaaacatgaatcaaaagaggtatccatttggggtattcctctcttaaaagatgaaaggtgcgatgttatccttt

SEQ ID NO: 1471 - DNA, 340 bp, Gossypium hirsutum
  Clone ID: uC-gsronu33B002f10b1
taccggatcgccgccctttttttttttttttgcaaaaattaatatcaaattgcaattatggcccctgaaaaatagattacataaaccaaacaatccctcgtgttcttacaaatctataacagtgtaaaaggttccacaatatagacatgatacaccacagaaatgtacaatgcacaacaccagggtaacccaacatgccaagaacaaatttcaaaaccatgagcaacttgctgtcaaccatgctcctcacaaagatgcataaaaaaaaaaaaaaaaaaaaaaaaaaaaaaaaataaaaaaaaaaaagggtgcccacccctaaaggggggcaatttttttg

SEQ ID NO: 1472 - DNA, 1491 bp, Gossypium hirsutum
  Clone ID: GOSHI-09MAY01-C1260_1
ggaggttcggctctgggcccgcagttcgtcgcggaagcattggctcctgataatcctgcgcttgagataagatttattgataatacagatcctgctggaatcgatcatcaaatagcacaacttgggcctgagttggcttctactcttgtaattgtgatttcaaagagtggaggtacccctgaaacaagaaatggtctattggaagtacagaaagccttccgtgaagctggtctggattttgcaaaacagggtgttgctataacacaagaaaattctttgttggacaacactgcaaggattgagggttgggtagccaggttccctatgtttgattgggttggtggcaggacctctgaaatgtctgcagttggtttgcttcctgcagcacttcagggagttgacataagagaaatgcttgttggtgcatccatgatggatgaggccactaggagcacagtcctgaggaagaatcctgcagcattgcttgctttatgttggtactgggcaactgatgggattggatctaaggatatggttgttcttccttacaaggatagcttattactatttagcagatatttacaacagttggttatggaatcgcttggcaaggagtttgatctggatggtaaccgggtaaatcaaggaatttctgtttatggaaataaaggaagcacagatcagcacgcctatatccaacaactgagggagggtgtgcacaatttctttgtgacctttatcgaagttctacgtgatagaccccctggtcatgattgggagcttgaaccgggtgttacatgtggtgactacctgtttggaatgctacagggcacaagatcagctctgtatgcaaatgaccgtgaatccatcactgtcactgtccaagaggtgacacctagatctgttggggcactcatagcactttatgagcgagcagttggaatttacgcctcgcttgtcaacatcaatgcttatcatcaacccggtgtggaagctgggaaaaaagctgctggtgaagtattagctctacaaaagcgggttttagcggtgctcaacgaggccagctgtgaagaccctgccgaatcattgacgcttcaagaaatcgctgaccgttgccatgccccggacgatattgaaatgatatacaaaatcatcgaacacatggccgccaatgaccgagcactaatcgccgaaggggactgtggttccccatatagcttaaaagttttcctcggcgaatgtaacgtcgatgaattatatgcgtaagtgaatgaaaactcatgtcctcttttaagcttggactttccacagagaggaaaaaagaaaaaaaaaatcgcgcggcacgagtttgcgatgcttgtcgtctttttttctgggaaccaggttgttacctattgtatcaatgtttttgagttggaaataaacattccctcacagtttccttgtttgtcatttgaaagagaaaagagcaaaatttccaggatttttatt

SEQ ID NO: 1473 - DNA, 650 bp, Gossypium hirsutum
  Clone ID: GOSHI-09MAY01-C1210_5
cgaattcggcacgaggaacaaaccgaagccatttgcgtattgtgagggaagtagaggcaatcggtggcaatgtaaatgctgcagtttctcgggagcagattggatatacctttgatgctttgaagacttatgttcctgaaatggtagagttgcttattgattctgtgagaaaccctgcttacttggattgggaggtcaatgaacaacttcagaaagtgaaagaggaaattgctgaagcagcaaagaatccacatggcttgcttttagaagctattcactcggcaggttattctggtgcattggcaaatcctcttttagccccagaatctgcagttaatatgttgaacagtacagttttggaggattttgttgcagaaatttttactgcttctcggatggtactggcagcaactggtgtagaacatgaagaattgttatctgttgcagaaccacttctgtcagatcttcccaatattcctcgtgctcaggaaccaaaatctgtgtatactggaggagattatcgttgccaggctgattcagggggccgaactcattttgctcttgctcttgaacttcctggtggttggcacaatgagaaggaagctataattttgaccgttcttcaaattctaatgggaggaggtggatca

SEQ ID NO: 1474 - DNA, 582 bp, Gossypium hirsutum
  Clone ID: GOSHI-09MAY01-C1210_4
gtggagtattcttgaaggttgttgatgagattacactgaaggatatttcttcgatagctcaaaagcttctatcgtctcctctcacaatggcatcatatggaaatgttattaatgtcccaagctacgattcagttagccgcaaattcaagtgaaaaatgaaattgctttcctgtgtcaaacttgacgtgtatccgaccttgttttacagggttatgcatccgaataccttcgacttcttttgcaacaaggtgcacccatttttaacaataaaattgtttcctcggcaaacaatcgattagtgaaatagcttctgcagacaatgggatacttgtatgttttctgctgaattccatgattttggtcatggttggggaaaagtgtctccaaactttttatttttcacttttgttttaaaaattacccaaagcaaattcaagaattatttttttactccgagcatacatttcgacttgaaattttttggtgtatatgttaagaacatttgccctttatggcacaattttcaggttttattttgcacaatttattttggaattagatttagccactgcattgacatgc

SEQ ID NO: 1475 - DNA, 1269 bp, Gossypium hirsutum
  Clone ID: GOSHI-09MAY01-C1210_3
tcggccacgccttccgttttttcgtccgtatgtagtctgtattaattgattggggattcattcgggtgtgatttaacccccatacctctcttcttcttcttccttctggaccttgggtaaagctgtatatataaagcttgttcttcttgataaaaagtggaggtctggcaggggtcaaaaccatagcctttaaaatggctggtgggagcgggaggaaggaggaagagggtgatcaaaatcagcaagagaaagataagagtgaaagagaaattcatggatttttggcataagatgattttccctgttcgtagattttggtttactgtttcttctcctctcaaagctcgcaaaaacggtgcagggctattgaaactacgtgatgatatacaaacatgtgggtaccaagatgtgcaggtgatgtgggagatgctgagaagatccgaaactgagcatcatcatcctcatcccaagcgcaagcaacgacccttttggcgagtttttgtatggtcttcttctaacaacacttcttcatccacatccttgtcggccgatcatgcttgattttgttgacagccatttggatttggggtacttgatgatgatattatagtatactactatgtaataaaattttgttcctactgtcccctgcaatgctttttacataggcatcgttgttttagaaccccgatggacggcctgctggccggtatgcgttgcagtggcatggtacatataggtgttttgccaaccttgttcaaatggaaatattaagttggtgtatcactattaaaaggaaatgctttcgtatgaagacattttgtagatatgtgatacttttatcaaatgcaaaccttgttgaactcaatggtgtgctgagctttaagctcaaagttttttcaaacaatacttccattatttcaaggagaaggaagctataattttgactgttcttcagattttaatgggagggggtggatcattttcagctggtggccctgggaaaggaatgtattcaagactatatgtccgtgtgttgaatgagtatccacaagtttattcattttcagcattcaacagcatttacaatcatactggcatatttggaatacaagctaccactggttctgattttgcaccaactgccattgatgtagctgtcaaggagcttattgctgttgcaacacctggacaagttgaccaaatacaactagaccgtgctaaaaagtcaaccaagtctgcaattttgatgaatttggaatctagaat

SEQ ID NO: 1476 - DNA, 1104 bp, Gossypium hirsutum
  Clone ID: GOSHI-09MAY01-C1210_2
cccacgcgtacgaccacgcgtgcgcccacgcgtacgcccacgcgtgcggcccaaagaaaattccgcacgtgtcaatatcctcatcatcgggctaatcaggataaccagagagcaaccaacagccccacccgcccgctcccatctcccacaaaacccttcgacatccaaaacaggcggagttccgcagcgtccgtacgatttagggctttcctgagaccaacgatcacgatgtaccgtactgcagcctctcgcctccgagctctcaaaggtcgcacgagccatatagcacctgcaaggtttgcaagttcaagcactgttgctacaacatcatcctcttcaggtggcctcttaagttggctgactgggagtcaatccaagtctgtaccatcactagatttccccctaccaggtgttgctctaccaccttcattgcctgattatgttgaacctggtaaaactaagattacaactcttccaaatggcctcaaagttgcttcagaaacctcagcaagtcctgctgcttcaataggattatatgttgattgtggttcaatctatgagtcaccagcctcttttggggtctcacacctgcttgagcgtatggccttcaagagcacgacaaaccgcagccatttgcggattgtgagggaagtagaggcaattggtggcaatgtaaatgctgcagtttctcgggagcagattggatatacctttgatgctttgaagacttatgttcctgaaatggtagagctgcttattgactgtgtgagaaacccagctttcttggattgggaggtgaatgaacagcttcaaaaaatgaaagaggaaattgctgaagctgcaaagaatcctcagggcttgctcttagaggccattcactcagctggttattctggtgctttggcgaattctcttttagcccctgagtctgctgtaaataacattgaatgggacaagttttggaggattttatcctggaaaactttaccgcttctcggatggtacttgcagcatctggtgttgaaaacgaggaactgttatctgttgccgagccacttttaatagatctttccaatgttctcgtcctcaagagccaaaatctgg

SEQ ID NO: 1477 - DNA, 1414 bp, Gossypium hirsutum
  Clone ID: GOSHI-09MAY01-C1210_1
cggccgcgtgggttcagaagtgaaagaggaaatgctgaagcagcaaagaatccacatggcttgcttttagaagccattcactcggctggttattctggtgcattggcaaatcctcttttagccccagaatctgcagttaatatgttgaacagtacagtcggacgcgtgggcggacgcggcggcagaaaatttgaccgcttctcggatggtactggcagcatctggtgttgaacacgaggaactgttatctgttgccgagccacttctgtcagatcttcccaatgttcctcgtcctcgggagccaaaatctgtgtacaccgggggagattatcgttgccaggctgattcagggggccaaactcattttgctcttgcatttgaacttcctggtggttggcacaatgagaaggaagctataattttgaccgttcttcagattctaatgggaggaggtggatcattttcagctggtggccctggaaaaggaatgtattcaagattatatctacgtgtcttgaatcagtatccacaagttcagtccttttcagcattcaacagcatttacaaccatactggcttatttggaatacaagctacaactggttctgattttgtaccatctgccattgatgttgctgtcaaggagcttattgctgttgcaactcctggacaagttgagcagaaagaactggagcgtgctaaacagtcgaccaagtctgccattttgatgaacttggaatccagagcagttgcttcagaagatattggtaaacaaatcttgacatatggtgagaggaaacccgtggagcatttcttgaaggtcgtcgatgaaattacaccaaaggatatttcttcggtagccgaaaagcttctatcttctaatctcacaatggcatcttacgggaatgtcattaacgtaccaagatacgattccattagcagcaagttcaagggaaaatgaaaaactgctttgttctgtcgaacttgggtatttcatctgtctttcaacagtattattatgcatctgcatatcttaaagagttgtttttcataaaaatgatgcggttgaaaatatgaagttttaagctcttctattttgaacaaaataaattatttgtctctagctagtgagcaaaacatattagttaaaaataatagcttctgcaaacaatggggttcgcatgtttctgctgaattccatgattttggtcatggttagtccaaaaataaagtctctgtattcttttttttttactttgttttataaacccaaagtaaattctacgatggttgtggttgtggaacttagagcacaatatttgagtggcacaatttatatatgtcagtacatgtgcagtttatggcacaatttttcaaaaaaaaaaaaaaataaccttatttttaaatagataaa

SEQ ID NO: 1478 - DNA, 463 bp, Gossypium hirsutum
  Clone ID: LIB3120-030-Q1-K1-A2
ccatctcccacaaaacccttcgacatccgaaccaggcggagttccgcagcgtccgtacgatttagggctttcctgagaccaacgatcacgatgtaccgtactgcagcttctcgcctccgagctctcaaaggtcgcacaagccgtatagcacctgcaaggtttgcaagttcaagcactgttgctacaacatcatcctcttcaggtggcctcttaagttggctgactgggagtcaatccaagtctgtaccatcactagatttccccctacctggtgttgccctaccaccttcattgccaggctgattcagggggccaaactcattttgctcttgcatttgaacttcctggtggttggcacaatgagaaggaagctataattttgaccggtcttcagattctaatgggaggaggtggatcattttcagctggtggccctggaaaaggaatgtattcaagattatat

SEQ ID NO: 1479 - DNA, 438 bp, Gossypium hirsutum
  Clone ID: LIB3493-034-P1-M1-G8
ctgaaatggtagagctgcttattgactgtgtgagaaacccagctttcttggattgggaggtgaatgaacagcttcaaaaaatgaaagaggaaattgctgaagctgcaaagaatcctcagggcttgctcttagaggccattcactcagctggttattctggtgcattggcgaattctcttttagcccctgagtctgctgtaaatacattgaatggtacagttttggaggattttatcctggaaaactttaccgcttctcggatggtacttgcagcatctggtgttgaaaacgaggaactgttatctgttgccgagccacttttatcagatctttccaatgttcctcgtcctcaggagccaaaatctgtgtacaccggcggtgattatcgctgtcaggctgatttaggggatcaaacacattttgctcttgcatttgaac

SEQ ID NO: 1480 - DNA, 584 bp, Gossypium hirsutum
  Clone ID: GOSHI-09MAY01-C1230_1
gcaaggatagagaagaaatttcgaagtatctcaaggatgagcgtgatagattgagaagtgagcgtgatgtgatgcgagagcagcataacaaggatgttgaatcattgaatcgtcagagagaggacttcatgtaaaagatggtgactgagcattctgattggttcaacaagattcaacaagagcgtgctgatttcttgttaggaattgaaacccaaaagagggagctggagaattgtattgagaaaaggcgtgaagaattggaaagttctttgaaggaaagagaggaagcttttgagcgagaaaagaaaaatcaacttgatcatattagtgctctaaaggaaatagcggagaaagagttggaacaagctactctagaaatgaaaaggctcgatgctgagaggacggaaatcaagttggatcgtgagcgaagggaacacgaatgggctgagttgaacaagtctattgaagagcttaaggtgcaaagacacaattgaagcaacagagggaattattgcatgctgatagaaaagagatacattttgatattgaagagctaaaaaagttgggggacttgaaagctgctt

SEQ ID NO: 1481 - DNA, 1452 bp, Gossypium hirsutum
  Clone ID: GOSHI-09MAY01-C1220_1
atctccagttccaacagtgacattttctttgaataccaagtataaatccttcactttttctattgatggctgaggttaaagggaaatgggtcaagcttaaccagaatggaactggtcctggagccagaagctcacacgccataaccattgtgggacaaaaggcgtatgtctttggaggtgagttcaccccaagagtcccggttgacaacaagctctacgtatttgatctcaataacttaacatggtctgttgccgatgtaactggcgatgtgccgcctccacgtgttggtgtcacaatggccactgttagtgaaaccatctatgtatttggtggtagggattctgcacacaaggagcttgatgagttatattcttttgatacttgtacaaacaagtgggtcttactttctaacggtgacagtggcccggctcatcggagctaccactccatgacagctgatgaccgacatgtttatgtctttggagggtgcggtgtttctggccggcttaacgatctatgggcttacgatgttgcttgccaaaaatggatcaaatatccaaccccgggagacggttgcaagggaagaggtggccccggactggctgtcgtccaagggaaaatatgggtggtttatggcttctctggagtggaaatggatgatgtgcattgctttgatccagtacaaggacaatggtcccaagtcgagacaagtggggagaaaccaacggcccgaagtgtattttctatagttgggattggcaaatgcataatcatatacggcggggaagtggatcctagtgatttaggtcaccttggtgctgggaaattttctggagaggtatactgtttggacacagacacattggggtggaagaagtgggaggatgagcggggtgtagaaactcatcccgggcctcgtggatggtgtgctttttccagcggcgtaagggatggccaacttgggcttctagtttacggtggcaactccgctagcaatgataggcttgatgacattttcatttttacgccatccgtagcatagcaaagaaactgaaaactgagcaggggttaatggtgattcagtattaggattacaaagataatgtgtggctttgtctagtaagtaatcttggagttgctttatgtgcttcagtgcttggattggttattatgtgcaagtattgagcatcactttctgcgggtgctgttgctactgtcttgtggttggatttggatggctgtggtgcctcggctgcttccattggcttgaacaactccctccctaggcaacaacatcttatctattttgtacacaatcaaacggctcttcatccttcacagaccctgtaattttgcagtcacgaccttagtcttgcatcgtcatttatcgtacttgtttgctccgactgttgcataatccgccaatagcaaacgacatcctttttcgtttt

SEQ ID NO: 1482 - DNA, 1169 bp, Gossypium hirsutum
  Clone ID: GOSHI-09MAY01-C2990_1
cttgatccaatgaccatgactacttttcgtgatctaattcccaccaagcttgcagctggaatctggaattgtcttgtgaaatataaatcaattcctaacttccctcagaaagaaacatgcgagttgctcattcttgatagatctatagatcaggttgctcctgtcatacatgagtggacttatgatgccatgtgccatgatttattgaatatggaggggaataaatatgtgcatgaggttccaagcaaaataggaggccctcctgagaaaaaggaggttcttttggaggagcatgatccaatatggcttgagcttcgccatgcacatatacccgcgcctccggaaaggttgcatgagaagatgaccactttcatatcaaagaataaagctgcacagcttcaacatggttcaagagacggcggtgaaatttcaacaagggaactacagaaaatggttcaagcattgccccaatacagtgaacaaattgacaagctctcccttcatgtagagattgctggaaaaataaaccgaatcatcagggagcaagggcttcgagaacttgggcaactggagcaagatcttgcttttggtgatgcaggaatgaaagacgtaattaaatttctctctactaatgaggtagcatctcgcgaaaataagttgcgcttattgatgattctagctgccatttaccctgagaagtttgagggtgaaaagggtcttaatttaatgaagttagcaagactaccacttgaggatatgactgctgtgaataacatggcattgcttgcacctccatcagaggccaaaaaaagttcaggaagtgctttctctttgaaatttgatatgcataagaagaagcatgcaactaggaaagaccgcagtggtgggcaagaaacatggcaattatctcgcttttaccctataatagaggagcttgttgaaaagcttggcaaaggagaactatcaaaggatgattatccttgcatgaatgatcctagtccaacttcccatggcacatctcacactgcatctgtatatgaagctccagttgctcattccatgagatcaaggaggacaccaacatgggctcggcctcgtggctccgatgatgggtattcgagtgattcggtactaagacatgcatcgagtgatttcaagaagttcggcaa

SEQ ID NO: 1483 - DNA, 517 bp, Gossypium hirsutum
  Clone ID: GOSHI-09MAY01-C2980_1
cccacgcgtccgattccgccagaagcccttgattcaatgtgggcggagggccagcgaaagatgtggggcaggaagcttaatgcatcttcttccgcagatgaactcctaaagctgttgacacagcttgagagtgccataaaacgagattatttatcgtccaactttgaaacaacaaaggagttattgggttctagtcttcagtcggagaatgattcttctactgtttctgtgcttccatggataccccaaaccactccagctgtagctttaaggcttttggagcttgattcgtccatcatgtatgtaaaaccagagaaagtcgagcctccggagaacagggaagctagagcatcatatataaagcttccttcgagaacctctcttttcatcaagaataaagagcttggattaaaaagagctagaccaagatgagcctatgaaaagaaaactttaccgacctgagtaacagtaaacgcagcagctataaacgggaagaggcgctcgtgagcaaagatct

SEQ ID NO: 1484 - DNA, 835 bp, Gossypium hirsutum
  Clone ID: GOSHI-09MAY01-C2950_1
taccttttctgatggaacagtctacaaggggactttatgaagtggggtcgaaatagcagtgacatcaactgcgatttcgtctcgtgaagactggtcaaagaatttagagacacaatttagaaacaagatagactcgttgtctaaagtgaaccacaagaatttcgtgaacctcattggctattgtgaagaaaatacgcccttcacaagaatgatggtttttgagtatgttcctaatggatcactctttgagcatctacatatacaagaagctgagcacttggactggggaatgcgcctaaggatagccatgggaatagcgtactgccttgagcatatgcatcagcttactccccctatagcccatagaaacttgcagtcttgctctgtgtatctgactgaagactatgctgcaaaaatatctgatttcagcttcttgaataatgctaccgcagccaaggtgggatcggctaccatggagctcttagaatctccatcagcagatgcagagagcaatgtttacagcttcggggtgatattgtttgaaatgataactggtaggatcccgtattcgatagacaatggctcccttgcagactgggcctcagactacttgaaaagggaccaacccttggaagatacggtggatccaactctttaaattttcaaggagatgatctggaaaaattgtttgaagtgttaaaactgtgttaatcctgatccaaaagagagaccaacaatgagagaaagtgcagccaagtaaaaagagattacagccatgggacctgatggagcaactcaaaactctcttcccttttggtgggctgagcttgaaata

SEQ ID NO: 1485 - DNA, 1141 bp, Gossypium hirsutum
  Clone ID: GOSHI-09MAY01-C2970_1
cccacgcgtccggaggacaccattttttttggtggcctttgctctcatcactcgtaagtccacataaaactccttgtaaagccaccttttttgatccaataattcaaatcccttcacccacctcacttcctataataactccccccatttgaatcggattccatttcctaaaaaatatgattcaccaagagatggatattgatcatgaatgggtcttcctccctgataatagattcctggatatcaatcaagaccatggaggaaaacgagtttctgattcaaaccttgttttcttcacagactacttcgatgaagaacagtctccgccatcagggaattcagggaaggtagctaaacaagttgtcccagttccatttccattggaaccaagaatccttaaggttccagaaaatgaaatagggaaggaaatcaccaaaagggtacctcttgatttcagttctacaccatccatgattcttgagaagatcaaagaaggtggtatggaatcagttggaggtgataaagaagtgaagacacaagtttcgtttaggaaaccaagttacaacaacaatgaatctgtcgacatgaccaacaaaatgaactcaccaaggtccactacgaaaggagttatccctcaattggatgctgcaggtacgtttaattttgatgatgaaactgagtttttggagaacatgaattcccccaaaataaaagatctggtggaaaaggaagctgagaacaaagatgtcaactggggaagaaagctctgggtggccttaatttatggaaatggagtttgactggtattggagccatctgctcttttggtgttgctgctgctaccttttgcatcatcatttttggaactcaacaaaggcacaaacaacaacaactgaaccaaaaactgttgttccaacgttacagtgatgacaagaggatgaagcaagtggttcatcacacaaccaaactcaatgaagcaatttcagtggtgagaggagtaccaatcaccagagctcaaataacattcgggggttactatgatggtatttaaagcaatattgcctggagaaatctggaccactcgtctgctgttattctccaagtgtcaaggatttactatgccagttctatacaagaattt

SEQ ID NO: 1486 - DNA, 566 bp, Gossypium hirsutum
  Clone ID: LIB3828-005-Q1-N6-F6
gagaaagatgaaaacttgataaatttaatgttcctcaatatttatacatatcagtgctgaatttgtagacatttcactaacatcaactcccacagtttaaaaactatgcttgcatatgccaaggatgcaagcatctattataagtggctgaataaacactgtaatatagaattttaaggactacaaacaggattcactatccatataccattttattatgtacaaaaacacagataccctatttaaaattcttgtatagaactggcatagtaaatccttgacacttggagaataacagcagacgagtggtccagatttctccaggcaatattgctttaaataccatcatagtaacccccgaatgttatttgagctctggtgattggtactcctctcaccactgaaattgcttcattgagtttggttgtgtgatgaaccacttgcttcatcctctacaatagcaacaaattaagttacttaagctacaagtattatctaaaaatggggcctaaatttgatgtgatgtaatttgcaagaaatggtgttgcttttgaatttggactctt

SEQ ID NO: 1487 - DNA, 406 bp, Gossypium hirsutum
  Clone ID: LIB3166-021-P1-K1-G3
gccggtactgactggccggaccgacccacgcgtagggaggcacgtggatcatgaatgggttttcctccctgataatagattcctggatatcaatcaagaccatggaggaaaacgagtttctgattcaaaccttgttttcttcacagactacttcgatgaagaacagtctccgccgtcagggaattcagggaagatagctaaacaagttgtcccagttccatttccattggaaccaagaatccttaaggttccagaaaatgaactagggaaggaaatcaccaaaagggtacctcttgatttcagttctacaccatccatgatccttgagaagatcaaagaagctggtatggaatcagttggaggtgataaagaagtgaagacacaagtttcgtttaggaaaccaagt

SEQ ID NO: 1488 - DNA, 842 bp, Gossypium hirsutum
  Clone ID: GOSHI-09MAY01-C2890_1
ttgtaatgtaagcaccttcttttagtatacaagaaaggcaacaaagaaaccccagaaaaatgagaactagcaaccatttgatagggttactaaacttcttaacatttttgttgtcaatagtaatattgggtggtggaatatggctaagcagccgagccaacagcacagattgtctcaagttcttacagtggccattgatagtaataggagcttcaatcatggtggtttcgttagcaggttttgcaggcgcgtgttataggaacaccttcttgatgtggctttacctcttcgtcatgttcttcatcatcgccgccctcatcggcttcataatctttgcttatgcggtgactgataaaggctccgggcggccggtgttgaacaaaggttacttggagtattacttgcaggactactcagggtggctcaaagaccgcgtggtggatgagagctattgggctaagattagttcttgcatcagggattccaaagtttgtagcaagacgggcagaacctttaatggcgtccctgaaacttatgacatgttttctatgaggaagctttcccctattgagtctggttgttgcaagccacctacagaatgtggctacgtttatgtcaacgagacactatggaactccggtagtgggctagctgcgaccaacctcgactgctcgcggtggagcaatgaccaacagatgctgtgctaccaatgtgactcctgcaaggccggtgtgcttggcagcctcaagatgagctggaggacagtctcggttatcaacattgttgtgcttatcctcctcgtcatcttctatgttataagctgtgccgcttttcccaacaat

SEQ ID NO: 1489 - DNA, 414 bp, Gossypium hirsutum
  Clone ID: LIB3135-050-Q1-K1-F6
aaaagaaacaggttacaccaccaaagagatctaatcagaagcaaacaaatgagggccagcgatcatttgatagggttactaaacttcttaacatttttgttatcaacagtaatcctgggtggcggaatatggctaagcagcagagccaacaacatcgattgtctcaagttcttacagtggccattgatagtcatcggagccgaaatcatggtggtttccttggcgggtttcgccggcgcctgttataggaacactttcttgatgtggctttacctcttcgccatgttcttcatcatcgctgcgctcgtcgggttcataatctttgcctacgcggtgactgataaagggtctggtcgcccggtgatgaacaaaggttacttggagtattacttgcgggactactcggggtggctc

SEQ ID NO: 1490 - DNA, 949 bp, Gossypium hirsutum
  Clone ID: GOSHI-09MAY01-C2850_2
ccaaatccataatgataaaacatttctttggtggaccttaagcgctccccaataaattccgtgaacttttttaaattctttttaaaattaagagacaaaattctgtaattaaaataaaatataaatacctcaaatataatacttttactgtttgaaatctaaattcactgttcaaaagataacactctaaaaatttctccaaataataaagtgaaacccctcaacacctacctaaagagttgtaatcatggttcctacttaaagaatgttattgcgactaaactggataacaaatatttgttattttaggtggccatacaattggattggcaaagtgtgccaccttcgacaatagattattcaatttctcaggaactggtgctcccgacagtacgatggaggcgaccatgttggcggatctgcaaagcttttgtccggttaacggtgacagtaacaggttcactgctcttgataggaagctaactgatctatttgacaaccattatttcaagaacttgttaaatgggaagggcttattaggttcggatcagattttatattctagtgatttggccgtttccacaactaaaagccttgttgaaagttacagcagcaactcaatacttttcttcaatgactttgtcaactccatgatcaagatggggaatataagtccacttactgggactgacggagagattaggaagaattgcagggatgttaattcttagattgcagtttaattgaaacaggatttgctcaaataattatagtcaagtttggtggtcaagtgataggagattgaaggaagtacttatgtgagacatgattgctgtaaatatcagcttatgtaataatgttcatgatttctgtgtgtttgttttacgagctatatgcccctatctatgccccgacaacatttctatgacacgtctttcagtttaatgct

SEQ ID NO: 1491 - DNA, 762 bp, Gossypium hirsutum
  Clone ID: GOSHI-09MAY01-C2850_1
ctttaccctcgcggccctaggattccactgagtgctataacatacttaaaattgctgtgggggaaatttgatatatataatatagcattaatgatgaagagtccaaacaaaattaagagttattattattctctgtttatgatcagcttgatgctttgtttaggtgcgaggtcccaactaaccactgatttctattcacaaacatgtccatctctcctttcaacagtacggaaacaagttcagagtgcgatcaagaccgaaatgcgaatggcagcctctctgctccggcttcatttccatgattgctttgtgaatggttgtgatgcatcagttttgttggatggagacaatagtactgagaagtttgctcttgcaaatgtcaattcggcaagaggatttgaagtcatcgacgcaataaaaagcgccgtagagagctcatgcagtggagttgtatcatgtgctgatatattagccatcgctgctcgcgattctgttgtcttaagtggaggtccaacatggagagttttattaggaaggagagacggactagtttccaacgggacactagcaaacgctgcacttccttctccattcgaggcattggatgctatcattcaaaagtttgtcgatgttggtctcaacataacagatgtagtctctttatcaggtggccatacaattggattggcaaagtgtgccaccttcgacgatagattattcaacttctcaggaactggtgctcccgacagtacgatggaggcg

SEQ ID NO: 1492 - DNA, 897 bp, Gossypium hirsutum
  Clone ID: GOSHI-09MAY01-C2870_1
gaaatcaaaagcaaggaattattacctttttttgatcgcttccatcgaatcaaatcaagctggaatgacaggtgtttttgcgttgggaaatatcctctgtccttgtctcctgatcttcatcaaggtgaatataaagcctcgcaagagattattatttgtcattcaaaaccagcgtcacttagctccactgaaagttctgaaggaggttcatcaaggagactggataatatacttgatttcgatcagattaacagcgaaaagccttatccacccatctaccagggtctgaatgaaacttgccatggaaaaatggggaatggcttcattgagccattggtgttgaatcaggagtctttgactgtcaaatcttctccatttcagcactcagagaatatatataatgataccggtcactctgagagaagtgatttttcctctctggagagggagttgcctccatcaagaagtaaggctgaaggaataccttctttcaatgctgtagggatcggtgctgcctcaatgttgcatgtagaccactatgatgcacctaaaaacattctggcagatgaatcatcattttctgcacaacagattgcggttgattttgtgcacttccgggaagggcactatgaaatcatacagcagaatggaagtggcaagttgtctgtacatgcaaatgatgatgtcgacagcatcagcagcaaccactgtggaaaggaaaaactggaagaagatggggaaaatgatgaaatgctaggtggcatatttctgttctctgaagaaggttgaaccggattcatcagtcacggtattggtttgaccactgtggatagcttagcaaaggtatgtttttggattcaaaatgcattgcaccctgtaaataaaggtgggggaggc

SEQ ID NO: 1493 - DNA, 1277 bp, Gossypium hirsutum
  Clone ID: GOSHI-09MAY01-C2860_1
cggttctttatcatttctctctataaacttgtacggccaaagattccttcccagcaaaaaatcggaaagaaagaaaaaacatggggatgccgcctgccacgtgcgcctccgcctcttcctcctccatcgtcaactcttctccgatcggtggcgctggcggaggaggtggagagatcatgctttttggagtcagagtggtggttgattccatgaggaaaagtgtgagtatgaacaacctttctcaatacgaacaacctcatgagtcgaacaagcataacaacaagaacgacaaagatcaaggcgatgataatctcaccgccggttacgcctccgccgacgatgccgttcctcactcctccggaaatcgagagcgcaaaagaggggtgccgtggacggaggaggagcacaagctgtttctggtaggactgcaaaaagtagggaaaggagattggagagggatttctagaaacttcgtgaagactcgaactccgacacaagtagcaagccatgctcagaaatactttctccgacgaagcaatctcaaccgtcgccgtcgcagatctagcctctttgatatcaccaccgatacggtgcaggcaattccaatggaagaagagcgagttgatcgacaagaaaactcaactcagccatctgaaaccaatgtgtttcccattatgccggcgacttttcccatggcctttaaccaggtagttccgccggttccaattcagaatccgactgaaaatctcacaatagcacaggggaatcaattgaataacaatgttccaacggcaaatctcatccgtccggttccaaatttcccagctcttcagagatccgatctcaacacagacttaaatcctgcgacggatcctttatcgctgtcactcaagctgtctttgcaatccgatcaaatggattcatcatcatcttcaacttccaggcattctccatttcaggtgatgccaaactttagcagtggagataacaataacatcatcagtgttgcttaagaatgacaataattatataataagcaaaagcgacacaaagcttattattattagagcttaaatttggatttagagaaaataaaaaaaaagacataagtttaaattaggtaactggtttttgaatccctttgtttttcatgtacagactaaaaacagaacaaaactgtcatgtcttgtttgcttctgttgttttctgtttttatttatgttagattaatgcttcatttagtctttgatctatgctagttgatatatatatatatg

SEQ ID NO: 1494 - DNA, 488 bp, Gossypium hirsutum
  Clone ID: uC-gsflnu33B111c12b1
tgctgagttaaagcatatctcggtggacgagttgagggagtgatttatggacagaataggggatgagcggagcacgttagaggatggtgccggctggatagtgcgcgtccgattgaacgaactatagatttgactgttttgaggtcttctgcacaatgatggagctgcagcagtaaacatatgatgatgggagagtatccgttggtgttcagatggtaatgtgatgagagatgcacttgatttgaggacatacagacttgtgagttggacttgcttttcttcaagagcaacaaagatcaaggcgatgataacctcaccgctggttacgcctccgccgacgatgccgttcctcactcctctggaaatcgagagcgcaaaaggggggggccgtgtacggaggacgagctcacgctgcttctggtaggactgcataaagtttggaaaggagatcggagagggatttctagaaacttcgtgaaaactcgaac

SEQ ID NO: 1495 - DNA, 318 bp, Gossypium hirsutum
  Clone ID: LIB3493-003-P1-M1-D1
tccatgaggaaaagtgtgagtatgaacaacctttctcaatacgaacaagctcatgagtcgaacaagcataacaacaagagcaacaaagataaggcgatgatacctaccgtggttaccctcgcgacatgccgtctactcttggaatgaagccaaaaggtgcgggcggggggaccagtgtttgtgacgaaagaggaagaatggaggtttaaactggaatgactcccaggagctgtaaaatttcacacattacgcgggaatagtttgtacactcggcgatcatgaaacatgtcaaatatacttacatgtcttcggttctgt

SEQ ID NO: 1496 - DNA, 598 bp, Gossypium hirsutum
  Clone ID: GOSHI-09MAY01-C2800_1
cggacgcgtgggtctcacggcagggttctcttgttccagtttcttcacagggtgctcaccagatcacagattcacccgctgtacaaaataataatgatttcctaagtggcttaatttcagaaccagggtcaaagccagcacagacagtcactcccacatcaacaggagcacttgctatagttccacaaccctcaaaggataaatttgagcttaagtcggcagtttgggctgatacattaagcagaggattggtgaatttgaacatatctggacctaaaacaaatccgttggctgatattggagtcgacttcgatgctcttaatcggaaggaaaaaaggatggaaaaacctgccccaaatgcagtgacatctacagttacaatgggtaaagcaatgggatctgggtctgggattggtcgttctggtgctaccactcttagacctcccgcaaatcctatgatgggttctagtatgggtagcatgggcatgggcatgggcatgggaatgggtggtggacctgttggaggcatgggaatgggaggaggctatggtggtatgaatcaacaaccaatgggcatggggatggggatgaacaacat

SEQ ID NO: 1497 - DNA, 457 bp, Gossypium hirsutum
  Clone ID: LIB3585-040-P1-K1-B9
gccggaatcccggtcgcgcacgctccaccagcgtccggcactcgtgatcctaactaacttaatcaaaaccacaaacaaggcgacggtgcaattctccacatgacacgacacttgctatagttccacaaccctcaaagataaatttagcttacatctcagtttgggctcatacattaaccagaagattgatgaattctaacatatatctacctaaaacacatccgctggctgatatcggaatcgacttcgatgctcttaatcacaaggaaaaaaggatggaaaaacctgccccaaatgcagtgacatctacaactacaatgactaaagcaatggaatctgaatcttctatcgcacgttctgatgctaccactcttatacctaccgcaaatcctatcatagctactagtataggtagcattggcatggacatcagcatggaaatgggtggtccacctct

SEQ ID NO: 1498 - DNA, 802 bp, Gossypium hirsutum
  Clone ID: GOSHI-09MAY01-C2830_1
tttcgctttcgcgtccgcggacgcgtgggttttaaggcttactattgtaataaaaagaggcttatatatcatatcatatacccaccataccattacccccgcgtccgcactacctctacccaccgtcgtaccgttttcttttcttttttttttctcttaatattccgactagaactctccattttctcttgtgctgtctttggtttctctttatttttcctctctaaatctctgcatcatcatcgatcatgtctcttttaatctccctactcctgttcttagccatgactggccattcaagtgctacttattgcttatgtaaagatgggttaggggatcaagctcttcaaaaggccctcgattatgcttgtggagctggagctgattgttctgcaattctacaaaaaggtggttgctataaccccaacactgtgaaagatcactgcaactatgctgtcaatagttatttccaaaagaaaggtcaagcacaaggaagctgtgatttttcaggcactgctactgttagtgccaatcctccttcaaatattgcttctacttgcagctttccctctagtagcacaggcatgaccgcaccaactgggacaacaaccgggacaccaaccaccactggctcaaccacagggactccaagcacagtgtttggtggtgcagggacaaccttaggtccaacagggacaacagaaaccggcttcaatgatcaaagcaatgctgtgggtctcttcacaaagaatataaactttttcttcacttttgctattatgaccctttggattgagggtta

SEQ ID NO: 1499 - DNA, 453 bp, Gossypium hirsutum
  Clone ID: AI729707.1
tgaccgtttgagtatgtgaaaacaatgcttccgtaaattcatattgatgatatttaaacactcaaatacatgacaccacccccttttttttaaagtcttgttttgctcagtttcccacagcagcacttagggtgtatttatttttaaggcttactattgtaataaaaagaggcttatatatcatatcatatacccaccataccattatcaccaccatgactggccattcaagtgctacttattgcttatgtagagatgggttaggggatcaagctcttcaaaagaccctggattatgcttgtggagctggagctgattgttctgcaattctacaaaaaggtggttgctataaccccaacactgtgaaagatcactgcaactatgctgtcaatagttgcaattctacaaaaaggtggttgctataaccccaacactgtgaaagatcactgcaac

SEQ ID NO: 1500 - DNA, 2098 bp, Gossypium hirsutum
  Clone ID: GOSHI-09MAY01-C2820_2
tgatcttgttgtcattcatggccatgaagagcctaggcctctgaagaacttggatggtcaagtttgtgagatttgtggtgatgaaattgggttgacggtcgatggagatcttttcgtggcctgcaacgagtgtggttttccagtttgtaggccttgttatgagtatgaaaggagagaagggagtcaacaatgtcctcaatgcaaaactagatacaagcgtctcaaagggagtcctagggtggagggagatgaagatgaagaggatgtggatgatatcgaacatgaattcaacattgatgatgaacaaaacaggtatagaaatatcgctgaatcgatgcttcatggaaagatgagctacgggagaggccctgaagacgatgaaggtttgcaaatcccacccgctcgagctggtgttcgatctcggccggtgagcggggagtgcccaataggaagctctcttgcttatggggaacacatgtcaaataaacgagttcatccatatcctatgtctgaacctggaagtgccagatgggatgaaaagaaagagggaggatggagagaaaggttggatgattggaaaatgcagcaagggaatttgggtcctgaacctgatgatgcctatgatgctgacatggctatgcttgatgaagctaggcagccattgtcaaggaaagtgccaattgcatcgagcaaaatcaatccttatcgtatggtgattgtggctcgtctagttatccttgctttctttcttcgctatcggattttgaacccggtacatgatgcaattgggctttggctaacttccgtgatctgtgaaatctggtttgccttttcatggatccttgatcagttccctaaatggttccctattgaccgcgagacgtatctcgatcgcctttccctcaggtatgagagggaaggtgagcccaacatgcttgcttctgttgatatttttgtcagtacagtggatccattgaaggaacctcctctagtaacagcgaatacagttctatcgatcttggccatggactatccagtggataaaatctcttgttacatttctgacgatggtgcttccatgctcacctttgaatcattgtctcaaacagctgaatttgctagaaaatgggtgccgttctgtaagaaatttgctatagaaccccgagcaccggagatgtactttactttaaaggtagattacctcaaagacaaagtccagccgacattcgtgaaggagcgtcgagctatgaagagagaatatgaagaattcaaggttaggataaatgcacttgtagccaaagcccaaaaggttcctccagaagggtggatcatgcaagatgggacaccatggccaggaaacaatactaaagatcaccctggtatgattcaagtatttctcggtcaaagtggaggccatgataccgaaggaaatgagcttcctcgtctcgtctatgtatctcgagagaaaaggcctggtttcttgcatcacaagaaagctggtgccatgaacgcccttgttcgggtctcgggggtgctcacaaatgctccttttatgttgaacttggattgtgaccattatttaaataacagcaaggctgtaagagaggctatgtgtttcttgatggaccctcaaattggaagaaaggtttgctatgtccaattccctcaacgtttcgatggtattgatagacatgatcgatatgccaatcggaacacagttttctttgatattaacatgaaaggtctagatggtatacaaggccctgtatatgtcggcacggggtgtgttttcagaaggcaagctctttatggttatgaacctccaaagggacctaagcgcccgaaaatggtaacctgtggttgctgcccttgctttggacgccgcagaaaggacaaaaagcactctaaggatggtggaaatgcaaatggtctaagcctagaagcagccgaagatgacaaggagttattgatgtcccacatgaactttgaaaagaaatttggacaatcagccatttttgtaacttcaacactgatggaacaaggtggtgtccctccttcttcaagccctgcaactttgctcaaagaagccattcatgta

SEQ ID NO: 1501 - DNA, 1485 bp, Gossypium hirsutum
  Clone ID: GOSHI-09MAY01-C2820_1
cccacgcgtccgcccacgcgtccgcccacgcgtccgcggacgcgtggggatggtaacctgtggttgctgcccttgctttggacgccgcaggaaggacaagaagcaccccaaggatggtggaaatgcaaatggtctaagcctagaagcagccgaagatgacaaggagttattgatgtcccacatgaactttgaaaagaaatttggacaatcagccatttttgtaacttcaacactgatggaacaaggtggtgtccctccttcttcaagccctgcagctttgctcaaagaagccattcatgtaattagttgtggttatgaagacaaaaccgaatggggaagcgagcttggctggatttacggctcgattacagaagatatcttaacaggattcaagatgcattgccgtggatggagatcaatatactgcatgccaaagttgcctgcattcaagggttcagctcccatcaatctatcggatcgtctaaaccaagtccttcgatgggcgctcggttctgtcgagattttctttagtcgtcactgccctgcctggtatggcctgaagggagcaaagttaaagtggcttgaacgattcgcatatgtcaacacaaccatctaccccttcacatctttaccacttctcgcctattgtaccctcccggcaatctgtttacttaccgataaatttatcatgccaccgataagcacctttgcaagtctattcttcattgccttgtttctttcaatctttgcaactggtattctcgagctaaggtggagtggagtaagcattgaagaatggtggaggaatgagcaattttgggtcatcggtggcatttcggcacatttgttcgctgttatccaaggcttgttgaaagttctagctggtattgacactaatttcactgtcacatccaaggcaactgatgacgaggagttcggggaattgtatactttcaaatggacaacccttctaattcctcctactaccgtcttaatcatcaatttagtcggtgtcgttgcaggcatctcggatgccataaacaatggataccaatcatggggacctctttttgggaagctcttcttctctttctgggtgattgtccatctctatccattccttaaaggtttaatggggagacaaaacaggacaccaaccattgttgttatatggtcagtgctattggcttcaatcttctccttgctttgggtccgaattgatccatttgtgatgaaaaccaaaggaccagacactacaatgtgtggcattaactgttgaaaaaaatcatcttgcgtggttcttttagattatggtatgtgatgtatgaacaaacaagaatggagatgcacaagacagaataaaattagagtgaaagttttgtgtagttatatattcattgtaccaactataagttttgtcattcaattgaaaatagctcaactttgtgatcacccccgtgtacctgctaaatttttttgttctct

SEQ ID NO: 1502 - DNA, 491 bp, Gossypium hirsutum
  Clone ID: LIB3585-038-P1-K1-G7
gcaaaggttgatttttgctgggaaacagctggaagatggaaggactttggggaattgtatactttcaaatggacaacccttctaattcctccaactactgtcttaatcatcaatttagtcggtgtcgttgccggcatctcagatgccataaacaatggataccaatcatggggacctctttttgggaagctcttcttctctttctgggtgattgtccatctctatccattccttaaaggtttaatggggagacaaaacaggacaccaaccattgttgttatatggtcagtgctattggcttcaatcttctccttgctttgggtccgaattgatccatttgtgatgaaaaccaaaggaccagacactacaatgtgtggcattaactgttgaaaaaaatcatcttgcgtggttcttttagattatggtatgtgatgtatgaacaaacaagaatggagatgcacaagacagaataaaattagagtgaaagtttt

SEQ ID NO: 1503 - DNA, 411 bp, Gossypium hirsutum
  Clone ID: LIB3083-015-Q1-L1-E11
ggcttgccgatctagaagcgtagccggatgccctcgggctagttcgacacgaggctagaagttctagctcgtattgacactaatttcactgggacagacaacgcaactgatgacgacgagtccggtgaattgcatactttcaaatggacaacccttctaattcctgcaactactgtcttaatcatcaatttagtcggtgtcgttgccggcatctcagatgccataaacaatggataccaatcatggcgacctctttttgggaagctcttcttctctatctgggtgattgtccatctctatccattccttaaaggtttaatggggagacataacaggacaccaaccattgttgttatatggtcagtgctattggcttgaatcttctccttgctttgggtccgaattgatcca

SEQ ID NO: 1504 - DNA, 367 bp, Gossypium hirsutum
  Clone ID: LIB3083-108-Q1-L1-H5
acagagcccccggctgaggaattcgatcgaggagggacttttttaacttggaaaagaaattgggacagggggccatttttgtgacttcaacactgatggaacaagggggtgtccctccttcttcaagccctgcagctttgctcaaagaagccattcatgtaattagctgggggtatgaagacaaaacccaatggggaagcgagcttggctggatttacggctcgagtacagaagatatcttaacacgattcaagatgcattgccgaggatggagatcaatatactgcatgccaaagttgcctgcattcaacggttcagctcccatcaatctatcggatcgactaatccaagttcttcgatgggcact

SEQ ID NO: 1505 - DNA, 1157 bp, Gossypium hirsutum
  Clone ID: GOSHI-09MAY01-C2590_1
ggaaattacaatggcaagaagggtttcgagaggcaggggagtcggcgtattgttcgatgaagaaggcgttttcctcgatggtgtttataatccgggagctccatagctatactctgcaaatgcgagagcttttgttttatgaagatttacaagggattctcgttagagttcaaaaagagatgcacgcttcattcgtttggttgttccaacaggtcttttctcatacacccactttgatggtctacgtgatgatcctattagcgaattattcggttcattcaatgggaagcaacgccgctctggcagcaaccgccgctgcgaatccgacgccggggtcttatgttgctgtggttgacgttcaagatcagaaggattccaacttcgattcttcgtcgataaagtcattttcagtgtcgtcatcgagcgggaaaaccgcttccatcggggggaacaacggcggcggtggaaaagtccggtctgtagccaacggaacagacggtgacggttggtttaacaaagcaggccagttcagaaccatctttcccgatggtgcttcccagttatcatccccccgcgcggccgcagaaacacaaagcgaatcaaccagagaagaagagcttactctttggaactcaatcgtcgatgaagcttcgaaaatgctcgcttcatacagagacgaaacgctcgaccatgaaacaattcagagattcgtttctccggtgacggcaaacatcgaacccgacggtgattatgaagattatataagaactgagcttctttatcaaacggggttatctcaagaccccactaactccctcctcctcgccaattacgctcagtttctctaccttgttgcacatgattatgagagagcggaagagtacttcaagaaagcggtaacagtggaggcggtggatgcggaagcgtacagtaaatacgcaagctttttgtggaaagcgaggaacgatttgtgggcagctgaggaaaccttcttggaagccattgaagcagatccgagcaactcttattacgccgcgaattatgctcattttctatggaacactggcggggaagatacctgtttccctcttgacactacccaagacgcttaaaccaaaaaaaaaaagggaaataaaaaatttttagaaaataaccct

SEQ ID NO: 1506 - DNA, 540 bp, Gossypium hirsutum
  unsure (1)..(540): unsure at all n locations
  Clone ID: LIB3584-005-P1-K1-A7
caggggagtcggcgtattgttggatgaagaggcgttttcctcgatggtgtttataatccgggagctccatagctatactctgcaaatgcgagagcttttgttttatgaagatttacaagggattctcgttagagttcaaaaagagatgcacgcttcattcgtttggttgttccaacaggtcttttctcatacacccactttgatggtctacgtgatgatcctattagcgaattattcggttcattcaatgggaagcaacgccgctctggcagcaaccgccgctgcgaatccgacgccggggtcttatgttgctgtggttgncgttcaagatcagagggcttccaacttcgattcttcgtcgcttctagtcttttcagtgtcngtctcgcgcgggctaaccgcttccatcggggggttcttcggcggcggtgggtctgtccggtcttgtgcccccggttcctccggggtctgtttggtttttccttgtcttccctttttttttcctttctttcccgctgtttctttccctttttttctttc

SEQ ID NO: 1507 - DNA, 309 bp, Gossypium hirsutum
  Clone ID: GOSHI-09MAY01-C2550_2
cggacgcgtgggtgcacagcaattaagcatctccaacatgtttaatgcaatcaggagacaataatcagtctcctagatgttttagcataggattctaaatcttatgtagtgttttatggaaatgtattgtactgtattgtaggagagggcaagtagtagtattctctttggttgatttatgtggtggtagatttcacctttgtaacttgtaattaacaattgcaatcaaaacaagggtgtttgaaagttaaaaaatcaataaattctaatgttgatgagattatgaaataaagatattatctctttccc

SEQ ID NO: 1508 - DNA, 1582 bp, Gossypium hirsutum
  Clone ID: GOSHI-09MAY01-C2550_1
cgacaagattggaccgaaaacgaattcaatgcctttgttcttcgtgaacgagaaggtagaaggccggtggtaactggagatctcaacattacgttggtagatggtgtaggtactgttgataatgtgattttcaccgacaattcgagctggataagatgtcgaaagttccggttgggagctagaattgtgcaaaggagtgctggtgaagtgacaatcagggaagctacaagtgatgcattcatggtgaaggatcatcggggagaattgtacaagaagcactacccaccgctccttcatgacgaagtatggcgtctcgaaagaatagcaaaagacggagccttccataaacgtttggcatataaatccgttcataccgtgaaggacttcttacggttgcttgttaccgatccaatcgcactacgcaatatactaggtggtgggatctcaaacagggtatgggaaacaatcatagaacatgctttatcatgtgttcctgatgatgatgaatggtatacctaccatggaactgcacaaagagttgaactcctattaaactctatttacaacgttgttaaagtaacatttgatggccaagattacctacctgtggaaaatttaaccttttctcagaagcttttagtggaagatgcaaagagacaagcttacaagaatgtttggaacctgaccccatttgatcggcgagcaattatgggcccttcgatgccctttaccgatctgctgcctgaaccggtcggcacctctaatttacttctgcaccaacctgatttctcaggtacaagaccagacatgccactaggattcaaccaatcctcaacatcattttcctatgaagtggaaaatcccaatcccttacagggaattgaaccacttaatccaatgctaagtaacagtagttttagaatggaagggatcttcccttacaatgcagacaacagtttttcatttttcgcggacgacggtttcggtacaaatcaggacaacactcaggctcaaatgctaagcttaacatcagctactccagcatgggcacaaggcagtggattcattttcacaccagactatgaaacatcatctataagcttcttgtcttctttcccgagctgcaatgtaaatgaccgaagcatcggagagacaagagaagtgtgtcccaaaaacaggtggttgaaggtacgagctgttatccaatggaaatcaatcagccgcggcgctgcaaaaaggcggcggcagcactggctgcaacacggtatatgtacatgaataatatataagatcaattgcacagcaattaagcatctcctacatgtttaatgcaatcaggagataataatcagtctcctagatgtttcagcatagggttctcaatcttatgtagcgttttttcttcctatggaaatgtaatgtaatgtattgtaggagagggcaagtagtagtattttctcttaggttcatttatgtggttgtagatttcacctttgtaacttataattaacaattgcaatcaaaacaaggctgcttgaaagttaaaaaaataataaattctaatgttgatctgttgattagt

SEQ ID NO: 1509 - DNA, 1097 bp, Gossypium hirsutum
  Clone ID: GOSHI-09MAY01-C2540_1
ctagtctcgagtttttttttgactgtttttagtttcttgtttcgcttgtctttctagttgcttcaaacagctgaggtgtatatatatatatataatggagattctggttagatgttttcaaattattgcatgagagaagagcttgtcagagttgagaggaactaaattggaaggaaatggggtgcctgttatcgacgccagaggttgcaggaggagctcgaagaaggccgagaaatattggtgaagttgtagtttttgttcctggactgaaatctcctaggccccttggtttcgcacagccactcggtgatggactatccaagagcttggttgaacgtctatcggcgttgagaacacgtatagaggtcatggcaggtcaagaagcacctatgactactaaaccgagaagaacagccacacaacacggaggttcaacgttgactgatttgcagcaggctctcgaggattatctgccggtcttgttggggctagttgaaaatggtaactggctaaaacataacttgcggttctgttggataaatcaggaagatgatgtggaggaaactaccatgtcggattcttggtatgaggtactatcagtgttgcacttgatggcagttctattgttatcacaggccaatttattgcttcttccaaacaaatttaccagtggttatcagtctacagcattggaagattgcaaacgagcatccattgacattttcttaaaggcagctggatatctggacttcgctgtgcagaaagttctccctcaattgcccttggaacttaggagtgatttgccacttgttctgtcagagggagtgcttaaagccctttgtttgcaagcattaggccagggtgttgagattcaactgggaatggcaattgatagcattaaggccactctggccgtgaaaaggaggctagcatgtgagatggttaaatactggcatcaggctgaggaatacataaaggaacttccagtagcaaatggatggggagaaaagcacaagcttttcattcagtggaagcacattgaagctaaggctattgcatactatcttcacggattaatcctcgaaaaaaggaacaca

SEQ ID NO: 1510 - DNA, 805 bp, Gossypium hirsutum
  Clone ID: GOSHI-09MAY01-C2520_1
gagaaagcgagagaagaagagaatcgatttttttattcaaaaaaagatatccatggcagagacagcaatcaactctaaaccgaaaaacgcaagatggtttctcaatggaatgactgcccttgtcaccggtggcactcgaggaattgggcatgctatagtggaagaacttgcagggcttggggcttctgtttacacatgttcaaggaatggagatgagttgaataagtgtttgaaagaatgggaaagcaaaggatttttggttaatgggtcagtttgtgatgcctcgtctaaagaccaaaggctgaaactgatagacaacgttgcctctgttttcaatgggaagcttaacattcttgtcaataatgtgggaacaaacatcagtaagccaacagttgaatacactgcggaagaatattcaaagctgatgtcaacaaacttcgactcttcataccatttctgccaacttgcgcatccacttctaaaagcatctggaaaaggcagcattgtgttcatttcgtctgttgcaggtttaacccatgttggcagtggatccatttatgcaccagctaaagctgctatgaatcagctcacaaaaagcttggcctgtgaatgggccaaggataatatcaggaccaactgtgttgctccctggtacatcagaacctcacttgttgaacgtttgcttgaaaagaaagaatttatggaaaaagtaatatctcgaacgccacttgaacggattggagaaccagaagaagtgtcatcaatggtagcctacctttgccttccggctgcttcttacatcact

SEQ ID NO: 1511 - DNA, 1719 bp, Gossypium hirsutum
  Clone ID: GOSHI-09MAY01-C2490_1
tcgctcattgaaaatatttgtggaaaacagcaactagctggaagctggatgaagcacttcagctgttttatgtcggtaatgaaggtggtgtagttggaacggcttctgagtctccagcagtggaaaacgtagattcttgggttgatcaaaactctggtgagttgaaggagtctggaaacagtgatgttggacccattggtggagaggaagtacgccctcctttacctgtagtaagggagactctttatgatgatgcatcgttatatggagcttcaagattaggattacctccccaacagtcgagttcgttaattgcattccgtaattttgatgaggaaatgaaacggcccggggtttgggaatcagatgaaggtgcttcttccacggtagatgctcctcgggataatcttgcctctttattatcgtcctccttttcatttctgatgttccagggacccatttgaaaaggcaaaagctgctgcatctgttgaggacaagtggctccttgtcaacttgcaatctaccaaggagttcagctcacatatgcttaatcgagatacttggggaaatgaggctgtttctcaaactgttagcaccaactttattttctggcaggtatatgatgacacaagcgaggggaggaaagtttgcacctattacaaactagattcaattcccgtagtgctggttattgacccaatcacaggacagaaaatgcgctcctggtttggaatggttcaacctgagagtttgctggaggacctggttcaattcatggatggtggcccaagggattatcatgcaactctgtctcataaacgtcctagaggaagctcagttactccgcaacaaaaaattaaagtgtcaacagatgaaaccaatgaagataaggaaatgttgagagcgatagcagcttctatggagaatgcaaaagaatctattaaaacaactgaagatgataaagtatcatccacaactgaggaagaaccatgcttgactaagaagcctgcatatcctcctctacctgaagaacctaagggtgacaggaacctcttatgtagggttggagtccgacttcctgatgggcgcagggtacagagaaattttctccgaactgatccaatacagctactgtggtcattctgctattctcaacttggtgaagctgaatcaaagccattccgcctgactcaaccgattccaggagcttcgaaatctctggattatgatagcaaattaacatttgaggagtcggggcttgccaattctatgatctcagttgcgtgggaatgaatattgtcaagatggcaatggttttcaagttcattcaaccccccccccccccccgattttttggtttacgaactcttcacatccctgtttctcactttgtgttgcacttcaaggagttatttacgaggggatgaaagacccccccactttattatgtatatacactcaaaacactccttttatgtcttcaaccccccccccctgtttagttcttttgaaagaccagacatttaagctgcctagcccaccacttaggcctccactattttccaaacagttgaaactttgcggatggtattaatgcacatggtttaatctctattagatccagtcacttccagtatcattttctttgtatatgggttttatgtacatggtttacatcgcctgtttccatgtaaatagagtttttgttttgtgagaacc

SEQ ID NO: 1512 - DNA, 780 bp, Gossypium hirsutum
  Clone ID: GOSHI-09MAY01-C2480_5
cgtccacgcctgccctaatcaaagcactcaggccttttacttatgcttgtggaatcatcttactctgccaaaaatgcgagggtaaaggccgttaactttttaaaaatttgcaaaggatttatttttctcctataaaacactctattgtcatcaaccttggtgaccaacttgaggtaatcacaaatggtaaatataacagtgtgatgcaccgtgtgattgctcaaacagatgggaccagaatgtccattgcttccttctacaacccgggcagtgatgctgttatatatccagcaccagctttgctacccacgcgagctgacaaatctcaagtgtaccccaaatttgtgtttgaggactacatgaatctctatgctgacctcaagttccaagccaaggagccaaggttcgaagccatgaagaccgtggagtctgcagttaacttgggtcctattgcaactgtttgagtccttcagtgagtgaagagcgatgggttttaattagcagtgtgtttctgttaataagtttagtcggctgatggataaattctgttaattatagttctggaattagagagtgcctgcaggtgtggagcttagtagtttaaaataagctgaaaaagcttgtactaagaattcctcagttatatatggtgcctggtcgccagtggctgtgctttaaatgagatgttttggctgtcggaagtgaccaaattatatttgatatgaaaaattgtccttaagattctgaatatagcttaaaaaatatctctccctcttttat

SEQ ID NO: 1513 - DNA, 593 bp, Gossypium hirsutum
  Clone ID: GOSHI-09MAY01-C2480_3
cccacgcgtccgcaaacacaaacatattactgctcactatagcctaatagtggaattgttgaaagagaaaacaaaaatggaggtagctttccctgttattgacttgtccaaaatcaatggtgaggagagaggagccaccatggacatgatcaaagatgcttgtgagaattggggtttctttgagctgacgaaccatggaatatctcatgaactgatggacactgtggagaaactgacaaaggagcattacaaaaagtgcatggaggataggttcaaagaaatggtgacaagtaaaggtcttgaagttgttcaatctgagatcactgacatggattgggaaagcactttcttcttgcgccacttgcctgaatcaaacctttatgaaattcctgatcttgaatatgattacaggaaggtgatgaagcaatttgcagtggagttggagaagctggctgagaaacttttggacatactgtgtgagaatcttgggttggaacagggttccctgaagaaagtgttttatggttccaaagggccaacttttggtaccaaagtcagcaactaccctccatgccctaaacccgacctaatca

SEQ ID NO: 1514 - DNA, 1213 bp, Gossypium hirsutum
  Clone ID: GOSHI-09MAY01-C2480_2
cccacgcgtccgagctaacgtaacctcattgatagtatagcttagtaaattccccgggatggacaaaaaatggagctcactttccctgtaatcgacttctccaaactcaatggtgaggagagagcagccgccatggaaatgatcaaagatgcctgtgagaattggggtttctttgagttggtgaaccatggaatatctcatgagctgatggacactgtggagaggctgacaaaggagcactacagaaagtgcatggagcaaaggttcaaagaaatggtggccagtaagggtcttgaggctgttcaatctgagatcaatgacatggattgggaaagcaccttctttttgcgccacttgcctgaatctaacatgtctgaaattcctgatcttgaagaagattacagaaaggtgatgaaggaatttgcagtggagttggagaagcttgcagagcaacttttggacctgttgtgtgagaatctggggttggagcctggttacctgaaaaaagtgttttatgggtccaaagggccaacctttggtaccaaggtcagcaactatcctccatgccccaaacctgacctaatcaagggactcagggctcacactgatgctggtggaatcatcttactcttccaagatgacaaggtcagcggccttcagcttctcaaggatggtcagtggattgatgttcctcctatgaaacactctattgtcatcaaccttggtgaccaacttgaggtaatcacaaatggtaaatataagagtgtgatgcaccgtgtgattgctcaaacagatgggaccagaatgtccattgcttccttctacaacccgggcagtgatgctgttatatatccagcaccagctttgctagagaaagaagctgacaaatctcaagtgtaccccaaatttgtgtttgaggactacatgaatctctatgctgacctcaagttccaagccaaggagccgaggttcgaagccatgaagaccgtggagtccgccgttagcttgggtcctattgcaactgtttgagccccccatttagatcaatgggtttaaaaaatagtttgtttttgttgataaactaagtctgataaatgctctgatggatccatcctgttatattatgggaactttgtagtttgactaagctactaagagttcccctaggaaccctgatagtggtttatatatatgatactaataaatttccctg

SEQ ID NO: 1515 - DNA, 1032 bp, Gossypium hirsutum
  Clone ID: GOSHI-09MAY01-C2480_1
cctcgccagtaatacctgcgacgcgtctccttctatcaaatagccacaccgtttggagagatagcttttcaaagattttctagatatcagctatcataacttcttatttcctcatttcaaaaacaaaatcaatctggttctcctctccatctaccttccggatctgtctcgctggacgccgggtgttccctcttcaactacgaatgaggaggagatattttcatggagagtcgtctttgaagcttgaaacaccctcatccggtcccgcaccactattccggaaggccgatcgaaaatttctcccgtcaaaggctgtatcaaatagttacgttgatctcgatgtctcttctgtttggctatgggtgttttcaggaatagaggcaagtttttttatctctaatcccctctagttcagctagataacttctgattttctcaactagatcccatactgaaatggatttcctttcatgaacaaactggttcattgagttccatatgagccacaatgcgcaacaaaagatcctacactgttcattggtacctcttacaaaaaaccaggacactgtctaaagacatgatcactatcctcttctccaactccacagcaagggcagatgatgttgttagccactctcttgtaacttagattgatcaatgtagagatgtaattccagtagatcctccatattgtaattgtaattttttatggtagctgtatgtcccatagttttctaaagaaatctttagattcggtctgtaataaataactattaggatccatgctagcacattgtaatagtgtataggcactccgtactgagaaaactcccgaaggttcctctttccatacttggaaatcttcatgcttcgcttctgccaaagggatctgtaaaatctttttggcagtttccgtatgaaaagtactggtcactacaaaaaaaaaaaaaaaaaaaaaaaaaaaacaataaaaaaaaaaaaaactaacatatataaatgcaaaacaaaggggaagcgcctactaaaaggggg

SEQ ID NO: 1516 - DNA, 563 bp, Gossypium hirsutum
  Clone ID: uC-gsronu33B155e04b2
agctatcataacctcattgatagaaaagcttagtaaaagccccgggataaacaaaaaatggagctcactttccctgtaatcgacttctccaaactcaatggtgaggagagagcagccgccatggaaatgatcaaagatgcctgtgagaattggggtttctttgagttggtgaaccatggaatatctcatgagctgatggacactgtggagaggctgacaaaggagcactacagaaagtgcatggagcaaaggttcaaagaaatggtggccagtaagggtcttgaggctgttcaatctgagatcaatgacatggattgggaaagcaccttctttttgcgccacttgcctgaatctaacatgtctgaaattcctgatctcgaagaagattacagaaaggtgatgaaggaactccacagcaagggcagatgatgttgttagccactctcttgtaacttagattgatcaatgtagagatgtaattccagtagatcctccatattgtaattgtaattttttatgggagctgtatgtccccatagtttctaaagaaatctttagattcg

SEQ ID NO: 1517 - DNA, 404 bp, Gossypium hirsutum
  Clone ID: LIB3829-023-Q6-K6-H7
cgatgtccttgttccttttacaaccctggaaggagctgttatatatccagcacctgctttggtggcaaagaactgagaacccatgcgtacccgaaattctgttcgaggactacatgaaggtctaccccgccctgttatttcgaagacaaggagccgaggttcgaaggcgggaggaccatggaatccatcgttagcttgggtcctattgcaactgtttgaaccacccatttagatcaatgggtttaatatatagtttgtttttgttgataaactaagtctgataaatgctctgatggatccatcctgttatattatgggaactttgtagtttgactaagctactaagagttccactaggaaccctgatagtggtttatatatatgatactaataaatttccctga

SEQ ID NO: 1518 - DNA, 298 bp, Gossypium hirsutum
  Clone ID: uC-gsronu33B011h01b1
cgattggttttaattagcagtgtgtttctgttaataagtttagtcggctgatggatatattctgttaattatagttctggaattagtgagtgcctgcaggtgaggagcttagtagtttaaaataagctgcaaaagcttgtactaagaattcctcagttatatatggtgcctgatcgctagtggctgtgctttaaatgagatgttttggctgtcggaagtgaccaaactatatttgatatgaaaaattgtccttaaaaaaaccactacttttaacggtaaattacctattccgtgaatc

SEQ ID NO: 1519 - DNA, 1443 bp, Gossypium hirsutum
  Clone ID: GOSHI-09MAY01-C2440_1
gacggagttttgtccaggcggcgaccttcatgtcctccgtcaacgtcaacctctcaaacgtttccccgattcctccgtcaggttctatgcatcagaggtggtggtggctttagagtacctacatatgatggggattgtttaccgtgatctaaagcctgaaaacgtgttggttcgatcagatggtcacattatgctcacggatttcgacctttcattgaaatgcgatgagtccacatcaacgccccacattgtttccgatcaaaaaccgccggtaccaggtctgcggaatgactatcctaaagatcatcctcctttcacatcgtcttcttgcatcatcccaaattgtattgtacctgctgtttcatgtttccacccaaaacgcaaacgcaaaaagaagtctgcccatcgtggtgggcctgagtttgtggcagagcccattgatgtccggtccatgtctttcgtagggacacatgaatatttggcaccggaaattgtgtccggtgagggccacggtagccctgtggattggtggacattggggatctttatgtatgaactgttttatggggtaacaccgttcaagggcgtggaccatgagctaaccttggccaacattgtggctcgagcccttgagttccctaaagaacccatggttcctgcagcggctaaagatcttatttcccagctgttggtgaaggatcctccaaggcgtttagggtccacaatgggtgcatcagccatcaagcaccacccattcttccaaggggtcaattgggcattgctaaaatgcacgaccccaccatatgtacctccaccttttagtaaagaagttgtatcagatgaaagctgtccagagaccccagtagagtattattagggtgaagtaaagaaatgatcagtaaattaaaaaagaatcaagcgtcccctacagcaatcatgtaacttgtgattatactttttggaatctatattgcaacgagtattcatttatctttaaatatcggcatatattattgtaagcctccagttggaggttaatgtgttggttcattggattccgacaatgcatttgtaaaaaacaatcgatatggacacgggaagaggaaagccggtggcatcgaacgtgataggctgtccaccgatcaccgaaggtatgagaatacaccaaggaaacgaaattggtgccttttaagatgattgcccctaccatgtggtttgtttactacatagggaaaatgttgggacttttgccatgattcctttaaatcggctcacatgatcactgcgtacttccatgttgatgccatccaatggtttaatttttatttctttggcttctactgcaaatccaaacaacaatgttatatgtaaatgaagttatcgtatatgtaaaagaatgtcataatggtatatttttggctctactactctaatgtactaaat

SEQ ID NO: 1520 - DNA, 726 bp, Gossypium hirsutum
  Clone ID: GOSHI-09MAY01-C2470_2
ccaggaagcagaggcaaaagctgctgctgctgaagagagagagcggtctttgaatgatcgcttatctcaaaccttatctcgaattaatgttcttgaagctcagatttcatgtcttagagcggaacaaacacagataagcaggtccctggggaaagagagacagagagctgctgagaatagacaggagtaccttgcagcgaaggaggaagcagatactcaagaaggtcgggcaaaccagcttgaggaagaaattagggaactaagacggaaacataagcaagagttacaagatgcttatgtgcagcaggaacgcctacagcaggaagtagaaagggagaaagctgctcggttagacttggaaaggacaacgcatgtgcattctatggctatatctgagcaagctccaatggcaaggcacaattctgcttcggagaatggaagcttgtcccggaaactctctactgctagcagcctaggaagtatggaggaaagctattatctgcaggcatctttggactcatctgatggtttctctgaaaagagaaatattggagaggcaacattaagtccgctctacatgaagagcatgacacccagtgcgtttgaatctgcccttcctcagaaggagggtgaacttgcatcctacatgtctcgcttgtcttccatggaagctatccgtgactccttagctgaggagttggcgaaaatgacggaacagtgtgaaaa

SEQ ID NO: 1521 - DNA, 632 bp, Gossypium hirsutum
  unsure (1)..(632): unsure at all n locations
  Clone ID: AW186918.1
gttcttgaagctcagatttcatgtctaagagcagaacaaacacagctaagcaggtcccttgagaaagagagacagagagctgctgagcagagacaggaatacctancagcaaaggaggaagctgatacacgagaagttcgggcaaaccagcttgaggaagaaattagggaactaagaaggaaacataagcaagagttacaagatgctcttgtgcatcaagaacttctacaacaggaagtagaaagggagaaagctgctcgggcagacttggaaaggacagtgcgtgtacaatctacagagctagctccaatagcaaggcataattccactttggagaatggaagcttgtcccggaaactctctactactagcagcataaaaagcatggaggaaagctattatctgcaagcatctttggactcatctgatggtttctttgaaaaaagaaatattgttggagagacagcattaagtccactctacatgaagagcatgacacctagtgcttttgaatctgcccttcgtcaaaaggagggtgaacttgcatcctatatgtcacgtttgacttccttggagtctatccgtgactctttatccgaagagttggtgaanatgactgcacagtgtgaaag

SEQ ID NO: 1522 - DNA, 371 bp, Gossypium hirsutum
  Clone ID: LIB3147-003-Q1-K1-B2
cccacgcgtccgatttggaaaggacaacgcatgtgcattctatggctatatctgagcaagctccaatggcaaggcacaatactgcttcggagaatggaagcttgtcccggaaactctatactgctagcagcctaggaagtatggaggaaagcgaaccatatgcatgcatctgaaggactcaacggatggtgggtctgatgagagtaatgttgaagaggcatcattgaaaacgatctacatgaagagcatgacacccatagcgtgtgaatctgcccttcgtcagaaggagggtgaacttgcatcctacatgtctcgtttgtcttccatggaagctatccgtgactccttagcttaggaagtggtgaaaatga

SEQ ID NO: 1523 - DNA, 516 bp, Gossypium hirsutum
  unsure (1)..(516): unsure at all n locations
  Clone ID: LIB3584-003-P1-K1-A3
aaataatggtgcacttgaagaccttgtttacatcccttcttcttttcctcttgatttttgcctcctgcccaaggatcggttcagccactgcaactgctgatgcttcacttgctcatgctgcacaatcacatcagatgaggcagcggatgaatcatggaagctatcgtggacctcgaaaacaccttctcaacccagctgttgaccatcctcttcagcttcccaagttgtctgtatagttttctatgtaaaccaaaatctgatcactagaagctataatagtttatctgtttttatgtttctctttttgtatgtcttttatattactaccaaaaccatacaattcaattcaaacagctgaacccaattcttgaaggaatcaaatgttccccaacttggatttgnaaaaaaaaaaaaaaaaaaaaaaaaaaaaaaaaaaaaaaaaaaaaaaaaaaaaaaaaaaaaaaacaaaaaaaaaaaaaaaanaaaaaaanaaaaanaaaaaaaaaataacccccc

SEQ ID NO: 1524 - DNA, 412 bp, Gossypium hirsutum
  Clone ID: uC-gsflnu33B071b06b1
tgtacttgaagaccttgtttacatcccttcttcttttcctcttgatttttgcctcctccccaaggatcggctcagccactgcaactgctgatgcttcacttgctcatgctgcacaatcacattagatgagccagcgcatgaatcatggcagctatcgaggacctcgaaaacaccttctacaacccagctgttgaccatcctcttcagcttcccaagctgtctgtatagttttctatgtaaaccaaaatctgatcactagaagctataatagttcatctgatcttatgtttctctttttgtatgtcttttatattactaccaaaaccatacaattcaattcaaacagctgaacccaattcttggaaccgaactttcagctttgggactttagacaacaaagggtgcccgacag

SEQ ID NO: 1525 - DNA, 568 bp, Gossypium hirsutum
  Clone ID: GOSHI-09MAY01-C2780_2
taaaaataaaaatggcccaatacatctttgaacatttaagcctcatgctaattaattaatgtatacgatgagttgcacattcctgacaaggcagccattctgacggaagaagatattgtaaaaccagggcaagctcctaatctatggagactgaacaccatccatcgagtggaggaactaatagcagtgatccgaatgggacccatatgggcagcgggaatccttctcatcacagcctatgctcagcaaaacacattctccctccaacaggccaaaagcatgaacaggcacctcaccaagtcatttgagatccctgctggttccatgactgtcttcaccatggtctccatgctctccaccataaccttgtatgaccgtgtttttgtccgcattgcccgtatatacacattgctcaagcgaagcatcagctttcttcacaatatgtgaatatgattcatgatatcattattagccactctggtagcatgcttcgtgtgaagtgaaacgtaaacaagcttctttaccacattggcttcattacaaagctcattcaatcatccccatctca

SEQ ID NO: 1526 - DNA, 530 bp, Gossypium hirsutum
  unsure (1)..(530): unsure at all n locations
  Clone ID: LIB3584-007-P1-K1-H6
ccgggtcgacccagctttcgccccgcgtccngtcggatgatgagcttgacgcctccatttccgtaggtgtgaaaacttgttcacaccccagacatgacattcctggacaaggcagccattgtgactgaagaagatttgtaaaaccagggcaagctcctaatctatggagactgaacaccatccatcgagtgggggagctaaaagcggtgatccgaatgggaccaatatgggcagcaggaatcctcctcatcacagcctatgctcagcaaaacacattctccctccaacaggccaaaaccatgaacaggcacctcaccaagtcatttgagatccctgctggttccatgactgtcttcaccatggtctccatgctctccaccatagccttgtttgaccgtgttttggtccgctttgcccgtcgctcctcagggctcgaccggggcttctgcttcctgccccggttggggcttggatgcctgatctccgtttttgcctctctgttggcttgcttctcggccgcgaagcgtttt

SEQ ID NO: 1527 - DNA, 719 bp, Gossypium hirsutum
  Clone ID: GOSHI-09MAY01-C2750_3
cccacgcgtccgcccacgcgtccggacccacgcgtccgattcttgacaagaaaataggtcttggacaaccaaaacgaatagagaacgcaaagattttggtggcaaatactgcaatggatacagataaagtgaagatatatgccgcacgtgttcgcgttgactcgatgtctaaggttgctgagattgaaggggctgaaaaggaaaagatgagagagaaagtgaaaaagatcttaggacatgggattaactgcttcgttaacaggcagttgatttacaatttccccgaagaactctttgcagatgcaggcatacttgctattgagcatgctgattttgatgggatagaacgtctggctttggtaacaggtggtgaaattgcttcaacctttgacaacccagagtctgttaagcttggacattgcaagcttattgaagaaattatgattgctgaggacaagtatgatccactttctggtgttgaaatgggctcagcttgtctattgtgttgataggggccagccatatgtgctggatgaatctgaaaggctctgcatgatccctttgtgtgctgctcataccgacaatatcttacgtttgtgattaatgactgatcgcaaagcatggtctataatcgctcattacccttgacaactcactcaaactcttacatatataacctcctgcacattccacctcataatatctatatctcctcctct

SEQ ID NO: 1528 - DNA, 1877 bp, Gossypium hirsutum
  Clone ID: GOSHI-09MAY01-C2750_1
ccgaatctccgattttcccaagcatcgcgcatacgatcaggtcttttttctctgcactaagactcagagctactctcgtcctagttattttccatggcgattgagaaaattcttaaagatgatgctagtgaagagaagggggagcgtgccagaatggcatcatttgttggggcaattgcaattactgacttggttaagacaacccttgggccaaagggaatggataaaattttacagtcaactggcaggggaaatgaagtcactgttacaaatgatggagctaccatcttaaagtccctgcacattgacaacccagcggcaaaagttttgattgacatctccaaagttcaagatgatgaagttggagacgggacaacctctgttgtggttttggctggggagcctttaagggaggcagaaaagctagtggcagccaagattcaccctatgacaataatatcaggttatagaatggcagccgaatgtgctcgtaatgctttgttgcagagggttgtggataacaaagagaatgcagagaaattcaagtcagacttgatgaaaattgcaatgaccactttgagctccaaaattctctctcaggataaggagcattttgcacaactagctgtggatgctgttatgaggttaaaggggagcacaaatttagaggccatccaaattatcaagaagcctggaggatctttgaaggattcctttttagatgaaggattcattcttgacaagaaaataggtctcggacaaccaaaacgaatagagaacgcaaagattttggtggcaaatactgcaatggatacagataaagtgaagatatatggtgcacgtgttcgcgttgactcaatgtctaaggttgctgagattgaaggggctgaaaaggaaaagatgagagagaaagtgaaaaagatcttaggacatgggattaactgcttcgttaacaggcagttgatttacaatttccccgaagaactctttgcagatgcaggcatacttgctattgagcatgctgattttgatgggatagaacgtctggctttggtaacaggtggtgaaattgcttcaacctttgacaacccagagtctgttaagcttggacattgcaagcttattgaagaaattatgattggtgaggacaagttgatccacttttctggtgttgaaatgggtcaggcttgtactgttgtgttgagaggggcaagccatcatgtgctggacgaagctgaaaggtctctgcatgatgccttgtgcgtactgtctcagacagttaatgacactagggtattgcttggaggtggatggcctgagatggtaatggcaaaggaagtggatgaattggcacggaagactccggggaagaagtctcatgctattgaagctttctcgcgtgcgcttgtggccatcccaacaattattgctgacaatgctggtctagacagtgcagacttagtagctaagcttcgtgcagagcaccacaaggagggatgcaatgcagggattgatgtcatctctggatctgtaggagatatggcagagctaggaatctctgaagccttcaaagtcaagcaagccgtattgctatctgcaactgaggctgctgaaatgattctcagagttgatgaaatcatcacatgtgcgccaaggaagagagaagacagaatgtgaaaatgacgatagtcaacggcacgttcatttgttgtaatggattactgtctttggcatttgcttgttgattttgattgtttttcactgcagtatggttgaattctagaactgaagtttgggtggcttggttcagtttttaactgaaaagggaaccattcttcactcctttaaaaatttaaacctaccaattttcaatggct

SEQ ID NO: 1529 - DNA, 627 bp, Gossypium hirsutum
  Clone ID: LIB3582-007-P1-K1-A2
tctgagtcttcttgcacgtctccccacgcgtgacgttccggtaagacgcagcggacgtacaacgtccgcgaagaactctttgcagatgcaggcatacttgctattgagcatgctgattttgatgggatagaacgtctggctttggtaacaggtggtgaaattgcttcaacctttgacaacccagagtctgttaagcttggacattgcaagcttattgaagaaattatgattggtgaggacaagttgatccacttttccggtgttgaaatgggtcaggcttgtactattgtgttgagaggggcaagccatcatgtgctggatgaagctgaaaggtctctgcatgatgccttgtgcgtgctgtctcagacagtcaatgatactagggtattgcttgggggtggatggcctgagatggtaatggcaaaggaagtggatgaattggcacggaagactccggggaagaagtctcatgctattgaagctttatcgcgtgcgcttttggccatgccaacaattattgctgacaatgctggtctagacagtgcagacttagtagctaagcttcgtgcagagcaccacaaggagggatgcaatgcagggattgatgtcatctctggatctgtagga

SEQ ID NO: 1530 - DNA, 923 bp, Gossypium hirsutum
  Clone ID: GOSHI-09MAY01-C2760_1
atttgttttgcgctttgtgtaagaaaaaagaaggcgtccaacgaaaataaacaaggggaagaaagaaaagtagagtagcaagaactagggtttcctcaattccaggccaaagaggaaagttaagaaacgtgtgaatggcggacggttactggaatcggcgacagccaactcctccgatgctgtcttccagtggggcgcttaaacgacctcgtactgaatacgatggcccaccttctgggctacatccatctcatgagatgcataattatttggcaagagacagtgatcgtggtggacatctgcctgtaaaggatacaaaaacaattgggtcggcatatgatcgctatctgcagagtgcacaaatttcttcttttccttctggagaagcaagaacatttggtgggttgggaaagcctgttggtggtgcaatgcctgctcgtccaatagctgatcctcctgtgatgggtcgtcctggatctgctgctccagatatggtaccaaatggtcgaaatgtaggttatggtaatcaacttcctttggatgcaatgtcgaggctaggtcgggatactgtacctctacctccagatgcttccaatactctatatgttgagggacttccttctgacagcacaaggagggaagtagcccacatctttcgcccttttgtgggatataaagaagtacgactagttagcaaagaattccgacatcgtggtggagatcctcttatcctctgttttggtgatttcaccactcctgcttgtgcagcaactgcaatgagtgccttgcaaggttacaaaattgatgaacatgatcctgattctaactacttgagacttcaggtttctcggtaccccaggcccaaggtcaggtccaggagctcgtggaaggaaggtgaatgtcattttctggatggaactaat

SEQ ID NO: 1531 - DNA, 605 bp, Gossypium hirsutum
  Clone ID: GOSHI-09MAY01-C2710_3
acttgaccgtgatgcttgtgggaacttgaattccatgatatatccttgttgtgacgatttgagagacctgaaaagtggtcactaccacaagattgtagaaattacagagaatgcttcacaatgcctcgaggacgaatacatggtggacaagccatcttgttcgactccaaggaagaggtcattcaaccttccgagtgtttcatccattgacgaactcagaactcctccattcgaggagttattgaagttgttttgggaagcaaaatctgcaaaactagcgaatggagatgtaaaacatatgctggcagcatatgaagcagcccaagccttgaaagactccagagttccactcactgctataaactaaaagtgagatggaaaggaacaaacatatttaagaaaacaaaggccgagtatagtatagtgttaagaacaaaaggtgtgtacagattcagaaccattccactcttttttttttttctttcttgtatttcattaattgtttggttgcttgttggattcagcaaattatcacatttacatactaaatcagattttcttctcttcgtgcctcagcaatcctatcattgccaagatgtaccaag

SEQ ID NO: 1532 - DNA, 888 bp, Gossypium hirsutum
  Clone ID: GOSHI-09MAY01-C2710_2
gtctgaatttgaaaagagtttgaggatgtgccgctaatgaagagaagcaattgctgcaaaagtggcagaactgcttgcaggttcaagtgctaggaagaaaagctggtccaaatggcagtccacgatctccgggaaaatgcatccagcaaaaccagtaaactacagaaagaaatgtctaccatgcaagagtccacttctgttgttaaagcagaatggaatgttcacatggaaagcacagaatcccactatattgaggatacttctgctgtagaaagtggaaagaaagacatggaagatgttcttcaaaattgtatgaagaaagcaaagatccctcccctccgcccgcgcgtccctcaagaatcccttctcagtttagaaaagagtaatgttgattctgtggattccattgttaggggaggaatggaagccaatcagatcctccgagatcaattttcttgtgctgtatccactgctcttgaagatgtagacactgcaaacaacagttgcctaacatccattgattattcattacaacttgatcgtgatgcatgtgggaacatgaattcgatgattattccttgttgtgaggaattgagggaactgaagggtggtcactaccacaagattgtagaaatcacagacaatgcagggaaatgtctggaggaggaatacatggtggacaagccatcgtgttcaacaccaacgaagagggcattcaacctaccaagcatgtcatcaatagaggaactgaaaacgcctccattcgaggaactattaaagttgttttgggaagcaaaatcagcgaaggtagccaatggagatataaaacacatgtgggggaatatgaagcagcatcagcagctccccaatccccatcccaacaattga

SEQ ID NO: 1533 - DNA, 1256 bp, Gossypium hirsutum
  Clone ID: GOSHI-09MAY01-C2710_1
atccaagctgaccaaaattgtggaagaatctcaaacagtaaacgacaacaaattgtctgaatttgaaaagaagtttgaggaatgtgccgctaatgaagagaagcaattgctgcaaaaggtggcagaactgcttgcaggttcaagtgctaggaagaaaaagctggtccaaatggcagtccacgatctccgggaaaatgcatccagcaaaaccagtaaactacagaaagaaatgtctaccatgcaagagtccacgtctgttgttagagcagaatggaatgttcacatggaaagcacagaatcccactatattgaggatacttctgctgtagaaagtggaaagaaagacatggaagatgttcttcaaaattgtatgaagaaagcaaagatgagtgctcagcaatggaagaatgctcaagaatcccttctcagtttagaaaagagtaatgttgattctgtggattccattgttaggggaggaatggaagccaatcagatcctccgagatcaattttcttgtgctgtatccactgctcttgaagatgtagacactgcaaacaacagttgcctaacatccattgattattcattacaacttgatcgtgatgcatgtgggaacatgaattcgatgattattccttgttgtgaggaattgagggaactgaagggtggtcactaccacaagattgtagaaatcacagacaatgcagggaaatgtctggaggaggaatacatggtggacaagccatcgtgttcaacaccaacgaagagggcattcaacctaccaagcatgtcatcaatagaggaactgaaaacgcctccattcgaggaactattaaagttgttttgggaagcaaaatcagcgaaggtagccaatggagatataaaacacatgttgggggaatatgaagcagcatcagcagctccccaatccccatcccaacaattgaaagattctagacttcctctcactgctattaattaaaaagtgaatggacttttaaaacagataaaaacaagaaattagtatattatattatattatattatattatatatataatattagtatagtggtaagaaagaaaaggtgtgtacagtgcagatacagaaccagaatacggtgtggctgaacgactccttcccttgggcttccattcattgtttgttgaaagaattcaactggaacatgcagtgagttcttaaatataatactaaaacagtgatttattattattaaaaaaaaattttttttaatt

SEQ ID NO: 1534 - DNA, 1419 bp, Gossypium hirsutum
  Clone ID: GOSHI-09MAY01-C2700_1
ccgttgcgacacgatgggcaacgatgctcctgctttaaagttggcagacattggtatcgctggccctgatgccaccgatgccgctcgaagtgcttcagatatcgtacttactgaacctgggcttagtgtcattatcagtgcagtgctgaccagtagcgccacgcgtgcccaaaggatgaagaactacacgatctatgctgcttcaatcaccatccgtatggtgggtggtttcttgttcattgccttgatatggaagttcgacttcgcaccgttcatggttttaattatcgccattctgaacgatggtacaatcatgacaatttcaaaggacagagtgaaaccatctccacagccagacagctggaaactcaaggagattttctctaccggcattgtgcttggaggttacttagcactaatgactgtgatattcttctgggcaatgaaagacaccaatttcttctcgaacacattcaatgttagatcactgaggcataataatattgatggtgagaaagaaatgatggcagctttataccttcaagttagtattgtgagtcaggccctcatttttgtcacaaggtctcgcagctggtcctactttgaacgccctggacttctactagtcagtgcctttctagttgctcagttggtggccactttaatagctgtgtatgcagactgggggtttgcaaggattaaaggtatgggttggggatgggctggtgtaatctggctatacagtgtggtgacttttatcccactggatcttatcaaatttgcaatccgctatgttcttagtggaaaggcttgggataaccttttggagaacaagactgccttcactacgaagaaagattacggaaaagaggaaagggaagcacaatgggcagctgcgcagaggactctgcatggccttcaaccacctgaaaccacaagcattttcaatgaaaggagcagttacagggaactttcagaaatcgcagagcaggccaagcgcaaggctgaggttgcaaggctgagggagctgaatacactgaaggggcatgttgaatcagtcgttaagctcaaggggcttgatatcgataacattcagcagcattacaccgtttaaagatggatgctatttcccctccaagaaaaaaaggagttataatgacgaacaatcaccccggatattaatattaatattgttatcaatcggcttatagtagtagtatagatttaggataattttcctttttcctaaatgtcggaatttgtgttcattgtgattacctctttgggatgcagaaaggttaattaataacatcatctaatccaaggctctttgtttgctcaaacaaaaaaaaaaaaaaaaaaccccaccaaaaggaaaaaaaaaacccacgcgaccaaaaacgcaacaaatattataat

SEQ ID NO: 1535 - DNA, 417 bp, Gossypium hirsutum
  Clone ID: LIB3585-027-P1-K1-H5
cggaatccggttcgaccacgcgtacgcgtacgggtctagagctctatacctccaagtaggtgttgcgagtcaggccctcatttttgtcacaaggtctcgcagctggtcctactttgaacgccctggacttctactagtcagtgcctttctagttgctcagttggtggccactttaatagctgtttatgcagactgggggtttgcaaggattaaaggtatgggttggggatgggctggtgtaatctggctatacagtgtggtgacttatatcccactggatcttatcaaatttgcaatccgctatgttcttagtggaaaggcttgggataaccttttggagaacaagactgccttcactacgaagaaagattacggaaaagaggaaagggaagcacaatgggcagctgcgcaaaggac

SEQ ID NO: 1536 - DNA, 383 bp, Gossypium hirsutum
  Clone ID: LIB3148-017-Q1-K1-D8
ctcaaagagattttctctactggcattgtgcttggaggttatttagcactaatgaccgtgttattcttctgggccatgaaagacactgatttcttctctgacaagtttcatgttaggtcactgagggatcgtcctgaacaaatgatggcagctttataccttcaagttagtatagtaagtcaggccctcatttttgtcacacggtctcgcagctggtcctttgtcgaacgtcctggacttctattagtcactgcatttattgctgctcagctggtggccactttgatagctgtctacgcttaatggcgttttgcaaagatacaaggcatgggttggggatgggctgctgtaatctggctttacagtttggtcacttatattcc

SEQ ID NO: 1537 - DNA, 275 bp, Gossypium hirsutum
  Clone ID: uC-gsflnu33B025g11b1
ttgggctaagtgtcattatcagtgcagtgctgaccagcagggctattttccaaagaatgaagaactacactatctatgcagtttcaatcaccattcgtattgtgtttggacttatgttttttgccttgtcatggctttcttcttattctctttttttctattttatttctactacttttttctcctatattctctccctctttctctctattttattttattcttctcttttcttttttcctcattcttttctttaatatactttcccttttttt

SEQ ID NO: 1538 - DNA, 938 bp, Gossypium hirsutum
  Clone ID: GOSHI-09MAY01-C2720_1
cccacgcgtgcggcgaaatatttacgaagttctaccgccatggggagaagacctgcaaggtgttatcgtcagataaaaaacaaaccttacccaaagtcacgttattgtcgtggtgttcctgatcccaagattaggatttatgatgtgggaatgaaaaagaagggtgtggatgagttccctttctgtgttcacttggtctcttgggagaaggaaaatgtctctagtgaagctctggaagctgctcgtattgcttgcaacaagtatatggccaagtatgctgggaaggatgccttccacctgcgagtccgtgttcacccattccatgtcttgcgtatcaacaaaatgctttcatgtgctggagctgataggctccaaactggtatgcgaggtgcttttggcaagcctcagggaacatgtgctagagtagccattggtcaggtcctcctttcagttcgttgcaaggacagcaacagtcatcatgctcaagaggccctccgacgtgctaagttcaagttccctggtcgccaaaagattattgtcagcaggaagtggggtttcacaaagttcaaccgaactgattatttgaaatataagtcagagaatcacattgtccctgatggtgttaatgctaagcttcttggatgtcatggacctctagccaatcgggagccaggaagagcattcctccatgctgccgtttaagatctgacgatactctaaatcctcaactagttggctgagtcttgatagttatcttattcactcgttttgttgaaagaacctttgttttgtttaatgcttagtataattgcccatagaccaagtatgttcaagtatgtttttacttgaaatcttttgaagggtttggttcattgtggatttttctactttataatgcattttgttggaaacagttttggttgctcattttctcgtat

SEQ ID NO: 1539 - DNA, 1644 bp, Gossypium hirsutum
  Clone ID: GOSHI-09MAY01-C2680_1
ctttcatcatgaggttgttaagagggctttggttcttgctatggaaattcgaacagctgggccatttttgctgaaactcttgaaggaagcagctgaggaagggttgataagttcgagtcaaatggtgaaagggtttgctcggttagcagagagtcttgatgaccttgccctagacattccatctgcaaaaaccttgtttcccccgcgtccgcccaaagctttttctcaagggtggcttgacgcatcattcatgaaatcctcatgtactgatggagaggctcaaaatgaagacaaaaagttagaccggtacaagaaggagattgtaactataattcacgagtattttctctcggatgatattcctgaactcattcgaagtcttgaagatctagggttgcctgaatataatccagttttcctaaagaaacttatcactcttgccatggacaggaagaacaggggagaaagaaatggcatctgttttgctctctgctcttcatatcgagatcttttctactgaagatatcgtgaatggctttgtcatgcttctggaatctgcagaagatactgctttggatattctggatgcctccaatgagcttgcccttttcttggctagagctgtcattgatgatgtgatagttcctttgaatcttgaagagataaccagcaagttgccaccgaattgcagtggaagtgagactgtgcgaatggctcgatcacttataactgcacgccatgctggtgagaggctcctcaggtgctggggaggtggaactggctgggctgtggaggatgcgtccgcccacgcgtccgagcttctggaggagtacgaaagtgggggtgttgtggctgaagcttggcggggtatccgtgacctcggaatgccattcttcaaccatgaggttgtgaagaaagcgctggtgatggccatggagaagaaaaacgataggatgctagacctgctgcaggtgtgtttcaacgaaggtctaatcactatcaaccagatgaccaaaggcttcaccagggtcaaagatggactcgacgacctagctctcgactttccaaatgcaaaggataagttcagtttctatacggagtatgcccagaagaagggctggcttctgccatcctttggggtcatctgcaaccagaagctctgcccactgcagcagcctcttgaaaaggaaaacatattcatgtctctagtttctcatgtatgatgttgacgttcccagtacctgtgttcttagcagtcatccatggcagatcagattgataggattagatgtgggatgttcggattcctgatgttgtcttgtttttaatggtgtcatctgatggagattcttatgatcccagtccaagctaagcttgccattgtgtaaagttggttatattttcttctatattgaaatagcttcaagctcatgtcacaaccagcggcatattaggtattgcctgctggtacttgcaatatatgatggttagaatgacgctgtttacttccaaaggctcaaatatttatgctcttttgttgtagcaattccagtttgattttttatttttacatagttatgttgtagtttgatgagaggtcagatattttgtaatttttgtattatctgattttggatttacttt

SEQ ID NO: 1540 - DNA, 683 bp, Gossypium hirsutum
  Clone ID: GOSHI-09MAY01-C2640_1
tagtccatgtacacctgcgaatggcattggcacggcatatgcagcagatcttttaaacccctccacggaaggctgctttgattgccatggctgctcatgccactgaacccagtgaagcagaaaagcttaagttcttatcgtcaccacaggggaaggatgagtactcacaatgggttgttgcaagtcagagaagtcttcttgaggttatggctgagttcccatcagcaaaacctcctcttggtgtattttttgctgcagtagctcctcgtttacagcctcgttattattctatctcatcctcccctaggtttgtacctgccagggttcatgtaacctgcgctttagtttatggtccaactccaactggaagaattcaccggggtgtgtgctcaacatggatgaagaatgcagttcctttagagaaaagcaatgattgtagctgggctcctatttttattcggcaatccaattttaagctccctgcagatccttcagttccaatcatcatggttggacctgggactggattggcacctttcaaaagttttctacagaaagattggtcctcaaaaaaatggtgcagaacttggctcttctctactcttttttggatgtaggaatcgcgaatggatttcatttatgaagatgagctcataactttgtggaacaaggtgccctttctc

SEQ ID NO: 1541 - DNA, 720 bp, Gossypium hirsutum
  unsure (1)..(720): unsure at all n locations
  Clone ID: LIB3583-025-P1-K1-B2
atagaaacaagtctgatagatcgagttcgatgataaatcacggtgatgttttgaaagctctgtctcgggctttgaagaaaacagaggagtcttatttggatattgctgataagatgttaatggagaacctacagttggctttgatgggttcttgtgtgcttgtcatgttgatgaaaggtgaggatgtgtatgtgatgaatgttggtgatagtagggcggttttggcgcaaaaggcggagcccgattactggttggggaaggttaaacaggatttggagaggattaatgaggaaacattgcatgatcttgaaggatttgatggagataaatttagttcaattcctgatttaactgcttttcagcttagtgtggatcatagcaccaatgaaaaagaggaagttcaaagaataaaaaatgaacatccagatgatccttgcgctgtgatgaatgaccgagttaaaggttctttgaaggtcactcgagcttttggggctggttttctcaaacagcctaaatggaacaatgcacttctagagatgttcagaatagattacaaaggaaattctccatatatcacttgtgtaccatctctccaccaccacagattaggccccaaagacagattcttggtattatcatccgatggactgtcaatatttgttgtaaatgggttgtaatatttggactggtaataatattntattataaattattcttttt

SEQ ID NO: 1542 - DNA, 709 bp, Gossypium hirsutum
  Clone ID: LIB3582-036-P1-K1-C6
cggacgcgtgggtttgaataaaacagagtatttggatattgctgataagatgttaatggagaacccagagttggctttgatgggttcttgtgtgcttgtcatgttgatgaaaggtgaggatgtgtatgtgatgaatgttggtgatagtagggcggttttggcgcaaaaggcggagcccgattactggttggggaaggttaaacaggatttggagaggattaatgaggaaacactgcatgatcttgaaggttttgatgtagataaatttagttcaattcctgatttaactgcttttcagcttagtgtggatcatagcaccaatgaaaaagaggaagttcaaagaataaaaaacgaacatccagatgatccttgcgctgtgatgaacgaccgagttaaaggttctttgaagcctaaatggaacaatgcacttctagagatgttcaaaatagattacaaaggaaattctccatatatcacttgtgtaccatctctccaccaccagagattaggcccacagattcttcgtattatcatccgatggctctctcaatacttaacaaatgaggaggctgtatctgacgttgaacttttcatcacattgtaacccgaaggagaccctgcgcatcatctcattgaagaagtgctgttccgtgctgcaaagaaagcaagcatggacttttacgatttacttcgaataccccaggggata

SEQ ID NO: 1543 - DNA, 680 bp, Gossypium hirsutum
  Clone ID: LIB3583-022-P1-K1-G8
cccacgcgtccggatgaagagagcttaagaacatgttaatggtaaatctctccttttgcatttctctacggttttgcccaggataatttcctgtggctgttttttttttttcaattttaggtttagttagttgccgtggatgggacagtcagtttcgtcggcgaaactcacgactcgtcgggattgttatcatagtcaacggtcttactccagatcaacggttctgatctctccgatgaaaaccgaggaagctgaagtgattgatgaattatccgatttcatatcggatctaccggacgagtgtttagcttgtgtttttcagtgtcttactccggctgataggaaacggtgttcccttgtttgccggcggtggttgaggattgaaggtcagaatcgtcaccggctttctctcaacgctcaatcagatctacatcctttgattccttcaatcttctctcgtttcgatgctgtcacgaaattggctttgaaatgtgatcgtagatctgtcggcataggtgacgaagcacttgcttcgatctcggaacgttgcccgaatttgactcgtcttaagctccgagcttgccgtgacttaactgatgcaggtatgttggctttcgctaaaaactgtagaggtctaaagaagctttcgtgtggatcttgtacttttggagcttaaggca

SEQ ID NO: 1544 - DNA, 367 bp, Gossypium hirsutum
  Clone ID: LIB3165-007-P1-K1-C2
ggaaatcccggggcggaccgcaggcgtccgccacacgcgtccgtccgtaagggagttttttcgggtaaggccaatgattcaagggatgggggactcaacgccttggacttattctcaaactttaaataggtaggacggctgtggctgtttttttttttcaattttaggtttagttagttgccgtggatgggacagtcagtttcgtcggcgaaactcacgactcgtcgggattgttatcatagtcaacggtcttacttcagatcaacggttctgatctctccgatgaaaaccgaggaagctgaagtgattgatgaattatccgatttcatatcggatctaccggacgagtgtttagctagagtttttc

SEQ ID NO: 1545 - DNA, 663 bp, Gossypium hirsutum
  Clone ID: GOSHI-09MAY01-C2140_1
aactcactctcaaagatccctcttcctattttctctcctctgctctctcctgctccactcaatatataaataaaaacccaaactcaaaatatcaaaaaccccatttttcctccattgattcatccatctttgaagaaaaagagagagagagagagcttttgaagtaacatatatccatggcttcttgttgcaattctttgagactcgaaggtttcttctcttctgcttttaaatcatctaagcgatcatccaatgccattcccattcccatcccttcctcttctttttctcacctctgtaaccatcgcttccctcttcaaagcatttccttttcagtaccacgctccccttctttcaccatcaaagcttcctcctcctcctcttcttcctccaccaccattgccgagcctgaaggcatcaagataacttcagttcccactaaaccgattgaagggcaaaagaccgggacaagtgggcttcggaaaaaggttaaggtttttatggaagagaattacctttcaaattggatccagtcgttgtttaattcattaccgcctgaggattacaagaatgggtgttggtattaggaggcgatggtcggtactttaaccgcgaagcttcacagataattatcaaaatgctgctggaaatggagttggaaaa

SEQ ID NO: 1546 - DNA, 815 bp, Gossypium hirsutum
  Clone ID: GOSHI-09MAY01-C2170_1
gtttgtttctgataaagttcctgaaatggttatgggggatccagggagatttagacagataattacgaatcttgttgggaactctgttaaatttacagaacgggggcacatatttgttaaagtccatctagctgaaaacccgaagcctatggaagatcctaaagctgaaacttgtttgaatggagggtcagatgaagatgcattggtatcaggtgctcgccagtttaaaaccttgagtggttatgaagctgctgatgagcggaacagttgggattccttcaagcatttagttgccggcgaagaattgcgatatgatgcctcagtaaaaatgaaagctgctgatgaagcttctcagagtgtcactttgatggtatctgtggaagatactggcattgggatccctttgattgcccaggacagggttttcatgccctttatgcaggcggatagctcaacctctagaaattatggtgggactggcataggcctgagcattactaagtgtttggttgagctaatgggtggtcacataagcttcatcagcagaccacaagttggaagcacattctcattcaccacagtctttgggaggtgtaaaagagcttcatttagtgatacaaaaaaacccaatgccgaagatcttccatctggtttcagaggattgaaagctgtggtagtggcgggaaaaccagttagagctgctgtaactcgataccacttgaagaggcttggcatgctggttgaatttgcaaatagtgtcaaaatagctgcttctgcttgtggtaaaaatggttcttcatgcggaagtaaaactc

SEQ ID NO: 1547 - DNA, 469 bp, Gossypium hirsutum
  Clone ID: GOSHI-09MAY01-C2130_1
cccacgcgtccgcccacgcgtcctcggacgcgtcgctggaatgatgtccaaccgaggagggggtgactttgacaggatgaggcatagaagccccagtcccatggcttcttcaaacattatgtcaaatgtttctggaactggattaagcaactggaatagtcttcctcaggagagactaagtggacctcctgggatgacaatggactggcaaggtgcaccggcaagccctagttcatacaatgtgaagagaattttgcgtcttgaaattcctgtcgatacatatccaaatttcaattttgttggacgactcctaggccctagaggcaattctttgaagcgggtagaagctactactggttgccttgtatacatcagaggcaaaggatcaataaaggatccagacaaggaagagcagctcagaggtagatctggctatgagcacctcaatgatccactccacatattaatt

SEQ ID NO: 1548 - DNA, 746 bp, Gossypium hirsutum
  unsure (1)..(746): unsure at all n locations
  Clone ID: LIB3583-022-P1-K1-F10
cccaaactcaaacctcagctatgtcaggtctgtataatcaccgcttctcccctgtccgaactgcttctccacatattagaaacacccccgacattgatagtaatcaactcttatcagagctgttggcagagcatcaaaagcttggtcctttcatgcaaatccttcccacatgtagccgactgttaaatcaagagatattaagggtctctggaatgatgtccaaccaaggatttggtgactttgacaggatgaggcatagaagccccagtcccatggcttcttcaaacattatgtcaaatgtttctggaactggattaagcaactggaatagtcttcctcaggaggtattgtttttattcttgtttggttaattgaatgttttcttttatatgtacatcataaagatctcaaacaaacaataaagtttgaagtaatttctctttctatgacaaatgagctttaaagtcacttctttacactaattattttctgcttcaaatcacaggccttatcaaagagattatgaagntagttttctgctacttccttttatacttcattgcatactatagcaattcaaattgccagaacagacacctatatgtactgttcctttacaagtgatccatttgaatatggttttgctgtatgcattgtcatagggaaaaatattaatggaggcccctgcactattgccttttgttccctttgctcaaaaaatgagccaaattagttcatgtccatta

SEQ ID NO: 1549 - DNA, 543 bp, Gossypium hirsutum
  Clone ID: GOSHI-09MAY01-C2120_2
cgtgggcggaaacaagcggggctgtcgggggtccagtctcttctctcctaacctttcctttcgcttggagagtcggatgggagggtttgcaaattgatgttaaatcggaatcgctttcagggggaaagggaaaatgtcatcatacgaaaacgttgtaggtgggaagctgaagctcaagggaaaagccttggatgttaaggcgggtggaatcttgttgaaaaagaaacataagaagcagattcaacatgatgaccaaattacccagaacgatccctctgatgccgcttccgctggtgaaaccacggaagtttctgttgatcccaatgaagaagatatcaacaatgcggagatgtcaagtggggagaaggcggctcctcattatgatgatcatcttaccccagcagagagacgatacattgagcagagggagcaactcgacgttcataggttggctaagcaagctaataaatctcaccgtgatagaatccaggatttcaatcaatatctggcaaacctgagtgagcattatgacattcccgaaag

SEQ ID NO: 1550 - DNA, 890 bp, Gossypium hirsutum
  Clone ID: GOSHI-09MAY01-C2120_1
cttccctcttctctcctaacctttcctttcgcttggagagtcggatgggaggtatatcgcttgttttcaagatcttcaaattcaatttcaaatttgaccatccaaatatttatttcttgtcaaatcgaaatttctaacccattaaagggggaaagggaaaatgtcatcatacgaaaacgttgtaggtgggaagctgaagctcaagggaaaagccttggatgttaaggctggtggaatcaagaagaaaaagaaacataagaagcagattcaacatgatgaccaaattacccagaacgatccctctgatgccgcttccgctggtgaaaccacagaagtttctgttgatcccaatgaagaagatatcaacaatgcggagatgtcaagtggggagaaggcggctcctcattatgatgatcatcttaccccagcagaaagacgatacattgagcagagggagcaactcgacgttcataggttggctaagcaagctaataaatctcatcgtgatagaatccaggatttcaaccaatatctggcaaacatgagtgagcattatgacattccgaaagttggtcccggttaattcaggcaacaccaaggtaatcttctcagtggttttggaaggaacttctttgtgttatgtaccaaaggtcaacaacagagaactgctttgttttatggaggttgtttgatggtatatcacagattatgcatttaatttgtagttgctgtattcaatctccatcacttcctgcatttagtttgtagttactgttttgtggaggctatatgtttttactagcgcttgccatcatggtcagtacgaatggtaccgtttggttcgattttgaaaactaagtttgtggctaacgtgctttttagttatttag

SEQ ID NO: 1551 - DNA, 912 bp, Gossypium hirsutum
  Clone ID: GOSHI-09MAY01-C2090_5
tccacgcgtccgcccacgcgtccaacctcgccgagcaagccgagcgctccgaggaaatggtcaggtcatggagaacgtcgtctccgccgtccctgcccccgacgaactcaccgtcgaggaacggaacctcctctctgtcgcctacaaaaacgtgatcggcgctcgccgtgcctcttggcggatcgtttcctccatcgagcagaaagaggaaggacgtggcaacgccgaccacgtctctgtcatccgtgagtccagggccaagatcgaggccgaattgtccgagatttgcgccggaattttgaagcttctcgccggagaatctttttccgcccgcggcacccgttgatcccaggtcttttacctgaagatgaagggagattcccctatggccctggtttgtttaaaacatggccaatcacaggaaagcgtctgccgataacccgctcactgcgtataaatctgctcaggacattgcgaatgctgagctgcccccacactcatctctatttcggattggggattagtggtcctcaacatttgtctgtacttgtactatgagatcttgaactctcctgatcgtgcttgcactctcgcatacaggcttttgatgaagccattgccgagcttgatacacttggagaggattcatacaaggacagcactttgataatgcaacttcttcgtgataacctcactttgtggacctcagacatgcaggatgatgggacagatgaaatcaaagaagcttccaaacaagaggatgagaaacaaccgtgaagtctctaatcttcatggtagtgtttacttctctggttgtttttgatggaagaagtcgcttggtcctactatcgtcttcaattacttgtttttagtagatcaggcctcaatttatgaacctggaagtactcctaa

SEQ ID NO: 1552 - DNA, 1111 bp, Gossypium hirsutum
  Clone ID: GOSHI-09MAY01-C2090_4
aaaaattccattaaaccccctctcgtcccaccccggccaagaactctcatttcgtttctccacaactcaaacctctcaaatctttttcagttttcatttccccatccaaacgacgccctaaaccaaaagtcatggccaccccttccgcacgtgacgaaaacgtttacctggcgaaactcgccgagcaagccgagcgctacgaggagatggtcaagttcatggagaacgtcgtctccgccgtccctgcccccgacgaactcaccgtcgaggaacggaacctcctctctgtcgcctacaagaacgtgatcggcgctcgccgtgcctcttggcggatcgtttcctccatcgagcagaaagaggaaggacgtggcaacgccgaccacgtctctgtcatccgtgagtacagggccaagatcgaggccgaattgtccgagatttgcgccggaattttgaagcttctcgacgagaagctcgttccggccgccgggaccggtgattccaaggtcttttacctgaagatgaagggagattaccataggtacttggctgagttcaagactggcgatgacaggaaagcggctgccgagaatacgctcactgcgtataaatctgctcaggacattgcgacttttgatgaagccattgccgagctggatacacttggagaggattcatacaaggacagcactttgataatgcaacttcttcgtgataacctcactttgtggacctcagacatgcaggatgatgggacagatgaaatcaaagaagctcccaaacaagaggatgagaaacaaccgtgaagtctctaatcttcatggtagtgttttacttctctggttgtttttgtatggagaagtcgcgtggtcctactatcgtcttcaattacttgtttttagtagatcaggcctcaatttatgaaccttggaagtactcctaagaatttcttagtgtttcactggttattgtttttgagtttgaagccttctagcttttgtaatggcagtgaagttatgtgcacactttcttaattgttttcatgacaataatggagctgatggttgagatattttctatggttaaggtttgaaatttgttttcaaaaaaaaaa

SEQ ID NO: 1553 - DNA, 1260 bp, Gossypium hirsutum
  Clone ID: GOSHI-09MAY01-C2090_3
ctcactcgtccgacgcgtcggcggacgcgtgggtccttttagcattttctctcaaaactcaacctcccaaatcctctgtaccttttttttttcttccaatccagacagcacccaattccatggccacctcttccccacgtgaggataatgtctacatggcgaagctcgccgagcaagccgagcgctacgaggagatggtgaagttcatggagaccgtcgtctccgccgtcccctcctccgacgagctctccgtcgaggaaaggaacctcctctctgtcgcatacaagaacgtcatcggcgcccgacgcgcctcctggaggatcgtttcctccatcgagcagaaggaggaaggacgcggcaacgccgaccacgtctccgtcatccgtgagtacagggccaagatcgaggctgagttgtccgagatttgcgccggaatcttgaagctcctcgacgagaagctcgttccggcagccaagaccggggattccaaggtcttttatctgaaaatgaagggagattaccataggtacttggctgagttcaagactggcgatgacaggaaagccgctgccgagaatacgctcacggcgtataaatctgctcaggaaattgcaacttcggagctggctccaactcatcctattcgattagggttggctctgaacttctctgtcttctactacgagatcttgaattctcctgaccgtgcttgcagtcttgccaaacaggcttttgatgaagccatctccgagctggatactcttggagaggattcatacaaggacagcactttgataatgcaactccttcgtgataatctcaccttatggacttcagatatgcaggacaatgcaaccaacgagatcaaagaagctcccaaacgcgaggaagagaaacaagagtgaaatcgccaatcttcacggtacgattttacttctctggttatttttgtatggagaagttgctcggttccgctatccccttgattccctccagttacttgttcttagatcatgcctctcggtttatgaaccatcgaagcattgctaaaagtttcttaagtatttcactggtcattaatttttgaagttcaagcttttctaatggctaatgaggctatatgcactactttctcaattgtttttgtcaacagtaagggagttgcatgatggagatgttttctaagcttcaatttggaagatgtttcttggaattatcacattaatatatatatatataactatcttgtatgatttctcc

SEQ ID NO: 1554 - DNA, 1169 bp, Gossypium hirsutum
  Clone ID: GOSHI-09MAY01-C2090_2
tcctcctatacattgtccctcgcccccccccaccatttctcaaatatcaaatccctcgaaaaatcctccccatccaatcaccacccgaaaccatggccactccttccccacgcgaagaaaatgtctacatggccaaactcgccgagcaagccgagcgctacgaggagatggtcaagttcatggagaacgtcgtctccgccgtccccgctcccgacgaactctccgtcgaggaacgtaacctcctctctgtcgcctacaagaacgtcatcggcgcccgccgtgcttcctggaggatcgtctcctccatcgagcagaaggaggaaggccgtggcaacgccgaccacgtcgccgtcatccgtgactacagggccaagatcgaggccgagttgtccgagatttgcgctggaattttgaagctccttgacgagaagcttgttccggctgctggaaatggggattccaaggtgttttatctgaaaatgaagggagattaccataggtacttggctgagttcaagactggcgatgacaggaaatctgctgccgagaataccctcactgcctataaatctgctcaggacattgcagtagctgagctagccccaactcatcctatccgtttaggattggctctgaacttttctgtcttctactatgagatcttgaactctcctgatcgtgcttgcagtcttgcgaaacaggcttttgatgaagccattgccgagctggatactcttggagaggattcatacaaggacagcactttgataatgcaacttctccgtgataacctcactttgtggacctcagacatgcaggatgatgggactgatgagatcaaagaagctcccaagcctgaggatgagaaacaaccgtgaagtccccagtcttcgtggtagtgttttacttctctgcttgtttttgtatggagaagttggttgatcccactctctctttagttacttgcttttagttgatcaggcctggatttatgaaccttggaagtaactgctataaatttcttagcatttcactgcttattcattttgagttgtagctttctaattgcagtgaggctatgtgcactctctttcttgattgtttcttgacaataaggaagttaacgattgagatatttcctaagctaaattttttaagttgttttcttg

SEQ ID NO: 1555 - DNA, 1132 bp, Gossypium hirsutum
  Clone ID: GOSHI-09MAY01-C2090_1
cccgaacacgacctctcaaatccctctgaaaaatcctctcagattttctttccatcccaacatcccccaaaaccaccatggccgctacttcaccacgtgaggaaaatgtctacaaggcgaaactcgccgagcaagccgagcgctacgaggagatggttaagttcatggaaaccgtcgtctccgccgtccctgctcccgacgaactcaccgtcgaggaacggaacctcctctctgtcgcctacaagaacgtgatcggcgcccgccgtgcttcctggaggatcgtttcctccatcgagcagaaagaggaaggacgtggcaacgccgaccacgtctccgtcatccgtgagtacagggccaagatcgaggccgagttgtccgagatttgcgccggaattttgaagcttctcgacgagaagctcgttccggctgccgggaccggtgattccaaggtcttttatctgaagatgaagggagattaccataggtacttggctgagttcaagactggcgatgacaggaaagccgctgccgagaatacgctcactgcgtataaatctgctcaggacattgcagttgccgagctcgccccaactcatcctattcgtttaggattggctctgaacttttctgtcttctactatgagatcttgaactctcctgatcgtgcttgcagtcttgcaaaacaggcttttgatgaagccattgccgagcttgatactcttggagaggattcatacaaggacagcactttgataatgcaacttcttcgtgataacctcactttgtggacctcagacatgcaggatgatggaaccgatgaaatcaaagaagcctccaaacctgaggatgagaaacaacagtaaaatccctaatcttcgagttagtattttacttctctggttgtttttgtatggagaagttgattggtcccactatcccttcagtttgctttatatttaaaaaaaaaaccttgaaaatactgctaaaagtttcttggaatttcgccatatatatatttagttgaagctttctaattatagtgggggcattgtgcactattttcctaattgtttacttcaacaataatggaactgatgatttgagatatttttctaagcttaatgattttgat

SEQ ID NO: 1556 - DNA, 546 bp, Gossypium hirsutum
  Clone ID: LIB3584-056-P1-K2-F9
cggacgcgtgggcggacgcgtgggcggacgcgtgggcggacgcgtgggcgaggagatggtcaagttcatggagaacgtcgtctccgccgtccccgctcccgacgaactctccgtcgaggaacgtaacctcctctctgtcgcctacaagaacgtcatcggcgcccgccgtgcttcctggaggatcgtctcctccatcgagcagaaggaggaaggccgtggcaacgccgaccacgtcgccgtcatccgtgactacagggccaagatcgaggccgagttgtccgagatttgcgctggaattttgaagctccttgacgagaagcttgttccggctgctggaaatggggattccaaggtgttttatctgaaaatgaagggagattaccataggtacttggctgagttcaagactggcgatgacaggaaatctgctgccgagaataccctcactgcctataaatctgctcaggacattgcagtagctgagctagccccaactcatcctatccgtttaggattggctctgaacttttctgtcttctactatga

SEQ ID NO: 1557 - DNA, 414 bp, Gossypium hirsutum
  Clone ID: LIB3148-011-Q1-K1-D11
cccacgcgtccgtcttgttcatcaaagactgtgtaagtatattctttacattgcaaaagcgcttttttgtgtttatttggagtttgtttattttgttcttcaaattatatttagtcaaaacatgttttgtttctttcctcaggcttttgatgaagccattgcagagctggatactcttggagaggattcatacaaggatagcactttgataatgcaacttctccgtgataaccttactttgtggacctcatacatgcatgatgatgggactgatgagatcaaagaagcttccaagcctgaggaagagaatacaaccgtgaagttcccagtctttgtggttgcattttacttctcttcttgtttttgtatggagaaattggttgatcccactcttctttttagttacttgctttt

SEQ ID NO: 1558 - DNA, 412 bp, Gossypium hirsutum
  Clone ID: uC-gsronu33B049f03b1
tactatgggaacgccggccgctccggtccgaatttccgggttggcccaaggctccggccatttgttcttcccaccgttccgcccacccttccgaaaaatcctaccaatccaatcaccaccggaaaccatggccactccttcccacgcgaagaaaatgtctacatggccaaactcgccgagcaagccgagcgctacgaggagatggtcaagttcatggagaacgtcgtctccgccgtccccgctcccgacgaactctccgtcgaggaacgcaaccttctctctgtcgcctacaagaacgtcatcggcgcccgccgtgcttcctggaggatcgtctcctccatcgagcagaaggaggaaggccgtggcaacgccgaccacgtcgccgtcatccgtgactacagggcccagatcg

SEQ ID NO: 1559 - DNA, 571 bp, Gossypium hirsutum
  Clone ID: GOSHI-09MAY01-C2040_3
gttatcaacaatcccatcggacctggtccgtcagttcccgatgatagggtaatgcataggggtgcaaccgttgatccattgttgctttctgctcctgctgcttctcttcttagagacgtcaaaaggacttcggttgtatgggatcaagacgccggtaggtacgtatcagtccccgtttctgcaactgatgctcggaatagatcgtctatacaaacgggtttgccaaattctagtggtgaaactagcatgcagggtagaagggttggttttccgcacaggagttgtctttgcaagcaaggggtccagcacaacaggtatagaacctactgtatacatgagactcttttttctttggcggcccactttcgagtgttcctgttagggatagtttgagaaaccataagggttctggtttgagggaagctcaacaaagagtaggtctgaacttgcctcgagaatctagattcaaaagggactcggtctcgaaccaacttcctgtatttgtccctggaggctttgaaaacaattctgctgcatctgtttctggttttaagtaaatttcagtcccact

SEQ ID NO: 1560 - DNA, 357 bp, Gossypium hirsutum
  Clone ID: GOSHI-09MAY01-C2040_2
gacatgttgtgtcttgtgattgaagcatgatcataaatagcagtaatgtcaacaaatgtttctaaccatcaaccataaatcttgaaaattatcttacaagtgacgatacaaaaatccaactgaaaataaataatctcgagctttttcggatcattcgggaagagaccacttgaaccatgcaataatctagtcagcaacatatcaaaattgcaagggtccagtgaacaagcatctcagacaaggaggctttttcgatctctgttgccctttgattcaaggggaaaaatgtgcagaaacttcgttaggagttggactgaaatctacttaaaaccggaaacagatgcagcagaattgttt

SEQ ID NO: 1561 - DNA, 643 bp, Gossypium hirsutum
  Clone ID: GOSHI-09MAY01-C2040_1
cccacgcgtccgcccacgcgtccgaaacaacattgtcaaaaaatgtttctaaccatcaaccataaatcttgaaaattatcttacaagtgacgatacaaaaatccaactgaaaataaataatctcgagctttttcggcacaacaggcagagaagctactgtatacaggagactctattttctttggcggcccactttcaagtgttccggttagggatagtttgagaaacgataagggttccggtttgagggaagctcaagaaagagtaggtctgaacttgcctcgagaatctagattcaaaagggactcggtctcgaaccaacttcctgtatttgtccctggaggctttgaaaacaattctgctgcatctgtttccggttttaagtagatttcagtccaactcctaacgaagtttctgcacatttttccccttgaatcaaagggcaacagagatcgaaaaagcctcttgtctgagatgcttgttcactggaaccttgcaattttgatatgttgctgactagattattgcatggttcaagtggtctcttcccgaatgatccgaaaaagctcgagattatttattttcagctggatttttgggtcgccccttgtaggataatgttcaagatttatggttgatggtt

SEQ ID NO: 1562 - DNA, 737 bp, Gossypium hirsutum
  Clone ID: GOSHI-09MAY01-C2030_1
tggaaatagtatgcagcaagctgctcttccgttcgattatttaggtacttgtgatacaacttcctcattgatggctgctgatgattcaggatggatgaacatacaacatcagaatcctgctttgcatgatccaatggggaaaccatatttaaggtcatggaaagggtcctttttttaattttgtttctgtggagtggaaggcctaaagttcatcattcatgaactggcttggatgattgcgagatatgctgaacaagtacttcatgtgattggtggttcgttcctataattatttttagagggatggtagagaaatcgactttctaggttacaagattccaaagctaggtctctgtacatacctatacaaagagccaactgaactcaacacaaaacaaacacaaactattaggtggggtggtgggaggtaagtcgtgacttgtgaaggatgaaaaaaccctggcatggcatctcatatttggtagatttacatatcacaacttaggtttctttttctttttccttatttcatattccctcgtttgatcccattgactatatcaagtacactcaataatgttggaggctttaattacagctgcttctctgtctcttagttgaataatgggtttctatggtggttgtggatttcgtaacagtacaagggaatgacaaggactttgtatttaaatatttacctagaaatttcaaagggggaaaccaaataatcactgccc

SEQ ID NO: 1563 - DNA, 749 bp, Gossypium hirsutum
  Clone ID: GOSHI-09MAY01-C2350_1
catctcaattcaatttgcagttccaatagtaatcgtagctcaaattattttgcattttagtgtgtgatgcagcagcgaggaaggatccaaaacagcagatcaaggtcgttttcaagatctcgtcttgccgttgagggattttaaatctttttcgctctcttttttctttaaaagaaaaaaaaagtcgaactcttaaaagcttactggcgatctttctccggtaaccatggcggctaacggtgaacgtgaggttcaaaagaactactggatggagcactccattgatttaacagaggatggtacgatacttgattccaaggacgcagatctcgacaaagaagaccgactcgaagtgctctccctgctcccgccatatgaagagaaatctattttggagttaggagctggcattggtcgatttaccggtgaattagctcagaaggctgatagtgttatagctttagacttcattgaggatgttatcaagaagaatgaaagcatcaatggacactataagaacatcaaattcctttgtgccgatgcgactgccccagatttggatatttcagaaggatcaatggacttgatattctcaaatttgctgctgatgtatctctcagatgaagaggtagagaatttggcccaagggatgatgaaatggttgaaagtcggaggacatattttcttcagggaggcttgttttgatcaatctggcgactgcaagcaaaagcatgacccttctctctacc

SEQ ID NO: 1564 - DNA, 819 bp, Gossypium hirsutum
  Clone ID: GOSHI-09MAY01-C2340_1
aaattgtgctcttccgtgatggggttagtgagggtcagtttgatatggatcttaatgaagagttaatggatctcaagagtgcattccatcgaatcaattattttcctacgatcaccctgattgttgctcagaagcgacaccaaactcgtttctttcccgagggaaagtgggatgggggtccccactggtaatatttcacctggcacagttgttgacactaaaattgtgcatcctttcgagtttgacttctatctttgtagtcactatggaagccttggtactagcaagcctacacactaccatgtcttgtgggatgagcatgggttctcttctgatcagttgcaggagcttatctacaacatgtgctttacatttgcacggtgcacaaaaaccggtatctctggttccacctgtgtactatgccgaccttgttgcatataggggccggctgtactaccaggcaatgattaaaagacaatctcccatttcaacattatcctcatcttcatcaatgacatcgtcatcatcaatgtcatcggcagcttcattccatgtctggtttaagctgcatgcatacctggaaaacatgatgttttttctttgaagcatggccaaataccgttcaacgtcctgaacgcaggtttactccttttctaagcatcctagttaaggggtttgtgcgtgaatctaatgggtatgaaggcttctagcttctcctcttatacattgttggtttatataacagtgagtcgagggaactgaatatactattgtttccattaatctgtctttatgaaaatacagttgtggatttggttt

SEQ ID NO: 1565 - DNA, 928 bp, Gossypium hirsutum
  Clone ID: GOSHI-09MAY01-C2270_1
aaaatgttcagtttgtctggagttcccgcacaatgctgtcctcctccttgttcctcttatgataagggttgccgcccttacatgtgtgctactaccggcgcttttccaattgtcttgagcaatacaagaaggcatacactaaggcgacttcagctgacaatgggtcggtggataatgcaaatgtgggacaaccctctgaaaagatggaagtaccagagcttctatgcccgctttgtcgtggtcaagtgaaaggttggacagtggtaaaacctgtacggaaatatctcaatcggaaaaaaagggcctgcatgcaagacaagtgctcttttgttggaacttacaaggagcttaagaaacatgttaggcaaagcacccattacacgacctcgagcagtggaacctgtacttgaagaaaaatggaaaaagcttgaaaatgagagagagcgagatgatgtgatcagcacaattatgtcatcaccacctcgggctcgcgtccggggtgattgcgtgattgagccaggctatcgtggtcgtatctacagagatgaatctgattcagatgactcttttggcaatccttttgatgatgattttattcggctagactcttctgttcacatgcatggtagattcatggactatgacctatatgaagaggatgactttgggatgcgccgtgctttccgtgctgttcccccagtagctcgaacttggcctgctcgcttgctgggttcagtgggactaaggcgtatccccagggtccgaggacgtaatggtggccggtaacttccatccacctttttcttatctgcaattcagaatacctaaatctatttgaagcttgccatcacaaggtgaaatttatacctcaacgtgatgcaacgctaggtagcaggtaaatgaacaaactgtagggcagccgctcatt

SEQ ID NO: 1566 - DNA, 641 bp, Gossypium hirsutum
  Clone ID: GOSHI-09MAY01-C2200_1
ggagaaaggaaataaagggaaagggcggggggtttttgaattagttgcctccgtttaataattaactttttccttgcctccctactctctctccaagatggacagccacgtggagcctaccatcgccaccgctggtcctaccgcgctctctccgccgcgcgattctcttgatctcattcccgtcggatccgtcgaggcagaggaggagattgagacattatctcctccgtccgaggaggatcacgaccacgctaacggtcaaaatcgggatcaaaagcagaatcaggagaactcgtcggcgactgctgtccttactgatgatctcaaaaataagatcattaagcaggtggaatattatttcagcgatgaaaatttgccgaccgataagtacatgatgagtctgattaagaagaacaaagaaggttttgttgctatatcagtaattgcgtcttttaggagaatgaaaagactcagcagaagttatccatcaatagtcgctgcgcttaaagagtcttccctacttgttgttagttctgatgggaagatggtgaagcgtcgcaattctcttccatctattgaggtcagggaccctaagaaaatcttccagaggatcattcagtggagaacattaggaggatatt

SEQ ID NO: 1567 - DNA, 643 bp, Gossypium hirsutum
  Clone ID: GOSHI-09MAY01-C2230_3
cccacgcgtccgaaattacactatcagaagcaatcaatcagccgagctcgaaactctgtcaccatgggtcgtatgcacagccgaggtaagggtatttcagcatccgctttgccttacaagagaactcctcctagttggttgaagatctcttcccaagatgttgaggagaacatttacaagtttgcaaagaagggtttgactccatctcaaattggtgtcattctccgtgattctcatggcattgctcaggtgaagagtgttactggcagcaagattttgcgaatattgaaagcccatggtcttgctccagaaatccccgaggatctgtaccacctgattaagaaagcggtagccatcagaaagcacctcgagcggaacaggaaagacaaggattccaagtttaggttaatcttggttgagagcagaattcaccgtcttgcccgttattacaagaagacaaagaagctaccaccagtgtggaaatatgaatctaccactgccagcactcttgtggcttagaagtggcacagtttgaaccatcttccaagcgcttgcagtgacattctcctggatgcaggctaaacttttggtatttatgcttttaaaatttaaaagactagttcatttgtggtttgaaaatgag

SEQ ID NO: 1568 - DNA, 853 bp, Gossypium hirsutum
  Clone ID: GOSHI-09MAY01-C2230_1
tttcccgcgtcggtgactccgagagaagcagccgtaagctcgaactctgtcgccatgggtcgtatgcatagccgaggtaagggtatttccgcatctgctcttccgtacaaaagaactccacctagttggctcaagatctcctctcaagatgtggaggagaacatttgcaagtttgtgaagaagggtttgaccccatctcaaattggtgtcattctccgtgattcacatgggattgctcaggtgaagagtgttacgggcagcaagattttgcggatactgaaagcccatggtctcgctcctgaaattcccgaagatttgtaccacctgattaagaaagctgttgccatcagaaagcatcttgagaggaaccgcaaagacaaggattccaagttccggttgatcctggttgagagcagaatccatcgccttgcccgctattataagaagacaaagaagcttccacccgtctggaaatacgagtcgactactgccagcacacttgtggcctaagggaagacactgttggaaccagcttcttgcgctttgattgatggacccctggatatgggttggagtagtaaagttttaattacatgctatatttatgcttttaaagaaccagttcacattatggtttgaaattgatatacttaggagggataatattatgtttagtgatcagaatcatttttctagtccatttaaaatgtgttgacgttttggatcttatcttccaaatgttgttacgtggatttatgtttccgaaccttacttgttcaggggttagggtttagtgaagaagcttgagcttgacggaatttcacttctatataactcaagtctgatttgagat

SEQ ID NO: 1569 - DNA, 588 bp, Gossypium hirsutum
  Clone ID: LIB3583-025-P1-K1-F7
gaaaggagcagaggttcagtgaccgagagagaagcagccgtaaagctcgaaactctgccgccatgggtcgtatgcatagccgaggtaagggtatttccgcatctgctcttccgtacaaaagaactccacctagttggctcaagatctcctctcaagatgtggaggagaacatttgcaagtttgcgaagaagggtttgaccccatctcaaattggtgtcattctccgtgattcacatgggattgctcaggtgaagagtgttacgggcagcaagattttgcggatactgaaagcccgtggtcttgctcctgaaattcccgaagatttgtaccacctgattaagaaagctgttgccatcagaaagcatcttgagaggaaccgcaaagacaaggattccaagttccggttgatcctggttgagagcagaatccatcgccttgctcgctattacaagaagacaaagaagcttccacccgtgtggaaatagtgtgtattcctatccctacttccttttgatattcctcgacatgaataaatcacggttattagaggcattctctcttataaaacagcctccaacatgcaagaaa

SEQ ID NO: 1570 - DNA, 417 bp, Gossypium hirsutum
  Clone ID: LIB3189-042-P1-K1-G6
cggacgcgtgggctttgcagagaggtgaagtgagccagccagccagccagccagccaaccaagcagtcgagctcggaactccgcaaccatgggtcgtatgcacagccgagggttgtaagggtatttccgcatctgctttaccctacaagaggactccaccaagttggttgaagatctcttctcaagatgtggaggagaacatttgtaagtttgcaaagaaaggtttgaccccatcacaaattggtgtcattctccgtgattctcacgggattgctcaggtgaagagtgttacaggcagcaagattttgcggatactgaaagcccacggacttgctcctgaaatccccgaggatctgtaccacttgatcaagaaagccggtgccatcagaaaacatcttgagaggaacaggaaagaca

SEQ ID NO: 1571 - DNA, 269 bp, Gossypium hirsutum
  Clone ID: uC-gsflnu33B132b12b1
tcttccacacttacgacctcgcacccatcgtggggttctttaaaacaaacccccgcgtctttccctcttttacttcgtatgcatgggtcatatgcatagccaatttatgggtatttccgcatctgctcttccgtacaaagaactccacctacttggctcaagatctcctctcaagaaacggaggataacatttgcatgtctgtgaataacggtttgacctcatcccaaattgctgacattcttctcaattaacatgggattgctcaagt

SEQ ID NO: 1572 - DNA, 268 bp, Gossypium hirsutum
  Clone ID: uC-gsronu33B047c12b1
ttcctctcgtccgctttgattgatggacccctggatatgggttggagtagtaaagttttaattacatgctatatttatgcttttaaagaaccagttcacattatggtttgaaattgatatacttaggagggatactattatgtttagtgatcagaatgatttttctagtacatttaaatggtattgacgatttggatcttatcttctaaatgatctgacgtggatcatggataaatgaatactatttatttaggcgttgatacaaaat

SEQ ID NO: 1573 - DNA, 668 bp, Gossypium hirsutum
  Clone ID: GOSHI-09MAY01-C3950_1
cactcaacagcacaaaatatggtgaagtccgttacagtttccgaccaaatgctcaggttgtggcgcggcctgaaaacggtggtccgaacatcaccggcgaatacacaccattaccacaccatccaagctatcccacgagaatgcaccggcagccgtatctcgagccgtgacagagcccaaggtagaatccctgctgtggttttctctcaaggcttgctcgagataaacccaagcaaccgttccccgtccaggaaacaaattcttactgccgaaagatagcagattcgatccattatcaagtccgttcaactccctttcttttgttccactaggttccagcttcagaatccgggaccggttctggctcttctgtcttacttgaatccgggacggttttacccatctagattcatagggacgatgagagtggttaaaatattgaatttggtgtttgtttgggcggaggatgggcctgagttgatggttgtgtgcctgtattttgaaagattataggatgacctgtatatataaagttgacactttaagggttttatgcatttaaagttcatgcccgtatatactttttaatttatgtggaattaataatatacaattggatgggttttatttctgataattgattgaatttatgtaagtatagtttataa

SEQ ID NO: 1574 - DNA, 363 bp, Gossypium hirsutum
  Clone ID: LIB3166-050-P1-K1-B4
cttcggttcgtttacagtttcgccccaattctttaggtggggccccggcctgaaaccggggggccaaccttaaccggcgattccacaccattcccacaccatccaggctatccaacgagattgcactgccagccgtttctcgagccgtgttagagcccaaggtagaatccctgctgtggttttctctcaaggcttgcttgagaaaaacccaagcaaccgttccccgtccaggaaacaaattctaactaccgaaagaaagcagattcgatccattatcaagtccgttcaactccctttcttttgttccactaggttccagcttcagatccgggccggatctggctcttctgtcttacttgaatc

SEQ ID NO: 1575 - DNA, 878 bp, Gossypium hirsutum
  Clone ID: GOSHI-09MAY01-C3960_3
atcgccttcgaatacccacgaggacgcttggaagatcgttcatcccttatggcagatattcagaatataaagccaacccatgtgtttaatgctgctggtgtgactggtaggcccaatgttgattggtgtgaatctcacaaaacagaaacaattcgcaccaatgtggctggaaccttgaccttagcagatgtttgcagagaacatgggcttttgatgatgaattttgctacagggtgtatattcgagtacgatgcaggacatcctgagggctccggcattgggtataaagaggaagacaaacccaatttcactggttccttctattcaaaaaccaaggctatggttgaagagctgttgaaagaatatgacaacgtctgcactcttagagttcgaatgccgatctcatctgacctaaacaatccacgcaacttcatcaccaagatttcacgctacaacaaagtggtcaacattcccaacagcatgacagtcttggacgaacttctaccgatatcgatcgagatggcaaagaggaacttgaggggtatatggaacttcacaaaccctggggttgtgagccacaatgagatcctcgagatgtacaagacttacattgaccccaagtttaagtgggaaaacttcacattagaagaacaagccaaggtgatcgttgcaccccgaagcaataacgagatggatgcatccaagttgaagaaggagttccctgagttgttgtcaatcaaagaatcactgattaagtatgcctttgaaccgaacaggagaacctgagcttattaagcaggtttcagcttatagatcctatactttctgcacctaatattttatgaccgggaatatcttttaagcttcactcttttgcc

SEQ ID NO: 1576 - DNA, 1857 bp, Gossypium hirsutum
  Clone ID: GOSHI-09MAY01-C3960_2
caaagcctttcctccgctcccccgaacgctcgctctaagatttcgtcgtttatatttctccatctggattttgattgagctctctctcctttcgtcttaattggtttcactatgtcttcttatacccctaagaacatcctcataactggggcagctggttttattgcgtcacatattgctaaccggctcataaggaactacccggactacaagattgttgtgcttgacaagcttgattactgctcgaacctgaaaaacctccttccttccaagtcatctccgaactttaagtttgtgaaaggtgacattggtagtgctgaccttgttaactacctccttattaccgagtctatcgacacaataatgcactttgcagcccagactcatgttgataactcgtttggaaacagctttgagtttaccaagaacaatatctatggcactcatgtcttgcttgaagcttgcaaagtcactggtcaaatcaggaggttcatccatgtcagcactgatgaggtttatggtgagaccgatgaggatgctgttgtaggaaaccatgaggcttcccaacttctcccaacaaacccgtactctgctacaaaagctggtgctgaaatgcttgttatggcatatggtaggtcatatgggctacctgtgataacaacccgtggaaacaacgtttatggtcccaaccagttccctgaaaagttgattccaaagtttattctcctagcaatgaggggaaagactcttccaattcacggggatggttctaatgtgaggagttatttatactgcgaggatgtggctgaggcatttgaggtcattcttcacaagggtgaagttggtcatgtttataatgttggaacaaagaaggagaggagagtgattgatgtagccaaagatatatgcaaacttttttcaatggactcggagacaagcatcaagtttgttgaaaacagaccatttaacgaccagaggtattttcttgatgatcagaaattgaagaacttgggatggtctgagcgaactgtgtgggaagatggcttgaagaagaccatagaatggtacactcaaaatcctgattggtggggcgatgtgtctggtgcactgcttccacacccgagaatgctgatgatgcctggtcgagagacaatttgattcagaagaggggaaaagatacatcgtatataagttctcctaatcagatccaaatggtagttccaacctccaaatgtagtgtctcttctcaaaaaccagtcttgaagttcttgatttatggcaggactggctggatcggaggtctactaggtcagttatgtgataagcaaggtattccctttgaatatggaaaaggaaggttggaagatcgttcgtcacttacagcagatattcggaatataaaaccgacccatgtttttaatgctgctggtttgaccggtagacccaatgttgattggtgtgaatcccacaaaacagaaacaattcgcaccaatgtggccggaaccttgaccttggctgatgtttgccgagagcatgggcttttgatgttgaactttgctactgggtgtatattccagtatgatgcatgacatcctcatggctctggcattggatttaaagaggaagacatacccaattttactggatccttcttttataaaccaaagctattgttgaaaaattctttatgaattcaactatgtttgccccttatattcgaatgctatatcatccgacttataatctctttaacttcgtatatagattttgtatacgtctggggttaaaatcctacagttcgcatttttcccaacttatctgtttcttcattgttaaaagatctttatgttattgaag

SEQ ID NO: 1577 - DNA, 1560 bp, Gossypium hirsutum
  Clone ID: GOSHI-09MAY01-C3960_1
acctaatcagacccgaatggtggttccaaccttcaaaactagtagcagcacgcaaaaaccagccttgaagttcttgatctatggcaggactggctggattggaggtctgcttggtcagttatgtgagaaacaaggtattccctttgaatatggaagaggacgcttggaagatcgttcatcccttatggcagatattcagaatataaacccattcgttcgtccacgcgtccggacccatgtttttaatgctgctggtgtgactggtaggcccaatgttgattggtgtgaatctcacaaaacagaaacaattcgcaccaatgtggctggaaccttgaccttagcagatgtttgcagagaacatgggcttttgatgatgaattttgctacagggtgtatattcgagtacgatgcaggacatcctgagggctccggcattgggtataaagaggaagacaaacccaatttcactggttccttctattcaaaaaccaaggctatggttgaagagctgttgaaagaatatgacaacgtctgcactctcagagttcgaatgccgatctcatctgacctaaacaaccctcgtaactttattaccaagattgcacgctacaacaaggtggtcaacattcccaacagcatgacaatcttggatgaacttctgcctatttctatcgagatggctaaaaggaacttgaagggtatctggaactttacaaaccctggggttgtaagccacaatgagatcctggagatgtataagacttacattgacccaaagtttcagtgggtgaacttcacattggaagaacaagccaaggttatagttgcccctcgaagcaataatgagatggacgcatccaagttgaagaacgagttccccgatctgctaccaatcaaggagtcactgattaagtatgtctttgaacccaacaagagaacctgagccttttgagcagcagtttacaggaatagaattcggtattatcctatgttttttcttcattgagttattgcctggaatatctttgcagtttaattcatttgttataatcttgtcttccacctcattaattttcactagataactcttaaggtattactattagatttaaaccattcattgttactagctgcaccaagctgtatcctagtttgtccgtccattcttgaagaaactatctataggtgctttacaaattgtcatctgcaggctgacaggtgtattatttggcattacattagttgaatgttatgactttcaacagtcacctactggtctataatggaggaaattccatctatctcttattactcagatgagtgaattatttatgtatttgagtctctcaattggcccttgtgcaactacattatattactcaccagtcctgtccctggactaagagtatatatttacttttcacttttttgccccttttcttattaacttttccaaagttgcaattgccatcatattattgacgtttatgcaattccataagaacatgtgtcttttacaattaaacacgtttgtacttgttacctttgttaagaaaaaaa

SEQ ID NO: 1578 - DNA, 418 bp, Gossypium hirsutum
  unsure (1)..(418): unsure at all n locations
  Clone ID: LIB3146-025-Q1-K2-F8
ccggaccggaaggcccgacccaaccgacccgagaacctgagccttttgagccgcagtttacaggaatagaattcggtattatcctatgttttttcttcattgagttattgcctggaatatctttgcagtttaattcatttgttataatcttgtcttccacctcattaattttcactagataacctttaaagggttttcttttaggaattaaaaccattcaatggnttctagccggcacccaacctggattccaagttggccccgtcctttttggaaaaaccatctataggggccttacaaaatggcaatttcaaggttaccagggttttattttgcctttccttaagtgaaaggtattaactttaacaagcacctaccgggcttttaagggaggaaatggatttatttcttatttctt

SEQ ID NO: 1579 - DNA, 412 bp, Gossypium hirsutum
  Clone ID: LIB3272-037-P1-K1-E4
gttttccttactaccaaatgttattcctcagccatttctctctgtaaatttgagtgtatgtaattctgtatatagattatgattgattcctattgatacataattggtttcgggatggctacttataccccgaagaacattctcataactggggctgctgggtctattgcatcggatggtgccaatcggattgtcctcaactacccagactacaagattgttgtacttgacacgcttgattactgctcatatttgaaaaacctcattccctctgagtcatcgcctaactttaagtgtgagaaaggggatattggtagtgctgaccttgttaactacctcctcattactgagtctattgacacaataatgcactttgcatcccaaactcatgttgataactcgtttgggaaca

SEQ ID NO: 1580 - DNA, 1127 bp, Gossypium hirsutum
  Clone ID: GOSHI-09MAY01-C3910_1
ctcggttatagtggaccctgattcagtactgcgcaagagttcaaagatttggtgtggaggataatggaggattcagccaaacccaacttgtcagattatttccctatcttaaaaagtttgatttgcaagggataagaaagcatataaggccgtcttacacgaggttgcatgagatttttgatgagatgatagatgaaagaatggaggttagagcttcagattccgtgtccagaaatggtgatttgttggatgttctgcttgatcagcgccaacaggatgggtctgacttcactcgccaaaatatcaagcctttgatcctggacttattcattgctggaagtgatacatctgcaataacaacagaatgggcgatggcagaactccttagaaaacctggagtgctacaaaaaacaagaagggaactaatggaagtcattggaactaaaagaactgttcaagaatcagacctcgataaactcccatatcttgaagctgtggccaaagagacaatgcgccttcatcctgccgctcctcttctcctaccttacaaagccaaaaatgatgtcgaaatatgtggctacaccatacccaacaacactcagcttctggtgaatgcttgggctattgcccgagaccccaattactggaaccaccctttttcgttttgccctgagagatttcttgattccagcttagatttcagaggtcgttattttgagtatataccatttggagctggtcgaaggatatgcccgggtttgcctcttgcagttcgtatggtgcatctgatattagcttctatgattcattcctttgattggaaactgcctcatggaatccatccacaagacttggacatgcaagaacagtttggcatgactctcaagaaagctataccgctctgtgctattcctatttagctatatagtccgccgcgtgggttaaactatttgttgtttttctttgttgggaacatatatattaaatcttccactatttgtcttttgttctactagtactagtaggaggaagcatgtctacctactacgttcttgaatggttggcctgtattttatttgttgagcatgcttagctactactctagctcttgaatggtttataaatat

SEQ ID NO: 1581 - DNA, 971 bp, Gossypium hirsutum
  Clone ID: GOSHI-09MAY01-C3930_1
aattattatatagcatcagatcatctttatcgttccgcactgctgccttttcttcttcttcgagcgatctaaacccctaaatcagaatgaattttacggcttcaaagcaacctgaaaattgcttgcttggccctgaatctgactcccaaaggacactgtacccatatgtgacaggaacatcagtcgtggctttaaagtataaagatgggattttgatggctgctgatatgggaggttcatatgggtccaccctgcggtacaagagtgtggagcgaatgaagcctattggcaagcattcccttctgggtgctagtggagaaatcagtgatttccaagagattttgaagtatcttgacgagcttatcttatatgacaatatgtgggatgacggcaactctttggggcctaaagaggtgcacaattacttgactcgagttatgtacaacaggcgcaacaagttcaatccattatggaactcccttgtacttggtggagttaaaaaagggagagaagtatctgggaacggtcagtatgattggtgtaaactttgaggacaatcatgttgcaactggttttggaaaccaccttgcacgaccaattcttcgtcaagagtggcatgagaacttgagctttgaggatggtgttaaactattggagaaatgcatgcgtgttctcctctatcgtgatagatcagctgttaacaagcttcagatagctaaaattactgagaatggggtaccattttccaagacatatatatggaacacactctgaaaattctgcgtttgagagacctgtgcacagggctctatgagcacaggggctcgtgcaaactcttcataccctttgggaacttctatgcgctcatatgataagaacatcttacatcgatgggagacaacttgttgcatgatgttatatgtctggaagaaacttattgagtttgatgctgattgtcatttgatttaatg

SEQ ID NO: 1582 - DNA, 501 bp, Gossypium hirsutum
  Clone ID: GOSHI-09MAY01-C3880_1
tggggggctgtttttcactggagatggaactggttttatagtgtgaaaatgggcagaagcggttcccaagccctgatgtgttgcagcaacggataacatattagtcaatcgattgtgtatttttggtgtggatcattttatttcttgtcatccatccggtgaggggtcatttgtaggtttttttaagtttgcgggagaaattacttgagttagagaaaacaattatggggtagcggtggaatgtttaatagcaccaaccaaccaaccaaccgaccgaccaagcccttcaccttaagtgtgtgccaatagaacgctcataaatctctagcagtcactgtgttgaagcttgtaggggatcaagctacattacatcacatctcatatctgtccctgcctctttctatggaaatcagcgtgatgattgttggcgttgagtttattaaattgcctcagcaattcttttacttgtaaacaaatgggagaaggaaaaccctgtataat

SEQ ID NO: 1583 - DNA, 436 bp, Gossypium hirsutum
  Clone ID: LIB3135-053-Q1-K1-C9
gcagaagcggttcccaagccctgatgtgttgcagcaacggataacatattaatcaatcgataatgtatttttggtgttgatcattttatttcttgtcatccatccggtgaggggtcatttgtaggtttttttttaagtttgcgggagaaattacttgagttagagaaaacaattatggggtggtggtggaatgtttaatagcaccaaccaaccaagcccttcaccttaagtttgtgccaatagaacgctcataaatgtctagcagtcactgtattgaagttgtaggggatgaagctacattacattacatctcatatatgtccctgcctttttctatggaaatcagctgatgattgttggcgttgagtttattaaattgcctcagcaattcttttactggtaaacaaatgggagaagcaaaactctgtataataaa

SEQ ID NO: 1584 - DNA, 797 bp, Gossypium hirsutum
  Clone ID: GOSHI-09MAY01-C3840_5
caatagtttatgtcttgcatttggagtgtaaaatgtatttggtccaaaattattattgaaacatttaactttcaaatttgcttaatgcaacagctaatggtttcttgctctaaaaaagctagaggattatggcattttaacaaataaacaccgacgtctacacattccaaacgactcgtcaatacccttggcactcccaatgacacccctgagctccgagaaaaactgcataaaacaaggctacatattgggcaattggtgaaggacacttcagctaaacttaaacaagctagtgaaaccgatcaccatgctgaagtttgcacaagcaaaaagataacagatgccaaacttgcaaaagattctcaagcagttttgaaagagtttcagaaggctcaacggcttgcagctgaaagagaaacttcatattccccttttgttccccagtcagctcttcctgcaagctacacggcaggggagatggatgcaggttctgataaaagtgctgaacagcgagcccttcttgttgaaagaagacaagaggtcgtgctgctggataatgagattgcatttaatgaggctatcattgacgaaagagaacaaggaattcaagaaattcagcagcatattgttgaggtgaacgagatcttcaaagatcttgctgtgctagttcatgagcagtgttacattattgttgacatcgggccctattttgaatattcctaggctgccactttacaggtatattctccttctttgaaagctgtcttgatccttttttccatttttttctggctttt

SEQ ID NO: 1585 - DNA, 594 bp, Gossypium hirsutum
  Clone ID: GOSHI-09MAY01-C3840_4
cccagcgtccgcccagcgtccgcgggcgcggttattttcccaccctctttcccgaaaaaatttaatctcaaaattttctcgggaaagcgagggtttattacaaacacagctatatagtggagcagtaatcatgagctttcgagatctggaagccggacggccattggtgtcgaggcaaaacctaatcaacggcaagcaagacgccacgcaagcagttgcctctggcattttccagatcaacaccgcagtctccacctttcagcggctcgtcaacgccctcggtactcctaaggatacgcctgagctccgagaaaagctgcataaaacaaggctacatattgggcaattagtgaaggacacttcggctaaacttaaacaagctagtgaaacagatcacagtgccggaattagtgccagcaagaaggtagcagatgctaaacttgcaaaagattctcaagcagcaccgaaagagtttcagaaggctcaacgacttgcagctgaaagggaaacatcatacgctacatctgctgccaaggcagctcttgcttgaagttactcggctgatgacgtagatgtaggttcagatggaggggc

SEQ ID NO: 1586 - DNA, 502 bp, Gossypium hirsutum
  Clone ID: GOSHI-09MAY01-C3840_3
ccctcccgtccgccccaattctctaatttctcctaatccctaaatttcccccaaaagaatcagcggacgcggcgaagactcattgtcgaggtaacatacatctgacgcttttctcgtttgcttcgtcggagtgtaaaatttcagctgcttcggatcattccaagatctgtacggccgagaaccaaaagaagaaagatgatgaggatctgcagttgcagtcttccttcattaactaaaaatttctaaagggtagcagctcctgcataggtgcaatgagggttaaaaatgcatgtatcgcattttggagtttcaacgacgcttaaaaccgcgatgggtgtttgaggtgtttgcaacagctctctcatgaatactccctactgaagaacatgcttcaaaccttattccagctggagcaacaaatagttgcagctggtggatcgattccaagagtgcattaaatcacatttcgtatcgtcttcttgtagaataaaaattgtcaaac

SEQ ID NO: 1587 - DNA, 1282 bp, Gossypium hirsutum
  Clone ID: GOSHI-09MAY01-C3840_2
gcgttcttgttattttcccacccttctttcccggagggggggggtgggtgggaatttatctcgggaaagcgagggtttattacaaacacagctatatagtggagcagtaatcatgagctttcgagatctggaagccggacggccattggtgtcgaggcaaaacctgatcaacggcaagcaagacgccacgcaagcagtggcctctggcattttccagatcaacaccgcagtctccacctttcagcggctcgtcaacaccctcggtactcctaaggatacgcctgagctccgagaaaagctgcataaaacaaggctacatattgggcaattagtgaaggacacttcggctaaacttaaacaagctagtgaaacagatcacagtgccggaattagtgccagcaagaaggtagcagatgctaaacttgcaaaagattttcaagcagttttgaaagagtttcagaaggctcaacgacttgcagctgaaagggaaacatcatacgctccatctgttcccaaggcagttcttccttcaagttactcggctgatgaggtagatgtagattcagatggaggggctgtacagcaagcctttcttctggaatcaagaagacagaaggttttgctgttggataatgagatcgcatttaatgaggctgtcattgaagaaggagaacaaggaattcaagagagttcagcagcaaattggtgaggtgaatgagatcttcaaagatctcgcagtgctagtacatgagcaaggaactatgattgatgacattgggactcatatcgagaattcacgggctgccactatacaggctaaatcccaacttgcgaaagctgcaaagactcagagatcaaattcttccctgacctgcttgcttatggtgatatttggaatcgtgattctgattgtggtcatactactagtagtctaatcggaaactaaagatcatctcagcaacgagacggtgatctcttcgcctatgtatttgattatgttgttctatgagaaatcatggcccacaggagttcactcctagtcttagcataccaaattgggggtagctctctcatcccttaacctcatgtgtttgatcctttgggaggccggtgtgtctcatttctaaaagctggtgtttgggtttgtagacgttttgtgaatttaacccctttgtttcacacttcttttcacaataaccgtggtaagagttttaaatttttggttttcaatgtcaagatgcagacaaaccaatatgcatttgcaaagtgtcttatttccctg

SEQ ID NO: 1588 - DNA, 1314 bp, Gossypium hirsutum
  Clone ID: GOSHI-09MAY01-C3840_1
ccatcgtctttcctaaccgttcaattgaacatcccctcttttctggtctttttgttttcccatccctttctctagaaaattttgacaccaattttctcgagaaagttagggtttttacaaagacagatatagagaaggagcaatcatgagctttcaagatctggaggctggacggccatttgcgtcgaggcaaaacatgatcaacggaaagcaagacgcttcgcaagctgtggcttctggcattttccaaatcaacaccgccgtctccacattccagcgactcgtcaatacccttggcactcccaaggacacccctgagctccgagaaaaactgcataaaacaaggctacatattgggcaattagtgaaggacacttcggctaaacttaaacaagctagtgaaaccgatcaccatgctgaagttagcaccagcaaaaagataacagatgccaaacttgcaaaagattttcaagcagttttgaaagagtttcagaaggctcaacggcttgcagctgaaagagaaacttcatattccccttttgttccccagtcagctcttcctgcaagctacacggcaggtgagatggatgcaggttctgataaaagtgctgaacagcgagcccttcttgttgaaagaagacaagaggtcgtgctgttggataatgagattgcatttaatgaggctatcattgatgaaagagaacaaggaattcaagaaattcagcagcaaattggtgaggtgaacgagatcttcaaagatcttgctgtgctagttcatgagcagggaactatgattgatgacatcgggacccatattgaaaattcccaggctgccacttcacaggcaaaatcccatctcgtgaaagccgcaaagagccagagatcaaattcttctctggcatgcttgctcctggtgatattcggaattgtgcttctgatagtgatcatagtactggcagcctaatcagaaagtcgtccaagatgatcaagggcaaactcaaaagatcttcccagcagcaagaatgtggtcttctgagtaatgtgtttgacgtttgtttgcaagacatgatggctgactcgaattcgcttaatagtttttcaagtatatagcatgtgattatcagtaaatcataatgatatttttggttaatctttggcggagtgtctcttttctaagttggtgttttggtttttttgttgaggatgtctttacagctttcgtgttgtaataagagttgcaattctttgtttttctatataaataaatataaataaatttttgagttgtttaaaaaaaaacctctcgccccgggg

SEQ ID NO: 1589 - DNA, 363 bp, Gossypium hirsutum
  Clone ID: LIB3048-033-Q1-L1-E11
ccaattctctaatttctcctaatccttaaatttccccccggaagaatcagcagacacggtgaagactcattgtcgaggtaacataaatctgacttgaatcgcttttctgttttgtaggttactcacaacaaattcgtataatcagacgctttttctcatttgcttcatcggagtgtaaaatttcaggctagcaagaaggtagcagatgctaaacttgcaaaagattttcaagcagttttgaaagagtttcagaaggctcaacgacttgcagcttaaagggaaacatcatactgtacgaaggtcttccttcaagaaaaatgcgttgaggaagattacaagatttaagtattgtccagaatactc

SEQ ID NO: 1590 - DNA, 275 bp, Gossypium hirsutum
  Clone ID: uC-gsronu33B156e12b1
gattaccatgctgaagttagcacaagcaaaaagataacagatgccaaacttgcaaaagattttcaagcagttttgaaagagtttcagaaggctcaacggtttgcagctgaaagagaaacttcatatttcccttttgttccccagtcagctcttcctgcaagctacacggtaggggagatggatgcatgttctgattaatgcgctgatcattgatgcccttcttgtcgataagatgacttttaggttgttttttctttttttatttgttttttttt

SEQ ID NO: 1591 - DNA, 511 bp, Gossypium hirsutum
  unsure (1)..(511): unsure at all n locations
  Clone ID: LIB3583-035-P1-K1-F3
gctgataaaaaaggggaaaaaaaaaggaaaagggagagaaattggcggagaaggcggcggcgtatgacgtggcccgtggaggttggagcgaaactcggacgtgcgttgttttaggaggtcgtggattcataggaagaacgctagtcaacaggttactgcgactcggaggctggatcgtccgagtcgctgactcatcatctcacttgctgctgctcgatacttnctctggttcagattctctcctctctgatgctatcagttctggtcaagccaccttttgccacgtcgatgttctcgatacttctcaaatcgtcaaagtaactacaggtgcagatgttgtattttacatggaaccgactgatttagacacacatgatttcagtaattgctacatgatcatagttcaaggtgcanaaaatgtcattaatgcatgccaagaaaagtaaagtaagcgacttgtatacaatagttctgcagatngtgtttttgatgggtcacaagatatacttaa

SEQ ID NO: 1592 - DNA, 452 bp, Gossypium hirsutum
  Clone ID: LIB3585-067-P1-K1-B7
cccacgcgtccgcccacgcgtccgagaaatgctaggaaagagagctcgatcagttatctatttgagtttaagtaactacaggtgcagatgttgtattttacatggaaccgactgatttagacacacatgatttcagtaattgctacatgatcatagttcaaggtgcaaaaaatgtcattaatgcatgccaagagagtaaagttaagcgacttgtatacaatagttctgcagatgttgtttttgatggttcacaagatatacttaatggtgatgagtccttcgcttacccagggaaatttaaggatatgacagttgaccttaagtttcaagctgaaggactaatcaggttagctaacaatattggcggtcttcaaacatgtgtacttcgccctagcaatgtctttggacctggtgaaacacaatttgtgcctttgctagcgaatctagccaag

SEQ ID NO: 1593 - DNA, 672 bp, Gossypium hirsutum
  Clone ID: GOSHI-09MAY01-C3860_12
atcggttactaatttaatcggtggatttcgccgattggtaatccccccattttgcccagattaggcgccgcataggtttaccatccctgttataccctctcatctgcttcccctttgtttctcttctgttccttctagcctctgccgattttcttgttggtaagttaatcccctccagatttccttgttgctgaagccttagttgcagcttcttcaagctttcgaactgcactttctgatttccttgttgcttcttcctcatcgcactgtgcccggatttcttcatttacagataaatatgtcaggtgttccacaatcacatgcttcttctcaagctgctcgaggaagcaaaagaaaatgggttccagaagaagatgcagccttggtttcttgcatggtggatttgcacaatgtaggaacatttaatgctgataccgggttcaaggccggttatttgaacgagctagaaaaaatgctagaaaagactttaccaagagcaatgttaaaggcgaagccaaatattgaatctcggattaggtgcctaaaaagggaatggtcagtcgtctacgacatgcttaatggccaaaacaatagcggttttggttgggacgagcataagcagcttgttgttgctaaagatgcagtttgggaatcctatgtaaagagtcacaa

SEQ ID NO: 1594 - DNA, 511 bp, Gossypium hirsutum
  Clone ID: GOSHI-09MAY01-C3860_11
cccacgcgtacggggattcaaagccggctatttaacccacgcggccgccctcgcggccgtagttttacccaatgccatgttagagaagaggttagcctttaattcatttttattgagtcataaagaagcagctcaattcagacatcgaagtttcctttattatgaccaacttactgccatctacgcaaaagatcgagccattggaaaagatgctcaaacatctgctgatatttttgaagaaataaatgttgaggatgtagctgctacaaatactcatgaagaaataaacgatttctatggatccgaagctgatgtttctttggatgacatggatctttcagctacacaacagcaatcagaatccaaccagctagaaatcaaggtgattctgtattttcaaagaagaaaaaaaggatttctgatgcaagtgatttttctacttcatttaatgatgctgccgctttattcgcggaaaatatacggaccgttggccttgaaatcagtaagagta

SEQ ID NO: 1595 - DNA, 665 bp, Gossypium hirsutum
  Clone ID: GOSHI-09MAY01-C3860_9
tgtttatttttatttgatagtgtgttattgcaacttcaattctttgatagtgtgttctaatttcaatatcttgcagtaatggctcgtctgcctttaattgcacaaagtgtgaggcgtaaaagaattggtattgctgtgacaatatggttgcaaatctgtggaatcgcgatttggttcttacttacattgggtgcctgccttagcctacggtcttggaccccatccttgggcgcatatattttagatttttatgcaaaacgggattatgtgaaaaggcttgtatatgctagtgacgagacctgtatgaacaagttaggatgaatagaattgccttttttaaactatgtgagatgttacaaacgttagggaagttgaaagtcgtcaagaaacatgcttgttgatgagcaagtgacaatgtttttacatatgatttcccatcattaaaaatcgagttatcaagtatcactttaataggtcccgggaaattgttagcagatcattatagtgtttaaatgctgtcatacgcttacaagagtgttatttaaaaggcagagccattacagctaatctttacacaaggtggaatgtttagaattgctagtgctctgatgaaccacatcaaataggttccacagtgataaactaattcaccccaaagtgcttac

SEQ ID NO: 1596 - DNA, 994 bp, Gossypium hirsutum
  Clone ID: GOSHI-09MAY01-C3860_8
ggggatttctgttcttttccctcttcaccgtttagctattcatgaagaaccctattctaccctaaccaaaatttcacctcaaaaacaatctcaatcggcagccatttcacgtacccttcgacttcgacattcctccccttcatccaaggtcagagccttgaagaagtagagtatcttgacgttctcgttctcactaaaaccagtaaaaaaatcggcgtttccaagcccagggtaggagaggcacccttccctcaaattcctgcaaaattcctaaggataaataatggctcgtctgcctttaatagtacaaagtgtgaggcgtaaaagaattggtcttgcattgacaatatggttgcaattatgtacagttgcgagttggttcttaattacattaggtgccactgggaaagatgctcaaactgctgttgatattattgaagaaatagatgctgaggatgcagctactacaaatactcatgaagaaagaaacgatttccatggatgcgaagctgatgtttctttggatgacgtggatctttcagacacacaacagcaaccagctataaaccaagaaaagatcaagcctgttggcgttgaaatcagtcggagtattgcctctgaggtgctaattcaacaaaagttaaaaatgaccattcaagaaagtgctctaaaattatattcaacattatgtgaagtagaaggtttaactgatgatgagctctatcacgcattgatcaaaattttagattatccaacgcaaatgcttattttctttagtttactgtacaattggaataggtcaaaagatttcttgctgaccattaaatatcatggttctgttgatgatattttggtaactttttgtgtttgtaatatttggatggtataatgacatgataaaatgtcattacaatgttgtaactttttgaggttgtaaaattttataacatatggattatgacatataaactaatgaaatcatgtctttcttgtt

SEQ ID NO: 1597 - DNA, 674 bp, Gossypium hirsutum
  Clone ID: GOSHI-09MAY01-C3860_7
cccacgcgtccggcgtaatcatagcactaaggaggccacgtgggagcctgaggatgcaatgcgtcagcaatatccttatctgttctgatcaggataaacaggccagcattccagtcctgttagccagtgacattgcatgtaagaaggtcctgccttttctcctccaaactataaaacacgtgtgttattttttcctattgaagcggcttgtttgattgcttcctccaccacagttgagcgtcttgtattcacacaatcactataattatgtcaggtgtttcagaatcaaatgtttcttcccaagctttttgaggaaccaaaaggaaatgggttccagatgttgatgccggcgttggttgcctgtatggtcgacttgcacaatgttggaacctttaatgctgatacggggattcaaagccggttatttaaacgagttggaaaaaatgttagaaaaggctctacctaatgccatgttgaaggctaaacctaatcttgaatcgaggattaggacattgaaaagggattggtcaatcgtttatgacatgcttagtggaaaaaacaatagcagttttggttgggatgatcataggcagcttgttgttgctgaagatgcggtgtggaactcatatataaatgtaagaattatttcaagtatttattatcttattttgacc

SEQ ID NO: 1598 - DNA, 851 bp, Gossypium hirsutum
  Clone ID: GOSHI-09MAY01-C3860_6
cccagcgtccgtttcaaaataaattaatggggaccttatatgaattctgtacaattagatatttgatttttagcgccaagaggtcagatctgtcgagctgtgaaacaggggatactttaatgaataaactgtactaatgtgctaagtaaaaaattctgaaacttttatggtaagtaggaatatgagtctagtttcacggaaaatttacggatttaaattttgagtttcttaactcaagttataattaaattagtgacagttgcgcaggtggacagtgttgttatgaacagtgaatttaattttaaaagcaaatttttatgctccgaatcggtaagttaaattggatgacatctcgtactcgattccggagacggtctcgggtaaggggtgttacattaaaaatagtaaataatgttttttttttcttaagataaatatgtcaggtgttccacaatcacatgcttattctcaagcttttcgaggaagcaaaagaaaatgggttccagaagaagatgcagccttggtttcttgcatggtggatttgcacaatgtaggaacatttaatgctgataccgggttcaaagccgggtatttgaacgagcttgagagatacctgcaaaccgtttccccaaatgcaatgttgaaggcgaaacctaatattgaatcaatgattaggttacttaaaagggagtggtcaatcgtctacgacatgcttaatggccaaaacaatatcggttttggttgggacgagcatatgcagctcgttgttgctgaagatgctgtttgggagtcctatttaaagagtcacaaagaagccgcccaatttaaatttcggacttttccttactatg

SEQ ID NO: 1599 - DNA, 608 bp, Gossypium hirsutum
  Clone ID: GOSHI-09MAY01-C3860_5
agcctctctcgatctccacccaccctctccctcccagcatcgacatcgacagaagctgccagcgaaagctccagcccatcccgactttcattttcgcatatttctctgctaaacggtctcagccggttatcatttctcatctttcctcttcgcatatttctctgctaaacggttctttgttcattggtttcttcatcgcagtcgtcccgatttgctcattacagatgcttcttctcaagcttctcgaggaagcaaaagaaaatggattccagaagaagatgcagccttggtttcttgcatggtggatttgcacaatgtaggaacatttaatgttgataccgggttcaaagccggttatttgaacgagctagagaaaatgctagaaaaggctttaccaagagcaatgttgaaggcgaaaccaaatattgaatctcggattagttgcctaaaaagggaatggtcagtcgtctatgacatgcttaatggccaaaacaatagcggttttggttgggacgagcataggcagctcgttgttgctgaaaatacagtttgggaatcctatgtaaagagtcacaaagaagcctctcagttcagacatcgttcttttc

SEQ ID NO: 1600 - DNA, 1312 bp, Gossypium hirsutum
  Clone ID: GOSHI-09MAY01-C3860_4
tccgcttcttgatcctcctacgtttcccttccagaggttaatttttttccttccatcggttctgccatcggtgcttctcgttcgtttcttttatcttcttcattttatcaagaacgaaaaactgatttccagagatcgttaccatcattcttttagcagttcgcactcttcccctgtttattttacagtgtgttattgcaacttgaaatctttggcttgtttgattgcttcctccacccacagttgagcgtcttgtattcacacaatcactaatcaaatgtttcttcccaaacttcttgaggaaccaaaaggaaatgggttccaaaagaagatgcagcgttggtttcctgtatggtggacttgcacaatgttggaacctttaatgctgataccgggttcaaagccggttatttaaacgagctggaaaggatgctagaaaaggctctacccaatgcaatgttgaaggctagacctaatattgaatcgaggattaggctactgagaagggattggtcaatcgtgtatgacatgcttaatggccaaaacaatagcggttttggttgggacgagcattggcagctcgttgttgttgaagatgcggtttgggactcttatttaaatagtcataaagatgccggtcaattcagacatcgcagtttcccttacccccgcgtccgccctcccgtccgcgcaagagatcgagcgactgggaaagacgctcaaacagccgccgacgttcttgaagaaataaatgctgaggatgtaccttctgcagatattaatgaagacagaaacgaatactatgattgcgatgctaatgtctctttcgatgacatggatgtttctgccacggagccgcaaacagacaaaaaccaagggggttcctcatcttcaaagaggaaaaaaaagtattctgatgcaactggtcatttttcttcttcagttaatgatgctgccactttattggctgaaaacatgcgggcaattggcgaacaaatcagtaggagttttgcctccgatgtggtagttcaccagggcatccaacagaaagcggcaaatttatatccaaccttatgtgaaatagaaggtttaactgtggatgaacggtttcaagcattgagtaaaattccggatcatccaactcaaatggtagttttctttagtttaccttctgatgtacggttggaatgggtcagaagatttcttgctgaccattaaaatttatggttttgttgatgacattttcgtaactttttctgtttgtaatatttgggatggtatgtcatatacaatgttctaactttttgatgtg

SEQ ID NO: 1601 - DNA, 851 bp, Gossypium hirsutum
  Clone ID: GOSHI-09MAY01-C3860_3
gtaactgcaaaaaaactggaggaacgaccataccaataactctaggaaaatcgaagaggcctcctgggtgtcgagcaggaactagggctctgacaaggtttttgatctcaaaattctgacaaggttgcctgtaagagctattagctaccaatttgctccaaacataaatcgttgccaagctgaagctctagttgcaattcaagagtgtgttattgcttactattgaagcggcttgtttgattgcttcctccacccacagttgagcgtcttcttttcacacagtcactataattatgtcaggtgtttcagaatcaaatgtttcttaccaagcttctcgaggaaccaaaaggaaatgggttccagaagaagatgtggcattggtttcctgcatggtggacttgcacaatgttggaacatttaatgctgatatcgggttcaaagccggttatttaaacgagttggaaaaaatgctagaaaaggctttacccaatgcaatgttgaaggctagacctaatattgaatcgaggattaggttactaaaaagagattggtcaatcgtgtatgacatgcttaatggccaaaacaatagcggttttggttgggatgagcataggcagctcgttgttgctgaagatgcggtttgagactcttatttaaatagtcataaggaagtcggtcaattcagacatcgtagtttcccttactacgaccaacttactgtcatatacgcaagagattgagcgactgggaaagatgctcaaacagccgctgatgttattgaagaaataaatgttctattaatgaagagagaaacagattctatgactgcgaagctgatgtctctttggatg

SEQ ID NO: 1602 - DNA, 1297 bp, Gossypium hirsutum
  Clone ID: GOSHI-09MAY01-C3860_1
cccacgcgtccgcccacgcgtccgcaaaaactgagtgaaggtagaaagtttgttattgcttcctcttcttatttggcttatttgattgcttcctccacccacagttgagcgtcttgtattcactaaatcactataattatgtcaagtgtttcagaatcaaatgtttcttcccaagcttttcaaggaaccaaaaggaaatgggttccagaagaagatgtagcatcggtttcctatatggtggacttgcacaatgttggaacctttaatgctgatacggggttcaaagccggttatttaaacgagttggaaaaaatgttagaaaaggctttacctaatacaatgttgaaggctagacctaatattgaatcgagaattatgttactaaaaagggattggtcaatcgtgtatgacatgcttaatggccaaaacaatagcggttttggttgggatgagcataggcagctcgttgttgctaaagatgcggtttggaactcttatttaaatagttataaaaaagccggtcaattcagacatcgtagtttcccttactacgaccaacttactgccatctacgcaagagatcgagcgactgggaaagatgctcaaacaaccgctgatgttattgaagaaataaatgttcaggatgtacctactacagatattaatgaagaaagaaacgaattctatgactgcgaagctgatgtctctttggatgacatggatgtttctgctacggagccgcaactagatagtcaccaagggggttcctcatcttcaaagaagaaaaaaaaagaattctgatgcaagtgatcatttttcttcttcatttcatgatgctgccactttattggcggaaaacatgcgggccattggcgaacaaatcagtaggagtattgcctccgatgtggtagttcaacaaaagtcagaagaattccagatcatccaagaaaaagctacaaatttatatccaaccttatgtgaaatagaaggtttaacagtggatgagcggtttcgagcattgagtaaaattccagatcatccaactcaaatgctcgttttctttagtttaccttctgatgtgcggttggaatgggtcagaagatttcttgctgaccattaaaaattatggttttgttgatgatattttcgtaactttttctgtttgtaatatttgggatggtatgtcattacaatgttctaactttttgatgttctaaaactgtataacatatggattatgacatagaatttcatgaatctcataccttttgttaatctatgaaaattatgtttatcc

SEQ ID NO: 1603 - DNA, 720 bp, Gossypium hirsutum
  unsure (1)..(720): unsure at all n locations
  Clone ID: AI055042.1
tacccattcaaggtaacacccgttaagtcttagacgaaaataacctgcctctcttcttcccaaaattcactccagatttcttcttccccaaatcaagcatccatttgcccttcatcttcatctcccgtgaaatctatcagtaccagcaaagtactgaactcctcatcagaaactgcctttggaaaggctcgttcgtgaatttgcccaagcctttttaaggtggacagacaagatcaatggtgttattgcttcctcttcttctttggcttgttcgatttgtttcctctactcacagtgnagcgtcttgtaaatcactntaattatgttcaggtgccttcagaatcaaaatggtttcttcccaaacatcntcgaggaaccaaaaggaaattgggttccagaaagaagatgcagcgttttggttcctatatgggtgggacttgcacaatgttggaacctttaatgttgattggngtttaaaagccggttatttaaacgagtttggaaaaatgttagaaaaggctttacccaatgcaatgttgaaggctagacttaatattgaatcaaggatanggtactgaaaaggattgtcaatcggtatgaatgctaatggcaaacaaacacggttggttgatacataggcnantgtgtctgaaaatgcgtggactctatttatgccttagaaaccgcattaaaaatgagtcctatcagcactctgcttan

SEQ ID NO: 1604 - DNA, 440 bp, Gossypium hirsutum
  Clone ID: LIB3585-067-P1-K1-A7
attactcgctcgacatttattccaagactgtgccctagtttttagctccttaatcgacaacgggtcaagcgttcatgcgccgtctgcatcttcatctttcttctagttgaacgatcttatgtacatgtgtgatggcaactagaactctttggcttatttgattgcttcctccacccacagttgagcgtcttgtattcactaaatcactataattatgtcaggtgttatagaatcaaatgtttcttctcaaacttctcaaggaaccaaaaggaaataggttccagaagaagatgcagcgttggtttactgcatggtggacttgcacaatgttagaacctttgatgatgatataaggttcaaagccgggtatgtaaacgagttggaaaaaatgttagaaatagctttacccaatgcagtgttgaaggctagacctaatattg

SEQ ID NO: 1605 - DNA, 624 bp, Gossypium hirsutum
  unsure (1)..(624): unsure at all n locations
  Clone ID: AW186891.1
ccgaaggaaagctcagttttgcttccgttttggttctcccgatttcatctgccctgttttaccctcccaacccgaaagccacctccaccctctccctcccaacatcaaacagaaccgccccttatattttcccttattttccttctttattacaagtgtaaaagaaatctgagtcagatttgttcctgaaggtaactgcaaaaaaaattggaggaccggccacaccaagtgagttttcagaaatactgaaggtaactagggcacttcaagagattcagaaataccagaagagctcaaatctactcgttcctgctgccaacttcatcagagaagtctcaagatttccttgatctccattctttctggatagagccaatcccaagtggaaatctacctcctggttttgatcctgttgaaggttgcaagcttatcaaaaaggaaaaggtattattttcaagattttcccttttctttttttccctttatgaagctgtgagggtgcactgtaatgaatattttatatggagctttaattctctgcctctggaaggtacctttttttgaagcaatgtaggagtgggatancaatgtagggtgttggatttattttctcttaatcaattt

SEQ ID NO: 1606 - DNA, 555 bp, Gossypium hirsutum
  Clone ID: LIB3583-057-P1-K1-A2
gacccacgcctacgcggaaagctcagttctgctcgtgttcaggttctgccgatttcatctgccctgttttaccctcccaacccgagagccacctccaccctctccctcccaacatcaaacagaactgtcccttacattttcccttattttccttctttattacaagtgcaaaagaaatctgagtcagatttgttcctgaaggtaactgcaaaaaaaaaaaaaactagaggattggccacactaactccaggaaaatcgaagaggcctcattattttcgagcaggaactagggctcttcaagagattcggaaataccagaagacctcaaatctactgttcctgctgccagcttcatcagagaaatagagccaatcccaagtggaaatctgcctcctggttttgatcctgttgaaggttgcaagcttaccagaaaggaaaagtgtgttattacttcctattgaagcggcttgtttgattgcttcctccacccacagttgagcgtcttcttttcacacaatcactataattatgtcaggtgtttcagaatcaaatttt

SEQ ID NO: 1607 - DNA, 548 bp, Gossypium hirsutum
  Clone ID: LIB3829-008-Q6-K6-F4
gttttcatgcgttttaggttgtcccagatccttcttccctgttttaccctcccaagccgaaagccacctccacctccaccctctccctcccgatttcttccggcctcatcgttttcgagcaggaactagggctctgtcaaggttattgatctccaaattccggcctcccgattcctttctgggtattggattgttagctaccgatttgctccagacataaatcgttcacaagctgaagctctagttgcaattcaagagtgtgatattgcttcctactgaagcggcttgtttgattgcttcctccatccacagttgaccgtcttcttttcacacaatcacttaatggctcgtctgcctttaattgcacaaagtgtgaggcgtaaaagaattggtattgcattgacaatatggttggaaatctgtagaattgcgatttggttcttatttacaatgggtgccagccttagcctacatacttatagacgaaggattaggtcctctgctcttagcctacatacttatagacgaaggattaggtcctctgctac

SEQ ID NO: 1608 - DNA, 501 bp, Gossypium hirsutum
  Clone ID: uC-gsflnu33B036d05b1
cctttttgtccgaaggaaaactcagttttgcttcggtgttgtttctcccaatttcttttgccctgttttaccctcccaacccgaaagccaccttcaccctctcccttccaacatcaaacagaatcgccccttacattttccttcttctgtcccgttaatttttctgcttgtttattgtttaagctccaggaaaatcgaagaggcctcatcgttttcgagcaggaactagggctctgacaaggtttttgatctcaaaattctgacaaggttgcctataaagccaatcccaagtggaaatctgcctcctaattttgatcctgttgaaggatgcaagcttaattctctgcctctgaaagtgtgttattgcttcctattgaagcggcttgtttgattgcttcctccacccacagttgagcgtcttcttttcacacaatcactataattatgtcaggtgtttcagaatcaaatgctttttctcaagcttcttgaggaaccaaaagg

SEQ ID NO: 1609 - DNA, 525 bp, Gossypium hirsutum
  unsure (1)..(525): unsure at all n locations
  Clone ID: uC-gsflnu33B100g08b1
cggcccggactgactggctcgaccgacgcatgcgttctattttttctctcccatcatcaaacagaacctcccattacattttcctttattttccttctttattacaagtgcaaaagaaatatgagtcagatttgttcctgaaggtaactgcaaaaaaattggaggattggccacaccaactccaggaaaatcgaagaggcctcatcgttttcgagcaggaactaggtctcttcaagagatccggaaataccagaagacctcaaatctactcgttcctactgccagcttcatcagagaaatagagccaatcccaagtggaaatctgcctcctggttttgatcctattgaaggttgcaagcttatcagaaaggaaaatgtattattttcaagattttccctcttctttttttccctttatgaagctgtgagggtgcactataatgaatattntatatggagctttaattctctgcctctggaaggtacctttttttgaagcaatgtaggaatgggatagcaatgtag

SEQ ID NO: 1610 - DNA, 503 bp, Gossypium hirsutum
  Clone ID: LIB3829-008-Q6-N6-F4
agatgaaaatgagattctacatcataatccatatgttatatagttttataacatcaaaaagtttgaacattgatttttaatggttagaaagaaacttctgacccattccaaccggacctcagaaggtaaactaaagaaaacgagcatttgagttggatgatctggaattttactcaaagctcgataccgctcatccacagataaaccttctacttcacataaggttgaatataaatttgtagctttttcttggatgatttggaattcttctgacttctgttgcactaccacatcggaggcaatactcctactgatttgtttgccaatgatccgcatgttttcggccaataaagtgactgcgtcattaaatgaagaagaaatttatcacctgcagcaaaattcttctttttcttccttgaagatgaggaacccccttggtttctatctggtctcgggtccgtagcagaggacctaatccttcgtctataagtatgtaggctaag

SEQ ID NO: 1611 - DNA, 440 bp, Gossypium hirsutum
  unsure (1)..(440): unsure at all n locations
  Clone ID: LIB3165-013-P1-K1-E9
ccggcgggtcccacgcgtccggnttttcccttctctgctttaacgntttagtcccttgcccatagccttcttcatggatgtccctttcactcagtcctcagattctccgactccttcttgcaaagacaccttcttcatcacaatcttggccgattttgcattcaccctgttgttgttcatcgatctcttccccgatttccctggttacagtaatggctcgtctgcctttaattgcacaaagtgtgaggcgtaaaagaattggtgctgcattgacaatatggttggaaatctgtataattgcgattaggttcttatttagaatgggtgccaaccttagcctacatacttatagaccaatgattaggtcctacaccttagatttttatacaaaacgggattatgtgaaaaggcttgtatatgctagtgacgagacatgtatt

SEQ ID NO: 1612 - DNA, 402 bp, Gossypium hirsutum
  Clone ID: LIB3166-014-P1-K1-D1
cgccgtttgggacctcccttccaaaagaaaggtttacctaatcggtcctcttttaccctccgaagcctctctcgatctccacccaccctctccctcccagcatcgacatcgacagaagctgccagcgaaagctccagcccatcccgactttcattttcgcatatttctctgctaaacggtctcagccggttatcatttctcatctttcctcttcgcatatttctctgctaaacggtctcagacttccatcttcgcatatttcgcatatttcttcgcatctttcctctctgcatgcattagtgggtgttgttgcatttttttttataaatctgattacgattgtttcatcagtttcttggtaaatcagaatagggtttcttgctggttatgaatttttttttc

SEQ ID NO: 1613 - DNA, 407 bp, Gossypium hirsutum
  unsure (1)..(407): unsure at all n locations
  Clone ID: LIB3196-035-P1-M1-F5
tccacttcgnnnnntggtcgcgtagaggtcagatctgtcgagctgtgaaacaggggatactttaatgaataaactgtactaatgtgctaagtcaaaaattctaaaaattttatggtaagtaggaatatgagtccagtttcacggaaaatttacggatttaaattttgagtttcgtaactcaagttataattaaattagtgacagttgcgcaagtggacagtgttgttatgaacagtgaatttaattttaaaagcaaatttttatgctccgaatcggtaagttaaattggatgacatctcgtactcgattccggagacagtctcgggtaaagggtgttactagaatcttctnnnagattgagccctaacgtattgggtttcaactctttcgttgaatctgaataatca

SEQ ID NO: 1614 - DNA, 230 bp, Gossypium hirsutum
  Clone ID: LIB3146-025-Q1-K1-F1
cccacgcgtccgcagactcgttcgctttcgcgtacgtttcgatgggcgggcggaattggttaaaaaagttattgcttgacattaaactatatatttctgctggtgatagattgataactttttctgtttgtaatatttgggatggtatgtcattacaatcttttaactttttgatgtactaaaactgtgtaacatatggattatgacatagaatttcatgaatttcattt

SEQ ID NO: 1615 - DNA, 701 bp, Gossypium hirsutum
  Clone ID: GOSHI-09MAY01-C3820_1
ctctctcgtccggtcaaaaaaccttagccgtctgtcaaaaaaaaccctagctgtagtcctcttggtttttaggtttctttctaggagagagagttctgtattattttttagttcgtaagttttttcgtatactgaacaatcttttgttaccgattcataaatttctcgaggaagttctggggatttcgaaaagaaaaagccgataatgtctcggtgttttccttacccgcctccaggatatttaaggcaggggtttgccgaatccattaagctcgagaatgagaaggtaccgtccaaaagagaacagagattacacaagagaagtgagaagaagcagaaaaagaaggaaagagaaagaaaggataaaactcacggtctcaccaagaaatttaagcatgatgattccctaaatgtctataaagatgaccaattggagaatagtgatcttaccgaagaacatgggccacctgtttgctacacatctgatgtcagccaaaacagcaacaagaggaaaagggaaactttattctttagtgaatacagggttaatgataatgccttaaagatacggtttaccttgaaaaagccttgtcaatctgctgcatctcttagtgaagaaacagtctctacctcggtgaggtcggattccactcgggagcaatgttcatcttggaattataaagctaatacagttactcatt

SEQ ID NO: 1616 - DNA, 1010 bp, Gossypium hirsutum
  Clone ID: GOSHI-09MAY01-C3550_3
cccacgcgtccggccagaaaaagcaaactgcatttctaaaaatattacagtaatagattataaacgagccttgtcttggttaatacaaagtcagagagcaatagcccttcacgaatttcattttatctttattaattaatcgagctgaaaatggaggcaggagttgcatgcaagttgaattatccgacatggattaggtttgggagaaaatcgactggttctttgcggttcgatcggatagcgaagcaagaacacaagacccgggtggttgtttcggcccactttccggttcagacatcttccaatcgacatagatcagtctctttggaggtttcctgctcttcctatacgaacttttcagcttcaacaatggaaactggcagcattcatgcaccttttggtgaagctttaatgttaaagaataagtcactagaggttgagccatatttaaatgggcacagtatatatcttgttggattgatgggctctggaaaactacagtgggcaaaattctctcccatgtactcggttattcattttgtgacaggttgaatattagaagtgttattccttccttgatgtctaccaatttccaaggaggtgaatggaatgtctgtagctgaaatatttaagcttcatggggagagtttcttcagaaaaaaagagactgaggtattgcagaggctttcttcacagaaacaacttgttgtttctactggcggaggtgcagttgtacaggatgtgaactgggactatatgcagaagaaggggattgttgtctggttagatgtacctttggaagccttggcacaaaggattgctgcagtaggtactcattctcgtccccttttgcattatgaagatggcgatccatatacaaaggcttaaaacgtctgtcttaccttttggaacagaggggtaaaaaatatgctaaagcaaatgccagggtttcattggaaggtatgtatagttaaacctgtctcgtacttttattgtctaggttatgttcc

SEQ ID NO: 1617 - DNA, 614 bp, Gossypium hirsutum
  Clone ID: GOSHI-09MAY01-C3550_1
ttcagaaagaaggagactgaggtattgcagaggctctcttcaaagaaacagcttgttgtttctactggcggaggtgcagttgtacgggatgtgaactgggactatatgcagaagaagggggttgttgtctggttagatgtacctttggaagccttggcacagaggattgctgcagtaggtactcattctcgtccccttttgcattatgaacatggcgatccctatacaaaggctttaaaacggctgtcttaccttttggagctgaggggtaaaaattatgctaaagcaaatgcccgggtttcattgtaaagaaattgctggcttactaggttattgagatgtatcagatcttactccaacagagatcgcaatcgaggcattgggacaaattggagtgtatctaaaggaggaagatggcatggccattgcaggattatagttttgaaaaagcttaaatatggtgatttgatttggttttatttgaagcatagcatgtcaaaattgcctcacttttgatttgatttttattttatcccagccacggtgtagtttgtttacgcaaataagttgtgaaactccccacgtattgtgactaaagatcatgaatttgatgc

SEQ ID NO: 1618 - DNA, 457 bp, Gossypium hirsutum
  unsure (1)..(457): unsure at all n locations
  Clone ID: LIB3825-020-Q1-K6-D11
cggncgcgtgggcggacgcgtgggttatgctaaagcaaatgcccgggtttcattggaaagaaattgcaggcaaactaggttatagagatgtatcagatcttactccaacagagattgcaatcgaggcattgcaacaaattgaagggtatctaaaggaggaaggtggcatggtcattgctggattatagttttagaaaaagctatagatatggtgattgaatttcgttttatttgtggcatagcatgtcaaaattgaccagtttttttttccatctctgcaccggtgtagtttgtttccacaactaagttgtgtaactcacaatgtattgtcactaaatatcatgaacatgatgcacttgtatatgtttgcctaattcatttttgttttagtcaaaaaaaaaaaaaaaaaaaaaacaacaaaaaaggaccttaaaaaaccataactacataaaaaata

SEQ ID NO: 1619 - DNA, 186 bp, Gossypium hirsutum
  Clone ID: LIB3584-020-P1-K1-C6
cccacgcgtacggtttccacaactaagttgtgtaactcacaatgtattgtcactaaatatcatgaacatgatgcactggtatatgttagcctaaaaaaaaagaacaaaaaaaaaacaacgaaaagactgaaaaaaaccctgaagaaacaaaactaaaatagaattgcaaaacaataacaactttgg

SEQ ID NO: 1620 - DNA, 687 bp, Gossypium hirsutum
  Clone ID: GOSHI-09MAY01-C3480_1
tcgccccgcgtccgcactcctccaccttcactaaaatggcgtccatggccttccccgttgttcaatctcctaggaggcgcggcccccttttttccagtaacaaagagcaaacccagaattggaatgccttgaaattcgtcagaggcaagaaactcttgaaggatcttagcacttggggcattggtggcccttgcaattactttgttcaagtctttcaccaaacccatctgctttctgccatcagatattgtcgtgagttttccattccatgcgttgtgattggcaaaggctcaaattgtctgtttgatgatctgggttttgatggttgtgtgcttctaaatcagattgacttcttagagaggatggaacctggagtttatagggctggtagtggttttcgatttaatcacttgggaagtctgagttgcaatgaaggatttacaggtcttgagtttgcagcaggcattcctgggactgtaggaggtgcaacttacatgaatgctggagcaaatggtcaggagactgccaatgttattgaaagcgtagacattgttacaactgaaggaaatttcggacactgaacagaattgatctcactttcggctaccgatcatcatcgtttcaagacatggacaacttggcagcaatcgtggcccgtacgttccggttagagcactcagggtcagc

SEQ ID NO: 1621 - DNA, 513 bp, Gossypium hirsutum
  Clone ID: GOSHI-09MAY01-C3450_2
gcctaatccgtgttttccccttttctgctattccattttttgccctcgtcctcaaccttctgattctacgacgcctccttgcacaggttgttgttcatcgaactcttccccgatttccctggttacacaggttagttttcctccccaagtaaaactcatctgcgatttgtgaagagaaacttgaggggacaaatctgctctcccttgctattcctacttaactgctttcgatcttttgtttttgttctttggcatgctaatgagctttatgattggttagctgttggttggcatatttaatcatgctcaaactccaaacaaatattatttgcgggatttttgttgttgttgtgtcttggtctgtttggtctgtttatattttgttgttagtaatgctctgttcttttggctagatttggttccagtttgcttagcttaggtggaatggtgttgggtttgatagatatcttacatctgatacatggaagattgttgttcttttcctttgtatgt

SEQ ID NO: 1622 - DNA, 995 bp, Gossypium hirsutum
  Clone ID: GOSHI-09MAY01-C3450_1
ccgattccctaatccgtgttttccccttctctgcttttccgttttttgccctcgtcctcagcctgcttcatcgatttcccttccagctcagtcctcagattctccgacgcctccttgcaaagacaccttcttcatcgcaatcttggccgattttgcattcacccggttgttggtcatcgatctcttccccgatttccctggttacaggttagttttcctccccaagtaaaactcctctgcgatttgtgaagagaaacttgaggggacgaatctgctctcccttgctattcctacttaactgctttcgatctgttgtttttgttcattggcatgctaatgagctttatgattgcttagttggtgtttggcatacttaatctgctcaaattccaaacaatggagattttgcgtaattttagttgttgttgcgtcttggtctgcttggtttggttatattttgttgttagtaatgctttgctttgttggctaaattttgttccaccccgcgtcccgtaggtggaatgggtgttgggtttagggttgtatcttaccatctgatacatggaagattgttgtctcttttcctttgttttgtaatccaaagacttttaaggcatgcaagtatgttaattgaagttgtttaagctatgtttattatttcataggtagtagtacagaaccattaggttcattttggttgcaatcaaagttaataagcttaactgcagacttgaggcagtgagcaattacggctacattttctaagttagcttaatgactgatccagacttgtgaattgccatttaaattcagacagatttctgatactctgctgctgtttgaaggagtttaccttctgtaaattgttgttagtgctgtttttgcaattcagaaattgtttttgttgttagtgagtagaagatgaaaggggaaattgttgcccgattttgatatttttttataggttctggttcctgcttgttttggccattatt

SEQ ID NO: 1623 - DNA, 613 bp, Gossypium hirsutum
  Clone ID: GOSHI-09MAY01-C3410_1
tcgaaacacatctgctctctctgaagattcggcatggcctcatccactttcaaactaaccattcatctaccactctcagcatccatcatagtctgaagccaagttacaaatcaaccatactaaaggatggatgatccagaattagaatgggaaatccaagaatcatcaactgggtatagtgagaatggcaaactaagttggttgatgagattgggaaggaaaatatttgtcactggaattgttatatcatctgcaccacttgtcttccctccaattatggctatttctgctattgggttcgtctgttcggtcccttatggagtcttattagtaagctatgtttgcactaagactttaatgagtaggttacttccaatgccttcgcgatctgccccattattgttggaatatggaaaagcatgtaatggagaaggagaaggagatggagaaggagaaggagaaggagaaggagaaggagaaggaggaggaggagaagaaactaatggagtacaaaatgaagttattaaaggagatattagcatagagagggaggaagaagagttaaaagaggacattattggaagaaattgaggctagaattgaattggttgac

SEQ ID NO: 1624 - DNA, 1040 bp, Gossypium hirsutum
  Clone ID: GOSHI-09MAY01-C3400_1
atcgattgtatggacgttatggagaatttagggtacatggatctgatcgataacaatgatttattcgatcacatcttcgatatttcaccatgatgatactggcctagaagagttccaacaagatcagcaaaaccaacagcagcaagaacatgattcgactcaacagcagctggggcaacaagtgggggcaatgatgtacaggaagaacgaatgatcagacccaacaagagaaagcttcggatgatttagccatggggttcttggagtggctcaagaccaacaaagagactgggctcagcagaagacttgtggggagttaaaatcaagaaagctaccatagagtgtgccgcccggcgtttgggtggaggaaaagaggccatgaagcagctgttgaagcttattcttgaatgggttcaaaccaatcatcttcagagaaggcgcattaaagaatcagcttccaacaaccaacctgatcacccttaccagtactcaaaccctaatccccgcgtccctcgccccaacccaaacctcaactgcaaccctatcttaccatctgaacctaactcttgtttttctcaaccagcatgggttccacaaccagcttacacaaccgatccggaggctgcaccaccaccgctgccaggtttcacacctgtagtggggtatatgggggatccttttgcaaatggagctcctaatgttaccacccaccaccacccttatcagcccccaacggattatcaagtgctggacacagctcaaacgtggccaccttcacagtttgctttggcagcctctcaatacaactcatttgcagacaataatctccatccagctccacttcagcagcagccatctgcttttcctgggtatgtgaatcaatatccgtatcactacgtcccggggcataataataatgatcaaaggctactacggtaggctcgtctgctacgaaagaggcaagaaagaagaggatggcaaggcaaagaaggtttgcatcacaccatagaaatcacggtcatcatcataataatcaacaa

SEQ ID NO: 1625 - DNA, 705 bp, Gossypium hirsutum
  Clone ID: GOSHI-09MAY01-C3780_1
ggaactacatcatctacgtgctgttgccattcttatgacattcattatggttgtttccatcctaacgtcaattgcaattgttcgccgcatcttaatggcaacatctgtcctcaaggttgctgcaaaagtcataggcgaagttcaagcattgataatttttccaatcataccatacgcaattcttgcaattttttacatgttctggatatcggctgcccttcatctgttcagttctggtcaggttgtcaagaacaactgtaataccaactgctgtgcttatgatcttgtggcgaaaaaggtgaattgtgatggttgctgtggttatagcacccattacaccccgcatattgctgttgccatcttcttccacctgtttggtggttattgggctacgcaattttttatagcgtgttcttcaaccgtgattgcgggttctgttgcttcttactattgggctcggggtgaaacatcgccagagatcccatttcttcctgtttttgcctctatgaagcgtcttatacgatacaaccttgggtcagtggcccttggctcattggttgtatcctttgtggaatcaattcgtttcattcttgagtcaattcgtcgtaaactcaaagttgctggtgttacatcagatggttggcttggtaagatcggacatcatacttcacagggatgcttgagatgtgttgaggggacgatcaa

SEQ ID NO: 1626 - DNA, 342 bp, Gossypium hirsutum
  Clone ID: LIB3493-041-P1-M1-F7
ataccaactgctgtgcttatgatcttgtggtgaaaaaggtgaattgtgatggttgctgtggttatagcatccattacaccccgcatattgctgttgccatcttcttccacctatttggtggttattgggctacgcagttttttatagcgtggactgtaatcaagtttgcgggagttattattattctctattgagcgcagcttggtacgtaaatcttgtggccctttgcctggtcattatggatgtgttatgcgacttgttcgaaaaatttgtggactctaatcttgcagttgactcaacttgctctttatgtactgtctatatttgttgtacttcacacat

SEQ ID NO: 1627 - DNA, 317 bp, Gossypium hirsutum
  Clone ID: uC-gsflmaxxa064c05b1
ccgcgcggacgcgcgggcggacgcgcgggttctcttctttggcggctactgggctacccacttttttatagcgtgttcttcaaccgcgattgcgggttctgttgctttcttactattgggctcggggtgaaacatcgccagagatcccatttcttcctgtttttgcctctatgaagcgtcttatacgatacaaccttgggtcagtggcccttggctcattggttgtatcctttgtggaatcaattcgtttcattcttgagtcaattcgtcgtaccctcaaagttgctggtgttacatcagatggcttggtttggaaa

SEQ ID NO: 1628 - DNA, 580 bp, Gossypium hirsutum
  Clone ID: GOSHI-09MAY01-C3750_2
cttcgcgactttccgttttgttcctttggatctgtgaggcagccgccggttcctttgaccaccaccaccgccacctctctgtgatcaaccttcactctctttttcaactgaacttttcagggaaattaactgaaatggctggaggattaatccaccaggttttaaggaggaaatttcaatcacagtctgctgttcaagctttatcatggttttcatcaaggaaagttaatgacgatgcgggttctgctggtatgaggactgttgcactccttggagctggtgtttcaggtttactaggttttgcaacagtagcatctgctgatgaggcagaacacggtttaggagttgcaaattatccttggcctcacgcaggcatcctcagttcatatgaccatgcttcgattcgtcgcggtcaccaggtttaccagcaagtgtgtgcatcctgccactctatgtccctaatatcataccgtgatttggttggtgttgcatataccgaagaggagacgaaggctatggcagctgagattgaggtggttgacggtcctaatgatgagggtgagatgtttactcgtccggg

SEQ ID NO: 1629 - DNA, 686 bp, Gossypium hirsutum
  Clone ID: GOSHI-09MAY01-C3750_1
ctcttatactttccgttttgttcctttggatctgtgaggcagccgccggttcctttgaccaccaccaccaccaccaccacctctctgtgatcaaccttcactctctttttcaaggaaattagctgaaatggctggaggattaatccaccaggttttaaggaggaaatttcaatcacagtctgctgttcaagctttatcatggttttcatcaaggaaagttaatgacgatgcgggttctgctggtatgaggaccgttgcactccttggagctggtgtttcaggtttactaggttttgcaacagtagcatctgctgatgaggcagaacacggtttaggagttccaaattatccttggcctcacgcaggcatcctcagttcatatgaccatgcttcgattcgtcgcggtcaccaggtttaccagcaagtgtgtgcatcctgccactctatgtccctaatatcataccgtgatttggttggtgttgcgtatacggaagaggagacgaaggctatggcagctgagattgaggtggttgacggtcctaatgatgagggtgagatgtttactcgtccgggtaaacttagtgaccgctttcctcagccatatgcaaacgaacaagcagctaggtttgcaaatggaggagcttatcctccagatctaactctcatcaccaaagctcgtcataatg

SEQ ID NO: 1630 - DNA, 646 bp, Gossypium hirsutum
  Clone ID: GOSHI-09MAY01-C3740_2
attgaacctaaaaccgataaaattaattatttagttgatttgatcatcggtctgatttaattattgtttttcagaatattttcttttatcttttgtgatattttttactaatttaaatataaaaataatcataagttattattttcctttttgtcttcaattaaatgaaaaaaatcagagcttcttgggttatctccgagctcaccagacgccgccatcttcaccaactcctcctctaaagcaacgacacccagtacttcaacaaccaccgcaacgccgtcttccgcggccgataaaaccgatagcaaatccagtggaatcaagcttggtccccacttcgtcggttccacggcggcgctactggttgctacagcggccgtgtttttccttgtattcccagctggatttgcttcaatagtttagggtttttgcatgggatttcgagatttgggggtttatttattgttgaagtccttttgtttttaaacagtctcagaaaaaagatggactgagttgacaattatgattattttcgtttatttttcctttttgccctttaaattaaaactagtatattttcccagcttcacctgggaaatccttttatatatatttttaaaattttataaataataattataattat

SEQ ID NO: 1631 - DNA, 938 bp, Gossypium hirsutum
  Clone ID: GOSHI-09MAY01-C3740_1
aagaagttgagcagtgaagaaagatgatcaaaatgggttttattgttttggccttgatggtggtttccgccgcgacggtggttacggcggctgacgagagtgggttagcgaatgagtgcagcaaagatttccagagcgtgatgacttgcttaagctttgctcaaggaaaagcagcgtcgccgtcgaaggagtgctgtaattcagtggcggggattaaagagaataaacccaaatgtttgtgttatattttgcaacaaacacaaacctctggtgctcaaaatctcaaaagcttaggtgttcaagaagataagctgtttcagttaccatcggcttgtcaattgaagaacgctagcgtcagtgattgcccaaagcttcttgggttatctccgagctcaccagacgccgccatcttcaccaactcctcctctaaagcaacgacacccagtacttcagcaaccaccgcaacgccgtcttccgcggcggataaaaccgatagcaaatccagtggaatcaagcttggtccccacttcgtcggttccacggcggcgctactggttgctacagcggccgtgtttttccttgtattcccagctggatttgcttcaatagtttaggggttttgcatgggatttcgagatttggaggtttatttattgttgaagtccttttgtttttaaacggtctcagaaaaaagatggactgagttgacaattatgatgatttttcgtttatttttcctttttcttatttgatttaacgtccctttgaattaaaactagtatattctcccagcttcgcctgggaaatccttttatatatatatatttaaaattttataaatagaatttcagagaaaatgatgatgcatacattaaaaaggactacaatctttgaggacttgaccagacaagttccttattacgaactatgcgctggat

SEQ ID NO: 1632 - DNA, 350 bp, Gossypium hirsutum
  unsure (1)..(350): unsure at all n locations
  Clone ID: LIB3189-017-P1-K1-E11
aagaaagatgatggaaaggggttttattgtttctgtcttgacggaggntttcgccgcgacggtggttacggcggctgacgagagtgggttagcgaatgagtgcagcaaagattttcagagcgtgatgacttgcttaagctttgctcaaggaaaagcagcgtcgccgtcgaaggagtgttgttattcaaaggcgtgtgtataaagtgtttttacccaaatgtttttgatatatttttcaacaaacacaatacttcttctgctatattttcaaattcttttgtcttcaattagatttagctgctttattttccgccaatttttctattgcatactatttttttaaaaatttt

SEQ ID NO: 1633 - DNA, 271 bp, Gossypium hirsutum
  Clone ID: LIB3083-007-Q1-L1-B1
ctggcgtcaaaatggctatcattgttttatcctagatggagacttccgccggaaggtgttttacactgccgggcgggaaccccttatcatatgcatgcatcaaatatttccagagcgtgatgacttgcttaagctttgctcaaggaaaatcatcgtctccgtcgaatgagtgctgtaattcaatggcggtgattaaagagaataaacccaaatgtttgtgttatattttgcaacatacacaaacctgtggtgctcaaaatcttataagctt

SEQ ID NO: 1634 - DNA, 661 bp, Gossypium hirsutum
  Clone ID: GOSHI-09MAY01-C3770_1
ctctcacccagttttgttggttcttccacaacaaagaggacttaattttcagtccattggctcaagaaggttatttttatatacgtgaacatcacgaagatgagtcgcagaaatggtcccaagcttgagttgaagctcaacctatcaccaccaaggtttaacccaagagtggaatcaccaagccgatcggctaccgtgtcaccgacatcgcctcccggctcatgcgtgtcatcagagatggagtatgacactggcagtagtagtgaggcaacaacgacatccatggttcttgtggggtgcccaaggtgccttatgtatgttatgctatcagaggatgaccccaaatgccccaaatgcaagagcactgttttgctagatttcctcaacgacactgccaccgctgcctccaccaagacaagaaagagcagctagaccacactgcagtctcacccctgccctttccctaattttaatgttacagctctcttagatagtgctatttgctctccacctttagtttttgacctttttctttataaactccactaatgatagaaaaaaacaaggtggagcaccaatagcagtgatcttttccttttttctttttttctcttttccggagaatcctaaatctaatcatagaacatagaatattggcgtt

SEQ ID NO: 1635 - DNA, 410 bp, Gossypium hirsutum
  Clone ID: LIB3145-034-Q1-K1-A2
cccacgcgtccgcccacgcgtccgcttctctcactcagttttgttggttcttccacaacagaagaggacttaattttcagtccattggctcaagaaggtaacttttttcaaaaccgttcaatagttgttgaattaactcttttgtttttgtcagttatgttacatgcatgtttcattcaggttatttttatatacgtgaacatcacgaagatgagtcgcagaaatggtcccaagcttgagttgaagctcaacctatcaccaccaaggtttaacccaagagtggaatcaccaagccgatcggctaccgtgtcaccgacatcgcctccaagctcatgcgtgtcatcggagatggaggatgacactggcagttgtagtgaggcaacaacaacatccatggttctttgtgggtg

SEQ ID NO: 1636 - DNA, 595 bp, Gossypium hirsutum
  Clone ID: GOSHI-09MAY01-C3760_1
aaaaaagatgtgtgctaccaatggtttttttcatcagaaacagaagatagaaaatcctttgggcccttaccatcacaacgctcctgctcttttaaagtttgcttcgaggacattggtagatgcctaaaatgtgaatgtattgtgacggatgtgtttggaaggtcaagtgagccagtttatgctgagactgctcctgtattgccagggattcctagaattgataagctagagattgaagggaggggctttcataccaatttatatgctgtacgtggcacttattttggaggaaaagaaggaaaaagtaaaattcagtggcttagatcgatggttggtagtcctgatcttatctccataccaggtgaaacagggaggatgtatgaagcaaatgttgatgatgtggggtacaggttggttgctatttatactccggtcagggaggatggcattgagggacaacctgtttctgcatcaactgagccaattgcagtcgagcatgatgtttataaagaagtaaaacagaagcttgatattggatctgtaaagtttgaggtattatgtgacagggtgcgcatacttttttgaattctgagac

SEQ ID NO: 1637 - DNA, 335 bp, Gossypium hirsutum
  Clone ID: LIB3146-010-Q1-K1-D8
aaagaagtaaaacagaagcttgatattggatctgtaaagtttgaggtattatgtgacaaggatcgcaacccaaagaaggtcccaggagaagggtgccttgagagaagaatcctggaaattaatagaaaacgagttaaggttgtaaagccgggttcaaagacttcttttcctgctaccgaaatacgtggaacctttgctcctccttttcatgtggaggttttccgtaatgaccaacgccgacttaggattgtgttggacagcgagaacgaagtagacctcatggtgcattcgcgatacatcagggatgttattgttcttgtgatccgtggtcttgc

SEQ ID NO: 1638 - DNA, 775 bp, Gossypium hirsutum
  Clone ID: GOSHI-09MAY01-C3720_1
gtaaaaaacaattcatttcatctttaaagtaatttgtacatcagttagttgaaaaactagagttatttatctggaaccaggatcctgtagtgtaccttcaataaccccataatggaggaaacattgacaatcctgggggaatcagataagtgaagcaggggaacaaatgcttcaacctttcttgctgccaaaagggtagcagttgtaacaggagcaaacaagggaatcggttttgaactatgcaggaacctcgcttcaaaagtgatcatggttgttttgacttctagagatgagaaaaggggacttgaagcttttgcaaaattgaaagattctggtttgtctcatcatttagttttccatcaacttgatgtgacggtcccttctagcattgcctcccttgttgattatgtcaaatctaaatttggaaaacttgatctcttggttaataatgctggaacttttggagctattctacatcaacaagcttttgtcaaagctactgaacttgctggatactttccaagtgaagagcaagccagtgagtatgagattgcaactcaaacttttgagttggcgcaagaatgcttagaaaccaactactatggtgcaaaaagaatggttgaagcatttgttcccctgcttcacttatctgattcccccaggattgtcaatgtttcctccattatggggttattgaagaatatacccagtcaatgggccaaggaagtgttgagtgatgctgaagtgttacagaagagcaagtggatgaagtccg

SEQ ID NO: 1639 - DNA, 676 bp, Gossypium hirsutum
  Clone ID: GOSHI-09MAY01-C3690_1
tttaaacaccatttttgctatggcagacggggggggggggggcaattcctgatcgctggatgctggttgttaaggagcagaaggatggatctagtctttcgtactacacatgtcctgagagtgggcaaaagttcaacacctatgaagatctcatgcgatatgtgaactatgcaaaagctgctaagcgtggcacctgctctcctgatttctgtccccggaaacctccccgcaaaccaaagaaaaaagctagcacacctgaagtagctcagaatgtagccgagaaggacaaggactcggactcggactcggactcggattcaagcgattcaacattcgagttgcctcccattgcttcgctcgagtttctagatgagtggagttcagcggagtctgataagcaatctgcttcgggaaagaagaagttagagaagaaccacgcttcaaatgaaggttgcagcagtggtaacatgggaaaggctaagaaacagaagaagtaaatgagtagaagatggtgcgggtgcagttgatcagcaagtttatgttctgcctttctcttattttgcaatggtgtggttttatttagggtttgaataaatgagttaaaacaaaactaagaacaatagatcttttctttttctagtgtggactgaatgacgaacttttaaggctgatcaat

SEQ ID NO: 1640 - DNA, 520 bp, Gossypium hirsutum
  unsure (1)..(520): unsure at all n locations
  Clone ID: LIB3582-017-P1-K1-C4
ctggtaagccctctggagaaatcaccattttggctatggcagacaaggtttcttcaaggccaattcctgatcgctggatgctggttgttaaggagcagaaggatggatctagtctttcgtactacacatgtcctgagagtgggcaaaagttcaacacctatgaagatctcatgcgatatgtgaactatgcaaaagctgctaagctttccatctactctcctgatttctgtccccggaaacctccccgcaaaccaaagaaaaaagctagcacacctgaagtagctcagaatgtagccgagaaggacaaggactcggactcggactcggactcggattcaagcgattcaacattcgagttgcctcccattgcttcgctcgagtttctagatgagtggagttcagcggagtctgataagcaatctgcttcgggaaagaagaagttagagaagaaccacgcttcanatgaaggttgcagcagtggtaacatgggaaaggctaagaaacagaagaaagtaatgag

SEQ ID NO: 1641 - DNA, 766 bp, Gossypium hirsutum
  Clone ID: GOSHI-09MAY01-C3650_5
aaagttcaaccatttctgctttgtttctcttagttcttcttttcaacttagtttgactttattttatggcattggcttcaacttttgtctgcttctttctttatttttattattttttacataattatgttagtgtgcaaatcgctttctttgggttgtgatttttgaagtgttaaggtctgggttttagctgtggaagatgctttgtcttaaaggttggtgagtgtgtggacctggtttttagtttcccatctcctttatatctttaacatgacgcctttttcttcgtttcccgtggtttggtaagctctaaaacagcgggcgtttttgtctcttttcctttcaacttctcacctcttcccaattttccactcttaatctttgtaatttcttcgttgctgttttcgctacttactttctctaactatggcgcttcatttttttcatgtctagattcaaagtgctttgcttgtaaacgctaaatgcatctccttggtttgttttctggctcaattccctgatcttttgcatgcatctttgcattttaacttggaaacccatcaaacatgttctaagatctatatgcttttcagctgttttattttcacccaatttggagctcctttttagttaatttttttgtttgaaagttgattttgaaggcatcattcaagtgtataggttattggaagtgaatgcatggatcgaaaggatgccatgcattatcaaggtctgcatcttactatatgcaacaaagaggaataac

SEQ ID NO: 1642 - DNA, 560 bp, Gossypium hirsutum
  Clone ID: GOSHI-09MAY01-C3650_4
tcgattggcaaagaacaagaaaccggaaggtcaagaatgtctaaatgactcggacaatcagagtgtcgacaatctagtatctccgtccggcatttcaccaagtcaaaatctgattccaacttcaccagcaggtgtatggcctggttcaagaacaatggatatgcgtaacactcatgttgacatcgatctaatgcgcggttgactcgtttcctctaatagtttcacaagcaatgtacaaagtttgctgctacaggcagcctgattttcagcttgacggaatctcacttgattttactcgtcgacaagagcggtggtttggtccgatatttgtagctttgatagaccgaactcacgatttctactgatcccatcggtaccatttcatttctccaatttgaaccagttttaaattagacatgcttcagtcctctttataggcagccatggtttttagttatctttattttacttttcgacattattgacatttatgtaccccgatcttgtcggctttaagcctctacgaggcgttgagacaatatataaaagaaatgtctcct

SEQ ID NO: 1643 - DNA, 653 bp, Gossypium hirsutum
  Clone ID: GOSHI-09MAY01-C3650_3
cttgccagtcctgatggccgtgtcattgggggaggtgttggagggatgcttattgcagcaggccccgtgcaggtgattgtggggagttttatatggggtggatcgaaggcaaagaacaaaaaaggagggcaagaagggataaaagattcagatgatcagatggttgacaatctagtagctcctccaggcatatcaccaagtcaaaatatgactccaagtgcaccggcaggggtgtggcctgggtcgagatcaatggatatgcgtaacaatagccatgtcgacattgatctaatgcgcggatgatgactgtttcctggtaatagtttggggagaaatgtttatagtttggtgttgaagggccagcggattgtaatttgaaagtgttattgtgggaagtgttgagaaagggagggcggagcctgatttttggctttgatgatattctcacatccatatctactacccatgacaatgacagaatgggagttgctctgatatttgtagctttgatgaccagttagttaaatattttagtaggtcgtggtttcaactgatcctagacttgcatttcatttctcctgcttgaaccaaataagatatgcttctcttctctttgtagaccgccatggctttagtgttttgttttcctcagc

SEQ ID NO: 1644 - DNA, 618 bp, Gossypium hirsutum
  Clone ID: GOSHI-09MAY01-C3650_2
ggcggccgccgggtactggaaggaagcaacagttatcttcccttggtgaattgctttctggttctgctgggatgggttttactccgcatgtcatcacccattgcaataggaagaagacattgcaacaaaaattaatgtcattttcacagcaaggaccaagagaggtatgcattttgtcagccaatggtgccgtctctaccgtaactcttcgaaagccgtcatcgtcgggtggcactgttacgtacgagggacgatttgagatattatgtctgtcaggctcgtacctgctgacaagcaatactggctctcgcaatcgaactggtggtcttagtgtttctcttgccagtcctgatggccgtgtcattgggggaggtgttggagggatgcttattgcagcaagccccgtgcaggtattgagatcccagtctagctgtctattttttcaactaaaaattaagttagcctgcttcattgcaagtttgaaaaagcaggaagccatcatagtaataccatttcaaagtttaaatcatttaaacttaccatatgctttactgggaatttaattatatatcatgagcaggtgattgtggggagttttatatggggtggatcgaaggc

SEQ ID NO: 1645 - DNA, 1907 bp, Gossypium hirsutum
  Clone ID: GOSHI-09MAY01-C3650_1
ggaggaaaaataaaggagcaaaagtccaaccatttctgctttgtttctcttagttcttcttttcaacttagtttgactttattttatggcattggcttcaacttttgtctgcttctttctttatttttattattttttacataattatgttagtgcgcaaatcgctttctttgggttgtgatttttgaagtgttaaggtctgggttttagctgtggaagcatgctttgtcttaaaggttggtgagtgcgtggacctgacttttagtttcccctctactttatatctttaacatgacgcctttttctttgtttcccgaggttcggttagctctaacacagcttgctatttcttctttttcctttcaacttctcacctcttcccaatttccactctgatttttcgcctttcttcgttgctgccctcgcgtccgactttctctaactatggcgctccattgccttcatgcctagatccaaagtgctctgcttgtctacgctgaacgcctccccttgtgtataggttattggaggtggatgcatggatcgaggggatgccatggcattatcagggtctgcatcttactatatgcaacaaagaggaataaccgggtcagggtccgaacccgagtctgggatacacggatctccaggcattcatccgttctctagtccaaatgtacaataccaatcaagtattccagtcactactgtgggatcaaccttagctatggagtctccatcaggaatcgcccctcatagtgtcaatgtaggcacaccttcagcacagccatctagtgagacagtgaaacggaaaagaggaaggccacgaaagtatggtcctgatgggactgtttcgttggcgctgactcctgcatcagctcctcatcccgtgaccacaacgccgggccaaaaacgaggaagagggcggccaccgggtaccggaaggaagcaacagttagcttcccttggtgactggctgtccggttcagctgggatgggttttactccacacgtcatcaccgttgcagtaggagaagacattgcaacaaagataatgtcattttcacagcaagggcctagagcagtatgcattttgtcagccaacggggctgtctctactgtaactcttcttcagccatcatcttcgggtggcactgttacatatgaggggcgattcgagatattatgtctatcaggctcttacctgctgatcagcaacaatggctcttgcagccgaagtggtgctcttagtgtttcccttgccactcctgatggccgcgtcattggtggaggtgtcggagggatgcttattgcagcaagcccagttcaggtgattgtcggaagttttcaatggggtggtccaaaggcaaagaacaagaaaccggaaggtcaagaatgtctaaatgactcggataatcagagtgtcgacaatctagtatctccgtctggcatttcaccgagtcaaaatctgattccaccttcaccagcaggtgtatggcctggttcacgaacaatggatatgcgtaacactcatgttgacatcgatctaatgcgcggttgactcgtttcctctaatagtttcacaagcaatgtacaaagtttgctgctacaggcagcctgattttcagcttgattttactcgtcgacaagtgcggcggtttggtccgatatttgtagctttgatagacagttagaactcacgatttctactgatcccatcggtaccatttcatttctcccatttgaaccagttttaagttagacatgcttcagtcctctttataggcagccatggtttttagttatctctattttatttttcgacattattgacatttatgtaccacgatcttgtcggctttaagcctctacgaggcgttacaatatataaaagaaatgttctccac

SEQ ID NO: 1646 - DNA, 425 bp, Gossypium hirsutum
  Clone ID: uC-gsflnu33B055b04b1
tatattgttgattctggcatgggttcgtgaggctttagtgattaattgacttgcgcgagcggagagtctgccgtctagtatctccgcccggcatggaaccacgtcaaaatctgagtccagcttcaccagcaggtgtacagcctgggtcaagaacaatgggtatgcggcacactcatgtgtgacattgatcctaagcgcgggtgactcgtttcctctaataggttcacaagcaatgtacaaagtttgctgctacaggcagcctgattttcagcttgacggaatctcacttgattttactcgtcgacaagagcggtggtttggtccgatattttgtagcttttgataagaccgaaactcaacgattttctacctgtatcccattcgggtacccattttaatttcttccaattttgaaccacctttta

SEQ ID NO: 1647 - DNA, 404 bp, Gossypium hirsutum
  Clone ID: LIB3272-002-P1-K1-G4
gaagtgttaaggtctgggttttagctgtggaagatgctttgtcttaaaggttattggaggtgaatgcatggatcgaagggatgccatggcattatcagggtctgcatcttactatatgcaacaaagaggaataaccgggtcagggtccgaaccggagtctgggatacacggatctccaggcattcatccgttctctagtccaaatgtacaataccaatcaagtattccagtcactactgtgggatcaaccttagctatggagtctccatcaggaattgcccctcatagtgtcaatgtaggcacaccttcagcacagccatctagtgagacagtgaaacggaaaagaggcaggccccgaaagtacggtcctgatgggactgtttcgttggcgctgactcctgcat

SEQ ID NO: 1648 - DNA, 659 bp, Gossypium hirsutum
  Clone ID: GOSHI-09MAY01-C3670_1
gtaaaagtagagttatagagagagagagagtccctcttttctctctcttttcccttctttttgatcccaagaaacactttccatacacagggaaactgctgttttcttctttcagagagagagagaaagagttgccaccatgtctcttggctatgcagagaagctctcattcatagaagatgtgggtcaagttggaatgactgagttctttgactctgctcatgttttacaagataaaattgaacaacttgcaaaattgatagaaaagagtagacatctagtggtgtttacaggtgcaggaatatcaacttcttgtggcatacctgattttcgaggccccaaaggaatatggacattgcagcgtgaaggtaagcccttgcctgaagcatccctaccttttcaccgtgcaatgccaagcatgacccatatggctctggttggattggagaaggctggcattttgaagtttgttattagtcagaatgttgatggtctccatcttcgatctggaataccaagggagaagcttgccgagctgcatgggaactcgtttatggaaacttgtccctcatgtggtgctgagtattaccgagattttgagttggaaactattggattgaaggagacatcacgacgttgtctgatgagaaatgtggagc

SEQ ID NO: 1649 - DNA, 577 bp, Gossypium hirsutum
  Clone ID: LIB3543-039-Q1-K1-H4
ccccgcgtccgcacattcactgctgctctatgaatgccagtaacgctgaaagaactaacgaaacccatcttaagaataaagataatctattgttttctggtccagtttgagagaaagggtctttgttgttttagggttttttttagatggacgagaatttgcttgataatatcatggggaggctgctagggacgaagaatgggaggagtacaaagcaagttcagttgacggaggctgagataaagcagctttgtgctgcctccaaagatgctttcttagtcagcctaatcttctcgagcttgaagcccctatcaagatttgtggagatgttcacggtcaattttctgatcttctacgcttgtttgagtacggaggatatccgcctacagcaaactatttattcctaggtgactatgttgatcgtggcaagcagagcattgaaacaatttgccttctcctagcatacaaaatcaaatacaaagagaatttttttctccttagaggcaaccatgaatgtgcatcaattaaccgtatatatggtttctatgatgagtgcaaaagaagtttaatgttcgtg

SEQ ID NO: 1650 - DNA, 393 bp, Gossypium hirsutum
  Clone ID: LIB3583-053-P1-K6-C1
ccccgcgtccggccttctctaattgaattatctttcattcactaccacattaacttgatcttcatcaaacgagcttggagatgttcacggtcaattttctgatcttctacgcttgtttgagtacggaggatatccgcctacagcaaactatttattcctaggtgactatgttgatcgtggcaaggcagagcattgaaacaatttgccttctcctagcatacaaaatcaaatacaaagagaatttttttctccttagaggcaaccatgaatgtgcatcaattaaccgtatatatggtttctatgatgagtgcaaaagaaggtttaatgttcgtgtctggaagttgtttacagaatgctttaattgcctccctgttgctgctctaattgatgaga

SEQ ID NO: 1651 - DNA, 859 bp, Gossypium hirsutum
  Clone ID: GOSHI-09MAY01-C3620_1
gtaaaactcatgatttgagaatttgaataaaaacaaaaaccgatatacaaagagagttcatcatatatcgttaatggaagacgagaaagccagaagcaagttcaaaaggttgtgtgttttctgtggcagcaactctggacatagacaagtcttcagcgatgctgctcttgaattgggcaatgtcctcgcgtccgggaagctagacttggtgtatggtgggggaagtgttgggttgatgggtttgatatcccagacagtgtatgatggaggctgtcatgctcttgggataattccaaaagctctcatgcctcttgagatatcaggagaaacagttggggaagtaagaaccgttttagacatgcatgagcgcaaagctgcaatggcccgagaatccgatgcctttgttgctcttcctggtggatatggaactatggaagagttgttggagatgataacatggtcccagcttggaatacataagaaaactgttggtttgctaaatgttgatggttactacaataatttgcttgctttatttgacaacggggttaaagagggatttatcaagccaagtgctaggcatataattgtctctgctccaacggccaatgaactcttggagaagatggagcaatacacaccttcccatgaacatgtggctcctcatgaaagctggcagatggagcaacttggtgattatcccaatcaactaaatgcgcaatgaagctttgttggtaggtttctacctctttgattcctgatgtgattcataatcatagacaactctctttggatgggccacatgttggtcgtttaccagtgtacttttatcaccataaaaaagggatttgatcctact

SEQ ID NO: 1652 - DNA, 498 bp, Gossypium hirsutum
  unsure (1)..(498): unsure at all n locations
  Clone ID: LIB3583-053-P1-K6-B10
gngnaagccagtagcaagttcaaaggagtatgtgttttctgtggaagcaactctggccgtagaaaagtcttcagtgatgctgctcttgaattgggcaatgaactggtaaagaggaagatagacttggtgtatggtggcggaagtgttgggttgatgggtttgatatcccagacagtgtatgatggaggttgtcatgttcttggataagtaaacaacttgcctggtttttgatttttgaacaagcttattttaatgttttttctctgcagaaaactgttacaagttgcaagcacaagtagcttccttcttgtttgcaatttgtttgttactaagtaaattaatcgttctttacatgcaggataattccaaaagctctcatgccttttgagatatcaggagaaacggttggagaagtgagaactgttttagacatgcatgagcgcaaggctgaaatggcccgagaagcggatgcctntattgctctttcctggggatatg

SEQ ID NO: 1653 - DNA, 545 bp, Gossypium hirsutum
  Clone ID: GOSHI-09MAY01-C3140_1
ttctcgcgtccgggcattcggtttttctccttctcagccttcaaataaaggatggagaggaacatatccctggtttccctgttatgcttcattattttcaatgggtgtttggtgttggaggcggatgctgtgaaaagccaacgcagcgaaaagctcaagctgattcacaggcattcacctgagctagggcacaatcctggaacgacccttggacccccaaaaaattcagaggaacgattaaaacagctggtgcagagcgacaaggctagacttcatgccattaaacggaggctaggcgtagtggggaaggcgaacgatagggtggagttcccattccgatcggcggcagatttgggattcgggcaatactttgtttccttgaggatggggacccctgcccacacctttactctgctggtggatacgggtagctgtcttacatggcttaaatgcaaatatacgtgcattgattgttccgcagcgtggtatggcagaaggtttttttccgctaatgaatcaagcagctttaagagcattccatgtta

SEQ ID NO: 1654 - DNA, 965 bp, Gossypium hirsutum
  Clone ID: GOSHI-09MAY01-C3130_4
gaatccgggtcgacgccacccatccacgctttcgagggtaccagataacatgcgaatgtgtgcaccatactctcatcatataccatggatatccgcgatggggtcaatatcaaagtgaaagctaaaatgatcgagggtgaacgtcccaggggtaagctcactcgtaacttcaagcacctcaacctctatttccacctcaccaaggacgaggagaccggcacgcgtaagctcacgatcgaggcctggttcggtaccaggaagaccagcgctgccatccgtaccgtcctcagccacatggagaatctcatcaccggcgtcaccaaaggttaccggtacaagttgacgttcgtctacgctcacttgccgatcggcgcctccatcactagcggcaacaagtccatcgagatccggaacttccttggcgagaagaaggtccgtaaggtggatatgttggaaggtgtttccattgttcgatccgagaaggttaaggatgagattgttttggatggtaatgacatcgaacttgtatcccgatctgcagctttgataaaccagaaatgccatgtgaagaacaaggatattagaaagttccttgatggtatctatgttagtgagaagggaagggtcgccgaagaagaatgattactatctccctgaatcatagttatagtgctgctttatttttttgtcgtggtaatatcttgggactccgttttttgtctcgtctttcctgtttccctggattgcaactgttacagagtacaaggatgttatctttatttgtttggagaattttggatatctggttaatctttagtactctaattattcccccattttaggctgtgtgttgatttatagaactgttccttaatgaatctcatttttctgcaatttgcttacgtgctgagtatgttactggaaatccggacttggatattttgaagtttaatcagtaagttgat

SEQ ID NO: 1655 - DNA, 800 bp, Gossypium hirsutum
  Clone ID: GOSHI-09MAY01-C3130_3
cccacgcgcccccccgtccctccatcgaagccgccccgagaaaggaagcagagggcaagtaaaatgaagaccattctttcttcagagacaatggacatccctgatggggttgctattaaggtgaaggccaagatgatcgaggttgaaggtcccaggggtaagctcatccgtaacttcaagcacctcaacctcgattttcacctcatcaaggacgaggagagcggcaagcgcaagctcaggatcgaggcttggtttggctccagaaagactagcgccgccatccgtactgctctcagccacgttgagaatctcatcaccggcgtcaccaagggttaccgttacaagatgaggtttgtttatgctcattttccgatcaacgcctccatcactaacggcaacaagtccatcgagatccgtaatttccttggcgagaagaaggtgcgaaaggtggatatgttggaaggggtatccattgttcgatcagagaaggttaaagacgagatcgtgttggatggtaacgatatcgaacttgtgtcacgctcggcagctttgataaaccagaaatgccatgtgaagaacaaggatattagaaagttccttgatggtatctatgttagcgagaagggcaggatcgctgaacaagaatgattggtacgggatctcttggttcatagcgttataatgctctgctttggttttcagactttagattataaggatgttatcttatatttgtttcatctttatggtttgcgacattgagctcctttcatcaatgacttggaatgcaatttttcggc

SEQ ID NO: 1656 - DNA, 971 bp, Gossypium hirsutum
  Clone ID: GOSHI-09MAY01-C3130_2
agtgagtgtaattttcttcctttctgccaaggctgccgcttgggagacaggatgaagaccattctttcttccgagacgatggacatccccgatgggattagcatcaaaataaaagccaaggttatcgaagttgagggtcccaggggtaagctcatccgcgacttcaagcacctcaacctcgacttccatctcattaaggacgaggagaccggcaagcgtaagctcaggcttgaggcttggttcggctccaggaagactagcgccgccatccgcaccgctctcagccacgtcgagaacctcatcaccggcgtcaccaagggataccgttacaaaatgaggttcgtctatgctcactttcccatcaacgcctccatcactaatgccaacaagtccatcgagatccgtaatttccttggcgagaagaaggtgcgtaaggtggatatgttggaaggggtttccatagttcgatctgagaaggtgaaggatgagattgttttggatggtaatgatattgaacttgtgtcacgatcagcagctttaataaatcagaaatgccatgtgaagaacaaggatattagaaagttccttgatggtatctatgttagtgagaagggaagaatcgctgaagaggaatgaatgatgggattttctcttgagacatagttgtagttctgctttattgagaacttggtttttgttttgattgaattcaactgcagagtacaaggatgttatctttatttattcttgagaaaattttgaatcttttgtttgaattttgtacttcaactatgtcttgatgcatttttaagcgttgtgttttccgtgtgctggttttgagaaacttccttatgccatgtttatcggtgtcggaaatatgtgaactcataatagatgaactcagtggcagagccgagtatagaattaaattatatatttttacgatagtaaaaatgtaattttatcctttt

SEQ ID NO: 1657 - DNA, 1011 bp, Gossypium hirsutum
  Clone ID: GOSHI-09MAY01-C3130_1
cggaccgggattcgattctccctcccctgaagccgcctaaaagagagccgggaaaggaagctagaagagcaaagcgaaaatgaagaccatactttcctccgagacaatggacatccccgatggggttagcattaaggtcaaggctaaggtgatcgaggttgaaggtcccaggggtaagcttacccgcaacttcaagcacctcaacctcgatttccatctcatcaaggacgaggagaccggcaagcgtaagctcaggatcgaggcttggtttggctccaggaagaccagcgccgccatccgtacagctcttagccacgttgagaacctcatcaccggtgtcaccaaaggataccgttacaagatgaggttcgtctacgctcactttccgatcaacgcctccatcactaacggcaacaagtccatcgagatccgtaacttccttggcgagaagaaggtgcgtaaggtggatatgttggaaggggtttccattgttcgatccgagaaggttaaggatgagatcgttttggatggtaatgatattgaactcgtgtctcgctcagcagctttgataaaccagaaatgtcatgtgaagaacaaggatattagaaagtttcttgacggtatctatgttagcgaaaagggcaggatcgccgaagaggaatgattgttatctcaagtcatagttatgggtgccatgttatttttctgtcatagtaatttctttggtaccatggttttttgttgttttacctctttatttggattacagctgctgagtagaaggatgtttatctttatttgttgttttagaaaattttgacttgctgtttgatctttagtactaaatgaaatgggtgaagtttacaattcaaaaaaaacaaacacaaaaaaaaaaaaaaaaaaaaaaaaaaaaaaaaaaaaaaaaaaaaaaaaaaaaaaaaaaaaaaaaaaaaaaaaaaaaaaaaaaaaaaataaaaaaataaaaattttttaaaaaaaaggggcggccct

SEQ ID NO: 1658 - DNA, 1881 bp, Gossypium hirsutum
  Clone ID: GOSHI-09MAY01-C3120_1
cccacgcgtccgcccacgccgccaaatttctcgcatctttgtttgttcataaaataatagtatagttttcttagaaaagccagagtgaaagaaaaaaaaaagaagtaaaagaaaaatggctttggcaagcttggtgagaagaaaggcataccttttgtctagaaacctgtcgaattcgcccgcagatgcgttgaaatactctttttcactcagcaatttctcgaggggtttcgcttcaggatctgaagagaacgacgtcgtcgtcatcggcggcggacccggcggctacgtggcagctatcaaggctgcacagctaggtctcaaaacaacctgtatcgagaagcgtggtaccctcggtggtacttgccttaacgttggttgcatcccatctaaggcgcttcttcattcatcccacatgtaccatgaagctacgcattcatttgctggccatggtgtgaaattctcctctgttgagattgatttgcctgccatgatggcccaaaaggacaaagctgtttctaatcttacccgtggtatcgaaggtctgttcaagaagaacaaggtaaactatgtcaagggctatggcaaattcatttctccctctgaagtttctgtagacactattgaaggtgtgagtactgtcgtaaaaggcaagaatatcataattgctactggttccgatgtcaaatctttacctggtatcaccattgatgagaagaggattgtgtcatcgactggagctttagctttgcaagaagtccctaagaaactcatagtcattggggcagggtacatagggcttgagatgggttcagtttggggccgattggggtcagaagttactgttgttgagtttgccccagatattgttccatcaatggatgcagaaatccgcaagcaattccaacgttcactcgagaagcagaagatgaaattcatgctcaaaactaaggtggtaggtgttgatactagtggaaatggtgtgaagttgacggttgaacccgctgctggtggtgatcagaccacacttgaagccgatgttgttctcgtctctgctggtagatctccattcactgccggacttggcttggacaagataggagtggaaactgataagataggacggattttagtcaatgacagattcgctacaaatgtggccggtgtttatgccattggagatgtaattccagggcctatgctagcccacaaagcagaagaagatggtgttgcttgtgtcgagtttatagctggtaagcatggtcatgttgattatgacaaggtccctggagttgtctacactcatcctgaggttgcatctgtcgggaagaccgaggagcaggttaaggcacttggtgtcgattaccgtgttgggaagttccctttcttggcaaatagccgagccaaggctattgatgatgctgaaggaatagtcaagatattggctgacaaggagacagacaaaattcttggagtccatattatggcaccaaatgcgggagagctcatccatgaagcagtccttgccattaattatgatgcatcaagtgaggacatcgctcgagtgtgccatgcacatcctacaatgagtgaggcattgaaggaagctgcaatggccacctatgacaagccaattcacatctagaaatatggatttttacatgttattcttcattttgatttatgtttgaaaattttcgagattgactcggcagcagtcagcacaaactgttcattttcttgtttgtccttactcgaaacagatggcgtgcttgaatagacatttgccattcatcgtttacattttcccaatggcatataataactcagcatgttcattcctctgtttgaatcatggatatgcaattaataccttgaagc

SEQ ID NO: 1659 - DNA, 460 bp, Gossypium hirsutum
  Clone ID: uC-gsflnu33B011a11b1
ttcacgcgtccggacgttcactcgagaagccagagaatgaaattaatgctcaaaactaaggtggtaggtgttgatactagtggaaatgatgtgaagttgactgttgaacccgctgctggtggtgatcagaccacacttgaagccgatgttgttctcgtctctgctggtagatctccattcactgccggacttggcttggacaagataggagtggaaactgataagataggacggattttagtcaatgacagattcgctacaaatgtggcccggtgtttatgccattggagatgtaattccagggcctatgctagcccacaaagcagaagaagatggtgttgcttgtgtcgagtttatagctggtaagcatggtcatgttgattatgacacggccacttgagttggatacacttatcctgatgttgctctatgctaggacatgtgtggacgtttgggtggc

SEQ ID NO: 1660 - DNA, 386 bp, Gossypium hirsutum
  Clone ID: uC-gsflnu33B057g01b1
tctttccaaactcggaagcgcgaggttgttcctggggggttgtttgtaaatctccatggactgccggacttggctgggacaagataggaggggaaactgataagataggacggattttagtcaatgacagatttgctacaaatgtggccggagtttatgccatgggagatgtaattccagggcctatgctagcccacaaagcagaagaagatggtggttagtgtgtctagtttatagctggtaagtatggccatgttgattatgactaaggcaattggggttgaggtacactaaatcccggaggtggtatatgaccgggaagaccgaggagcatggttaagggcacttggtgttgattacccgtggagggaagatcccttttttgg

SEQ ID NO: 1661 - DNA, 1680 bp, Gossypium hirsutum
  Clone ID: GOSHI-09MAY01-C3090_1
cccacgcgtccgcccacgcgtccgtagagaagtaacattactaatttgataattgcaatcgcacaagagctgtatacatgcattccgtggaatgacattgttatgtgattggacaaactttttgaaatgtcaatttggtagtttgtttacatgcttatgtgtgctgtagctccatctgcttggtcattgccctgattttgattttcttcatcaattagctttggccacttaagattctttgactaacaactttagtcatttggaggttgcttatccatcaattttcacaactagttttaacctgtcagaggctatggtttaatcgaatgagccattttttctgagtctagcattgattcttcattcttccaatcatttctaggatgccacttaattgcctattttgtgactgggttttagctatgtttgagaaccttggattgatggtcacagtaatacatgacttgaaacgcatactttttggcaaagataacagtttgctgcctctggtgccatcttgaaattctctaggtagaagtgaagcaggaataataatggattgggaggaattttgaaagggacttggttgtttttatctagttattcggatgtaaattgacatctattatgcaatctttcatggcatttgcgagtgttgaatcttcttcacaagttggggttgggaggttactcaaatggaagtttactgtttgtctgacattctgggaaatctacccttgtgacttcccccagttccgctattgcattggagggttttctggggttttagtggtagcgcagcattcccagattgagcttaccggaaatttgatgagtacttgcaagcagatggtttgatttgtcttattttattgctggttggaaataattgcattcttcctctgatgaaaagctcctcaagtttcaccggattgatcctggttgctggacttgttgggtgaaagctgttctctggttggacctgctctctttgggttttctgctctgtctgctgtccattcatggttttcattttcttggtgtaggactggtgtaccacctgttcagaggagggctaagaatggaggttttgcagcaaagccacgccagcaccagccgcaacggcaacaagaagggaatgtagttacaaagcaaaggcctcatacactggattcgttgtttgccaatatgaaaaaagagcgaatgaatggtcctgcacaacgtaacggcagcagtcgacaaagaatgccatggagaagaggccgatttggcaactgatggtgttgtgagacgtagtattcccctctgctgctggacaagctgttcagcttcttctatctcgtcttttttgggcatgatagatgcttgtttttcttactttcgccatgaaaataaactcgcttatgcgaacattttacgtgagaaagtgacagttcagttgtatagtgattttccttagttttcaattggctcgtggactgtaccccttgagaattgatacaaatagggttgttcattttgttagttctgttaaatttttaaccgatattattgagcttgtagtgcgcaaaggttcggtaataccggtcattttcagttcaaaatatagtcgatattccggaaagttttatttccacaaattacaaaaaacaaaaaccaaataattaaaaatatggacgg

SEQ ID NO: 1662 - DNA, 460 bp, Gossypium hirsutum
  Clone ID: LIB3583-040-P1-K1-C11
gccatttcttgcttcctccgactccggcattcctccttttcatccaaggtgaggtgaatattttcgtttcactgacagaacctaaaatacgaaagccagaagccgcttcaacattttcatatttggatttctaaggttgtatcccaaatcctgctaagaaaaatggagaacgcgacagcggataaggtgaaggaacaacataggaaagtaatggtagcgaacaagccacttaagattctttgactaacaactttagtcatttggaggttgcttatccatcaattttcacaactagttttaacctgtcagaggctatggtttaatcgaatgagccattttttccgagtctagcattgattcttcattcttccaatcatttctaggatgccacttaattgcctattttgtgactgggttttagctatgtttgagaaccttggattgatggtcacagtaatac

SEQ ID NO: 1663 - DNA, 344 bp, Gossypium hirsutum
  Clone ID: uC-gsflnu33B131a11b1
ttttagctattccatcctcctgttccgattttgcttttcccattgtctaatttttgccctcagttttatcttctgcttctgtaactttttttctaaccatctttacgtttccctttttttccattgattgcacaggagacctagatatttcaggactggagtaccacctgttcagaggaggctaagaatggaggctctgcagcaaagccacgccagcaccagccgcaacagcaacaagaagggaatgtcgttacaaagcaaaggccctggactggatttcgtgctcgccaagatgaaaaaagatagcatgaatggtcctgcacaatgtaacggcagcagtcgac

SEQ ID NO: 1664 - DNA, 601 bp, Gossypium hirsutum
  Clone ID: GOSHI-09MAY01-C3080_3
gcaggtttgtcttaacatttgcattaggagctggtcctgttccaagtctcttattaccagaaattttccctagtcgaatcagggcaaaagctatggcaatttgtatgtcagtacactgggtaatcaatttcttcgttggcttgctcttcctgcgtttgctcgagcaacttggaccgcaactcttatactcgatgttcgcaagcgtttgtatgatggctgtagtctttgttaaaaagaacgtaatcgagaccaaagggaagtctcttcaagaaatcgaggttgctcttctcccacaggaataagcaggtatatttttcttccaaaaattttctttgcaattcaatagtgtcgagcaaccaaagaacaaccatccaacatgaaaagaaaaaaaaaatcgtatatgcatgcacacacaccaagcataagcatatcacggtgccacacggtcatactagatcaaagttgtaagcccgtgacgtatatgtacacttattgtaaagccagtactttgggaatcctaagattttgctctttaagattagatttctaaaatctattctttcagttgaacctaactgtttggaatctgagttctcgaatt

SEQ ID NO: 1665 - DNA, 962 bp, Gossypium hirsutum
  Clone ID: GOSHI-09MAY01-C3080_1
attggttatacaagcaaggaagaattcccacgcgtccgctgaagctgaagctgagtttgagaggcttttaggtggatcacatgtcagatatgccatggtggaattagccaaattggacaggggggatgacgcagacaccgtgaaactctctgagttgctctgtggccgccattttagagttgtttatattgggtcaactctgtttgctttacaacagctatctggtataaatgccgtgttttatttctcttcgtcggtatttaaaagtgctggagtaccatcggatgttgcaaatgcattgataggagtagcaaatttaacaggatctatcgtcgccatgcttttaatggataaacttggaaggaagctgcttcttctgtggagcttctttggcatggctatgtcaatgctcctccaagttgctgcggcaaattctttcgtgtcaggctctgcatctttatacctatcagttggtggcatgctaatgttcgtcttaacatttgcactgggagctggtcctgttccaggtctcctcctacctgaaattttccctaatcgaatccgggcaaaagctatggcgttctgtatgtcagtgcactgggtaatcaatttcttcgttggtttgctcttcctgcgcttgctcgagcaactcggtccgcagctcttatactcgatgttcgccagcgtttgcatgatggctgtggtctttgttaaaaagaacgtaatcgagaccaaagggaagtctcttcaagaaatcgagattgctcttctcccaccagaatagagttgatcaaacataaatttgaagagcagatattttgatctcatgcaaccaactttaggtatacatgggagtgtttgacatattagatgaaatttgaagtttgttgtatatccatatttggtccttaattcattcgggctaatatgaaatgatatattagatgggctctctatttcct

SEQ ID NO: 1666 - DNA, 554 bp, Gossypium hirsutum
  Clone ID: LIB3584-015-P1-K1-H6
ccggaatgaccgacgcgtcccacgcgaaaagtgcgggagtgcctgcagatgttgcgaatgcgttcattggagttgctaatttatcaggatctatcatcgcgatgcttttaatggataaacttggaaggaaaatgctccttttgtggagcttctttggcatggtaaatagtagtttcactaattttctcatggaaagtatatcattcataacaaggaatttggaagaatggttttaaaatacactgttgttctatgttacctgacgggggtgaatgtaagatgggatatgtgtccgacatgtgtatgttaaatattttcaaagtttttccttaagtgtggaagatcatatctctatacttgtcactcttgcctgaatatgtatcagacattagtactttaagaaattgaaaactccagataacataactattgataccgtgttaagcatggctccgcataatgaaatttattttagaaattgggctttaatttgttctacatttgatttactcaggctatatcaatgctcgtccaagttgctgctgcaaatactt

SEQ ID NO: 1667 - DNA, 529 bp, Gossypium hirsutum
  unsure (1)..(529): unsure at all n locations
  Clone ID: LIB3828-025-Q6-N6-B1
gatctgcatatataaattcatttgatcaagtcagaaggaattatctacactcacatgtactgacatcgtcacactcacatgtnnactgacacgtgtgggtgggttttattggggttattannttcttagcttctataggagggggggaggaaaattgaattgcaaaaaataaatttgggagataatgtaccaactctattctggtgggagaagagcaatctctatttcttgaagtgattttcctttggtctccattacgttctttttaacaaagatcacagccattatgcaaacgctggcgaaaattgagtataagagctgtggaccgagttgctccagcaagcgcaggaagagcaaaccaacgaagaaattgattacccagtgcactgacatacagaacgccatagcttttgcccggattcgattagggaaaattttaggtaggaggagacctggaacaggaccagtttccagtgcaaatgttaagacgaacattagcatgccaccaactgataggtataaagatcca

SEQ ID NO: 1668 - DNA, 404 bp, Gossypium hirsutum
  unsure (1)..(404): unsure at all n locations
  Clone ID: uC-gsflmaxxa058c06b1
ctcttcctgcgcttgctggagcaactcggtccacagctcttatactcgattttcgccagcgtttgcatgatggctgtgatctttgttaaaaagaacgtaatggagaccaaaggaaaatcacttcaagaaatagagattgctcttctcccaccagaatagagttggtacattatctcccaaatttattttttgcaattcaattttttatcttacttttatagagctaagaataataaccaataaccaccacacgtgtcagtacatgtgagtgtgacgatgtcagtacatgtgagtgtagataattccttctgacttgatcaaatgaatttatatatgcagatcaaccttnnnnnanaaaaaannaaaanaaaaaaaanaaaaaaaaaaaaaaaaaaaaagggcgg

SEQ ID NO: 1669 - DNA, 646 bp, Gossypium hirsutum
  unsure (1)..(646): unsure at all n locations
  Clone ID: LIB3543-058-Q6-K6-B2
nganatagtaattatgccagtctaatattcatggcactcttcatatcaattgctgcaactggtattcttgagatgcagtggggtggcgttggaattgatgactggtggaggaatgagcagttctgggtgattggaggtgtatcatcacatctttttgccctctttcaaggtttactaaaggttctggctggggtcagtacaagcttcactgtaacctctaaagcagcagatgacggtgaattttccgagctttacctcttcaagtggacatccttgcttatccctcctaccacgttattggtcataaacattattggtgtcgtggtcggaatctcagatgccatcaataatgggtatgattcttggggcccattgtttgggcgactattcttcgccttctgggttattatccacctttaccccttcctcaagggtttgcttgggaaacaagacaggatgccaaccattattctggtatggtctattctgctggcctcaatcttgactcttatgtgggtacgaataaacccatttgtctcaaaagatggacctgtactagaggtttgcgggctgaattgtgatgactaggagattagagagaataaagaagcagcagcattggctctggagttataatctcatttgc

SEQ ID NO: 1670 - DNA, 539 bp, Gossypium hirsutum
  Clone ID: LIB3584-015-P1-K1-D6
gcgcccacgcgtccgcccacgcgtccgcccacgcgtccgacctcttcaagtggacatccttgctcatccctcctaccacgttattggtcataaacattattggtgtcgtggtcggaatctcagatgccatcaataatgggtatgattcttggggcccattgtttgggcgactattcttcgccttttgggttattatccacctttaccccttcctcaagggtttgcttgggaaacaagaccggatgccaaccattattctggtatggtctattctgctggcctcaatcttgactctcatgtgggtacgaataaacccatttgtgtcaaaagatggacctgtactagaggtttgcgggctgaattgtgatgactaggagattagagagaataaagaagcagcagcattggctctggagttataatctcatttgccatggtggttgagttgggagttgcttaagggatttgtggtatcctgagctgaatgcattgcttctttaggttatgttgcatggagtattcataatgggcaaagcagc

SEQ ID NO: 1671 - DNA, 867 bp, Gossypium hirsutum
  Clone ID: GOSHI-09MAY01-C3070_1
ctcgatttcgctgtctggattctgaatccttcatcgatacgacatggagtttccgtacatggaagctgttgttggttttatgatattaatgtacttatttgaaacttatctggacttacggcaacatgctgctctcaaattgccaactcttccaaaaacattggaaggagtaatcagccaagagaaatttgaaaagtctcgagcctatagcctcgataagagccacttccattttgttcatgagtttgtgacgatcctgatagattctgcaattttgttctttggtatattgccttggttttggaagaaatcaggaactttcttgcctttacttggtctaaatgaagagaatgaaatattgcacaccctttcatttttggctggtgttatgatatggtcacaaatcactgacctatccttttctctttattcaacttttgtaatcgaggcccgccatggtttcaatcaacaaacaatatggttattctttagggaccttatcaaaggaatatgtcttgctattgtacttggtccaccaattgtttctgctattattgtcatagtacagaatggaggtccatatctggctatctatctttgggcatttatgtttgtcctttctcttgtaatgatgacaatttaccctgttctgatagctccactttttaataagttcacccctcttcctgaaggagagctcagacttaagattgagaaacttgcttcctccctcaaatttcctttgaagaaactatttgttggtgatggatccacaagatcaagtcatagcaatgcctatatgtatggtttctttaagaacaagcgtattgtcctttatgacacattgattcagcagtgcaaaaatga

SEQ ID NO: 1672 - DNA, 398 bp, Gossypium hirsutum
  unsure (1)..(398): unsure at all n locations
  Clone ID: LIB3083-060-Q1-L1-E4
catttttggctggtgttatgatatggtcacaaatcactgacctaccgttttctctgtattcaacttttgtaatcgaggcccgccatggtttcaataaacaaacaatatggttattctttagggaccttatcaaaggaatatgtcttgctattgtacttggtccaccgattgtttctgctattattgtcatagtacagaatggaggtccatatctggctatctatctntgggcattaatgtttgtactttctcttgaaatgataacaattaaccctgttctgatagcttcaatttttaaataagtcaaccctttttcttaaagaaaacctaaacctaagaatgggaaacctggtttcttccttaaaatttcttttaaaaaactatttggtggtgaatga

SEQ ID NO: 1673 - DNA, 598 bp, Gossypium hirsutum
  Clone ID: GOSHI-09MAY01-C3060_1
cacatacgacagcctcggcttgttttacaagagcactgcaggtgagccatcacagtatactttacctgcaatatgggataagtgggccgtttcttcaagctttcaccagaggactgaaatgataaaagaattcaacagatttaataaatggaggaaacgagggatttcgcgtgtgccgatcgtgcaagaagtgattgtgaagccaactcgtgcgacagtaagcatcttaaatgatggatccattgttgttgaagttggagggattgagatgggccagggtctatggaccaaagccaaacaaacggctgcatatggtcttagtttgataaaatgtgatggcagtgaagagcttttggataaagtaagagtcattcaagccgatacattgagtttgattcaagggggtttcactggtggcagcacgacatcagaatcgagctgtgaagcagttaggctttgctgcaatgtcttggttgagagacttacagctcttaaggaaaagttggtggaacaaatgggatctcttcgatgggagacactgattcttcaggcatatgtcgcttctgtggacttatcggcaagtacactttttttaccg

SEQ ID NO: 1674 - DNA, 455 bp, Gossypium hirsutum
  Clone ID: GOSHI-09MAY01-C3010_17
cccacgcgtccgcccacgcgtccgccttgattctattccctttggtttcactgatcaaaatccccttctcataaattttctctcttgaagatttcatgcctacccacctttaatcttaaccaacggaagagacgcggcgtgcaatttgactgttccaatttccttttcaacgtacaattaaaaccctagcctcttccttttgcttctatcgggggagggggaagggaatcatgtctttcgatctcatatgctgaagccgtcctgcagcatctgctgttgaatctggaagtctatccgccatgccaactatttccttcactatcggagacaaagttttcgacctttaccctgaagagtatattctcaaggtgggtgaaggtcctcaagctcagtgcatcagtggctttactgctttggatgttcctccttctcgtggacccctctgattcactcat

SEQ ID NO: 1675 - DNA, 829 bp, Gossypium hirsutum
  Clone ID: GOSHI-09MAY01-C3010_16
cactgatcaaaatccccttctcataaattttctctcttaaagatttcatgcctacccatctttaatctcaaccaacggaagagacgcggcgtgcaatttgattgttccaatttccttttcaacgttcaattaaaaccccagcctcttccttttgcttctaccgggaggggggaagggaatcatgtctttcaatctcatatgctgaagccgtcctgcagctacttcggatcctcccaagatctgtacggctgaggaccaaaagaaaaaagatgatgaggatctgtcggagaaggatttggctttgaaacaacagttggagttatatgtagagagagttcaggattccgatcctaggttacagaaagtaggtcttgagagcatgaggcatgaaatccggacttcaacaagctctatgacttctgttccgaagccattgaagtttctccatcctcattatggaaccttaaaagctttttatgagacaatgccagaatccgatttgaaggagagtttgaagtagagattgttgggtttagaaggtgatattggttcgtggggtcatgagtatgtgagttccactttgtgttggtgctccgacttagggtttgtaaccagaagatcacctatgcgaatttatttttggaacttggctggagaaattgcacaagagtatgggaagcgacagagcgaagaggctgcaattgaagatctactggagcttgtgcaacagattgtttcatttcatatgaacgtataactttctctttgtcatatggagcttgtgcgacagattgtttcatttcgtagttctatagagttatgttaattg

SEQ ID NO: 1676 - DNA, 751 bp, Gossypium hirsutum
  Clone ID: GOSHI-09MAY01-C3010_15
atccttcttcccgcttctctatagttggcacctcatgcgggataacctgcaattgccttccagtaatttttctcactaacagcgtgaacttctctcggttttccaagcattgcttctccttgtctctgttggagccttttattttcacagctagacttatcttccctatagaattcaactttgtactcctctgcttccttcattatttgctccaacgttcttccttctctttctttcccttctcctccagtcgaatcacgttttgcctgcgccactctctcaaagcagagccttcttctggccccatctcagcaggcgtggtggcaagattggtccatccgatcctccgaactctccgttcaatcctttttcgttctgctccgatgagaaagcagagtttccaccaccgccactgtagctcggaggtgtttcaggtattgattgagatgagaagacatcatctccggtaccgtaggagaacatcggaggggaatcagctactgagtccttaaccgagtgggcgtcgaagggctgggacgcgggggtgccgggaaatatttgcgctcctgcactgtaggatttgtttttagaagaagtcaagaatattgtggttgcttttaatgaatggttaccatatatttgaattctcagctataccaaattatcgaccaaaactacttgggtccagatctgttttttaagttaccgacttatgaaaatcgattgaatgaaaatccatatttatttgtat

SEQ ID NO: 1677 - DNA, 704 bp, Gossypium hirsutum
  Clone ID: GOSHI-09MAY01-C3010_11
cccagcgtccgccccgcgtccgttaaaagattccacttctcttttgttcttgttctactccaaaaagaaatccctaaaacccaccataactcgaaagcaaccctaattacgatgtcggatcagaaaacgacgccggaacttctcaggcgaatgctccggcgaatgatccaaagaagaaagaggaccaaaagaagaaagatgatgaggatctgtcggaggaggatttggctttgaaacaacagttggagttatatgtagagagagttcaggattccgatcctgggttacagaaagtagctcttgagagcatgaggcatgaaatccggacttcaacaagctctatgacttctgttccgaagccattgaagtttctccgtcctcattatggaaccctaaaagctttttacgagacaatgccagaatctgatttaaagaaatacttggccgatatcctgtctgtgttggcactgaccatgtctgcagagggagagcgggagagtttgaagtacagattgttgggttcggaaggtgatattggttcgtggggtcatgagtatgtgaggaacttggctggagaaattgcacaagagtatgggaagcgacagagcgaagaggctgcaattgaagatctaatggagcttgtgcaacagattgtgtcatttcacatgaagcacaatgctgaacctgaagctgttgatctcttg

SEQ ID NO: 1678 - DNA, 1020 bp, Gossypium hirsutum
  Clone ID: GOSHI-09MAY01-C3010_8
cccacgcgtccgcccacgcgtccggcagcgttcccaagctcttatcgaaggaactagctgtctcaagtccctactaacagtttgctacttcgttcccattcgcattcccacttccacacactcatttcgatgaaagattgacaaacccacccgcaaattttcgattgtcgaagaatcgttgaataaaaaaaatgcatggttaggattcgacattttgtcgactactgcatcaaattgcttcagtcttaatttggtttccagttagactctgagatagaagagatggcagtgaaccagacggcggcgttgaaggtggggttgtgtctattgggcctctgcttattcggctacatagtgggtccacctctgtattggcatttcatggaaggattagtagccttcagccacacttccaacacttgcccaccttgcctttgcgattgctcttctcagcctcttctcacaatccctgaagcgtacaaacacggtcaagcgtattttgttggtgacaatgttaagaaccttaaactagaactggcaaagggtgcaaagctgaagtgcagcagatgtggactaaagggtgctgcacttggctgttatgtgaagtcttgccgcagaagctatcatttcccttgtgcaaaagagattccaaaatgtcgatgggactatgtggactttcttgtgctttgtcctgcccattcttcagtcaagtttccaagtgagaagtctagaaaggcccattctgcagccaagttcccaaatgagaagcctggaaactgtctatctgctgatgatagagtgccaactgaaagtggccagctgaaatccaacactttctggggccagccagagaataagaaagattgggttttctgtggatctgctttgtctcctgaggagaagtttcttctggtcaagtttgcaaaaatgattggtgtaactgtatccaagttttggaggccggatgtcactcatgtgattgcctctacagatgagaatggtgcatgcactaggacactt

SEQ ID NO: 1679 - DNA, 732 bp, Gossypium hirsutum
  Clone ID: GOSHI-09MAY01-C3010_7
caccgatcaaaatccccttctcataaattttctctcttgatggaagagacgcgatgtgcaatttgactgttccaatttccttttcaacgttcaattaaaaccctagcctcttccttttgcttctatcggggggggggggaaggaatcatgtctttcgatctcatatgctgaagccgtcctgcagctgctttggatcctcccaagatctgtacggctgaggaccaaaagaagaaagatgatgaggatttggtgagtggctgtttgggatttcaccctgctggttctctacaccgcaaatccatgctattcacgtctttgctcgcctttgcgattgctcttctcagcctcttctcacaatccctgaaggttaatagctttccagtattgggtttaaaaagctttataaatgcttgatgaatattttcctgcagttcagatacaagctagcacagatgagcaaatttctcaacttagagcggaggcagcagcgagggaggcagaggcagcagcgagggaggcggagtagaacagaaaatacaatgaactccagctacagcttcagtctatgatgactatgttccagcaacttcaaaatccgccatcttagacattttgtttcttgtaacttttaacactatcgtaagaatattttgaatattcatttacaatttatataatatatttttcgtatgaaaagaaaaaaaactactatgaacataaattaaaaaagaa

SEQ ID NO: 1680 - DNA, 622 bp, Gossypium hirsutum
  Clone ID: GOSHI-09MAY01-C3010_6
cccccccctccccccgttgctttcgccttaagcggtcacaatatttcgggtttgtaggttaatatgggaaccacggtcaaaggggttgtgctgtcgctgttcatctcgtcccttttgtgttctgtagtacttgcatccaatgatgggctggttagaattgggctgaaaaagatgaaattggatccaaacaaccggcttgctgcgcagcttgactcaaaggatagagaggctctcagagcatctattgctaaaaagtatcgcttccgtaatgatctaggagactctgaggaaactgatattgttgcactgaagaattacatggatgctcagtactatggtgagattggtatcggaactccaccgcaaaagttcactgtgatatttgacacaggaagctcaaatctgtgggtaccatcaactaagtgctatttctcggttgcatgtttcttccattccaagtacaagtcaagtgagtcaagtacttataagaagaatgggaaatctgcttctattcaatatggtactggagctatttctggtttctttagtaatgacagtgttaaagtcggcaacttggttgcgaaagatcaggaatttatagaggctactaaggagccaggtg

SEQ ID NO: 1681 - DNA, 606 bp, Gossypium hirsutum
  Clone ID: GOSHI-09MAY01-C3010_3
gcagaaccaattaaagcagaatcagactcaagacatcatattgaactacgtcaatcagctatgtgaccgtatgccgagtccgatgggagaatctgctgttgaatgtggaagtctatcgtccatgccaactgtttccttcactattggtgacgaagttttcgacctttcccctgaagagtatattctcaaggtgggtgaaggtcctcaagctcagtgcatcagtggctttactgctttggatgttcctcctcctcgtggacccctctggattttgggagatgttttcatgggccgctaccacaccgtgttcgatttcggtaaagagagagttggctttgccgaggcggcataaaaataccttatcatggaatggggtgacagttttcttcaaatgtacacccattactgtgttaggtataactttatataaagatggttggaaacatggagtcactagctctctcagcctccattacgtaaagatagtgttgtgttgcttgtaaatatttccgtcgttgctctattatgtttaaccatggctgaaagttggatttgctactttgttttataatcagtgatcaaagatacttattaatcagtttccat

SEQ ID NO: 1682 - DNA, 1396 bp, Gossypium hirsutum
  Clone ID: GOSHI-09MAY01-C3010_2
cgcgaatccgaatcatttcagcttttaccgtacacgccgaagcttttggatggtttaaattgaatggactatagatgctatatctgcagcctgtgaccaaccattaactatctgctccagatctgaggttcttctctgacaaaatattctaatataaggactgatactgtgaatgggattgacaatggagttgaataacctgaaggatgcatttgatcgtgtagcaaagaagcaaaagctggcctgctctaaagggccgggaggtatgggtcagatcgtgcaagaaaatcgagaaggccatagagatgatgcagtcgaccacccttggaccataaatctatacttgctggactgaacaaaaagttgcatgaaattgctccactcgctcagctagaaggcacacagaaggaactcaacattgcattgagcaagtatccaaaagctcttgagaaaacccttaatcctgatatatccaaggcttatcgaaatatcgagtttgattctcatacagttaaccaaataattgccagccatttctatcggcagggcatgtttgatgttggtgattgttttataactgaagctggggaagcagaagctgctgctgctgtgagatcgctttttcaagaaatgtatcaaatacttgaagccatgaagagtaggaacctagagcctgccctgaaatgggcagccacaaactccgataaactgaaagaaaatggttcagacctcctgttggggctccatcagttgcagtttgtgaaaatactacagaagggaagcagagaagaagcactcaagtatgcaagaactaacttcgttccttttgccggaaaccatatggccgagatccagaaactcatggggtgtctcttgtattccgatagacttagtgagtccccatatgctcatttattatcaccaaccaattgggatatagtggctgttgagctcactcgacagttctgcaactcactggggcagtcatatcagagcccattgagtgtgacaatagcagcaggtgtgcaaggtctaccaccacttttaaagtttatgacagttatggctgggaagaacaagaatggcaatcaatgaagcagttgcccgtgccagtggagttagataaagagttccaatttcattctatattcgtgtgtcccgtgtctaaggagcaatcgaccgaagataacccgccgatgctgatgtcgtgtggtcatgtgctctgcaaacaatccatcaacaagatgtcgaagaatggatcgaaaactttcaagtgcccgtactgcccatccgatgttgatgcgccccggtgcagacagctgaatttctgattaagtgttaccctaaaatgcaaatggggttgtattaaaaaaaaaaaaaaaaaattctgcggccg

SEQ ID NO: 1683 - DNA, 2319 bp, Gossypium hirsutum
  Clone ID: GOSHI-09MAY01-C3010_1
gttttcactagctagttatttgtttgacggtaaatgaggaatcaaattggttgagctgacgtgaggattaggatctagtatggagtttgaagaaattattgttattgaactttgtttcttcttagttgtaactagcttgaggatgaggatatagtatgaatttcgaagaaattatagttgttgaactttgtttcttcttagtgctaacaagctatatggcaggttaaaattgaaaagatatatatattttaaaatttttgtatgcaggaaactatataagctgaaaacaataaaatgtttaagatgttttgatgtttttataggatttttggaatttataacttgccaggttcgaagttatggcagatgggtgttgatattagcgtttcttcatcgtgcataagtggataagtgatatacctaattctttgcctttctgtttgttatctaacaccttgtttgttttcgtctaaagcggttaatatgggaatgtctatgaacgtggttgtgctgtcattgttcgtcttgtctattttgttttctgtcatgactgcatccgacgatgggttggttagaattgggctgaaaaagaagaaatttgatccaaacaaccgacttgcttcccggcttgagtccgaggatcaacaggctctcatagcatctatgcaagaaaagtatggcctccataataatcacggagaccatgaggaaactgatattgttgcactgaagaactacatggatgctcagtactatggtgagattggtgtcggaactccaccgcaaaagttcactgtgatatttgacactggcagctcaaatctgtgggtgccatcatctaagtgttatttttcggttgcatgctacttccattccaagtacaaggcaagtgagtcaagtacttataagaagaatgggaaatctgcttctattcagtatggcactggagctatttctggtttctttagttatgacaatgtccaagtcggcaacttggttgtggaagatcaggaatttattgagactactaaggagccaggtcttatatttttggcggccaagtttgatgggattttaggacttgggtttaaggagatttcagttggggatgctgtcccagtgtggtacaacatggtcaaacaaggtcttatcaaagaccaggtattttcattttggcttaatcgcaatgtaggagaagaaatgggtggtgaaattgtgtttggtggggttgatccaaaccactacaagggcaagcacacatacgttcctataacacaaaaaggctattggcagtttgacatgggtgatgttcttattggtgacaaaccaactggatattgtgctggtggttgtgcagcaattgcagattctggaacttccctgctggcaggtcctacgactgtgattaccatgataaaccaagcaattggagcctctggagtggctagccaggagtgcaaggcagtggttcaacagtatggacaaaccatcatcgatttacttgtatctcaggcagaacccatgaaaatctgctcccaaattggattgtgcgcttttgatggcagtcatggtgttagcatgggcattgagaatgtggtagatgagagcaacggcaaatcgtctggaattcttcatagtgctatgtgccctgcttgcgagatggcagttgtgtggatgcagaaccaactgattgagaatcagactcaagaccgcatattggactatgccaatcagctttgtgatcgggtgccaaacccaatgggagaatctactgtcgactgtggaagtctttcttccatgccaaccatttccttcactattggtggcaaagcttttgatcttacaccagaagagtacattctgaaggtgggtgaaggtgctgaagctcaatgcatcagtggctttactgctttggatgtccctcctcctcgtggacctctctggattttgggagatgccttcatgggtcgctaccacactgtgttcgattttggtaagcttagagttgggtttgcagaagcagcataaaggggacctgaggttttcaatggccataaactatatatgtgtatgatttaaatttataaagatccaacgaaagcccaaaaccttgaaaagaaatgatgctgtgttgcctgtaaatatttgcgttcctgcactgtaggatttggttttagaagaagtgaaaaatattgtgtttgcatttaatgaatggttactatatatttgaattctcaacttaacgatgcttcatactgagaaaattgacaaagctcgggattgatcctcctaagggagaactttgctatggtccttctg

SEQ ID NO: 1684 - DNA, 645 bp, Gossypium hirsutum
  unsure (1)..(645): unsure at all n locations
  Clone ID: LIB3830-001-Q1-K6-A7
cgtggttgtgctgtcattgttcgtcttgtctattttgttttctgtcatgactgcatccgacgatgggttggttagaattgggctgaaaaagagaaattgatccaaacaaccgacttgcttcccggcttgagtccgaggatcaacaggctctcatagcatctatgcaagaaaagttggcctccataataatcactgataccatgaggacacagatattgttngccttgaagaactacatggatgctcagtactacggtgagattggtgtaggaactccaccacaaaagttcactgtgatatttgacactggcagctcaaatttgtgggtgccatcatctaagtgttatttttcggttgcatgctacttccattccaagtacaaggcaagtgagtcaaaaacatataagaagaatgggaaacctgcatctattcagtatggcactggagctatttctggtttctttagttatgacaatgtccaagttggtaacttggttgtggaagatcaggaatttattgagactactaaggagccaggtcttatatttttggcggccaagtttgatgggattttaggacttgggtttaaggagatttcagttgggaaagctgttccagtgtggtacaacatgctcaaacagggtc

SEQ ID NO: 1685 - DNA, 486 bp, Gossypium hirsutum
  Clone ID: LIB3147-052-Q1-K1-D11
gcgtccgcccacgcgtccgcccacgcgtccgccgattgacaacacgttgtgctgacattaatttgctgggtgtgatgtaatgcaggacattctgaaagtgggtgaatgtgctgaagctcaatgcatcagtggctttactgctttggatgtccctcctcctcgtggacctctctggattttgggagatgccttcatgggtcgctaccacactgtgttcgattttggtaagcttaaagttgggtttgcagaatcagcataaatgggacctgatgttttcaatggccataaactatatatgtgtatgatttaaatttataaagatccaacgaaagcccaaaacctttaaaagaaatgatgctgtgttgcctgtaaatatttgcgttcctgcactgtaagattttggttttagaagaaatgaaaaatattgtgtttgcatttaatgaatggttactatattatttgattttcaactttccaaaaattata

SEQ ID NO: 1686 - DNA, 590 bp, Gossypium hirsutum
  Clone ID: LIB3582-006-P1-K1-B2
gatgaggatctggtaagtggctgttcgggatttagctttaactgtatcgatttttttaacacttggcttttttttaatgcagtcgggggaggatttggctttgaaacaacagttggagttatatgtagagagagttcaagattccgatcctgggttacagaaagtaggtcttgagaacatgagtatgtgaggtgagcattgtccaacttgataacatgctaatttactctactttttgtgaaaattttgtattagcaattcttcatcagctatatctggtcaaacttatgagtggttttagattgtgttaatgtttttgtgtttgtttgtatattggtttcaagttccactttgtgttggtgctccgacttaggattggtaaccagaagatcacctatgcgaatttacttcttctataaatcttctacttcaaatttgaagattgaagaacttatatttacaagattggtattggcatctcattctccttctatttttcacccttacattaaggtaaattttgttttggtttatgtggatgctcaaacctcaatgcttttgcgattctcatgagaaagttcattcaccta

SEQ ID NO: 1687 - DNA, 552 bp, Gossypium hirsutum
  Clone ID: LIB3582-020-P1-K1-E3
cccacgcgtccggctaaaaaccctgattctattccctttgttttcatcgatcaaaatccccttctcataaattttctctcttgatggaagagacgcgatgtgcaatttgactgttccaatttccttttcaatgttcaattaaaaccctagcctcttccttttgcttctattggggggggggaaggaatcatgtctttcgatctcatatgctgaagccgtcctgcagctgctttggatcctcccaagatctgtacggttgaggaccaaaagaagaaagatgatgacgatttggtgagtggccgttcgggatttcgccctcgctggttctctacaccgcaaatccatgctattcacgtctttgctcgcctttgcgattgctcttctcagcctcttctcacaatccctgaaggcctactttatattggatgaactcttgattgccggtgaacttctttatgtttgtccgaatttgactcaatccaaattataggttaatagctttccagtattgggtttaaaaagctttataaatgcttgatgaatattttcctg

SEQ ID NO: 1688 - DNA, 626 bp, Gossypium hirsutum
  unsure (1)..(626): unsure at all n locations
  Clone ID: LIB3825-022-Q1-K6-H6
cttcccctatatccccaattttgcgttgctaaaaaccctgattctattccctttggtttcaccaatcaaaatccccttctcattaaattttctctctttgaaaatttcatgcctatccacctttaatctcaaccaacggaagagacgtggtgtgcaatttgactattccaatttccttttcaatattcaattaaaaccctagcctcttccttttgtttctatcggggggggngggaagggaatcatgtctttcgatctcatatgttgaagctgtcctgcagctgcttcggatcctcccaagatctgtacggctgaggaccaaaagaagaaagatgatgaggatttggtgagtggctattcgggattttgccctcgctgattctctacactgcaaatcctgaaccagacgacggcattgaaagtggggttgtgtctattgggcctctgtttattcggctacatagtgggtccacctctgtattggcatttcatggaaggattattagccttcagccacacttccaacacttgcccaccttgcctttgcgattgctcttctcagcctcttctcacaatccctgaagacgtttgtgagaagaaaaaagctnttcactagcattttaact

SEQ ID NO: 1689 - DNA, 517 bp, Gossypium hirsutum
  Clone ID: uC-gsronu33B012g03b1
tttttgcgctgctaaaaaccctgattctattccctttgttttcatcgatcaaaatccccttctcataaattttctctcttgatggaagagacgcgatgtgcaatttgactgttccaatttccttttcaatgttcaattaaaaccctagcctcttccttttgcttctattggggggggggaaggaatcatgtctttcgatctcatatgctgaagccgtcctgcagctgctttggatcctcccaagatctgtacggttgaggaccaaaagaagaaagatgatgacgatttggtgagtggccgttcgggatttcgccctcgctggttctctacaccgcaaatccgtacgctcttccctttttttattttatttccttttgaaaaataaaattttaaatctatattcaaatcttaattctttttattctaatatagattatttaatttcttgtttatcttcgtcttcattttggtgtacgtatataaaattattatggatttctctttatttgtaattttt

SEQ ID NO: 1690 - DNA, 570 bp, Gossypium hirsutum
  unsure (1)..(570): unsure at all n locations
  Clone ID: LIB3825-030-Q6-K6-E11
gngnaggcagtcttgatttggcatcaaattgcttcattcttgatttggtttccagttaaactctgagatagaaaagaggcagtgaaccagacggcggcgttgaaggtggggttgtgtctattgggcttctgctatccggctacatagtggttccacctctgtattggcatttcatggaaggatttagccttcagccacacttgcaacacttgcccaccttgcctttgtgattgctcttctcagcctcttctcacaatccctgaagttatgcagctcaaaacattgtgacttctgattgtcaattaagatttcaaaatagagcaccccttgctggtactggtttgcttgtgacatcagagaacgtgaatggaaatagggctatttgtgaattttgccagtcctctaaaatctctgagggcacctcaagtgtattttgttggtgacaatgttaagaaccttaaaccagaactggcaaagggtgcaaagctaaagtgctgcacttggctgttatgtgaagtcttgccgcagaagctatcatttcccttgtgcaaaaaagattccaaaatgtcg

SEQ ID NO: 1691 - DNA, 492 bp, Gossypium hirsutum
  Clone ID: LIB3189-042-P1-K1-G2
gagctcactagttgcgctgctatataccctgatcatattccctttgttttcatcgatcaaaatccccttctcataaattttctctcttgatggaagagacgcgatgtgcaatttgactgttccaatttccttttcaatgttcaattaaaaccctagcctcttccttttgcttctattggggggggggaaggaatcatgtctttcgatctcatatgctgaagccgtcctgcagctgctttggatcctcccaagatctgtacggttgaggaccaaaagaagaaagatgatgacgatttggtgagtggccgttcgggatttcgccctcgctggttctctacaccgcaaatccgaatcatttcaacttttaccgtattccccgaagcttttgaatggtatgtcctgagaatcagattgattatgtcctgttatttgcctagggcttcctttatatgtcaagatcattcgtatagaatatatgtcatggtgtgcatt

SEQ ID NO: 1692 - DNA, 490 bp, Gossypium hirsutum
  Clone ID: LIB3582-030-P1-K1-E11
gtttcaccaatcaaaatccccttctcataaattttctctcttgaaaatttcatgcctatccacctttaatctcaaccaacggaagagacgtggtgtgcaatttgactattccaatttccttttcaatattcaattaaaaccctagcctcttccttttgtttctatcgggggggggggaagggaatcatgtctttcgatctcatatgttgaagctgtcctgcagctgcttcggatcctcccaagatctgtacggctgaggaccaaaagaagaaagatgatgaggatttggtgagtggctattcgggattttgccctcgctgattctctacactgcaaatccttagactctgagatagaagagatggcagtgaaccagacgacggcattgaaagtggggttgtgtctattgggcctctgtttattcggctacatagtgggtccacctctgtattggcatttcatggaaggattattagccttcagccacact

SEQ ID NO: 1693 - DNA, 577 bp, Gossypium hirsutum
  Clone ID: LIB3825-005-Q1-K6-C11
ctctccagcagcgtctccaagctcttatcgaaggaaccctagctgtctcaagtccctactaactgtttgctacttcgttcccattcgcattcccacttccacacactcatttcgatgaaagattgacaaacccacccgcaaattttcgactgtcgaagaattgttgaataaaaacaaaatgcatggttagcattccattcaattcttttatttgtattactgtttcaggtttattcccctcgcttggattcacctccaccaagatgggttcattttgcacacgggttgcttctatttttgtatcagacttttgatgctgttgatgggaaacaagctagacaaacaaactcctcgagtccacttggagaactttttgaccatgggtgtgatgcacttgcgtgtgcggcatgtatttaacttgtttcattacataacaatgtctaataaaattctgccattatacaatattgattctttttaagttcgaaaccatggcttttgggagcactgccatgtgcagaggggacagtttctggttttgggtaatttcatctataccattttatggagctacatg

SEQ ID NO: 1694 - DNA, 303 bp, Gossypium hirsutum
  Clone ID: LIB3148-016-Q1-K1-B6
cccacgcgtccggtgattacccgctgagtttaagcatatcaataagcggaggcaacagcgggggaagaggagtagaacagaaggtacaattaactccaactacagcttcagtctatgatgactatgttccagcaatttcaaaatccgccatcttagacatttgttttcttgtaacttttaacattattgtaagaatattttgaatattcatttacaatttatataatatatttttcgtaaaaaaaagggcggcctttcaagcgggcccaaaatccttgcttcatcaatcacagctcaatcttt

SEQ ID NO: 1695 - DNA, 456 bp, Gossypium hirsutum
  unsure (1)..(456): unsure at all n locations
  Clone ID: LIB3166-015-P1-K1-D5
ctcggaccggaattgacaggccgggccgaccgacgcgtacagaggaactagaagcacaaacagagagatttacttataacggcagcaatcacgtagggtgggggcgggacaacgaaaccctgcaaaatcgatgtcgtcttttgatgacgatggctacttaggctacgaccctcgcctcgcttcccaccagttccagtccttcgacgcccactcggttaaggactcagtagctgattcccctccgatgttctcctacggtaccggagatgatgtcttctcatctcaatcaatacctgaaacacctccgatctacaatgggcggtggtggaaactctgctttctcatcggagcagaacgaaaaaggattgaacggagagttcggaggatcggatggaccaatcttgccaccgnctgctgagatggggccagaagaaggctctgctttgagagagtggc

SEQ ID NO: 1696 - DNA, 477 bp, Gossypium hirsutum
  Clone ID: LIB3543-022-Q1-K1-E3
ggtttgtgaaactgatcaaatccaatatatatgaaatggaaacaagaaaggaggagatgagatcgagccagatctgggaataccttcagggattgtaagaagaggctgagaagagcaatcgtaaaggcaaggtgggtaagtgttggaagtgtggctgaaggctaaatccttccatgaaatgccaatacagaggtggacccactatgtagccgaatagcagaagcccaatagacacaaccccaccttcaacgctgccatctggttcaatgccatctcttttatcttagagtctaactggaaaccaaatcaagactgaagcaatttgatgccaactcaagactgccatctcaatttcttgattgaaaagagcaatggaggggtgagattggggggtgttttgaggataccaattttaggggaaaaaattaggcatttcagagggggaaaatttaggataaaaccgcgcatttttttttt

SEQ ID NO: 1697 - DNA, 340 bp, Gossypium hirsutum
  Clone ID: uC-gsflmaxxa049b05b1
ttttagtcctcaaaatcatcccctttcttctcctctcttcttcctactccccacccccaccgagatttcgccctcgctgattctctacaccgcaaatccgaatcatttcaacttttaccgtacgccccgaagcttttgaatgttgcttctgtgacaaaatattctaatataaggactgatactgtgaatgggattgacaatggagttgaataacctgaaggatgcatttgatcgtgtagcaaagaagcaaaagctgtcctgctctaaagtgcaggaagttatggatcagattgtacaagaaatcgagaaggcaatagaaatgatgcagtcaaccaccctt

SEQ ID NO: 1698 - DNA, 451 bp, Gossypium hirsutum
  unsure (1)..(451): unsure at all n locations
  Clone ID: LIB3197-048-Q1-M1-C5
atcaaaatccccttctcataaattttctctcttgaagatttcatgcctacccacctttaatctcaaccaacggaagagacgcggtgtgcaatttgactgttccaatttccttttcaacattcaattaaaaccctagcctcttccttttgcttctatcgggagggggggagggaatcatgtctttcgatctcatatgctgaagccgtcctgcagctgcttcggattcttccaagatctgtacggctgaggaccaaaagaagaaagatgatgaggatctggtgagtggctgttcgggatttcgccctcgctgattctctacaccgcanatctatgctattcacgtctttgctctcctttccctcgcttgacattagcattntgtattgaatcaaaatgcatggttaggatttgacattttgccgactactgcatcaaattacttcagtcttga

SEQ ID NO: 1699 - DNA, 436 bp, Gossypium hirsutum
  unsure (1)..(436): unsure at all n locations
  Clone ID: LIB3197-060-Q1-M1-G7
cggacgcgtgggtaaaaaccctgattctattccctttgttttcaccgatcaaaaggcccttctcataaattttctctcttgatggaagagacgcgatgtgcaatttgactgttccaatttccttttcaacgttcaattaaaaccctagcctcttccttttgcttctatcgggggggggggaggaaggaatcatgtctttcgatctcatatgctgaagccgtcctgcagctgctttggatcctcccaagatctgtacggctgaggaccaaaagaagaaagatgatgaggatttggtgagtggctgtttgggatttcgccctcgctggttctctacaccgcanatccgaatcatttcaacttttaccgtattccccgaagcttttgaatgatgctattcacgtctttgctcgcctttgcgattgctcttctcaacctc

SEQ ID NO: 1700 - DNA, 381 bp, Gossypium hirsutum
  unsure (1)..(381): unsure at all n locations
  Clone ID: uC-gsronu33B080c09b1
ggcgtgaatcaatggcgtcctcggatcttattggcaggggggagactagatgactagatcgggctttcacccccaaagcnccaccatatgnggggccacaggcgggaaagagcaggaaacaatagaggctactaaggagccaggtgctacatacatggcggccaaatttgatgggatattaggacttgggtctaaggagatttcagttggggatgctgtcccagtgtggtacaacatggtcaaacaaggtcttatcaaagaccaggaattttcatttnnggcctaaacgcaatgtaagagaagaaacggggggcgaaataggggtcggcgggggtgatccaaaccactacaagggcaagcacacaaaccgtcctataacac

SEQ ID NO: 1701 - DNA, 376 bp, Gossypium hirsutum
  Clone ID: LIB3165-022-P1-K1-F8
aaaaaccctgattctattccctttgttttcaccgatcaaaatccccttctcatagatttgctctcttgatggaagagacgcgatgtgcaatttgactgttccaatttccttttcaacgttcaattaaaaccctagcctcttccttttgcttctatcggggggggggggaaggaatcatgtctttcgatctcatatgctgaagccgtcctgcagctgctttggatcctcccaagatctgtacggctgaggaccaaaagaagaaagatgatgaggatttggaatcatttcaacttttaccgtattccccgaagcttttgaatgatgctattcacgtctttgctcgcctttgcgattgctcttctcagcctcttctcac

SEQ ID NO: 1702 - DNA, 1017 bp, Gossypium hirsutum
  Clone ID: GOSHI-09MAY01-C3000_1
tcgaataatcaaagaaacagaggaaagtgaaagaaaatcgagagaaaaaaaatggggcttgaagaaaatctcaaatcaatgaacatcaacgaagaagagaacaagaaccctaaccctaacactaaagatgaagaagatggtgaacttgaagaaggggagatcgcaggtgaagaagatgatacgacgtcgtcttcgttaaagaaaggtgtcgtcgaacagcctcaccagttggagcattcatggaccttttggtttgataacccttctgctaaatcaaaacaagctccttggggtagttctatgcgccctatttacactttctccaccatcgaacaattctggagtctttacaataacatacatcatccaagcaaattggctgtgggagcggacttccattgtttcaaacataaaatcgagcccaagtgggaagaccctgtctgtgctaacggaggcaagtggactgtagttttccagaaggggaaatcagatacgtcttggttgtacacgttgctggctttgataggggaacagtttgagtacggtgatgaaatctgcggagcagttgtcagtgtgagaggcaagctggacagaatagcattgtggaccaagaatgctgccaatgaaactgcgcagatgagcatcgggaaacagtgggaaagagttacttggttacaacgacactatcggcttcatatttcatgatgatgcaaagacgcacgagagatctgccaagaatcgctacacagtatgactttctgtagagttcttctctactggacagcatgcgtggcacaatcaggactctctgtatgcttcctacggcttatctttgttgcctcctttcggattctagtttcaagctattgctgttttttacaaagatttttagctatataaagcgaatattagtactagcttaagtttcaattttatgaccatttatgaaatgctttttcaatcactacattttgttataaggttcttgcttaaaggaattacagggttgcttttttt

SEQ ID NO: 1703 - DNA, 694 bp, Gossypium hirsutum
  Clone ID: GOSHI-09MAY01-C3020_3
cggacgcgtggcccccgcgccccgctctcgcccgcgtaatacagtcgcctatacactccttagactctcactctcgcataagcattaagcaccgaggcacacactaggaggcgacgaactctgaggcggaaaagttacacaaagatggagcaaacattcatcatgatcaagcctgatggcgtccagaggggctcggttggtgaaatcattggcagatttgagaagaaaggtttctatttgaagggtttgaaactcatcaccgtggatcaatcttttgctgagaagcactatgcagacctctctgcaaaacccttctttaatgggctcgtagagtacattatctctgcgtcctgttgctgctatgatttgggagggtaagaatggtgccaccactggtcgcaagattattggagccacaaaccctgctgagtctgctcctggaacaatccgtggtgactttgcaattgacattggcaggaatgtgattcacggaagtgattcggttgagagcgctaggaaggaaatcgcattgtggttcccagaaagccctgttaactggcagagcagtgttcacccctggatctatgagcagatctcaaattaagctgctgcagatcatggcatccttgtgtttgcttctagttagtcaacttttttatgaactttttactgaattacctctagttactattta

SEQ ID NO: 1704 - DNA, 855 bp, Gossypium hirsutum
  Clone ID: GOSHI-09MAY01-C3020_1
atccttttgaaactagggtttgggttggggcagtgctgtattttatatagtatataaggacatttgttcgcgccctcccgcccgcgcccgggcagagcagagcagacagactagaaaagaagagaagatggagcaaacattcatcatgatcaagcctgatggggtccaaagaggcctggttggtgaaatcattggcagatttgagaagaaaggcttctatttgaaagggttgaagctcatcagtgtggatcgatcttttgccgagaagcactatgctgacctgtctgcaaaacccttctttaatgggctcgtagagtacattatctccggtccggtcgttgctatgatttgggaaggtaagaatgttgttaccacaggtcgcaagattatcggagccacaaacccagctgaatccgctccgggaacaatccgtggtgactttgcaattgacattgggaggaatgtgatccatgggagtgattccgtcgagagtgcaaggaaggaaatcgccctttggttccctgaatgccctgttaactggcagagcagccttcacccttggatctacgagtagaaatcatttggtagaagctgttgaccgtcatggctctgtcccggttgtttgttgttgttgttgccagccctttgatatttatgttactattatagtttgaagtggtgaaagctttgtagcattttgggtgtataggttaagttggagttgtgtttgaaagctcccattacaacgccacagtggaggtgaacagcggtttgaataatcaaagctattttgtgtgtttgtcatataacaagagataaatattaatattatattttttatttaatttttttttt

SEQ ID NO: 1705 - DNA, 505 bp, Gossypium hirsutum
  Clone ID: uC-gsronu33B016h05b1
cacacactttgaggcgacgaactctgaggcggaaaagttacacaaagatggagcaaacattcatcatgatcaagcctgatggcgtccagaggggtttggtaatgtttcttcttctttctctcttgcaattttcgggttttttttcagctgtattattcttttatccgatagtttgattctcttaactgctagaaattacaaataaaaaacgataaagaatctgtagtccttagtgaactcttgtagttaagctcgtagatctaatgtcttgaggcagggaatattggttcaacttagctaggcttcacagaatgagtactgttgtttctgtttctttttgaaatctattcttttgcatgctaaggctataaaatcaaagacttcgagagatgaattcttaaaaaaaaaagtatttatttgggacatatgaaaggctctcacgtttttctgatttagcaccttattttgttggattgtgggttcgaaatgagatacttgtgtttct

SEQ ID NO: 1706 - DNA, 401 bp, Gossypium hirsutum
  Clone ID: uC-gsflnu33B008g04b1
gtgcagagcagacagactagaaaagaagagaagatggagcaaacattcatcatgatcaagcctgatggggtccaaagaggcctggttggtgaaatcattggcagatttgagaagaaaggcttctatttgaaagggttgaagctcatcagtgtggatcgatcttttgccgagaagcactatgctgacctgtctgcaaagcccttctttaatgggctcgtagagtacattatctccggtccggtcgttgctatgatttgggaaggtaagaatgttgttaccacaggtcgcaagattatcgtagcctgaccccacactcaattcattctacttgacaacactccaacagatatgtcctcaatcagggagcggattctatgtggccaatcttgatcccaccactt

SEQ ID NO: 1707 - DNA, 217 bp, Gossypium hirsutum
  Clone ID: LIB3147-043-Q1-K1-C6
ctttgatatttatgttactattatagtttgaagtggtgaaagctttgtagcattttgggtgtataggttaagtgggagttgtgttgaaagctcctattacaacgccacagtggaggtgaacagtgtttgaataatcaaagctattttgtgtgtttgacaaaaaacaaaaaaaaaaaaaaataaaaaaaaaaaaaaaaaaaaaaaaaaaatatataat

SEQ ID NO: 1708 - DNA, 567 bp, Gossypium hirsutum
  Clone ID: GOSHI-09MAY01-C3370_1
cgtccgcccacgctccgccccgcgtccgccccgcgtccgggtctcagggcttcgaaaaggaagatgcaggcaagcgataggtttaacatcaattcccagctcgagcatctccaagccaaatacgttggaactggccatgctgatctcaacagatttgaatgggcggttaacattcaacgcgatagctacgcatcatatatagggcattacccgatgttggcttacttcgctgtggctgaaaatgaatccattggaagagagcgctacaacttcatgcagaaaatgcttctgccttgtggtctgcctccagaaagagaagatgattaagaactgctgggtgggctgtgaagtgaaatgttaggaattctaagctttcccatcaggctagagattttcctaattgactatccctcaaatattgtgtttatcttgaacttgaaatatggagcttatgtcatagtggtgtcattgtaacctcaactttatccctagcaagattttttcaattgtagtacgtatttagttctttaaatgagcctactcatcttgctgaatgtgtctgctact

SEQ ID NO: 1709 - DNA, 1307 bp, Gossypium hirsutum
  Clone ID: GOSHI-09MAY01-C3330_3
tctttcagcacagatagagatgaaattggtgggtgagagttcaaatggtcgtaaccaagacgattctctgatcaaacatggtgaatactgggctcaacgtgatgaactacatggtgcttgttttaatgcctcagaagtgaccactggaaaaactaataataatacaaatgatggcagagttgagaggggggaggatggaaggttggataagatggaatttttatctaacatctgggaacatgttgaatctgatgactttatggaacgtgtgtgtcaaggtttagattctcgaccctcttcccttggtggaaatcaggccatgttaattcagctcccatctcagattctaccattaaaccatgatcccttgatcttaccagctgggagagtcggtgatcatgttgataatgatcaccacggacgcgtgggttcgaccattaaaccatgatcccttgatctcatcagctaggagagttggtgatcatgttgctggcgatcaccatggactttgttttcttagaaatttgggagggttctcagaaagtgtggtgttttcccccgctcagaatcccttatgaacaatttgctgacagggttgaccaactacccaaatcccaagatagctcaaaaggggagacgcaagtttcacattactttcttagctgtgggatttattgaattcaggaatagagaaacattcccagatgagactgaagcctgtaaacactgcaactgtagaagatccagatgtttgaaactgtaagttcacatgcgagacagaacatttcacttgagtaatatgttactcggacttggtttaagcatatactcgagatcgttattgtgagtgctttgcagcacggatctactgcttggattgttgtgcatgtgataactgtttgaacaagccagattatgaggatattgttcttgatattccacttcaaattgaattgcttaaccctctcgcagcacaaaagcggatgcaaatgcaggtggtcaaaatgcctaaaattgtattgcgagtgctatcgcgtttaggatgccactatgaggattgtgacaattcttttggcaagaagtcatattgacggagaagaaagatgagtgccgaaaaagaattctctgtctctcaacgtcgcttggcctgcactagatgcttaaacgctctctggttgtgctattctccggtcattaattgcaacagtattacagagaaggaagtgtgcattattgctattgaaaatggagtgctttttgtgattgttggattttaaaaccaagcccttttttatactccaggaaat

SEQ ID NO: 1710 - DNA, 871 bp, Gossypium hirsutum
  Clone ID: uC-gsronu33B047f11b1
ataagatccagatgtttgaaactgtaagttcacatgcgtgacagaacatttcacttgagttatatgttactcggacttggtttaagcatatactcgagatcggtctgttttaattcttcttatgtttgatttttgaacttggttttttaatatttatttatttttttttttttattttatattattttttggttttcctttttatttgtttctttttttctttctctttttttctaattcatattttttatattttgtttttttttattttattcactttccgttattattactttctgttttatttttatataattctttctttaccctttttattcatttttttttttcattacctctttttctatgttgttttttatttcttatattgtctgttcttatcgcctctttcctatttttcgttttttttttattttttcatttttctcttttctttttttccttttttttttttctcgttttctttttcttgtttttttttctattatttctatttttatttgtttattttttttttttctctatctcttttttttctttttattattctttacgtttattttcattattttttctcttatctttttatttgtattttcttttatttcttttcgttctctttctattgttttttgcacctattaatttttttctgatttttcttttttttcttatcattcttatatttagtttacttcctttctatttttattttctttattattttctgttcctattagtatatattctcttccttttttttattatttatattcttccttttctttctctttattattttttatatttcttttttttttttttttttttttcttcttttatttctttt

SEQ ID NO: 1711 - DNA, 649 bp, Gossypium hirsutum
  unsure (1)..(649): unsure at all n locations
  Clone ID: AI054446.1
ccanattcttcttctataaacttatattctcccttaaccttcaatgattcagacacagatagagatgaaatttgtgggtcaagttcaaatggtcgcaaccaagacgattctctgatcaaacatggtgaatactgggctcaacatgatgaactacatggtgcttgttttaatgcctcagaagtgaccactggaaaaactaatgataatacaaatgatggcatagctgagatttccgatgatgaaaggttggataagatggaatttttatctaacatctgggaacatgttgaatctgatgactttatggaacgtgtgtgtcaaggtttagattctcggccctcttcccttggtggaaatcaggccatgttaattcagctcccatctcatattctaccattaaaccatgatccctttgatcttaccagctgggagagtctcgtgatcatgttgataatgatcacctgggaattcgaccattaaaccatgatcccttgatctcatcagctagagagttggtgatcatgttgtggcgatcacctggactttgtttccaaaaaattggaaggattctataagtgttaggtttcccagttcaaatacctatgatcaattgtgacgggttacactattcaaatcacgatactcaagg

SEQ ID NO: 1712 - DNA, 479 bp, Gossypium hirsutum
  Clone ID: uC-gsronu33B109f08b1
ttgtttaaaggttaaaacatacccgatagcactcgcaatactattttagcaattttaacctcttgcatttgcatccgcttttgtgcttggctgatggtgtgttcatcttgtcaaacacttatgaaattacacaaatttaaagggaaaaagtgtaggattatagaagttataattacaataacattaggggaatcattaggtgggttaacaataggtggagcaaatgcgagagggttatgcaattcaatttgatgtcgaatatcaagaacaatatcttcataatctggcttgttcaaacagtcatcacatgcacaacaatccttgcagtaaatccctgctgcaaagcactcacaataactgccaatcacaacaaacaacaaaactcaacagatgttccaaacatcttcactttttttgagcaccctctgaacattcagggtatgatgttccaagcatcttctaaatacatgaagaaaact

SEQ ID NO: 1713 - DNA, 725 bp, Gossypium hirsutum
  Clone ID: GOSHI-09MAY01-C3270_2
cggccgcgtgggaaactttattatgacaatttagtgttttatttccagaattttctagccttttctagcctaattaattacttagatattaagtttttgcttaggtcatttggctacctagctgaacattataaatagtttacttgtttattgtaaaaggttacagaatttgatgaattaaacttaatagaagttttgttcttgtgaggttacctcctctcttcttttgttcgagtctcgaagcgacttatctagcttgctagtggcgtcaatccgaactccattggacttatcacctaaccggtgtggtgttcaaccatattattatacctttggttcttacctccatataggtaacgggtcaaggtccgcttctatccttcatcataattcaccttaagcaacataagactcggggcaatactttttagtattgaaacattcttgaagcttgagttcaacttccattccattttatctatcaacttaaaaattatttctttgttaaaccgaacgtatcaaccatcaaaccaagcccatcttttgaacccaaactgcctgtttccgcttatacatctccataactcaattttcataagacaccaaaatgaaaacttctcgtcgacgatcgggcaactacgtggaacgactcgattaacctgggccggatcgtatcatggagccgcaccaatcagacagagtgctacgaaagtttggatgtagac

SEQ ID NO: 1714 - DNA, 1217 bp, Gossypium hirsutum
  Clone ID: GOSHI-09MAY01-C3270_1
atgggttgctgattgctattttccaagcatctcctcgtgaagttcaaggaccaaaggagctgatgcttcctaatcccaaaatgaccggcccgttctccaaccagttttaatgaccattcggttgagagctttcacacactaagggctattcagtttcgttcttcacattgcatgacttttcaatcttcttccttcataccgagtgactattgaagagttccatgcagcctcattatgaccaagaatattcggctgaaccaaggcagctcaattactacatgcattcatcttctcaaatacatttgcttaagccttaagctgaccattggagctccccattcagccaaactttattatgacaatttagtgttttctttccagaattttctagccttttctagcctaattaattacttagatattaagtctttgcttaggccatttggctacctagctgaacattataaatagtttacttgtttattgtaaaaggttacagaatttgatgaattaaacttaatagaacttttgttcttgtgaggttacctcctctcttctttcgttcgagtctcgaagcgacttatctagcttgctagtggcgtcaatccgaactccattggacttatcacctaaccggtgtggcgttcaaccatcttcctatacctttggttcttacctccatataggtaacgggtcaaggtccgcttctatccttcatcataattcaccttaagcaacataagactcggggcaatactttttagtattgaatcattcttaaagtttgagttctttatccatttccacctatttatcatctttgtaacttaattctttgttaaaccgaacctatctttcatcaaaccaaaacccatcctttgaacccattttgcctaccttccgcttataaaacattcaaactccatctatctacaaatttgaacgagcttctcgtcgacgatcaggcatcttaagtgaacccgactcaatcaatcgggccggatcacatcatttggtatcagagctactaaaatgaggagcgccgacgttcgtaataaggccgaaagtaggttcgaaacgtgaaaaaaaaatcaaaaaaaaatttgaagtggaatttaattttttttccctggatttagctactatggattggagtaccaaaaaaaatcaaaaaaattcgaaaaaaattgattgaaaaaatcaaaaaaagtgaaaaa

SEQ ID NO: 1715 - DNA, 564 bp, Gossypium hirsutum
  Clone ID: GOSHI-09MAY01-C3260_1
tggattcgttcttttggaaggttaacttggccaaggatatcagatattatcatctcaaagtggctttcaaaggttgttccagaagatgcttccaaacttgtggactttcagaagatagtcaagtgtacatcagaatttgagttctctttaaaggaaatgatgttcatatcagcatccgatggcaaagattacaggttgagcagtttttctgaaaatgttgaggttcactttgcatttaggaagaaaacagaaatcttgggaaaagctagaaattcactccttcaatgtgatttctctcttcctcaagattacacttccaaaggccctttactgaagaacgatggaatggctataaattcttccaaccaagttgttgatttgattttttcatctgagaggtgtgtggtatcaaaagcagcctcccaactgatggagctcgtgcatcagacacttcaggatgtttgcttgtcatctgcaagagttgctttggaattctatcatgctgtaagagatgctatacttctttatgaagctgttattcctgtcaagaaaggcagcttgatg

SEQ ID NO: 1716 - DNA, 978 bp, Gossypium hirsutum
  Clone ID: GOSHI-09MAY01-C3210_3
cgaggatgctcgtggcgccctccttctttcgccatcgtatgagccgctttgttggcctccctagagttcagtttacgtattatggttaacgcatccccttcaatgcaaacttcctggaaccccatatcttcagccaaaataacggcttgcagacacgccctcgcctcagccatcactggatctgcaatcttttcccatggttgggactgccattcccaaaccccgcaagacttgctgcgtgaataagcaacgtctaaaaaggtgatccgccgattcctcttcagtttgacacatcggacaccaagtgttgacaaccaaattccgggcttttagattatgtagagtaggtagaaagtcattagcaattctccatagaaaaattcgtattttgcttggaattttgagctcccaaagccttgtaaagaaagtagtagggatttcattatttaatcttgtacccccatctgtaatgagccatctatagccacttttagctgtatatatcccagtattgtcgccacgccatactggaacgtcctgaatcctgctgctcaccaacggaattgaagttatatgctgcagttgctcttcgccgaacaccgtgcgaataattccttgtttccaggtccaggaagccacctatcattccagatgttaactgaatctccgttaccaattcgccatcccactccttcctcgagaagatatctagctcccagaatgcttcgccaggtataccaagggtacgcgcctcaccctgcactcataaaatctccattcagaaaatacttggctttcattacacgtgcaaacaaacaatcaggttgcatgataagtttccaaccctgcttctgtaacccccttaactcccaaaccgtcgccggaacaggtttatgaggcattaccggacatatcacacaatttacacataatttaaaaataaacaaccaacatattaaagtaaatcataattcatat

SEQ ID NO: 1717 - DNA, 585 bp, Gossypium hirsutum
  Clone ID: GOSHI-09MAY01-C3210_2
cccacgcggccgcgtgggaaaaataagacctgagaaacccttctccttccttcttctacttctgttgagcatgaaacctctgtatcagccgtactagagacatattttctcccaatatcgtaccttcctaagatcacagtctctttctgaaatgcgagttcatcgggctcataaacatcacagacccggactctgcctttccctctaaccaccatgaatgttgtttctcctctcatgatttatcaaaatctccactgcatgcggtgcttcctctatccagaatcgaggatgctcgtagcgcccccttctttcgccatcgtatgagccgctttgttggcctcccttgagttcagtttacgtattatggttaacgcatccccttcaatgcagacttcctggaaccccatatcttcagccaaaataacggcttgcagacacgccctagcctcagccatcactggatctgcaatattttcccatgggtaggtacacgctgccattattaggccttctttgtttcgcgctatgatccctgagatagaaaattttgttatttgataaaggaagggtcagggtaatttttat

SEQ ID NO: 1718 - DNA, 586 bp, Gossypium hirsutum
  Clone ID: LIB3583-026-P1-K1-F2
gacctaagaaacccttctccttccttcttctaattctgttgagcatgaaacctctgtatctgccgtactagagacatattttctcccaatatcgcaccttcctaagatcactgtctctttttgaaaagcaagttcatcaagctcataaacatcacagacccggactctgtctttctctctaaccaccatgaatgttgtttctcctctcatgatttatcaaaatctccactgcatgcggagcttcctctatccagaatcgaagatgctcgtagcgcccccttctttcgccatcgtatgagccgctttgttggtctcccttgacttcctggaaccccatatcttctgccaaaataacggcttgcagacacgccctagcctcagccatcactggatctgcaatattttcccatgggtaggtacacgctgccattattaggccttctttgtttcgcgctatgatccctgagatagaacattttgttaattgattaaaggaagagtcaaagttaatttttatggagtcattaactggtggttcccaaactaaatgtccaacagcacatgagttctttaatctctccctcgc

SEQ ID NO: 1719 - DNA, 526 bp, Gossypium hirsutum
  Clone ID: LIB3582-037-P1-K1-D11
gcctaaacaacccttctccttccttcttctacttctgttgagcatgaaacctgtctataagccgtactagagacatattttctcccaaaatcgtatcttactaagatcacaatctctttctaaaatgcgagttcatcgggctcaaaaacatcacagacccggactctgcctttccctctaaccaccatgaatgttgtttcttctctcatgatttatcaaaatctccactgcatgcggtgcttcctctatccaaaatcgaggatgctcgtagcgccctccttctttcgccatcgtatgagccgctttgttggcctccctagagttcagtttacgtattatggttaacgcatccccttcaatgcaaacttcctggaaccccatatcttcagccaaaataacggcttgtagacacgccctcgcctcagccatcactggatctgcaatattttcccatggacttgctgcgtgaataagcaacgtctaaataggtgatccgccaattcctcttcagtttgacacatcggac

SEQ ID NO: 1720 - DNA, 569 bp, Gossypium hirsutum
  Clone ID: GOSHI-09MAY01-C3200_1
gtttcaggtacggatactaaatgccagagaacttttctgctttgactagaacgcacaataattattttgtgaaggataaaaaatcttcatatttagaaaggacaggcatagtgactgttacatgggcttgtgatgagatttggatatgagtatgttgtctgacttggctatgctcttaagtttttcaagtttttccatgtatttggatgcccaatcatgtttcaggtacggatacttaaaaaaaaaaaaaaaggaggagcatgacatagtggagcctgttagagaaattatttgaaaagcatacggcttttgaaatttctatctatgatacaactttctcactccatttagctgaacagataccattttctctgatcaggtaatgcaaatggtatgtggtttgaactatcttaatataagtgtcactttgtcttgaaaatcatgacatcgttagactaattaatgttattcttacacgattcactgagctgttctgatatgtgatgtaactttcatgtgcattccataataaaggttttctattcttgcatctctttcaatgtgtatgc

SEQ ID NO: 1721 - DNA, 1047 bp, Gossypium hirsutum
  Clone ID: GOSHI-09MAY01-C3230_7
cccacgcgtccgataaaactacaacaaaatattcatttcagtactttctcccgcgcggccgcggaaggaaggtctgaacgcaatttgaagtagagcagagtttggattagaatttagggttttacggaaggaacggacaaagacaaacaagaaccagatggatctggaaatgaacttgaacgcctcccactccatgggcacaaccatcatcggtgtcacctacaacggcggtgtcgtcctcggcgccgattctcgtaccagtactgggatgtatgttgctaaccgggcatctgacaaaattacacagctcactgataacgtctacgtttgccgctctggatccgctgctgattctcagatcgtttccgattatatccgctatttccttcaccaacatacgattcagcttggccaatctgcaacttccaaagtcgctgcaaatcttatcaggctactatcctacaataacaagaacatgcttgagactggccttattgttggcgggtgggataagtatgaaggtggtaaaatatacgcaattcctcttggtggaactctgattgagcagccttttgctattggaggatctggctccagttacctatatggattttttgatcaagcatggaaggaaggaatgacaaaggatgaagctgagcaattagtggttaaggcggtttcccttgccattgctcgtgatggtgctagcggtggtgtcgttcgcactgtgattatcaactctgaaggagtcacgaggaacttctatcccggtgacaaactgcagctatggcatgaggaattggagcctcagaactcgttgctggatttactgaattcttctaatcctgaacccatgaatatttaatcaaatcaaaggctaaggggaaattttttattatttttatgtggaaatttttgggtagatccaagaaatcgcttgaaattgatctaacaaatcccagatgattcgtcttataatattttgtttggatacaagtaccattaatattatatttttatatatagataaaatctataggaaattca

SEQ ID NO: 1722 - DNA, 587 bp, Gossypium hirsutum
  Clone ID: GOSHI-09MAY01-C3230_6
gccttctcaaaaagaaagaattccgcgcgtccgaaaaaaagaaaaaaaagaaaaaagagaaataaaagaataaaagtgaatgaaaatttctctcgtttgagaagtgaatcactacaaaatatatatcttccgcaggaggcagaattacttaaggctgtagagtagaaacggaggttgctttctcttttatgaatttcttgtaaagaataaagaagagaaaaatgtacaagatgaacatgtgcgacatggatatgtacagcatcaacactaactgcagttttaggattttcataacaagttttaggagacagtttcttttggtttggtagaagataggcctcatagtcgtttttacattagaagggttggttttaagcttgttgatagggattgatctaggtagaaatggaagcacggaacgccatggtatcggataataagcctgggtttctgcacaataggaagagaaagcgggctgcgcagcattcaacttattttcctggagcttcgcatgtgatattaccacaattgcccaacttgagtttaccatcccagaaagcatgcagctgaggagattggaggatcac

SEQ ID NO: 1723 - DNA, 895 bp, Gossypium hirsutum
  Clone ID: GOSHI-09MAY01-C3230_5
ttcaaatttgcaaaagttgcaaaatagcatttggctgtttttaatatcccgacttatgcttggttcctgctgatttatttgtctgcttctttgtcctgcaacaaagtgccatttctggttgctgtgtgctgtttttagcactcaagagttttatcatacggcaactcaaatcacctctgcattaatgatagttgctgtgtgctatgtgatgttttttttgtccttaggggagtattaatcaccaaacctcagaatcaggtggatcccacgaaaatgatcctagcctgggttcaaacacttcaaagacccctaaatctccttggatgcctttcccaatgttgtttgctgctatctcaaacaaaatccctcgttcagatatggatcaagttactaatcattatgaactattcagggcaaagaagataagtcgtgatgattttgtcaaaaagctgagattgatagtcggagatagtttgttgagatcaacaataacatctctgcagtgcaagtttccatctagacatgaattagaggcggcagcagcggcaaagcagaagaacacgaatggtcctggcggcctttgaacgtggtgatctcaagttgacggttgtctttcagtttggtgcttgttacaaaatgtgtcgacatgatgtggatatgtttattgaaggtaatgtttctcgtaataatggtgtaattgctaggtgtctctctagtaatgaggatttggctatgctgacgacttgttttcatcggaactgtcgtgttagacccgcgcattctaatgtgtgtgtgtgtgtttttttttttttgtggttctcaatgtggactcgttgctttgttatcgtataatacaaattgttgttgcctgggacttaccaaaaaaccccaaacc

SEQ ID NO: 1724 - DNA, 697 bp, Gossypium hirsutum
  Clone ID: GOSHI-09MAY01-C3230_4
ccaaattcaatcaggggatcccaagaaaagatcctagtctgggttcaaacacttcaaagacccctaaatccccttggatgcctttccctatgttgtttgctgctatctcaaataagattccccgtatggatatggaccaagttgctaatcattatgaactgttcagggcaaagaagataactcgtgatgattttgtcaaaaagttgagattgatagttggagataatttgctgaggtcaacaataacttcactgcaaagcaagataccatcgaggcatgaattagaggtggcaaagcagaacatgaagggtcccggaagcctctgagttttaccattttctcgtttaggtgaggaaggctttgctgcttggtatcctcaaaagctgttggtgctattgggtgactttagcttgcttcttgttatcaaaatgcgtcgacatgataaggacatgtttgaaggtacttgtagtagtcttagcactgctttgttttttaatggtgtaattgtttggtatatctcctagtctctagtagcattgatttggtgtttgctcaaaaccgacgaactcattttcaacctgaaccggcttgctagccaactctatcctgttttttttttttggttttcaaatttttttttccgaatgtggacgtggtgcatcgttctcttataataaataaataattgttgcctgac

SEQ ID NO: 1725 - DNA, 1843 bp, Gossypium hirsutum
  Clone ID: GOSHI-09MAY01-C3230_3
gtattctttttacgttttaacttaaaaaaaaccattgaaaattcagcctaacccctttcttctccttcttcttcttcttcttcttcttcttcttcttcttcttcttcttttctttttacttctttccacaaaattgacattaaaaaaaaaaaaaaagaacctaaagtaaataaaaaaagaacaagtccaatttgattccaacatgtagtgactacccaatgcctgacgcaaagccaaaattgaaaaaagaaaaaaaaaaagcaaagaaaaattatcaaaacaaaataaaaaagcctcacgaaaacaaaagctgaaaggtcttcaacaacgtcccacggaaaacgcagactagtttaagcttcctattaacccaatttctctctctctctctctctcccttcttcttcttggtcggtttagtcaggcaaaaacctcaatccatacccttcaaggatttctttggtatttaattcctttttcgggtgaagtgggctttattggtttgatcacttggggtaaggctgtgcttatgcgatgaactgggtatttgttacttcacgagagaggcagataacatggctcataccgcggcagcatgtgctgagagggcaaccaatgatatgttgattggtccggattgggctctaaacattgagctatgtgacattataaacatggacccagggcaggctaaggatgcgttgaaaatcatcaagaagcggctgggcagtaaaaatccaaaaatacagctattagctctttttgtattggattctctcagcaaaaattgtggcgagcatgtttttcagcagattgttgagcgcgatatcttgcgtgaaatggttaaaatagtaaagaagaaaagaaaaaaagaaaaaaagaaaaaagagaaataaaagaataaaagtgaatgaaaatttctctcgtttgagaagtgaatcactacaaaatatatatcttccgcaggaggcagaattacttaaggctgtagagtagaaaccgaggttgctttctcttttatgaatttcttgtaaagaataaagaagagaaaaatgtacaagatgaacatgtgcgacatggatatgtacagcatcaacactaactgcagttttaggattttcataacaagttttaggagacagtttcttttggtttggtagaagataggcctcatagtcgtttttacattaaaaggcggccgcgtgggcggccgcgtggggatggatctaggtagaaatggaagcacggaacgccatggtatcggataataagcctgggtttctgcacaataggaagagaaagcgggctgcgcagcattcaacttattttcctggagcttcgcatgtgatattaccacaattgcccaacttgtgtgtaccatcccagaagcgtggcaagctgaggagattggaggatcacaaaggccaagttgtttgttgtgctcatccttcgaaaagatctttgctgctttgctattccaattttaagaatactggcattccgaagcgcatcatgttctttgagaaaggtgaatggactgattttcccaaggatctcattgcttcaattaggaaagatctcatcacaaagaagccatttattgagctggagaaagatggtcaatcttttgtgcttgatttcttgcatatgtttcgactggatgggaaaactggcttgaaacaaccaattgcttggattgacgaagcagatggctgtttcttcccggagactttttctgtagaggatgaactatatcaggctcatgagtatgagagtgatcatgaatctatgtataatgaatcatatgtttcccctgagatcaagctacatcttgaaattgaca

SEQ ID NO: 1726 - DNA, 1297 bp, Gossypium hirsutum
  Clone ID: GOSHI-09MAY01-C3230_2
cccgcccggccgtgaggttcggttaggcctgtataaaagaaaaaaggatttctctttcctagtcttgtgttgcgctgtggttgaagaaaggtctcataacatttgaagccaagcaaagttcagattaggatttagggttttttgttttcttttctttttgtgaaaggcaaaatggatctggatatgaacgtgaacgcccctcactcaatgggcacaacaatcatcggagtcacctacaatggtggtgtcgtcctcggcgccgactctcgtaccagcaccgggatgtatgttgctaatcgggcatctgacaaaattacacagctcactgataacgtctacgtttgccgttctggatccgctgctgattctcagattgtttctgactacgtccgttatttccttcatcaacatacgatacaacttgggcagcctgcaactgtcaaagttgctgctaaccttatcaggctactatcctacaataacaagaacatgcttcaaactggtcttattgttggagggtgggataagtatgaaggtggtaaaatatatggaattccacttggtggaacactggttgagcagccttttgctattggaggatctggctccagttacctatatgggttttttgatcaggcgtggaaggaaggaatgacaaaggaggaagctgagcaactagtggtcaaggcagtgtcgctcgccattgctcgtgatggtgctagtggaggtgttgttcgcactgttgttatcaactccgacggagtgacaaggaacttctaccctggtgataaacttcaattgtggcacgacgaattggagccgcagcattcgttattggatatactgaacgctcctagtcctgaaccgatgaacatttaatcaatgggagtcagctgccttttcagtaatcaaatgggagtcacctgactttctagttttaggttgtattcagctgaagggcttgttcttactgcgtttattttctaaagctggaagttttatgtttagttgtgttaaaaacatattatctatttcattttctgtttgggtggtggcttggagacgaacgggaattcagcttcatttgaatgggcactaaaactatttgtgtcatggtttccgtgttcggatgttatggtatgctgtatcctatcctgtatttaacaggcaacgcttgcttgtgagctgagttacttttgttaaataaaaaatttttaattttttatttattattttatttttttttttatatgtttattttatttttatattattttttattaatttttttttattt

SEQ ID NO: 1727 - DNA, 1800 bp, Gossypium hirsutum
  Clone ID: GOSHI-09MAY01-C3230_1
ggcatttccgaagcgcatcatgttctttgagaaagtgaatggactgattttcccaaggatctcattgcttcaattaggaaagatctcatcacaaagaagccatttattgagctggagaaagatggtcaatcttttgtgcttgatttcttgcatatgtttcgactggatgggaaaactggcttgaaacaaccaattgcttggattgacgaagcagatggctgtttcttcccggagacttgctgtggaggatgaactatatcaggctcatgagtatgagagtgatcatgaatcatatgttccccctgagatcaagctacatcttgaaattgacattaatggtgatcaatctaggttgaaggaatgtagtggggagtcaagttcttttgttagcaattgtcaaattgctcagaaacctgccaccagttgctgtgccgtagaagctgaggataattgcaacagggatggtgatgcaaaacacagcaaaatcattgaggatattcaacaaccaaggttaaaattttcctgaaaaggagtttgtggatgtagaatttggagaacagttggattctcaaactgtggagacgatgttcctgttgggcatgagctcttcgggtggttcggatgttattgatataaagccctgctccagttcttcaacacaatataggttggagcgtttcctgaagcaggttcaaattatgaagaagtatcggggtgatgcaaatgttcagcatgcttggcttgcttgctctcagtcagacttgccaatcatcatgatgcatgggcttggggattgtcgcctttccagaattccacacaaatatggcactggtgttcatcttgccacagtagaatttactaataccagtgcaaactattgtgatgttgacgaaaatggaataaagtatatgatactatgtcgtgtaataatgggaaagagggagcttcttcgtcctggaagtggacagtgttatcctatcaatgaagattttgatagtggagtggatgatcttcagcatccaaagtactatattatctggaacatgaatatcagcactcacatttatccagagtttgttgttagtttcaagatctccaatgctgaagggcgtttgattggaagtgagactaatcatgctgtttcaggcgtcactgcatctactccaggacttcagggtcgtttaccagtattatcatctgccggtgaattggggagtattaatcaccaaacctcagaatcaggtggatcccacgaaaatgatcctagcctgggttcaaacacttcaaagacccctaaatctccttggatgcctttcccaatgttgtttgctgctatctcaaacaaaatccctcgttcagatatggatcaagttactaatcattatgaactattcagggcaaagaagataagtcgtgatgattttgtcaaaaagctgagattgatagtcggagatagtttgttgagatcaacaataacatctctgcagtgcaagttcccatctagacatgaattagaggcggcagcagcggcaaagcagaagaacacgaatggtcctggcggcctttgaacgtggtgatctcaagttgacggtagtcttttagtttggtgcttgttacaaaatgtgtcgacatgatgtggatatgtttgattgaaggtaatgttttcatcggaactgtcgtgttagacccgcgtattttagtgtgtttttttgtggttctcaatgtggactcgttgctttgttatcgtataatacaaattgttgttgcctgggacttgaaatcaaaaaaaaaaaaaataaa

SEQ ID NO: 1728 - DNA, 418 bp, Gossypium hirsutum
  Clone ID: LIB3148-001-P1-K1-G9
atcgtgataatggtgtaattgctaggtgtatctctagtaatgaggatttggctatgctgaggacttgtggtaatctgaactgtcgtgttagacccgctcattctaatgtgtgtgtgtgtgtatatggatttttggaggaatcaatgtgggctcgaagctttgatatcgaataatacaaattgttggtgaatgcgacttaaatagactttgatcgtgatggagctagacttggtatcgttcgcactgtcattataaagctatcaatgagtcactaggaacttctatgcaggagacatactgcaggtatggaatgaggaattgtagcctgataactccttgatggatttactgaattcttctaatgctgaacccatgaatatttaatcaaatcaaaggctaaagggaaattttatattat

SEQ ID NO: 1729 - DNA, 373 bp, Gossypium hirsutum
  Clone ID: uC-gsronu33B132h11b1
tccacgcgtacgaataaaagtgaatgaaaatttctctcgtttgagaagtgaatcactacaaaatatatatcttccgcaggtgctcttatttgatgtaataggaggcagaattacttaaggctgtagagtagaaacggaggttgctttctcttttatgaatttctcttcttcttttttcactctttcttttgaagtatattaagataaatctaaatgttcttgctaaagagcaagattattgagcactttaaataaaattcaagcaattatgtgccaaaaagaaaaaaaaaaagaaaagaacttatacaaagaacaaaaaagcttccgaacttttaaaaaaccaacattatgtcaaaagggaaataccttgaaa

SEQ ID NO: 1730 - DNA, 349 bp, Gossypium hirsutum
  Clone ID: LIB3083-056-Q1-L1-C12
cggcaacatgtgcttatagggctttcaatgatatgatgattggtccagattacgcgctaaacattgaactatgtgacattataaacatggacccaagtcaggctaaggatgcgttgaaaatcatcaagaagcggctgggcagtaaaaatccaaaaatacagctattagctctttttgtattggattctctcagcaaaaattgaggcgagcatgtttttcagcagattgttgagcgcgatatcttgcgtgaaatggttaatatagtaaagaagaagcctgacttgaatgttagggaaacaatactcattttgatagacacatggcaagaaaccctttgaggatctagtgg

SEQ ID NO: 1731 - DNA, 1789 bp, Gossypium hirsutum
  Clone ID: GOSHI-09MAY01-C0_1
acaaacttgagaaatctttgagaaaatctgaaatctattccagcattttcttatagcgattagtttgagaatggaggcgaagctgatagagaggctggaagccgcggtggctcggctggagtctctatcggccggtggaatctcggcgaggggattaccggacggtgttgatgaggtgtcttcggatccttcggttttggcgtttgacgatctgatggatcaatatgcggctagggtttcggctgctgccgagaagattggaggtcaagtgctggatgtgactaagctagttctcgaggcattctctgttcaaaagaaacttcttatcgagatcaagcagactcagaaacctgatatggcgggcttggtcgaatttctcaaaccactgaatgaagtgatcttgaaggttaatgctatgacggaagggaggcgatctgatttcttcaaccacttgaagagtgctggagacagtctttcagctttagcatggattgcttacacaggcaaagattgtggtatgagcatgcctatcgcacatgtggaagaaagttggcagatggctgaattttataacaacaaggttcttgtagagtacagaaacaaagatcagatccatgttgaatgggccaaagctttgaaggaactgtatttaccgggtctgagggattatgtcaaaagccattatcctcttggcccggtatggagtgcttccggtaaaaaggcatctagtgctccgccaaaagctcctccaccaggggcccctgcacctcctccccctccacctgcttctcttttcagctcagaaccttctcagccttcttcatcaaatccaaaacaagggatgtcagctgttttccaagaaattagtagtgggaatgtctctgcaggcctgaagaaggttactgctgatatgaagacaaagaaccgtacagatagaacaggtgttgttagtgccagtggaaaggaaacacgttcaagctccccttctttctcaaaagccggaccacccaaactagagctgcaaatgggtcgcaagtgggctgttgagaaccaaattggaagaaagaacttagttattgatgactgtgatgccaaacagtctgtgtatatttatggatgcaaagattctgttttgcagattcaggggaaagtcaacaatataaccattgacaaatgcactaagatgggagtggtatttaaggatgttgtggctgcttgtgaggtagtaaactgcaatggtgttgaggtgcaatgtcagggttctgctccaacaatttcagtggacaacacatctggctgtcagttgtacttaagcaaagactctttagggacatctataacatcagcaaagtcaagtgagatcaatgtgttggtgcctaccggacctgatggtgactggggggagcattcattgccgcaacagtatatccatgtatttaaggatggtcaatttgaaactaccccagtgtcgcactcaggagcataagtgaggcctatttgaattgaaaactcagctttcctttggggggaaaaacaattatattctttcattttcttggatacatacctatgggtgaattttacttcttccgtacggctgtttatttattttaacacacatatcatttggtcatcatctgtattatttcacaactacagtttgaatctcttccataacctgttttttggttggtgtgttttgttttttggcgatgatgagttgggaatttttgcaaatattactgttaagtttctaaatgttctactttcctttggatttttattaagt

SEQ ID NO: 1732 - DNA, 424 bp, Gossypium hirsutum
  Clone ID: LIB3145-025-Q1-K1-F8
cccacgcgtccgcctgaggaaggttactgatgatatgaaggcgaagaaccgtactgatagaacaggcgttgttagcaccagcgaaaagcaaacaagttccacaccctctactactacccctactgtcaaaaaagtcgcaccaccaaaactagagctgcaaatgggtcgtaagtgggctgttgagaaccacataggaaacaagaacttagttattgatgattgtgatgccaaacaatctgtgtatgtttttggatgcaaggattccgttttgcagattcaggggaaagttaacaatataacacttgataaatgcactaagatgggagtgttatttaaggatgttgtggccgcttttgagatagtaaattgcaatggcgttgaggcacaatgtcagggtttcgctccaacaatttcagtggacaac

SEQ ID NO: 1733 - DNA, 348 bp, Gossypium hirsutum
  unsure (1)..(348): unsure at all n locations
  Clone ID: LIB3584-008-P1-K1-A3
acttaataaaaatccaaaggagagtagaacattagaaacttgacagtaatatttgaaactaccccagtgtcgcactcaggagcataaatgaggcctatttgaattgaaaacttagctttcctttgggggaaaaacaattatgttgtttcattttcttggatacatacctatgggtgaattttacttcttccgtacggctgtttatttattttaacacacatatcatttggtcatcatctgtattatttcacaactacagtttgaatctcttccgtaacctgttttttggctggtgtgttntgttttattggcggtgttgtgttgggttttttttctttttttcctttc

SEQ ID NO: 1734 - DNA, 322 bp, Gossypium hirsutum
  Clone ID: uC-gsflnu33B135e01b1
cctactcgtccggaccagccagactagagctgcttgtgggtgataagtggggtggtgagaaccaagttggaagactgaacttagttattgatgactgtgatgccaaacagtctgtgtatatttatggatgcaaagattctgttttgcagattcaggggaaagtcaacaatataaccattgacaaatgcactaagatgggagtggtatttaaggatgtgtgtggctgtttgtgagggaggtaactgcaacggcgaggcggtgtaatgttagggatttgctcaccctgtttgagggggccacacaattgtgtgagaggtgttct

SEQ ID NO: 1735 - DNA, 251 bp, Gossypium hirsutum
  Clone ID: LIB3493-038-P1-M1-G12
atctgctctacagacaaacttgagaaatctttgagaaggtctgaaatctattccagcattttcttatagcgattagtttgagaatggaggcgaagctgatagagaggctggaagccgcggtggctcggctggagtctctatcggccggtggaatctcggcgaggggattaccggacggtgttgatgagggcttgactctagcccgactttgggaaatgacttgagaggtgtagcaatatgcggcttggggt

SEQ ID NO: 1736 - DNA, 433 bp, Gossypium hirsutum
  Clone ID: GOSHI-09MAY01-C90_1
gcattattgtcggcatcatcttgtcttcccgagctggccaatctagagcagaataagatgctggtggaattggttagtattcttttatttgcttatattggtatattaccatatgaaaaaagagtattcgatcgttctcgggttagttccgatttaaacagcaaatccagggttggtattattagtatttaatgaaaagcaactacttttgagagttcatttagcggttgctcttttcactttgtagaagtagaaatgagtttctatgaataaattgacaagaacctttttatccctgtttgaaggttattttcatcagtctatatctttgcttctgaaattgaaacttttctctatggaagttcaattttggagataatgccttaatctgttattatttttttaatgatccgtgtttgatacatattcggat

SEQ ID NO: 1737 - DNA, 1155 bp, Gossypium hirsutum
  Clone ID: GOSHI-09MAY01-C80_1
cggattttctttccccgtggttggttgcacagaaagtgagagaaagttttacttttgattttgaaactccgatgagaaaaccttgctgcgataaacaaggcaccaacaagggagcctggtccaagcaagaagatcaaaagctcattgattatatacgtatacatggtgaaggctgttggcgttccctccccaaagccgcaggtttgcaccgttgcggtaaaagttgcaggctgagatggataaattacttaagaccagatatcaaacgtggtaactttgctcaagacgaagaggacttaattatcaaactccatgctctccttggtaaccggtggtcactgatagctggtagattaccaggaagaacagataatgaagtgaagaactattggaattcccatataaagagaaagctaatgaagatggggatcgatcctaataaccataagttgaaccaatatcctcatcatgttggtccccttaaccccaccaccaccaactccatggatgtggcatgtaagcttagagtgttttcaacagaaaatgatgatggggtctcagatgctgcaagttatctcgaagacgcaacaccgcccactggtgtatccaacttggaccttgatctcacaattgcttttccttcgagtcctatcaagaatattattgaagaaagccagcagaacccagcatctattgtaccaaatgatgaagaagaccaatatacagtccctacccttcttcttttcagatgagacaaaaaaaaaagagcctcacacatgtggagattcgtgcaaaagacctaaaggcttacgaaggcaacatgcacgccattgtcaaattcttttggatgatggattgaaaccatatccttgtccattagaaaggaggaagataagctaaacctgtattattgtgtataaatttggtagaaagaaagatttcaacttaagaattaggatcaaataactgaatgaatgaaccaattgcagataagttgtttggaggtttctccccccccctatctgcaattaatttggtggagctgatgtaggatgatgagttcatcgtacatgaactgaacctttgatatttcaggctctatttgtctgtttgtatgcgtaaagatattcttcaatgtccagatcagctaaaaaa

SEQ ID NO: 1738 - DNA, 949 bp, Gossypium hirsutum
  Clone ID: GOSHI-09MAY01-C50_1
cccacgcgtccgcccacgcgtccgggcaagaccaggttctccattaatggaaaaccggggtaccatttcgttggcacatccaccttcagtgaatacactgttgctcatgttggcagtgttgccaaaatcaatcccgccgctcctcttgacaaagtttgtattctcagctgtggcatctctacaggtcttggtgccaccttgaatgttgcaaagcccaccaaaggttcaactgtggccatttttggactgggagcagtaaggcctcgctgctgctgaaggggctagcattgcaggcgcttctaggattattggggttgatctgaatcccaacagatttgaggaagctaagaaatttggttgcactgaattcgtcaacccgaaagaccataacaagccggttcaagaggtgcttgctgaaatgacaaatgggggaggtgatcgaagcgtcgagtgtactggaaacattaatgccatgatctctgcatttgaatgtgttcacgatggatggggtgttgcggtactcgtcggtgttccaaacagagatgatgcatttaaaacacatcccgtgaattttttgaatgagaggactctgaaaggaaccttctttggcaactacaagccccggtccgaccttccttcggtggtggaaaagtatatgaacaaagagcttgagctagagaaatttataacgcagcaagtggcattccgggatataaacaaggccttcgattacatgcttgctggggagggcatccgctgtatcattcgcatggatgcttgaaaatttgtaaacccttaataaagaaatgtgaataaattgagcaatcaatgcgttacccttttcatgctttgtatattcatgtgacggtacccaccacgccttgttttgatttgctttgatgtatcatcaaactacaattccatttcttttttaaaaaaacggcacgag

SEQ ID NO: 1739 - DNA, 542 bp, Gossypium hirsutum
  Clone ID: GOSHI-09MAY01-C40_20
cttttagacactcagctttcttaatgtttcttacccacatcaatacttggatctgggtgttgacttatttacgtgtgcaagggccccatacatacatttcgataattgtgtcatttacattgtcggtgctgcgagccccaaaatactcagcccattcaacttgatgaagcgtacgaattgttttatgaaagtataagttttgtctggtccttattgggaccatgttttggggtactggaaagcatctttggaacgtccagacaagttaaggctcttgaaatacgaagacctggttgaagatactgtctcggatcttaagaaaacagcagattttatgggttatcctttcttcgtagaggaacaacaacaaggggtgcctgataacattgtgttgatgtgtagttatctactacttttagtggtttggtagtaattttaactcttatactatcttttcctgaatttcatttttcttatctgatcttaatctttttttttttccctatcgttgattatttctttctttttctcattttttcttt

SEQ ID NO: 1740 - DNA, 494 bp, Gossypium hirsutum
  Clone ID: GOSHI-09MAY01-C40_14
cccacgcgtccggtttatgggttatcctttctcgtcagaggaacaacaacaaggggtgcgtgaaaacattgtgaagatgtgcagttcccacgcgtccggtggcttggaagtaaataaaaccgggagacatcgtgaagggaaaggaaatatggagacggaaaataacattttcttccggaaagggaaggttggagactggaagaattatttgaccactgaaatggctcaacgtttagaccaacgaacactgcaacagttgagcggttcaggtttaagtctctaattgaagatctataatctatttagcatccagtgttgcttaaacctgatcggagttcgtaatcatctcttttaataatattacttttaaataaggtcatcttggccgggtcttgtaatcaatgttaatagtctcgtatattgtaatcaatattaatagtcttgtataaatttattgtactatttcttgaattttgaagctcgtaatagaactt

SEQ ID NO: 1741 - DNA, 952 bp, Gossypium hirsutum
  Clone ID: GOSHI-09MAY01-C40_13
cccacccgtccctcgcgcggccgcccccgcctccgcacagactttgagcaaagcagcctcatttctccaagatggctagagggttgaagaaacatttgaagaggctcaatgcccccaggcattggatgcttgacaagcttggtggtgcttttgcacccaagccatcgtctggtccccacaagtccagggaatgctcgccattgatccttattttgcgaaaccgattgaagtatgctctcacctatagagaagtcattgctattctcatgcagaggcatgttatggttgatgggaaggttaggacggataagacctatccagctggtttcatggatgttgtgtccattcctaaaacaaatgaggacttccgtctactttatgacaccaaagggcgatttcgtctccatgccatcagtggcgatgaaaccaagttcaagctttgcaaggttacgatctgtccagtttggccagaaaggtattccatacttcaatacatacgatgggcgtactatccgctacccggaccctgtgatcaaggctaatgacaccatcaagctggaccttgagagcaacaaaattgttgatttcatcaagtttgatgtcggaaatgttgtcatggttactggaggaaggaacagatgcctgttggtagttgttaataacagggtgtttcacatgggtttttttgataactattcatttttaggttgcttcttggttatgagtttgctactatgatttgtttatttgttcatattttgatatggatcgtaattcattgtgtttatcttgtttatggtcaatggttatatagttttccttttactgtagatgtcatgtaattttttttttttccttttatttctaaattgtttcttaagtatatttatattttatattatctattttttattaattttatatattatttttttcttatatatttttcttt

SEQ ID NO: 1742 - DNA, 934 bp, Gossypium hirsutum
  Clone ID: GOSHI-09MAY01-C40_12
cccacgcgtacgcccacgcgtacgcccacgcgtgcgctccaatatggctagagggttgaagaaacatttgaagaggctcaatgcccccaggcattggatgcttgacaagcttggtggtgcttatgcacccaagccatcgtctggtccccacaagtccagggaatgctcgccattgatccttattttgcgaaaccgattgaagtatgctctcacctatagagaagtcattgctattcttatgcagaggcatgttatggttgatgggaaggttaggacggataacacctatccagctggtttcatggatgttgtgtccattcctaaaacaaatgaggacttacgtctactttacgacaccaaagggcgattgcgtctccatgccatcactggcgatgaaaccaagtgcaagctctgcaaggttcggtctgtccagttcggccagaacggtatcccctacctgaatacgtatgatggtcgcaccatccgctaccctgatccactgatcaaggctaacgataccatcaagcttgacctagagagcaacaaaattgtagatttcattaagtttgatgttgggaatgttgtcatggtcactggaggaagaaacagagggcgtgttggagtgattaagaaacgtgagaagcataagggtagcttcgagacaatccacatccaagatgctgctggacacgaatttgctactcgtttaggcaatgtcttcacaattggtaaaggaacgaagccatgggtgtcacttccaaagggcaagggtatcaagttgtccatcattgaggaagccaggaagaggcttgcggcccaagctactgtctaaattttatgattaaagatataatatctggaattgttttttgtcaaatgaattaatctgtttggtggtcctttgtgtttgcttttgtaggatttatgttttgtt

SEQ ID NO: 1743 - DNA, 713 bp, Gossypium hirsutum
  Clone ID: GOSHI-09MAY01-C40_9
cccacgcgtccgcccacgcgtccgcggacgcgtgggtgcgaaacagattgaaatatgctctgacctatagagaagtcattgctattctcatgcagaggcatgttatggtagatgggaaggttagaactgataagacctaccctgctggtttcatggatgttgtgtcgattcccaaaacaaacgaggacttccgtctcctttacgacactaaaggtcgtttccgcctccatgccatcactggcgatgagaccaagtttaagctctgcaaggttcggtccgtccaatttggccagaagggcattccatacctgaacacctacgacgggcgcactatccgctacccagaccccttgatcaaggccaacgacaccatcaagctggaccttgagagcaacaagattgtcgatttcatcaagtttgacgttgggaatgttgtcatggtcaccggtggaaggaacaggggtcgtgttggagtgattaagaacagggagaagcataagggtagcttcgagaccatccatgttcaagatgctgctgggcacgagtttgcaactcgtctaggcaatgtcttcacaatcggtaaaggaacaaagccatggatttcgcttcccaagggcaagggtatcaagttgtcgatcattgaggaagcgaggaaaaggcttgctgctcaggctgctgcttaaacctatcatatctagagtttttttttttgt

SEQ ID NO: 1744 - DNA, 837 bp, Gossypium hirsutum
  Clone ID: GOSHI-09MAY01-C40_8
tttggtagtattttttagctttgaatttgaatttgtggtatatagttaccatatataatttacttgctgcatggatggatgaaatctgggtcccttgtttgaggctgaatggtagggtcagtgttgtcaaggcatgtacctaggtgcgtctgtgcctttgcagcattcaacagaaatgcctcagacctttccaggcgaggcccatttaatgaggcatagacgccttgtgtgccttggtgctcttttttgtaaggcagtagacttagataaacctggatgattgaaatttttactaataaaaaagggataatgtcaaacttgattggccaatgtttgctgttgatttcatgttatggtagttttaaaatggtttgggtttctttgataattggtttataattgagtttttttaatgtgtttactctcctttgttttaaatttgggtctatatattgtttttaatgtgaaaattcttgtgctttaaacaatataaattttggatttatttaaagttttcttctttcaggctagagggttgaagaaattcttgaagaggctcagtgccccccaggcattggttgctcgacaagcttggtgggggcattcatatgttatttttcccgagctttcttttggcttcctttctagtccgatgctggcttcattttaattttggattccttgggtattttttacttaccttgcaatgtgtatagtcataggcaggttcaactagtcagtctgtttctcatatgtattatttattttagttttgattctaaatttttatttttactttaatatttatgataacttgagttctaacttttgaatttt

SEQ ID NO: 1745 - DNA, 821 bp, Gossypium hirsutum
  Clone ID: GOSHI-09MAY01-C40_7
gcgaaacagactgaatatgctttgacatacagagaagtgattgctattcttatgcaaaggcatgttatggtagatgggaaggttaggactgataagacctaccctgcaggttttatggatgttgtgtcaattcccaagacaaatgaggacttccgtctcctttatgacactaaaggtcgtttccgccttcatgccatcactggtgatgagactaagaagggtattccatacctgaatacctacgatggacgcacaatccgttacccagaccctttgatcaaagccaacgacaccatcaagcttgacttagagagcaacaaaattgttgatttcatcaagtttgatgttgggaatgttgtcatggtcactggtggaaggaacaggggacgtgttggagtgattaagaacagggagaagcataagggtagcttcgagacaatccatgtacaagatgctgctggacacgagtttgcaactcgtctaggcaatgtcttcacaatcggtaaaggaacaaagccatggatttcgcttcccaagggcaagggtatcaagttgtcgatcattgaggaagcgaggaagaggcttgctgctcaggctgctgcttaaacctatcatatctagagttttttttttgtcgaaagacttgttggatgaatgctggctggtcctgtcctagcttctgtagggttttacggatttgctttttattaatgtttttttttctatgaatttagtttagttactcatttggtttatgttatattttaactatcatttatcacattacagttctttctgaaatctattgttttacttggatt

SEQ ID NO: 1746 - DNA, 1170 bp, Gossypium hirsutum
  Clone ID: GOSHI-09MAY01-C40_6
cgcacccgattttcttaagaaagaacaactttcagcggaaacagccgcttcctccaacatggctagagggttgaagaaacacttgaagaggctcaatgcccccaggcattggatgctcgacaagcttggtggtgcattcgcgcccaagccatcgtctggaccccacaagtcgagggaatgtttgccacttattcttattctgcgaaacagactgaagtatgctttgacatacagagaagtgattgctattcttatgcaaaggcatgttatggtagatgggaaggttaggactgataagacctaccctgcaggttttatggatgttgtgtcaattcccaagacaaatgaggacttccgtctcctttatgacactaaaggtcgtttccgccttcatgccatcactggtgatgagactaagtttaagctctgcaaagttaggtctgtccaatttggccagaagggtattccatacctgaatacctacgatggacgcacaatccgttacccagaccctttgatcaaggctaacgacaccatcaagcttgaccttgaaagcaacaaaattgttgatttcatcaagtttgatgttgggaatgttgtcatggtcactggagggaggaacagagggcgagttggagtaattaagaatagggagaagcataagggcagctttgagacaatccatgttcaagatgctgctgggcatgagtttgcaactcgtctcggcaatgtcttcaccatcggaaaaggaacaaagccatgggtgtcccttcctaagggtaagggtatcaagttatccatcattgaggaagctaggaagaggcttgctgcccaaaatgctgcctaaactttagcataagacatccagatatgtattgctgcagtagtttattctaaagattagctggagttgtttatttatgaagttgtgagcaaaattttgagaactatttacttcttgcaatttatctttttttctgtcgggtgatgttacctactttaccaccaggctttaaattatcgaatactcggctgtttcatgaatattagtgcttttgttggttaaatgagaggtgcctcctttgtggatgaactccttcccagctaatgcaatatttgtttccatgctcatcattttcattgtaaagtaatgcaaatgcaacgcaggtg

SEQ ID NO: 1747 - DNA, 1044 bp, Gossypium hirsutum
  Clone ID: GOSHI-09MAY01-C40_5
gtttttccttctataactcacaacacttttttttttctctcaagctcgctaacgttttcagcacacactcaattcatttttcatgagactctacttacatttttataagcatagtaaatcgacttaaactttatcatgccttaccgtctaagattgttcaagctgctgccatcattatcctttgtccttgatttttcatgaaattcggcaggccacgttttctatgaggttgaaagccaattggataaccctcccgtccccccacgcgtccggctgaaagtcggtttgttttctaacacagcctatataaagccattgtttccatactacttgcactcattactcatggaatcccactttgattcccatgttgagcaacataacgaagatgagtttcagaaatctttcaaagagatgatttctactctccctaaagggaacagctggggtcttcccgatcatctatatcagtatcaagatttttggttcacctcacctttcctacaaggagtcctgttagctcaccaacagtttgaggctcaacccactgatatcatacttcctagggcccctagaccgcggcacagcctggttaaaatctctcactgtcgcttctctttccagaacctcataccatgattctaccacccctttgcttttcaggatgcctcatgatgttgtgcctttcatggagcttgagcatgctcatttttccgctaatcgacatcttggaattcctctcttggccactcatgctccttattctttcttacctacatcaataattgattctgggtgtaaaattatttacatttgcagggaccccaaggatacatttgtttcaatgtatcacatctgtaccaagtatgcgaaatcccaaacactcacccatagaacttgatgaagcgttgagttatttgtgaagcgtaagtggtccgacctattggaccatgtctgggatctggaagcagcttggacatcggcaattatgtctgaaaatataaagatgaaaacggtggtctaaaaaagggaatatggtgcctt

SEQ ID NO: 1748 - DNA, 799 bp, Gossypium hirsutum
  Clone ID: GOSHI-09MAY01-C40_4
ccgccgtttgttctaaataacctgtgggtggctttatacaaattgattcccatgttgcgcaacataacgccgatggggttccgaaatctttcaaagagatgatttctactctccctaaagggagctgctggggtcttcccgatcatctatatcagtatcaagggttttggttcaccccgcctttcctacaaggagccctgtcggctcaacaacagtttcaggctcaacccactgatatcatcctttctagcgcccctagaaccggcgcagcctggttaaaatccctcactttcgccactattacaagaacttcatacgatgattccacccacccctttgctttccaggatgcctcatgatgggtgggcctttcatggagcttgatcatgcccagttttccgctaatcgacatcttggaattcctctcttggccactcatcccccttattctttcttacccacatctataattgattctgggttgtaaacttatttacatttgcagggaccccaagatacatttgtttcaatgtatcacatctgtaccaggtatgcgaaatccaaacactcaacccatagaacttgagaagcgtggagttatttggtgagggctatggtaccgacttattgggacctgtctgatactggaacaagcttggaacatcccggacaagtatgtcttaatatgagaaatgaaatgaagatactgttgatctaagaattttcagagtttatagtgcctttacgagacagagggtcttgaagttttagaatgattgaataccctgaggaaatggga

SEQ ID NO: 1749 - DNA, 1440 bp, Gossypium hirsutum
  Clone ID: GOSHI-09MAY01-C40_3
ttgtaataattgaggtaatgattttttctttttctttttctttatattttcattttagtatttctttatattaaaaaatatcattccatcccactgcctccttattaaagaaaaagaagagtggcagcctatttacaaagcaattaatccttgtaatatagtatttgcactcattagcctgtccctcatggaatcccatcttgagaaacaaaatggagatgtgcttcaaaaatctttcaaagagatgatttctactctccctaaaaagagttgttggggttttcctgaagatcaatatcaatatcaaagtttttggttcagcccgccttttctacaaggagcattgtcggctcaacaacaattccaagctcagccaactgatatcatcctttgtagctctccaagaacaggcacagcctggttaaaatccctcactttcgccactattacaagaacttcatacaatgattccaccacccctttactttccaagatgcctcatgatgttgtgccttacatggagtttgatcatgcccagatttccactaatcgacatcttggaattcctcttttagccactcatcttccttattccttcttacccagatctataattgattctggttgtaaacttatttacatttgcagggaccccaaagatacatttgtttcattgtatcatttcattgcagggcactgcaaatcccaaaatgctcaacccgttcaacttgatgaagcgttcgaattgttttatgaaggtgtaagcccgtttggcccttattgggaccatgttttggggtactggaaagcaagtttcgaacatccggacaagtttatgttcttgaaatatgaagaaatgaatgaagatactgttttgtatcttaagaaattggcagagtttatgggttgtcctttctcaacagaggaacagcaaaaaggggtacctgaaaagattataaagatgtgtagttttgagaatctaagcaacttggaagtgaataaaagtgggatacatcgtgaagggcaagggaatttggagattcaaaacaagatttattttcggaaagggaaggttggagattggaagaattatttgacgcctaaaatggccacacagttagaccaaataactcagcaaaaattaagtagctcaggtttaagtcttaattaaataagaagccaatgtttcattagatccattttcgaaactaataatgtttgcatggtgcctagtttcttttttttaaagcatgggtagggtttgatctctattttactatcctttgattaaggattaggattatgtttaaaccttgtattgtcgtttcgtttaacttaatttgcggttgttgattaatgtgggcattgccccaacctttaacccctgttattgggactgttttttaagattattttatcataaagaggggttttgatggg

SEQ ID NO: 1750 - DNA, 1251 bp, Gossypium hirsutum
  Clone ID: GOSHI-09MAY01-C40_2
gaagagtggcagcctacttacacagccatccttgtataatatagtatttgcactcattagcctgtctctcatggaatcccactttgattcccatgttgagcaacataacgaagatgagtttcagaaatctttcaaagagatgatttctactctccctaaagggaacagctggggtcttcccgatcatctatatcagtatcaagatttttggttcacctcacctttcctacaaggagtcctgttagctcaacaacagtttgaggctcaacccactgatatcatactttctagtgcccctagaaccggcacagcctggttaaaatctctcactttcgctactattacaagaacttcatacgatgattctaccacccctttgcttttcaggatgcctcatgatgttgtgcctttcatggagcttgatcatgctcatttttccgctaatcgacatcttggaattcctcttttggccactcatgctccttattctttcttacctacatcaataattgattctggttgtaaaattatttacatttgcagggaccccaaggatacatttgtttcaatgtatcacatctgtaccaggtatgcgaaatcccaaaacactcaacccattcaacttgatgaagcgttcgagttattttatgaaggcgtaagttggtatgggccttattgggaccatgttctggggtactggaaagcaagcttggaacatccagacaagttaatgttcttgaaatatgaagaactgattgaagatactgttttgtatcttaagaaaatagcagaatttatgggttatcctttctcgtcagaggaacaacaacaaggggtgcctgaaaacattgtacagctgtgcagtttcgagaatttaagtggcttggaagtaaataaaactgggaaacatcgtgacgggcaaggagatttggcgatggaaaataacattttcttccggaaagggaaggttggagactggaagaattatttgacaactgaaatggctcgacgtttagaccaacgaacactgcaaaagtttcgcggttcaggtttaagtgtctaactgaaggtccacaatctatttatcagagatcagaattggtaattatgccttttaataatattatcttcaaataaggtcatcttgatcaagatttgtaattatcccatttagtaatattgatggggattgatttattgtactattcctccgatctttagttggagctcgttagtagaatcttatcagtt

SEQ ID NO: 1751 - DNA, 1176 bp, Gossypium hirsutum
  Clone ID: GOSHI-09MAY01-C40_1
tctttcgccccgcgtccgcggccgcgtggggcgggggcatcgtcttcaaagaacgctttaccatcaaaaccagctagctaaatcaaccgcatttcatccaggatggctagagggttgaagaaacatttgaagaggctcaatgcccccaggcattggatgcttgacaagcttggtggtgcttttgcacccaagccatcgtctggtccccacaagtccagggaatgcttgccattgatccttattttgcgaaaccgattgaagtatgctctcacctatagagaagtcattgctattctcatgcagaggcatgttatggttgatgggaaggttaggacggataagacctatccagctggtttcatggatgttgtgtccattcctaaaacaaatgaggacttccgtctactttacgacaccaaagggcgatttcgtctccatgccatcactggcgatgaaaccaagttcaagctttgcaaggttcgatctgtccagtttggccagaaaggtattccatacttgaatacatacgatggtcgtactatccgttaccctgatcctttgatcaaggctaatgacaccatcaagctagaccttgaaagcaacaaaattgttgatttcatcaagtttgatgttgggaatgttgtcatggtcactggagggaggaacagagggcgtgttggagtaattaagaacagggagaagcataagggtagctttgagacaatccatgttcaagatgctgctgggcacgagtttgcaactcgtctcggcaatgtcttcacaatcggaaaaggaacaaagccatgggtgtcgcttcccaagggcaagggtatcaagttatccatcatcgaggaagctcggaagaggcttgcagcccaaaatgcagcttaaactttagcatgagatatccagatacgtcttgttttcacctaaagagtaaaatttggagaactaatttcttcttgcagtttaaagtgtttgtgttgtgggtgatgtcatagacttttattttatagaatattttgatgttttcttgattatcaaccctgcttttttcaaactaatctttgtatgctttttgcttaaactaatattttatttatgtttaatataatgcccctaaaagcattgaaagacaatacaaccaccaaaagttaagcaaaaaaaaataaactc

SEQ ID NO: 1752 - DNA, 602 bp, Gossypium hirsutum
  unsure (1)..(602): unsure at all n locations
  Clone ID: LIB3583-045-P1-K1-H12
ttgtaaacttatttacatctgcaggggcggggggggcatttgtttcattgcatcatttcaatgcaaggtacaacaaatcccaaaatactcaacccgttcaacttgatgaagcgttcgaattgttttatgaaggtgtaaattggtatgggccttattgggaccatgttctggggggggttagaccgggttcggaacatccagacaagttactattcttgaaatatgaagaactgattgaagatactgttttgtatcttaagaaaatagcagaattcatggggnatccttactcgtcagaggaacaacaacaaggggtgcctgaaaacattgcacagctgttttttttcttttttttaattggctnggaaggaaacaaaacngggaaacancgcgacgggcaaggagatttggcgatggaaaataacattttcttcctgaaagggaaggttggagactggaagaattatttgacaactgaaatggctcgacgtttagaccaacgaacactgcaaaagtttcgcggttcaggtttaagtgtctaactgaaggtccacaatctatttatcaagatatcagaattggtaattatgccttttaataat

SEQ ID NO: 1753 - DNA, 460 bp, Gossypium hirsutum
  Clone ID: LIB3583-056-P1-K1-B9
cccacgcgtccgcccacgcgtccgtttacttgctacatggatggatgaaatctgggtcccttgtttgaggctgaatggtagggtcagtgttgtcaaggcatgtacctaggtgcgtctgtgcctttgcagcattcaacaaaaatgcctcagacctttccaggcgaggcccatttaatgaggcatagacgccttgtgtgtcttggtgctattttttgtaaggcagtagacttagataaacctagatgattgaactttttactaaaaagaaaaggataatgtcaaacttgattggccaatatattatatataagctttatacttctaaatattgttttacatgtgatggataaataagaaagggataatgtcaaacttctaaatattgaacatacttgcatcagaggcatacttgtatcaaaacttcaaaatggcatgggtttggtgattgtgcttcatgtgt

SEQ ID NO: 1754 - DNA, 424 bp, Gossypium hirsutum
  Clone ID: uC-gsflnu33B055f04b1
tctacgttagcgtccacgcgtccggagcaaagcagcctgatttcatttctccaatatggctagagggttgaagaaacatttgaagaggctcaatgcccccaggcattggatgcttgacaagcttggtggtgcttttgcacccaagccatctgttgagccccacaagtccagcgaatgcttgacattgatccttattctgctaaacaccaagtacaatgttactcccactgagggaatcctttgttgctctttaacaacaggcacaggctggttaaaatacctcactttcgccactattacaagaacttcatacaaagatttcaccacccctttactttacacgctgccttatgatgttgtgcctctcatggagttcggacattcccagttttccactaatctacatcttgggaattcctctttt

SEQ ID NO: 1755 - DNA, 474 bp, Gossypium hirsutum
  unsure (1)..(474): unsure at all n locations
  Clone ID: LIB3145-024-Q1-K1-D1
ggaanataccgggtccgacccaacgcgtctcggcaagtacacaagtactttgatgcaaagtcagtccttattttctctcaagatggcttagagggttgtaagaggacatgttgaagatggctcaatgtcccccaggcatttggatgcttgacaaggcttggtggtagcttttgcacccaagccattcgtttggtccccacaagtccagggaatgcttgccattgatccttattttgcgtaaccgattgatgtttgctctcacctatagagaagtcattgcttttctcatgctgaggcatgttatggttgatgggatggttaggacggtttagacctatccagcttggtttatggttgttgtgtcctttctttaatcatattgttgactttttgatttctttaattccaccaaatggttggttttctttactattgttttatgatggatatttaattcaatgtttaagttttttt

SEQ ID NO: 1756 - DNA, 423 bp, Gossypium hirsutum
  Clone ID: LIB3147-055-Q1-K1-C9
cccacgcgtccgcccacgcgtccgcccactcgtccgctcacgtacagagaagttattggtgttctcatgcagaggcatgtcatggttgatgggaaggttcggaccgataagacttatcctgctggtttcatggatgttgtgtccattcctaaaacaaatgaggacttccgtctcctttatgacaccaaagggcgtttccgtctccatgccatcacgggtgatgaaaccaagtttaagctttgcaaggttaggactgtccagtttggccagaaaggcattccatacctcaatacatatgatgggcgtactatccgctacccggaccctctgatcaaggctaatgacaccatcaagctggaccttgagagcaacaaaattgttgatttcatcaagtttgatgtcggaaatgttgtcatggtgact

SEQ ID NO: 1757 - DNA, 347 bp, Gossypium hirsutum
  Clone ID: LIB3147-021-Q1-K1-A11
cggcaagacacaaactgtgaacttaacagcctaatttttccattattgctagaggcttgaagaaacgggtcattgtgctctattcccccaggcattgaatactacacaagcttggtggtgctttcgcacccaagccatcgtctggtccctacaagtccaaggaatgcttgccattgatccttattttgcgaaaccgattgtagtatgctctcacctataaacaagtcattgctattctcatgcataggcattttatggttgatggaaaggtttggactgataatatctatccagctggtttcatcgatcttatcttcatttactaatacaaatgaagacttccctct

SEQ ID NO: 1758 - DNA, 329 bp, Gossypium hirsutum
  Clone ID: uC-gsflnu33B024e09b1
agcgaagaaggacgtggcttgtctgcgataagcctcggggagccgacaagtaggctttgatccggggatgtccgaatcgggaaaccgggcagaagaaattctgtcatctctcagtgaattcatagctgagtagaagcgaacctggggaagtgaaacatcttagtacccaaaatgctgcctaaactttagcataagacatccagatatgtattgctgcagtagttttttctaaagattagctggagttgtttatttatgaagttgtgaccaaaattttgagaactatttacttcttgcaatttatctttttttctgggtgatgtttccta

SEQ ID NO: 1759 - DNA, 519 bp, Gossypium hirsutum
  Clone ID: GOSHI-09MAY01-C70_5
ccacgcgtccgcaataaatcacttgcctcgtttccatcgacaacttctctatatctctctcttctctctatttccccatctccctgtctcactacattgctctgattcttgttcacgtcaagcttgacaggtagcactgaagctttggcttaaatgggtatttgctattgtaggcattttctgtttttctcaatggcaatggatgcttcactgactatgtgcaaatcggtcacatcacctcctggcttattcttggggagaagtagagttattaggagttcccagtgtacctttatggtgggaagcaggatcaactttcctaggcagaaagctcagtcaacccaagttaaatgtaaatctagcaggtgtggagtagctcttggtgctaaatgccgtgctgagaaaattttggtggcaaatagaggagaaattgctgttcgtgttatccgaacagctcatgagatgggaataccatgtgttgctgtttactctacaattgataaggatgcacttcatgtg

SEQ ID NO: 1760 - DNA, 660 bp, Gossypium hirsutum
  Clone ID: GOSHI-09MAY01-C70_4
gtttttctcaatggcaatggatgcttcactgactatgtgcaaatcggtcacatcacctccttttcctaggacgaaatcttccaaagctccgatgccccgttaaatgcttattgtgattttacgtatggggcttattcttggggagaagtagagttattaggagttcccagtgtacctttatggtgggaagcaggatcaactttcctaggcagaaagctcagtcaacccaagttaaatgtaaatctagcaggtgtggagtagctcttggtgctaaatgccgtgctgagaaaattttggtggcaaatagaggagaaattgctgttcgtgttatccgaacagctcatgagatgggaataccatgtgttgctgtttactctacaattgataaggatgcacttcatgtgaagctggctgatgaatcagtttgcataggcgaagcaccaagcagtccatcgtatttattgattcccaatgtcctatctgctgccattagcccttactgttctatgcttcatcctgggtatggtttccttgctgagaatgcggttttggtaaaattgtccgaatttcacaggatcaactttattgggcccttccccggcacttttccgggttaatgggtaacaatccactggcccaagaaacattgaagaagcccgc

SEQ ID NO: 1761 - DNA, 1654 bp, Gossypium hirsutum
  Clone ID: GOSHI-09MAY01-C70_2
ggcacgagcgtcattccactgggttggcatatatgcccactgtttctcccatatttgtacaagctccatcaaaaaaaggttttactggttttatggtggatttcctcatgggtggaccctcgcctccgggagtagttgtagtcaaacagcttcctaggcgacctctctggtcactgttttaagttgtaagcatggcagatggatcaaagcgtccatcagtgttccataaaatgcatgggcagtcctatttcatttccaggcttacgcctagcttgcctgctcagaattataacatgactggtgcctataccaatggaggaattcatgttgctttacagccatcacgtcattccactgggttggcatatatgcccactgtttctcccatatttgtacaagctccatcagagaaaggttttactggttttatggtggatttcctcatgggaggagtgtctgcagctgtttccaagacagctgctgctccgattgagcgggtaaaacttttgatccaaaatcaggatgaaatgatcaaagctgggcggttgtctgaaccatacaagggaattactgactgctttgccaggactattaaggatgaaggtgtcattgctctttggagaggcaacactgccaatgttctcagatacttccccacacaggctttgaactttgccttcaaggattatttcaagaggatgttcaacttcaagaaggacagagatggctactggaaatggtttgcagggaacttggcatctggtggtgctgctggtgcttcatcacttctttttgtttactctctggattatgctcgtacacgtttggctaatgataacaaggctgctaaaaagggtggtcagaggcagtttaatggtttagttgatgtctacaggaagaccatccaatctgatggcattgctggtctttaccgagggttcaatatctcatgtgttggaattattgtttaccgtggactttactttggaatgtatgattctttgaagcctgttgttttggttggtggattgcaggatagtttcttggcaagtttcttgctgggttggggtatcacaataggtgctggactggcatcttatccaattgatacggtacgtagaagaatgatgatgacttctggagaagcagtgaaatacaagagctcgatggcagcattttctcaaatcatcaagaatgaaggtgccaaatcgctgttcaagggtgctggtgcaaacattcttcgtgcagttgcaggggctggtgtgcttgctggctatgacaagctgcaagtccttttccttgggaagaaatatggatctggtggcggctaatgtggaaggtgattctgctgccttaaagaatgatctagcgtcccaagtttgaataattttggaaggacaaagtgcttatgatggtccccgttcccagtaattaggaatttaatatgaaaaagttggcgccgaaaaatttacttgagcttttgagtgttacattacatgtgtttagttacaagaccatgtggtttttcttttggtttttggttgacaataattacaacactgatttcatctgtagtatatgaatcggttttcttttgatttgttttgctttcaaaaaaaaaaaaaagtcgacgcggccgcggtcgacgcggccg

SEQ ID NO: 1762 - DNA, 1581 bp, Gossypium hirsutum
  Clone ID: GOSHI-09MAY01-C70_1
aaaacacttgcctcgtttccatcgacaacttctccatatctctctcttctctctatttccccatctccctgtctcactacattgctctgattcttgttcacgtctagcttggcattttctgtttttctcaatggcaatggatgcttcactgactatgtgcaaatcggtcacatcacctcctggcttattcttggggagaagtagagttattaggagttcccagtgtacctttatggtgggaagcaggatcaactttcctaggcagaaagctcagtcaacccaagttagatgtaaatctagcaggtgtggaggagctcttggtgctaaatgccgtgctgagaaaattttggtggcaaatagaggagaaattgctgttcgtgtaatccgaacagctcatgagatgggaataccatgtgttgctgtctactctacaattgataaggatgcacttcatgtgaagctggctgatgaatcagtttgcataggcgaagcaccaagcagtcaatcgtatttattgattccaaatgtcctatctgctgcaattagccgtaactgtactatgcttcatcctgggtatggtttccttgctgagaatgcggtttttgtagaaatgtgcagagatcacaggatcaactttattgggcctaaccctgacagtattcgtgttatgggtgacaaatcaactgcacgagaaacaatgaagaacgcgggtgttcctactgttccgggaagtgatggattgttacagagtacagaggaagcaatcaagcttgcccatgagattggctttcctgtgatgatcaaggccacagccggtggtggagggcgtggaatgcgtctttgctaaagagcctgatgagtttgtgaagttactgcagcaagccaaaagtgaagctgcagctgcatttggaaatgatggagtttatttggagaagtacatccaaaatccaaggcacattgagttccaggttcttgcggataaatatggtaatgttgttcactttggtgagcgagactgcagcatccagagacgtaatcaaaaacttcttgaagagctccttctccagcattgacaccagagttgcggaaggccatgggtgatgcagcagtagctgcagcagcatctattggttacattggtgtaggaactgttgagttcctattggatgaaagaggttccttctacttcatggaaatgaacactagaatccaggtggagcatcctgtaactgaaatgatttcctctgttgacttgattgaagaacaaattcgtgtagctatgggggaaaaactgcgctacaaacaggaagatattgtgctcagagggcattccattgaatgtcgtatcaatgcagaagatgcatttaaagggttcagacccggaccagggagaataacatcgtacttgccatctggaggcccatttgttcgaatggatagccatgtttattctgattatgtagttcctccaagctatgattcattacttggaaagcttattgtatgggctccaacaagggaaaaagcaattgagcgcatgaaaagggctcttgatgacactgtaattacaggggttcctac

SEQ ID NO: 1763 - DNA, 651 bp, Gossypium hirsutum
  Clone ID: LIB3543-062-Q6-K6-D5
ccccgcgtccgccccgcgtccgtatcaatctctctatttttctccattcccttaacactcactctctctttcacttcacctcattctctcattcttcttcacctcatattctttggcatttgtcgctatggcattggattcttccatgactatgtgcaaatccgtcacctcaacccctggcttattcttgcggagaaatacaagtagtaggagtttccaatgtacctttaaggtgggaaccaggatcaactttcctaggcagaaagctcaggtaacccaagttagatgtaaatccagtaaacgtggaggagccctcggtgccacatgccgtgctgagaaaatcctggtggcaaatagaggagaaatcgctgttcgggtaatccgaactgctcatgagatgggaataccttgtgttgctgtttactcaaccatagataaggatgcacttcatgtaaaattggctgatgaatcagtttgcataggggaagcaccaagcagtcaatcgtatttattgataccaaatgtcctatctgctgcacttagcctgaattgtactatgcttcatccgggatatggtttccttgctgaaaatgcagtttttgtggaaatgtgcagagatcacagaatcaactttattgggcctgatcctga

SEQ ID NO: 1764 - DNA, 434 bp, Gossypium hirsutum
  Clone ID: LIB3197-047-Q1-M1-B6
ctcatgtgttggaattattgtttaccgtggacttgagtttggaatgtatgattgtttgaagcctgttgttttggttggtggattgcaggatagtttcttggcaagtttcttgctgggttggggcatcacattctgtgctatacttgcatagtagtaaagttattaggaagttccagtgtacctttatggtgggaagcaagatcaactttcctcgacagaaagctcagtcaacccaagttagatgtaaatctatcaggtgtggaggagctcttggtgctaaatgccgtgctgagaaaattttggtggcaaatagaggagaaattgctgttcgtgtaatccgaacagctcatgagatgggaataccatgtgttgctgtctactctacaattgataaggatgcacttcatgtgaaactggctgatgaatcagtttgc

SEQ ID NO: 1765 - DNA, 1439 bp, Gossypium hirsutum
  Clone ID: GOSHI-09MAY01-C30_1
tctggggttcagacccttgtcgccaagtttttaatgcaaggtaaagctggtcaccatacaccagttttcgagaagtaccgtcagaaggcggagtacttcatgtgttcattgatcggaaagggtagccgtaatattcagaagactcccggtggtttgatttacagacagagatggaacaacatgcagttcgtgacaagcgcttcgttcttggcaaccgtctactctgattatctaacttcctataggggaagcttgaagtgtgctgctggcaatgttgcaccatcggagcttctttcttttgcgaaatctcaggtggattaccttctcggagacaatccaagagctacaagctatatggttggctacggaaacaattatcctagacaagttcaccaccgaggttcttcgattgtttcgatcaaggtcaaccctaaatttgttgcctgccgacaaggttacgcaacttggtttacaaggaaagctagtgatcctaatgtcctcaccggtgctgtggtcggagggcccgacgcctatgataacttcgctgatgaaagggacaattatgagcaaaccgagcctgctacctacaacaatgctcctcttcttggcattctggctaggctcgcgggcggtcatgctggttataaccagctccttcctgtggttgccccagtgcctaatcctgtcattgccaaaccgaaaccggcaccgaagcccaaacggactccaactcctgcctcatcttctagtccaattactataaaccagaagatgacaacttcctggaatcacaagggcaagacttactacagatattccacagtagtgaccaacaagtcttacaagacattaaaggctctcaagctctcaatatcaaagctttatggtcccatatggggtctcaccaagtctggcaattcttatggtttcccagaatggctcaactctttacctgccggaaagagtcttgagtttgtatacatccatgctgcttctcctgctgatgtctctgtttcaagctacaatatagcttaataatggaagccattgcaaaaaaaaaagggtaaggtccaacatgggtctggggtgtggtgttagaatttgtgcagctatacagaatgcgtcaaagaaaaaggttttcctttttttttcttcgctgtttggggattttcaactttacttgttgaatggggtatttaattagggttctaccagatatttagtggaagattggaggagaaatagatagaattgagagacagtaaaagaggatgaaaattgagaaagtaaacaaattacttctcaataagattgcaaggaatctgtttttacttcctacttacacagcagcagctgatgcctttttttttgttgtttgtgttgtaactgcaaactttagcattatatgttttccatataaatacagttcgcacaaaaac

SEQ ID NO: 1766 - DNA, 778 bp, Gossypium hirsutum
  Clone ID: GOSHI-09MAY01-C990_1
tcttcttctaaaatcaatctatgaatttccgtctctgttaacaactcgagctcttcggacgcgatcccttgccaacccgtccggactctgttttaccattcaccgatcgttaacatctcgtcttctttcgcaatctatcagttcaaccaccgcaatcggtgcctactcaatccagtattggggactttcgtactgtcttcctgctcgtgccattctatgagccacgtggttagcctccctggaggatttaagtttgcgtatgagagtcaatgcgtctccttccaccacaacgtcttggaagtccatttcctctgccatagtaactgcttatagacacgctcttgcctccgccataactgggtctggaacattctcccatgggaaggcccgcgctgccatggggcacccatctttattttgcgctaaaattcctgatactgatctccctatgtgttgattaaaggacgcatcaaaattaattctaatagtatcatcttttgggggtgtccatgtatctttctccacttcatttgcatgtctggaagcctatcccatagaattaatttctgcatgataagccttaataaaagctattattccatgaactgattctctgaaaccttcgtgatagatcttgttacgattaaaccagatagcccagtaggcgattgatctaaacgtattcatttctgcatcttgactttcaactatttgttctaaccattttttccaattgggttctgtattgcatattgtatctaccacacccatcattcgc

SEQ ID NO: 1767 - DNA, 523 bp, Gossypium hirsutum
  Clone ID: GOSHI-09MAY01-C890_3
atgcccgagttagagtaacatagttctggatatagtaaggtccatatttttctagtcagatatttgcattcctttcaatgcttctgggttggggcctgaaactctttcattctatatgatgtcgatatatcgaaggtctaataatcctcaataatactttctataattgcaggcaaaagctcttataacgaagctgactgatgaaaaaaataaagctattcaacaaaataacaagcttcgccaagagctggtgagcggaatttggtcttttctgtgttcccctgcacttatcgtctctgataattactcatagtgacagcaaatttcgagttgacatcaatctctctttttacaatgaatccatattttggtcataatcttgtatgaatatgttttccttcttcttctcagacttgcacatgatccctagtcatctttcctttaaaaccgctgcatcctgtcgatagttgcttacgacctgcagttaaaagtttccatccctgatagaattgtgccttcttac

SEQ ID NO: 1768 - DNA, 1047 bp, Gossypium hirsutum
  Clone ID: GOSHI-09MAY01-C890_2
gattaagcgattcctcgattaaatcccattgctccgaaatgagcacgggcgaccttcttaccatcgatcctttagagctcaagtttccttttgagctgaggaaacagatctcatgttctcttcaattgtcgaataaaactgataatcatgtagctttcaaggtgaaaacaacaaatccaaaaaagtactgtgttcgtcccaatacggggatcgtcttgcctcgatctacatgcgaagttatagttaccatgcaagcacaaaaggaggcccctgctgatatgcaatgcaaggacaaattcctccttcaaagtgtaaaagcccctgatggtgttaccgcaaaggatataactgcagaaatgttcaacagagaagctgggaatgtggctgaggaatgcaagttgagagtggtttatgttttttcgcatcaacaaacttcaccttcacaagaagggtctgaattagtgcctagaggctctatttcagacaattctgagtttgttatggctgcaagaacatttatggatcagcttgacactcaagacaaatctcctgaggcaaaagctcttataacgaagctgactgatgaaaaaaataaagcaattcaacaaaataacaagcttcgccaagagctggaactgttgaagcgcgaaagcagcaaaagtgggggcaatctgtctttcatgtttgtcgccttgatcggcttgattgggttaattatgggatacatcatgaagaggtcgtaaaccgctaccgatctagtcaagcttatatgcataatttttctctactttccttcaatggagaagtaaactgcaggaaaagggttaaggtcatatggctctgcactgcagttggtggctggcctgcattgtattgccattaactttgttgcaatctttctgtaacttggaaagagttaatttaggaataaatacgtactatagggtcatgagcaatttagtcccgttaaaaataaacggaaacggggcaatttaatctctgtattattctaaagtgaataaataaagataaaagatggtattaact

SEQ ID NO: 1769 - DNA, 1333 bp, Gossypium hirsutum
  Clone ID: GOSHI-09MAY01-C890_1
tccacgcgtccgcccacgcgtccggaaaaactcggcaaacgccataattaaagattttgttgttttgctctcgatctctccgcccaaatcttgtagacgccaagcagataaattttgtgattactcttttctttctcagatcccttcgaaagcgattcttcttcttctttttattctttttaaattgaattgaagttgctgattcgaaatgagtacggccgaccttctcagcatcgagcctttagagctcaagtttccttttgaactgaggaagcagatctcgtgtgctcttcaattgtcgaataaaactgataattatgtagctttcaaggtgaaaacgacaaatccaaagaagtactgcgttcgtcccaatacgggggtcgttttgcctcgatccacatgcgatgttgttgttaccatgcaagcgcaaaaagaggctcctcctgatatgcaatgcagggacaaattcctccttcaaagtgtaaaggtaaatgatggtgcatccgcaaaggatataactgcagaaatgttcaacaaggaagctgggcatgtggttgaggagtgcaaattgaaagtggtttatgtttctccacctcaaccaccttcacctgtacgtgaaggttcagaagaagggtctccaccaagagtttctgcttctgacaatgggcatgcaaatgctgctgagtttgctgcagctgcaaaacaattctctgaggggcttgaagctcaagataaatcttttgaggcaagagctcttataacaaagctgactgcagaaaaaaatagtgcaattcaacaaaataacaagcttcgccaagaactggaactcttgaagcgtcaaagcagcaaaagtggcggtggcgtgtcattcatggttgtcatcctcatcggcttgatcggtataattatgggatatatcatgaaaaaatagtcagaagcaactatctccgacaatcttactgcatatattccctctcctttccttcgtctgaacaagtatggtgaaggaaaagggaaggggggaaaaatggtcttgggctggtgcattttattagttgttagttttgtgacattagcaaaaacttgttaaaaggtgggtgtggatttgttagtcgcacttttcattaacatgcattctttctataacttaaaccagtgaatttatcatcacatcatcatcatcatcttcctattcctttctttttggtggtaaatttgtcagattctcactagaaactgttaatgattgtactcaagtggtcttttttttgccttttactatttggttctcatttatcattacagaacataaccagattgaagtattgttttg

SEQ ID NO: 1770 - DNA, 503 bp, Gossypium hirsutum
  unsure (1)..(503): unsure at all n locations
  Clone ID: LIB3583-012-P1-K1-C4
gaaagatatcccttatcagatccttaccaacgcaattgcatgatctcattgctttgaaatgagcgcaggcgaacttcttagcagcgagccttctgagctcaagtttccttttgagctaaagaagcagatctcgttttcgcttcaattgtcgaataaaactgataattatgtagctttcaaggtgaaaacaacaaatccgaagaagtactgcgtccgtcccaacacgggggtcgtcttgcctcgatccacatgcgatgttatagttacaatgcaagcgcaaaaggaggctcctcctgatatgcaatgccgggacaaattcctccttcaaagtgtaaaagtgaatgacggtttaacggcaaacgatataactgcagaaatgttcaacaaagaagctggaaatgtggttgaagagtgcaagttgaaagtggtttatatttctccaccttcaacagcacaagaagggtctgaagaaggaccttcaccgggagtctctttntcagatg

SEQ ID NO: 1771 - DNA, 493 bp, Gossypium hirsutum
  Clone ID: LIB3584-039-P1-K1-C1
gctgggcatgtggttgaggagtgcaaattgaaagtggtttatgtttctccacctcaaccaccttcacctgtacgtgaaggttcagaagaagggtctccaccaagagtttctgcttctgacaatgggcatgcaaatgctgctgagtttgctgcagtgagagcttgctggatatgtttttgttgttctctttttcagtgtacattattttcaaatgctaatagtgtgcattttgttctgaatgcaggctgcaaaacaattctctgaggggcttgaagctcaagataaatcttttgaggcaagagctcttataacaaagctgactgcagaaaaaaatagtgcaattcaacaaaataacaagcttcgccaagaactggtgaggggaataaaccgcgactttacctcatagattgtagttatttttatgattaatttgaagatcaacagaagtgctctttggctttgctgaaattgtatatgattcccagcccttttt

SEQ ID NO: 1772 - DNA, 1638 bp, Gossypium hirsutum
  Clone ID: GOSHI-09MAY01-C850_1
gcaaaagccaacctgcattgggccttctttgggttttcgaaattgggcaattgacctttttttttgcctataaaaacccatcaaaaacagatcaatttttcatcatctcttcatcaactcaaagaaaaaaattgagtgtcagtttgaaagtgttcttcagatatggctatgaaacaagttgctaattctgctatcaaagcaattgccaattctgggtcatcctctcttcttaccagacaactccatgcttctccagggagcaaaaagattgttggggtgttttacaaggccaacgagtactttacgaagaatcccaactttgttggttgtgtggagggagccttggggttgcgcccatggctggaatcacaggggcatcagtatattgttaccgacgacaaagaaggaccggactgcgaacttgaaaagcatatccctgatctccatgtgctcatatcgaccccattccacccggcttacgttacggctgagaggatcaagaaagccaaaaacttgcaactgcttctcacagcagggattggctccgatcatgttgatcttaaggcagctgcagaagctggtttgactgttgctgaagttactgggagcaatgttgtctcggttgctgaggatgagctaatgagaattcttattcttgttcggaattttgtacctggttatcatcaagttattactggagattggaatgtcgcaggcattgcttatagagcttatgatctcgaagggaagacagttggaactataggtgctggccgtatcggcaagctcttactccaacgattgaagccattcaactgtaatctcctatatcatgatcgagtcaagatagatccagaattggagaaacagaccggagctaaattcgaggaggatcttgatgcaatgcttccaaaatgtgacattattgtcataaatatgcctctaactgagaagacaagagggatgtttgacaaagatcggatcgcgaagatgaagaagggagtcctgattgttaacaatgctcgaggagcgatcatggatactcaagctgttgctgatgcttgttcaagtggacacattgcaggttacagtggagatgtttggtacccgcaacctgctccgaaggaccatccatggcgttacatgccaaatcaagctatgactcctcatatttctggtaccaccattgatgcgcagttgcgatacgctgccggagtcaagggatttgcttgagaggtacttcaaaggtgacgactttcctgaacagaactacattgccaaagcaggtgagctcgctcctcaataccgatgatttcgtggtttcttcgtccatgaaagagagtccaaatgtgttcggttggtagttaaacgtagctactattgaaatattgtgatgtttagtatgttgcaaataatgtgccatctatatggtgctttgaacttgatgttccgttgtaatgagttcagcttttgatggttcatctttttatgagtggtggttgtcatccaatgaaggagagcctatatgtaccctttcgtttttcttcaagtatcttcatactaataaatttttgcaaaaattttgaaatacgaatatcctaaatatatataaattaaaacgtgggttaaatggttttt

SEQ ID NO: 1773 - DNA, 597 bp, Gossypium hirsutum
  Clone ID: LIB3583-057-P1-K1-H4
atgacatggatttggaagaatcccttgtggaaatactcagtattcaatgctcacatcgagataacaagtgaaaaaagaatgaacccgaaggaatgattcaaatttcatgttgtttggcctgcaaatttgtttttgagtctagtggttcaagtattgatgtatggtaacatttgttaacaggcttctccagggagcaaaaagattgttggggtgttttacaaggccaacgagtactttacgaagaatcccaactttgttggttgtgtggagggagccttggggttgcgcccatggctggaatcacaggggcatcagtatattgttaccgacgacaaagaaggaccggactgcgaacttgaaaagcatatccctgatctccatgtgctcatatcgaccccattccacccggcttacgttacggctgagaggatcaagaaagccaaaaacttgcaactgcttctcacagcagggattggctccgatcatgttgatcttaaggcagctgcagaagctggtttgactgttgctgaagttactgggagcaatgtcgtctcggttgctgaggacgagctaatgaggattcttattcttggtcgg

SEQ ID NO: 1774 - DNA, 604 bp, Gossypium hirsutum
  unsure (1)..(604): unsure at all n locations
  Clone ID: AI730474.1
gcttgagaggtacttcaaaggtgaagactttcctgaacagaactacattgtcaaagcatatccttgactccgggngngggnnngaggtcntngtttcttctgctntgnnttagagtagaaatgtgtacngttggtagtgagatgtatttagtattgaaataatgtgatgtttggtgtgttgtgggtgatgtgcnatatattttgtgctgtgagtgtgatgttatgtggttgtgagttgcgctttgcatggtgcggcgtggtgttagtggtggtggtcggcccgtgatggagggcctctatgtgcgttctggtgtgtcttccggtgtcttcttcctcgggcgtttttgttgagccggctccatttgtctgtttgctggggccgtcttggcggtggagctccctttccctctagtggtgggtcgtgttcgccgcgcgcgcgggtccgcgttttgtggcgtcccgactggggagtaggtcggggttgccgtcttattcgggcggcggcgggtcgccctttcgcctccttggggttttgggggaaggcgcctgccggtcggccggctcctctgctggtgcgctctgcttgggtagtggggtcgcgttt

SEQ ID NO: 1775 - DNA, 366 bp, Gossypium hirsutum
  unsure (1)..(366): unsure at all n locations
  Clone ID: LIB3272-059-P1-N1-H10
cgaaaagggtaccatgnaggaggcccnntccttcagtgtggagtgaccaaccccaccactttctataaaaaggatgacannctatcaaaagcgtgannactcatttaacaacgtaaccatcaatgttcataagcaacaatattagatggccactttattttgcaacattactaaacattcactattanntttcatatagtagctacccgtttaactacccaaccgaacacatnttggacctctctttcatggaccgaagaaaccgcgaaatcatcggtattgaggagcgagctcacctgctttgacaatgtagttctgttcaggaaagtcttcacctttgaagtacctctcaagcatatccttgac

SEQ ID NO: 1776 - DNA, 357 bp, Gossypium hirsutum
  unsure (1)..(357): unsure at all n locations
  Clone ID: LIB3197-014-P1-M1-H1
cccacccttncgctcanaaaattatnnnnngtcagtttgaaagtgttcttcagaggtggctatgaaacaagttgctaattctgctatcatggcgtttggcggtgtggggtcatnctgtcttcttaccagacaactgcatgcttctccagggggcaagnnaattgtgggggtgttgtacatggccaatgagtactttacgaagaatcccaactttgttggttgtgtggagggagccttggggttgcgccaatggctcgnnttgcggggtcgtcagtatatcgttaccgacgacaaagaaagaccggactgcggtaagtataacaacccctactgtcttttttgccaatgtcgatgcct

SEQ ID NO: 1777 - DNA, 953 bp, Gossypium hirsutum
  Clone ID: GOSHI-09MAY01-C800_2
ccgtccggaattccaccacgcgtcacgctgagaaaaaaaaagaacaaactagttaagagccatggaagatgatgcaatggcaaccgaggctcctttagcaccagtcacttctggaaggagagtcagaaatgacttggaagataagcttcctaaaccttatatggcgagagctttggtggctccggatgtcgatcacccgaacggaacgccgggccattaccataacggaatgagtgttcttcaacaacatgcggcatatttcgaccaggacgacaatggaatcatttatccttgggagacttacgccggtaagattcttccccgcgtccggtaattttttagtactcttcgtacgactaattaaaaatgatgtttcaatttggatcctgaaacaggttgtcgagccttgggatttaatcccattgcctctctttttttcaccattcttattaatggatctatgagctatcctacacttccagtgagtttcctttgctaccatgttggatttcactcttatacttaacccaatttggctcctctcgtcatgcatatattttaatcacaattcacttgattttcacaattacatgagttctacatgtgtcttacatcttatgaagatagtaatggactatggtaatagagtggatcttaacttcaccatttcacatcaaagtaagttttgagtgttgaaatcaaaatttcattgaggtgaaagtacaatgggccctagttcattaaattgtattttgctctttgatttaatatttgtacttcgattttttaaaacttcattcattcgggcttacaagaaagtaacacgtgctaacttatcttctttgatctacaagaacaagaataattttaacagtaaaattgaatgaaatttttacagaaagaacaaacttgggttttttttatgtaatgttttggtccaaatttttagtaga

SEQ ID NO: 1778 - DNA, 1002 bp, Gossypium hirsutum
  Clone ID: GOSHI-09MAY01-C800_1
cccacgcgtccgcccccgcgtccggagaaaagtgagaaaaaaaaagaacaaactagttaagagccatggaagatgatgcaatggcaaccgaggctcctttagcaccagtcacttctggaaggagagtcagaaatgacttggaagataagcttcctaaaccttatatggcgagagctttggtggctccggatgtcgatcacccgaacggaacgccgggccattaccataacggaatgagtgttcttcaacaacatgcggcatatttcgaccaggacgacaatggaatcatttatccttgggagacttacgccggttgtcgagccttgggatttaatcccattgcctctctttttttcaccattcttattaatggatctatgagctatcctacacttccaggatggttaccttcaccgttcttcccaatatacgtctacaacatacacaaagccaagcatggtagcgactcgggtatttatgataatgaagggaggtttactcctgcaaacatcgaaagcatgtttagcaaatacgcgcgtacggtacctgacaaattcacattgggagaactttggaaaatgactgaggggaaccgagacgcattcgaccttttcggctggcttgcgggtaagttcgagtggggtgttctatatgttctggcacgggatgaggatggtatgttgtcgaaagaagcagtacgaagatgttttgatgggagcttgttcgagtattgtgcaagaatgaacatgggtaggcatgggaaagtggcttagagttggtgtttatgctccaacttctctatgtatagcctagtctgcatttgcatgatgtggtgtttatcttgtatttggtagctttatttctatggtttatgtttagttttggatttggcatttaatgtgcgtgtagttgtgtgccaatgagcttatgttatttgttgattatgatttgggtacttgaatctggttttttctggcatcggttcgtttctttttttttttt

SEQ ID NO: 1779 - DNA, 541 bp, Gossypium hirsutum
  unsure (1)..(541): unsure at all n locations
  Clone ID: LIB3583-004-P1-K1-E8
gttagtttagcaaggatggnnaccnaaccgttcttcccaatatacgtgtacaacatacacaaagccaagcatggtagcgactcgggtatttatgataatgaagggaggtttactcctgcaaacatcgaaagcatgtttagcaaatacgcgcgtacggtacctgacaaattcacattgggagaactttggaaaatgactgaggggaaccgagacgcattcgaccttttcggctggtttgttccttcgtaaccctttttcttttttgattttgactcactagtattgtgttgatcattgaaagcgaatgtaggcttgcgggtaagttcgagtggggtgttctatatgttctggcacgggatgaggatggtatgttgtcgaaagaagcagtacgaagatgttttgatgggagcttgttcgagtattgtgcaagaatgaacatgggtaggcatgggaaagtggcttagagttggtgtttatgctccaacttctccatgtatagcctagtctgcatttgcatgatgtggtgtttatcttgcatttg

SEQ ID NO: 1780 - DNA, 463 bp, Gossypium hirsutum
  unsure (1)..(463): unsure at all n locations
  Clone ID: LIB3582-051-P1-K1-H11
gaggaaactgaggaaaaaagaacaaagtggttagancaatggaagatgatgcaatggcaaccgaggctcctttagcaccagtcacttgtggaaggagagtcccaaatgacttggaagataaacttcctaaaccttatatggcgagagctttggtggctcccgatgtctatcacccggggggagcgccnnnccattaccataacngaatgagtgttcttcaacaacatgcggcatatttcgaccaggacgacaatggaatcatttatccttgggagacttacgccggttgtcgagccatgggatttaatccgattgcctctctttttttcaccattcttattaatggatctatgagctatcctacacttccagtgagtttccttttcttccatgttggatttcactctcatacttaacccaattnggctcctttnntaatgcatatattttaatcacaatncac

SEQ ID NO: 1781 - DNA, 627 bp, Gossypium hirsutum
  Clone ID: GOSHI-09MAY01-C550_1
tgcttgtccaggcctttgcttttgtacctttgatgtatatgtgcatgtgcacatattattccttgttcaaggtaggaatgttgatgttttactcattaacaccacgacagactagctcagtcagcttgctcatgatatgctcgatggttgctcgatatgctcccccaatttcgtacaactttctcaatctcattagccttggtggtaaaaagaccatatttgaaaagcgtatggggaacattgatgatgctgtacctttctttggagaaggattcaacaacatctatccacttatcatggttgtttacaccttgttagttgctagcaatttctttgatcgtgtagttggtttctttgggaactggaagagacttagatttcaaactgaggctgatgatatggatggatttgatccctcaggactaattatcctgcaaaaggagcgatcttggcttgaacaaggacgccgagttggtgaacaagtaattccattggcgagaaatttcaatggcgctgatattgagtatggccacaatattacagatcgtactgttgttgaaatgaaggcagcgaccacttcagccactggtggtgtgaaaggatctccctcaaagcctgcgaaagaag

SEQ ID NO: 1782 - DNA, 1543 bp, Gossypium hirsutum
  Clone ID: GOSHI-09MAY01-C540_1
cagcccagcccttacagcaacaggcgtctggatgctactataaagcaagaccaaagaccaagctagtgtggcctcttcccagcgtccggtgacctgtatccagccaacccgagattttctattttccgattctttttaggtctttttcccaatttttttgtatttctaaaacagaaacaaataggtgtctcaatggcagaagagagcggtgcccctgtaagttgtgctgatttgcccgttaaaaggcccagagaagacgaagaaaacggggtctcttctgctgctgctgttgttgccatggaaatggaagctgataccaataacacttccaaggaagttgatgggatttcctctgttattcctggatggttctctgagattagcccaatgtggcctggagaggcgcattccttaaaggttgaaaaggtcttgtttcaagggaagtctgattaccagaatgttatggtctttcagtcatccacatatgggaaggttcttgttttggatggtgtgattcagctcacagagagagatgaatgtgcatatcaagagatgatcactcatcttccactttgctccattccaaatcctaagaaggttttggtcattggtggtggtgatggtggagttctccgggaagtttctcgtcattcttcggttgagcagattgacatctgtgaaattgacaagatggtcgttgatgtttctaaacaatattttcctgatgtagctgttggttatgatgatccccgtgtgaaacttcatattggtgatggagtagcatttttgaaggctgttccagaaggtacttatgatgcaattatagtggattcttctgatcctataggtcctgctcaagaactctttgagaagcccttttttgagtctgtggcaaaggctcttcgtcctggaggagtcgtctgcactcaggcagaaagtatctggctacatatgcacatcattgaggatattgtagcaaactgccgtcaaatcttcaaaggctctgttaactatgcgtggactacagttcctacatacccaagtggcgtgattggtttcatgctttgctcaactgaggggcctcttgttgacttcaagcatccggtgaatcctatagacaaagatgagagctgctgcaaatcaaaacgaccccttaagttttacaactctgagattcattcggctgctttctgtttaccatcctttgcaaagaaggtgatcgaatcgaaaccttaagggtggaaattttgaagctttagaacaaaattctagttattggtgagcattagttatcatcctttgctgtgatggcccagtgtagcaacgaaccttggatttggaaatttagataatgcactttcttttttgtctcgcttaggaagagaatttgaggtaatggttgtggaaggatatatgtccacaagggataatatggtcatttagctgagacataaatggctgtttcttgcaatcgttttatcagattcacatgtttgtgtattatatcattttggccaatatattgtcatggatgtttaggatc

SEQ ID NO: 1783 - DNA, 382 bp, Gossypium hirsutum
  Clone ID: uC-gsronu33B137e09b1
tcgtttacgcgtccgtgctgagtcacatatttaacgcttttccagaagtcttaaaatcttattttgaaaacttggtacatttgcttgtttatgattgcagattcattcggctgctttctgtttaccatcctttgcaaagaaggtgattgaatcaaaaccttaagggtggaaattttgaagctttagaacaaaattctagttattggtgagcattagttatcatcctttgctttgatggcccagtgtagcaacgaaccttggatttggaaatttagataatgcactttcttttttgtctcgcttaggaagagaatttgaggtaatggttgtagaaggatatatgtccacaagggataatattggcatttagctgacacataaa

SEQ ID NO: 1784 - DNA, 354 bp, Gossypium hirsutum
  Clone ID: LIB3189-032-P1-K1-F7
gccaacccgagattttctattttccgattctttttaggtctttttcccaattttttgggatttctaaaacagaaacaaataggtgtctcaatggcagaagagagcggtgcccctgtaagttgtgctgtttttcccgttaaaaggcccagagatgacgaataaaattgggtctcttttgctgctgttgtagtattccatgtatatgtatagcattttcttttaacacttttcaaggtagtttgttatttattttctttattattttatatgtttgttattttaatttttttatacttatttggccatttatgttactcatttttatatttcttaattttatttttcattttttat

SEQ ID NO: 1785 - DNA, 1102 bp, Gossypium hirsutum
  Clone ID: GOSHI-09MAY01-C570_1
gctctctgctctctgctgctacactgattctttgccttcatctctgccctttgctggttctttgttctgccctctgctgatattgaaaggtaataggcctgatactcatttcacaaaagatggatggttgaaaataatcaccaactttgagaaagaaacgggcaagggtatttcataaagacaacttaaaaataggtgggatgccctaaaaaaaggatggaaagcttggaagaaacttaaaggcgaagatactggtctagggtggaatcctataaaaagaaccgttgatgcatcggatgattggtgggagagtaggctccaggttgtgcctgaagctaaaaattttagaacatcgggcattgatcctgaattcgaagcgaagttggaccaaatgttcatggggatagttgcaacaggtgataaagcatgggcaccttcttctggtacactccgtagtgatttttttgaggatgttaacaacgaaatacctgaagagagtgaagaagaaaatatgagaaatgatgttcacattttaaatgatgttcacatttcaaaagatgttcacatctcaaatgatgttcaaatggacggaaacggttaaaaaagaaaaaacattgagatatcaagttcacgttttaaaactggaagaaagaaatcctcaaagcaaattggaggggctgcaagattatctagtcaaatagaaaaattatgcagtgcagctgacaatatgagtcaagccacatctagtttgactcctgttatggatccatatggtattccacatgcagtcaaagtgcttgacagcatgtcggaagaagttccagaagctagtccgctttactttttcgcacttagattattgctcaataaggacaagcgaattatgtttttatcaattaatcccaagattagagctttgtggcttaagacggaaatggaggatagttgaaaattttctgatcttttagggttcaaagatatctattatgtgactaaacaacaatgctaaactagttttatcaatagttatttatgtttgatttttggcttaaactcaaactctacttatttatgtgtaatctagttttattaatagtttttt

SEQ ID NO: 1786 - DNA, 593 bp, Gossypium hirsutum
  Clone ID: LIB3582-045-P1-K1-D5
gcggtatcttctcttctccactacttttctcttttgcttttacccattttggtctggttctttgttcttctgctctggtccatcgtgttggaagctaaaaaaggaacaatttccgttgcctctgcttctcctggtcatcaacaagatgagtacttcggcggttgaagttagtggtgaaaaagtgaaaacaatgtgggataagagattgacagaaatattttgcgatatttgtattaaagagtttttgaaaggcaataggcctggtactcatttcacaaaagatggatggttgaaaataatgaccaactttgagaaagaagcgggcaaggtcttttcacaaaaacaacttaaaaataagtgggatgctctaaaaaaagaatggaaagcttggaagaaacttaaaggcgaagatactggtctagggtggaatcctataaaaagaactgttgatgcaccggatgattggtgggagagtaggctaaaggttgtgcctgaagctcaaaattttagaacatcgggcattgatcctgaattcgaagggaagttggaccaaatgttcatggggatagttgcaacaagtgataaagcatggg

SEQ ID NO: 1787 - DNA, 464 bp, Gossypium hirsutum
  Clone ID: LIB3120-031-Q1-K1-A9
caaatttctaacttctttgaagtgcttttggccaaatgaaaacgcagaaatttttagctttttcagctaaaaaagtgcttttaggctgctcttttacctttttagccacacacacaacactggttctttgctctcatctcttctcccatcgctggttctttgttcctctgctggctctttgttcttctgctggtgctggttctttgttcctctgctggtgctagttctttgttcctctactggttatttgttcctttgctggtgctggttctttattcctctgctgcttctttgttcctcttttccaccaccgtagatgagtacttcggcggttgaagttagtgacgaaaaattaaaagcaatgtgggataagagattgacagaaatattttgtgatatttgtattaaagagatattgaaggcaataggcctggtactcatttcataggagatgaatggctgaa

SEQ ID NO: 1788 - DNA, 418 bp, Gossypium hirsutum
  Clone ID: LIB3120-060-Q1-K1-D7
attttgttccatgctggttctctgctagtgctggtgttcctttgcttgctggttctttgttcctctactggtgcttgttctttgttcctcttctccacttctcaaaagcctctggtactttgttcctcttctccccaccaccgatgagtacttcggcggttgaagttagtgatgaaaaagtgaatgcaatgtgggataagagattgactgaaatattttgtgatatttgtattaaagagatattgaaaggcaataggcctggtactcatttcacaaaaaatggatggttgaaaataatgaccacttttgagaaagaaacgggcaagggtttttcacaaagacaacttaaaaataggtgggatgccctaaaaaaagaatggaaagcttggaagaaacttaaaagcgaagatactggtct

SEQ ID NO: 1789 - DNA, 345 bp, Gossypium hirsutum
  Clone ID: LIB3148-002-P1-K1-B9
cttctcccatcactggttctttgttcctctgcttattctttgttcctctgctggtgctggttctttgttcttctgctgcttctttgttcctcttctccaccaccgagatattgaaaggcaataggcctagtactcatttcacaagagatggatggttgaaaataatgaccaactttgagaaagaaacgggcaagggtttttcacaaagacaacttaaaaataggtgggatgccctaaaaaaagaatggaaagcttggaagaaacttaaaggcgaagatactggtttagggtggaatcctataaaaagaacccgtgatgcatcggatggatggtaggagagtaggc

SEQ ID NO: 1790 - DNA, 657 bp, Gossypium hirsutum
  Clone ID: GOSHI-09MAY01-C560_4
caacactatcacacacacacaaacaccaaaaatgccgttcaagagatacgtcgagatcgggagagttgctctcgttaactacggcaaagactacggcaagttggtcgtcatcgttgatgtcgtcgaccagaacagggcacttgttgatgccccgctcgtccgaagaggccaaatgaacttcaagaggcttacattgacagatatcacaattgacattccccgtgttcccaagaagaagacattgatcgaagctatggagaaggctgatgttaagaacaaatgggaaagtagctcgtggggtagaaagttgattgtccagaagagaagagcatctctcaacgactttgataggttcaagcttatgttggctaagatcaagaggtccggagtcatcaagcaagaacttgctaagctgaaaaaggagaatgcatcttgaatttgatattgaatcatggatttttgttagtttttgtcatcaaacattctgcaggttgttctttttttggaaatttttctttttatttacaaatgattaaaaagattaagatcagttgagagatctttgtttgctatattacatattttatagtgagtttaatagcaggatattgctttgtgtgctgcaatttttcttatcaccccgtctggtccctcttt

SEQ ID NO: 1791 - DNA, 752 bp, Gossypium hirsutum
  Clone ID: GOSHI-09MAY01-C560_3
cccacgcgtccgcgctcaatctctccttttagctcagaacgctcttcacgctgtgtagaaatgccgttcaaaaggtacgttgagatcgggagagtcgctctcgttaactacagcaaagactacggcaagctcgtcgtcatcgtcgatgttgttgaccagaacagagctctagttgatgccccagatatggtgaggggccaaatgaactttaagaggcttcaattgactgatttcaaaattgacattcctcgtgttccaaagaagaagacactgattgaagcaatggaaaaagctgatgttaaaaacaagtgggagaatagctcatggggtaaaaagctgattgttcaaaagaagagagcatctctcaatgacttcgacagattcaagatcatgttggccaagatcaagaaagctggagttgtgaggcaagagcttgctaagttgaaaaaggaaaatgcatcttgaagtgattcagaagattttgagtattttgctaattttgtcttctagtattctgcattttggttttttgtatgtttttatctaagaaaggattaaaaagaatcaattgggggcactttctttagtagatgcaacatttgatttcggaggttaagcctgtcacagtttttagttcaattagttgaaccggccaattgattaaatcgattaatcgatggatttgatccgataatttaaaccatgctacgaaataaaactatgagatgacagaaaccctgagctccccccta

SEQ ID NO: 1792 - DNA, 815 bp, Gossypium hirsutum
  Clone ID: GOSHI-09MAY01-C560_2
ccttctcgcctctcagtttgctacactctcacacactcacagcaaaaaagccgttcaagaggtatgttgagatcgggagggtggctctcgttaactacggcaaagactacggaaaattggttgtcatcgttgatgttgttgaccagaacagagctcttgttgacgccccagatatggtcagaggccaaatgaacttcaagaggcttactttgacagatatcacaattgccacgcccccggttccaaagaagaaaacattgattgaagccatggagaaggctgatgttagggacaagtgggagaatagctcatggggtagaaagctgattgtccagaagagaagggcagcgctcaccgacttcgataggttcaagcttatgttagctaagatcaagaaggctggagtcgtcaggcaagagcttgcaaagcttaaaaaggagaatgcatcttgaagtaattctgaattatgggattttttgctagttttttcatcaatgttccgcgagttctttttgggattgatttcgtttttctattaaacaaagggttaaggtcttttgaggacaccttatttgctgtatgacagattttgtagtgagtttattgctatatattgcttgctcaatgtggaaaaaaaaaaaaccactcttttcctttcaaaaaaaaaaaaaaaaaaaaaaaaaaaaaaaaaaaaaaaaaaaaaaaaaaataaaaaaaacaaaaaaaaacaaaaaataaattcacacacgggggggccgttttaagggacccaagtttacatccccgtgcttgcaacaaaaacttttttaaggggc

SEQ ID NO: 1793 - DNA, 811 bp, Gossypium hirsutum
  Clone ID: GOSHI-09MAY01-C560_1
tcccacgcgtccgcacctccttttttagttccttctcgcctctgtagtttccaacactctcacacacacacagacaccaaaaatgccgttcaagaggtacgtcgagatcgggagagtggctctcgttaactacggcaaagactacggcaagttggtcgtcatcgttgatgtcgtcgaccagaacagagcacttgttgatgccccagatatggtcagaggccaaatgaacttcaagaggcttacattgacagatatcacaattgacattccccgtgttccaaagaagaagacattgattgaagctatggagaaggctgatgttaagaacaagtgggagaatagctcatggggtagaaagttgattgtccagaagagaagagcatctctcaacgactttgatcggttcaagcttatgttagctaagatcaagagggctggggttgtcaggcaagaactcgcgaagttgaaaaaggagaattcatcttgaaatgatacctgaatcacgaggatttgctagttttgtcattcaacattctgcaatgtgttctttcggaatggttttttttttgtttgtttcaattaagatcagttgagtgcagtttcattggtctaagacagattttgtagtgaatttattgctagatttttgtttgtgaaaacttgtggtaatttatattggctgcatgagaggcataataatagtctctataagaacagcggtgtatttgtccttcctctgatggccacaaatgctttgaaaatttcttcaaaaaattccttttaaaaaaaataaaaaataaaaaaataaatg

SEQ ID NO: 1794 - DNA, 361 bp, Gossypium hirsutum
  Clone ID: LIB3149-028-Q1-K1-C6
cgaacgctgttgacgctgtgtagaaatgccgttcagaaggtacgttgagatcgggagagtcgctctcgttaactacagcaaagactacggcaagctcgtcgtcatcgacgatgttgttgaccagaacagagctgtagtgtgatcccccagatatggagaggggccaagtgaactctaacaggcacaaaatgactgattttgccaatgtgattcctagcgtaccaaagaagaagacactgattgaagcaatggaaaaagctgatgttaaaaacaagtgggagaatagctcatggggtaaaaagctgattgttcaaaagaagagagcatctctcaatgacttcgacagattcaagatcatgtt

SEQ ID NO: 1795 - DNA, 345 bp, Gossypium hirsutum
  Clone ID: LIB3147-054-Q1-K1-F9
cccacgcgtccgattgattgtagccatggatattgctgccgactataacatgtaaagaaagagctcatggtctaaaaagctgtttgtccagaacagaaaggcagctatcactgacatccatcggatcaagcttatgttatctaaaatcaagaaggctggcatacgcaggcaagagcttgcaaagcttaaaaaggagaatgcatatagcggtattctgaattaaaggattgtttgctaattctctcatcaatgttacgccagttctatataggactgattttcgtttttctattatacaggagatcaagatcttttgaggacaccttatttactgtatgacagatt

SEQ ID NO: 1796 - DNA, 652 bp, Gossypium hirsutum
  Clone ID: GOSHI-09MAY01-C510_1
ctggaaccctaaaaccctaataaatccccaattcacagcaaaaataagatagaaaaattcatttgtagttctattccacttccaattcatttaattttcatctaaagaaaatgcctttttgttcgcttttctccttcatttacttcgtcgatcattgtttcagaattcgtgttctctttgaaaagcgaaagttttaattatttaaaattcgtatcacgtttatttcactttctatgatttgtatacagaaaaaaaatggaatcaagcttgcttcaatgggaatccgaccccttattctcagccgccgaagtcgttcaagattcagctgacagggatggaatcgttttttcgacttcttttgcacgaaaaaactcttcttcaaagtgatcttcctgacccaaagctgcttacttcaattggatatcatacgcgtgatctcgcaaccgtactcgagacagcgaaatggcagttggaagatttcgaaagagcggttaactcatcggctaggatggaccagtctcactctagggagcatgtaatttctagacataagcagtttattagagccattagaggacagataaatgatgttgagaaaagcttggaggacatggaaatgggaaatcccatgaaaaagtccaagtggggaaac

SEQ ID NO: 1797 - DNA, 691 bp, Gossypium hirsutum
  Clone ID: GOSHI-09MAY01-C500_1
cgtccgcccacgcgtccgcccacgcgtccgtccatagagagattcaagctcgtctagacatttcaacaaatacctagtgatcttgctactagagaaaccaaagataaaataatgaagagggctgttatctcagtttttgtgatgctagccatgtttcaattcgtggtgaagcaagggcaggccgccgtaacttgcaaacaagttgatgatgcattggcagcctgcgttccttaccttaccaacggtggggttccttcgactccgtgttgtaatggtgtaggggaactccggaatagtgccgaaaccacggcagacaggcaagcagcttgcaactgtgttaaacaagccgccgctcgtatccccactatcaaagaagatgacgccgcaactctccctgcaaagtgccatgtccaagttgatttcccaatctccaagaacaccaactgcgaggacattcactaagatggaagccatcaagacgcaaatataaggccagtaggcgttgccgccatctattcaagtattattagccatatgtcgtacttgtgtcagaatagtaatgaagcacgcagatgtaagagtttttacaagcctttgtattagtaataaaaaggaatttgatgaaaatttcctgcactttgtaagctcaaccaagtgtttgaaacataaattgatgttttagtgtatttac

SEQ ID NO: 1798 - DNA, 260 bp, Gossypium hirsutum
  Clone ID: LIB3582-043-P1-K1-E9
actatcaaagaagatgacgccgcaactctccctgcaaagtggggataccagcggcattttgtaggagacaataacaccaagtgtgaggacattcactaagatggaagccatcaagacgcaaatataagggcagtacgcgttgccgccatctattcaagtattatcagccatatgtccgacttgtgtgagaatagtaatgaagcacgcacatgtaagagtttttacaagcctttgtattagtaataaaaaggaatttgatg

SEQ ID NO: 1799 - DNA, 741 bp, Gossypium hirsutum
  Clone ID: GOSHI-09MAY01-C530_1
cgaaatatgtaatggcagatgctgaggtggctcgtgtaagtgattatgggaagttgttttacataagaacacacctaggccatattctaaagcctggagatcgtgcactcgggtacgacctttatggggccaacagtaatgatatcgaactcgataagtatagaggacttgtcctttctgaggcaattctgataaagaagagctatgaagaaaaacgccagaagaagcgtgggaagcctagttcatggaagcttaagtccctcgatatggaactagacgaatctaaaggtagagcgaacgaacagaagctggacacagaatatgaggagttcttgagggatttggaagagaaccctgagctaaggttcaacttatcactgtaccgtaacagagattaccagcgcatcagagatggtatcggtgtcggatggggatgatctgccttcggttccatgggaagagttgctggccgatctcgagctgagtgaacaagaagatggtgaagatagcatgagagaatgaatctttgttgtacttctcgtatgctactttttttgagttttgccttgaaatgatgttttgagttattgctttgtgttttttgtttccttttttttggggggatatagtaaataaattttctgatcatgaattttatctccctttttttttttgcattagggctttcaaaaatattttatgtaacaaaatagtataaagtagctgttcaaagttggtact

SEQ ID NO: 1800 - DNA, 1411 bp, Gossypium hirsutum
  Clone ID: GOSHI-09MAY01-C520_1
ctggtttccaatgcttctgtttctctgctaccttttattgcaggagagaaaaactcttcatttcttcaatctggtggttttagcctgaatctctccagtgcatgacggaccatttctgggactcccttctccaggtaaaagctttctcctctcttgagagcctccgttgctatagtgtgagcatagatgtttcttgcttttgggataaaagaaaacacaatctcctggtaactgcttttcctgttttgaatgtctttgattattgctccaatgaccgatctgtctataatagaactttgacacttcttgataatcgttttcgagtcacccataacttcgattttgttgattctcaaaccgatacctagttttattgcttgtaatcctgcatatgcctctgctgtaaatggatcttcaatgttggagtggtgaactgcctgtgatgcaagaatttcccctttcccattccatactattagccccaatgccgatctggacgtctgacggtcaaaagctacttcaaaatgaatcgttgcccttccccttttgagcacctgttgaaaactttaagaagagtggagaagttgatttctactaaaccaaataaaccagagaccataacagagaaggcgaagttgctcatcatttcattgtccaaatactccccgcactgttgaaagatatggcagctgttttcttcttcactatcgcatcttggacatcgagtattcaccactacccattttattttgaggttgaaaaaggatgggataaaattccatgaaatcctctatattatcattttgatcttcgatgggatatgtagtttccatagctttctatagaaatttatagttttggtatgtaatattaaatcattaggatccaatgtagattcatgtaatagtttataggcgctcctaattgaaaactcgccggtcgactcccctctccaaacttgaaagtcttcatgttccatctccgccagtgggatcttcaaaattttttctgctacaatcggttggaagatcatctcgtattgaaattttatcaccttttcccaccctccagcaaagacctttttcgagcagacccttagtcgtccaaacactttttcaggatttcttcatcttcatcttcaagggatagaccagcaaattctgattccatgggcgtaacacgagaaaaccgaacgaagagaattattcaaaacactggagatgtaagccgtcaggccaagaaaaacttttgagaacctaaacttgccagagaggcagacagagacgtgctagggtagcagactcttaacaatggaattttacctatacacaagagtatattaattaattattattagatattattttaaattaaaaaaaaaaaaaaagggcggccggccgactagaactag

SEQ ID NO: 1801 - DNA, 651 bp, Gossypium hirsutum
  unsure (1)..(651): unsure at all n locations
  Clone ID: LIB3828-014-Q1-K6-A1
atgccatcaagatccagaacaattgctcagaagaagaattgcaaccggtccaggcagcgatccatttgaggctttagttgtctctcatcaggataggctgctatccaatactaaacttcttcattcaacataccacatttatcccacgaactagagctcctccaattggtgctcaatgctcgaatagaaattttgcttacagaatgactgaagaactacataatccatgggttaagagattgttgattggttttgctcggacatccgagtataatgggcctagaatgccagacggtcctcattgcttgattcaagaaattgattctcaattaccggttgcgctacctgccctccaacttacatataagatatttggttcttgtccccccatgcaaagttttgaccatgcaaagttgctaacagattctggcaaacttcagacgcttgatatattactgaaacgtctccgggcagaaaaccaccgcgttctattgtttgcacaaatgacaaaaatgctgaatattttggaggactacatgaactatagaaaatataggtacctgaggcttgacgggtcttccacaattatggatcgacgagacatggtcagagactttcagctgcggaatgacattnnttgtgttcttgctg

SEQ ID NO: 1802 - DNA, 639 bp, Gossypium hirsutum
  Clone ID: LIB3582-043-P1-K1-B6
ggctgctatccaatactaaacttcttcattcaacatacacatttatcccacgaactagagctcctcgagtatggtctttttattgtatccattttttactattatggggaacggcttaaactaaattagatatattattcactgttgatattttctccttgatagattggtgctcaatgctcgaatagaaattttgcttacagaatgactgaagaactacataatccatgggttaagagattgttgattggttttgctcggacatccgagtataatgggcctagaatgccagacggtcctcattgcttgattcaagaaattgattctcaattaccggttgcgctacctgccctccaacttacatataagatatttggttcttgtccccccatgcaaagttttgaccatgcaaagttgctaacagattctggcaaacttcagacgcttgatatattactgaaacgtctccgggcagaaaaccaccgcgttctattgtttgcacaaatgacaaaaatgctgaatattttggaggactacatgaactatagaaaatataggtacctgaggcttgacgggtcttccacaattatggatcgactagacatggtcagagactttcagctgcggaatgacattttt

SEQ ID NO: 1803 - DNA, 584 bp, Gossypium hirsutum
  Clone ID: GOSHI-09MAY01-C460_3
aggaggtgttcgatttccattccacacctcttcagaacactactttttctttattttaatttaataactacaatttttcgttctagatttcaacaaaaacaaggaaaagaaagacgtcatggcgtcgtcgtcgtcgtcgtcgtcgtcgttgtccgatagcctgaccgataagaacgttgttttcaaaaagctgaaagcaaaatcagataacaagatgtgtttcgattgcaatgccaagaatccgacgtgggcgtctgttacgtatgggatctttctctgcatcgattgctcagccgttcatcggagtctcggtgtccatatcagttttgtcaggtctacaaatttagactcctggtctcctgaacaattgagaatgatgatatatggagggaacaaccgtgcacaggttttctttaagcagcatggatggactgatggaggcaaaattgaggccaaatatacttcaagagctgctgatttatataggcaaatactatctaaagaagttggtaaaagtatggcagaagaggcaggtttgccttcatccccggttgcttctcagtcatcactacatctaatgggcc

SEQ ID NO: 1804 - DNA, 1528 bp, Gossypium hirsutum
  Clone ID: GOSHI-09MAY01-C460_2
cagagttggtgtcatcttttcaatactactagatttcttctctcataatctcaaagccggaggaggtgttcgatcccacacctcttcggaaaaaaaatcatcttcaaaaacgaaaaatattataaaattttcgttctaaaattccaaaaaaaagaaagaaaaaggaatcaatggcgtcgtccgatagcctgagcgacaagaacgcggttttcagaaagctgaaagcaaaatcagaaaacaagatgtgtttcgattgtaatgcgaaaaatccaacatgggcgtcggtcacgtatgggatctttctctgcatcgattgctcagccgttcaccggagtctcggtgtacacatcagctttgttaggtctacaaatttagactcttggtctcctgaacaattgaaaatgatgatctatggtggaaacaaccgtgcacaagttttctttaagcaacatggttggactgatggaggcaaaattgaagccaaatatacttcaagagctgctgatttatataggcaaatgctatcgaaagaggtggctaaaagtatggctgaagatgctggtttgccttcatcccccgttgctcctcaattgtcagcagcaactaatggattttctggcagcaagattgatgaagttcttaaagaaagttctttaggcagtcaagaaaaacccgaagtttctgctgccccaaaagcttcccataccgttgttaccagtgctgtcaagaagcctcttggtgcccgaaaggttacagggaagaccggggggcttggtgccagaaagcttactaataggccaagtgaaaatctctacgaacagaagcctgaagaaccagttgtcccagttgcttcctctactaatgacattgcacccactggctcatcttttccatctcgttctcgttttgagtacgtggaaaatgttcaatctactgagtggaatcatggtggcccacaagtgcttaatcatgttgctccaccaaagtcatcaagcttctttgcggaatttggaatggacagtggttttcagaagaaatcaagctcaaattcctcaaaagtgcagattcaggaaactgatgaagctaggaaaaaattctcaaatgctaaatctatttcatcagcccaattttttggtgaccaaaccagagcagctgacaatgaagctcaagttactttgcagaaattctcaagctcaacagccatctccagctctgatctatttggtcaaggtgcagataatgctcttgaccttactgctagtgacctcatcaaccgactctctttccaggcacagcaggatatctcaagccttaagaacatagcaggagagaccggaaagaagctgagctcctttgcgtccacttttatgagcgatttccaggacagaatcctgtaatggagtgttctggccttgaaaaactatatatatgatatatatctgagtttgttatgttagatcaccggccaatatcttttggtagtgaaatgtagtagacccattttataataacaattctttcacgggac

SEQ ID NO: 1805 - DNA, 690 bp, Gossypium hirsutum
  Clone ID: GOSHI-09MAY01-C460_1
cccacgcgtccgcccacgcgtccgcccacgcgtccggaaaatctctacgaacagaagcctgaagaaccagttgtcccagttgcttcctctactaatgacattgcacccactggctcatcttttccatctcgttctcgttttgagtacgtagaaaatgttcaatctactgagttgaatcatggtggcccacaagtgcttaatcatgttgctccaccaaagtcgtccagcttctttgcagaatttggaatggacagtggttttcagaagaaatcaagctcaaattcctcaaaagtgcagatccaggaaaccgatgaagctaggaaaaaattctcaaatgctaaatctatttcatcagcccaattttttggtgaccaaaccagagcagctgacaatgaagctcaagttactttgcagaaattctcagtatgtgcaattgctatttcttttttaaggcttgaaagagttcagcagaattagattcctagaagaacataattgtaaactgttttgtatttgcgattaggcatcatttacttatgatgaggtagccatagaaaacaccaaacttttggaatccgcactcaatatttcatccttaacagaaaatatataggcattattggaaatagtttgcttttctaagttcaagggatgtgagaactagtaaggttatgtatgaaatgtggcttt

SEQ ID NO: 1806 - DNA, 531 bp, Gossypium hirsutum
  Clone ID: LIB3583-055-P1-K1-D11
cccacgcgtccgtttgttcttcctttgatatagttttgaaatttacttagaaaggctcctttttatttttctcgagtttttgatagaataagcccattctgtagagagattaatctggtattaaccgaacctgtttgagttttttgtgggtaaacaatgcaatatgcacatcacctccctatattttacttctttttgtttgttttgtcggtgtgtttagccgaatttgaaggtacaaaaccacaccaccttcttaggagtcgagattgtccttattggcctaaaaagctaaggtgttttgttagatgtattttcctctttgaaaaacttgtatattttatgcaggtctacaaatttagattcttggtctactgaacaattgaaaatgatgatctatggaggtaacaaccgtgcacaggttttctttaagcagcatggatggtctgatgggggcaaaattgaggccaaatatacttcaagagcggctgatttatataggcaaatattatcaaaagaagttgctaagagtat

SEQ ID NO: 1807 - DNA, 401 bp, Gossypium hirsutum
  Clone ID: LIB3146-061-Q1-K1-C8
gaaatttctgttgtgccaaaaacttctctattatttcttaccagcaccatcaagaagcctgttggagcaaataaacttgggggtcttggtgcccgaaagcttactaataagcacagtgaaaatctctatgaccagaagcctgaagaaccagttgtccctgttgcttcctctagtattaacactgcacctattacctcaccttttccatctcgttttgagtatgtggaaaatgcacaatctactatgttgaattctgatggtccacaattgctcggccatgttgctctacctaagtcatcaagcttctttgctgaatttgaaatggacaatggttttcataagaaatcaagctcataatcctctaaagtgctagatgttattcaggaaaccgattaaactag

SEQ ID NO: 1808 - DNA, 488 bp, Gossypium hirsutum
  Clone ID: GOSHI-09MAY01-C400_1
cccacgcgtccgtagatatgttctacaatttaaataatgagatttatacacattccttgtctctggctggtatcttgtattctatcaatgttcttacaagaatggagtgtttgcagtaatactgttggttctttttattatgttcacagggggatgcagtagctaccaaagtaaacatgtaatgcagtaggtaccttgctcaatccgttctggatttccgtatcctaactgggaatgttttggaattcagattgttattatctttccttcaaagagaattttgtacaacacagtccaacaccaatgaagtgagtgctgctggctccgtgcaattatctataacagcacaaatcatgaggaagcgaataatgtatctgcatatatacgtatatattctctgtgtcgtgttagtctcttgctgtatatcctctcgaatcagaaggatccctgggttgaactggaaacgaactcaggtttatgagaagagt

SEQ ID NO: 1809 - DNA, 1047 bp, Gossypium hirsutum
  Clone ID: GOSHI-09MAY01-C760_1
gaccaacaatcctaattctattatattctccttcgtcaatcttcaacttgaagtaaataatagcaaatgcgccatggcggaccaaacgaacggcgtcaccctaaatgaaaaccagcgcatccgtaaggaagaaacgctctatgatgttctccaccgttcggtttcgatgatcttacccgatgcatcgtcgacggaatcagccccgttactgcagcggatcaagatatccgtttccgagaatgggcctcgtctcggcgaagcctctagaaacactggccaaaccctcctgcggtggactcgtcgaggcagccccctgcgtgctctcctcgtcatttctgtaatgttatcgccctgctttaaatttgataaaactattattagcccattcttaatttctgtttttgggttttaatcactttgattctctttctctgaccaacaaatcttgtgccgcttgggtctgttgcttttcttgcattgacagggttgcttacctttatgcttatatttctggtagcgaccgtcaatgccaggattgtctctcttctcatctctttggcagctgcgggaggcttcttgttcttttcccttggcatgtgtaacagctatttatattggggccatgtcaattgctgcactcgttttttctattgcgacgatttcagcaatttttgctgctatgatagctgcaggttgggttggattcttttgggtcatatggttgggtactaggaaaagtgtgggatttgccaagcaatcattgagcaagactggatcagttatttcagcttactcttttgcacagcatgcccgtattgactaactggaacactacacgactggaagtaagtggacagagtttcagattcaaatgcttgtctttaagaaatcctagatgcttcaacatatgtataatttttatcttgtgcttatgtttttggccgttttggtgcttgtatatgcgggtgagatggtgttgcctgttcatagatgagactgagaattatgaagatgtttggatccgaggcaacttttgtcattaaaaaa

SEQ ID NO: 1810 - DNA, 429 bp, Gossypium hirsutum
  Clone ID: LIB3135-052-Q1-K1-G2
cgagaatgggcctcgtctcggcgaagcctctagaaacactggccaaaccctcctgcggtggactcgtcgaggcagccccctccgtgctctcctcgtcatttctcttgggtctgttgcttttcttgcattgacagggttgcttacctttatgcttatatttctggtagcgaccgtcaatgccattattgtctctcttctcatctctttggcagctgcgggaggcttcttgttcttttcccttgcatgtgtaacagctatttatattggggccatgtcaattgctgcactcgttttttctattgcgacgatttcagcaatttttgctgctatgatagctgcacgttgcgttggattcttttgggtcatatggttgggtactaggaaaagtgtgggatttgccaagcaatcattgagcaagactggatcagt

SEQ ID NO: 1811 - DNA, 642 bp, Gossypium hirsutum
  Clone ID: GOSHI-09MAY01-C720_1
tttggggatagtaaaataaagtacaaaaaagaaaaattgtgttttccgttggcttttaggttgtgaattgtgaatcgacgccgtcaacgatgggattaggtttcatggtcggcgttttgggggtcctattcctcttccacgcagcttattccacaattcagtatagggggctgttgaagattatggaggaggagttttctggtccgcccatgaacgtggttttagagttgcttctagggtttgttttctgtatttcagctgccctaaccgtgcccgggaattttctctccatacatcctgattctgaggagaataggattgtttctttatcagcaaacttggactttatgatcttcaatcacagagcgaaagcacttcctttagaaactgatatgaagctgaagcattaagatcaatgaagcttcatagtcctttgattaaggagattaccactgttggcaggtctgttgaacgtaagagtagagagcctatgtcttaggtcattgtcgattgttttctgaagtgatagtgttttttaacctttcattacttgctagaatttggattttggctctcttgtttacttttatgttactttgcctgacatactgaaccaggccagccattcaatatattattctt

SEQ ID NO: 1812 - DNA, 515 bp, Gossypium hirsutum
  Clone ID: GOSHI-09MAY01-C690_1
aaagaattcaggaatgctctgaagccctcagagctctggtcatcggacctcctcaagcgcccacgcgacaccgtcgactttgccatttacggcaactggaagctgaaaagcttcgttttttcgcctataccgaagggtaagcgagaatctcggcgatgagtgctagcgttgattcgtgcattgactatggcgtgatactagtgcaggagtcatggcgctgatgaagcccactgaaacggcgcgagacgaaagggcgtggcgcttgggatggttgcggcgcctagggtttctgaaaccctaggcctttccgtattttgttaacaatttgggcctcttgggccccgttcgttttttgggctaagggtgtaatgggtaaataggttttgggccaagggtttaggctaatcgggtcttgggtgtaaccgggcatagggcttttgggctaaccgagtttggcttgtaaatggactgtttaaagggccttatttaatggactgttatatttttgttttttt

SEQ ID NO: 1813 - DNA, 771 bp, Gossypium hirsutum
  Clone ID: GOSHI-09MAY01-C650_1
ataaagtatttgctgaaaggcccttaccaattttcaactcgaaaaccctaaaaactggtaactctcagagactcaagctttaacgtgcaaaatcaccaactttttttttttgaaatggagggatcggaaaatgacggaaatgttacgccgatcgcgaagtggaagaccgagttctcgaggaaggtccagtcttttctcgacaggtcaacaccacacacgatggattggtggctggggacattggcggtggcgatgatctacgttttgcgggtttactacgttcaagggttttatgtaatttcatacggtttagggatttacgtattgaatctcttgattgggtttttatctcctaaagttgatcctgagcttgaagctttggatggtgcttcgttgccaactaaaggttctgatgaattcaagcctttcattcgtcgtttgcctgaatttaagttctggtatgccatcacaaaggcctttgtagttgcatttgtattgactttcttctccatgttggatgtacctgttttctggccaatattgctatgctactggatttttctatttttcctcacaatgaaacgccaaatttttcacatgatcaaatacaaatatgttccgttcgacattgggaaacagagtataccaataagaagtctgcaagtagtagccgtacaccaagaaactgaaaggtgatgacaaaaaggaaaattggttagctaacttggttttggttgcttttaattattccaaaagcaaaacagaccatgc

SEQ ID NO: 1814 - DNA, 1110 bp, Gossypium hirsutum
  Clone ID: GOSHI-09MAY01-C670_3
cccacgcgtccgcccacgcgtccgattttgcactttttgattattgtttttgagtcccccattaccgtgactgagttcaaacccatactgatgcctaagttggttgcttctaaacatgctaatgcttctgctacatatggagaggaaacgttggagtgaatagtagacttggaggctgcgattttcccattctgacccctgactaccattcctgatgcggatctggagttgttgatgtcgatagctgcgtcaaactgtatcgactcccatagctcctcctctctgtgttcagatctaacagccgtggttgtaagttttctttctcgtacaccttaaagctctattaaaaaattctgcactttaaaagctagatcccttcctgatgaaatcttcttctcatggagcatctgatttctcgagttccatataacccataaggcgcaacaaaaaatgcggatctgctcctttgttcctctactgaatacccagggcattgcctaaacacatgaaagctatcttcttctgcagaacaaccacgtggacaccttgcagtagtggtcactctcttatatctgagattaacaagtgaagggatgtagttccaagatattcgccatatgagaattaggatttttgttggtaactgtaaattccataatttcctgtagaaatctttagtatcggcctgtactaaatagttactaggatccaagctagcttcttgtaatagtttgtaggcacttcggactgtaaattctctagagagttcccctttccacacttgcatgtcttcacaattcgttctcgcaagaggaatctacaatattttttgagcgatttccttttgaaagatagatattgcgtctcctctcccgactctccagatgagaccattaagaagggagtcctttcgttgccgaaatacttctccaggtaagagatggtaagtttccaaactgtgaatttaggaactggatcttggtaatattggcttaagtactctggctaaagtgaaatgggttattaaaacatcgcaaaccctgctggctatacgcgatataaactgattaaaatacaaaactcaaaccgcgtttctttaatgcaagttca

SEQ ID NO: 1815 - DNA, 978 bp, Gossypium hirsutum
  Clone ID: GOSHI-09MAY01-C670_2
cccacgcgtccgcccacgcgtccgccctcgcccatgcttctgctacaaacggggcgggaccgttggagtgaagaatggactttgagactccgatttccccattctgaccccgggctaccattcctgacgctgatctggagttgttggtgtcgaaggctgcgtcaaactgtatggactcccctaggtcctcctctctgtgttcggatctaccgggcgtggtagataacccataaggcgcaacaaaaaattcggatctgctcctttgttcctctactgaatacccagggcattgcctaaacacatgaaagctatcttcttctgcagaacaaccacgtggacaccttgcagtagtggtcactctcttatatctgagattaacaagtgaagggatgtagttccaagatattcgccatatgagaattaggatttttgttggtaactgtaaactccataatttcctgtagaaatctttggtatcggcctgtaataaataattactaggatccaagctagcttcttgtaatagtttgtaggcacttcgaactgtaaattctctggagggttcccctttccacacttgcgtgtcttcacagtccgttctcgcgagaggaatctgcaatattttttgagcggtttcccttggaaagtttgatattgcgtctccttttccgactctccagatgagaccattagaaggagtcctttcgttgccgaaatacttctccaggtaagagatggtaagtttccaaactgtgaattatgaaaactgatcttggtaatatttggcttaagtactctggctaaagtgaatttggtattaacaatcgccaacctggttggtatacgcgaatttaactgttgaatccaaacccaccgcgcgttttttataacaggagttcccagacaaaagtgcggcgtctgatcattttgcacaatgtacaaatatctcattcttaaaggcgatggggaaagcaccag

SEQ ID NO: 1816 - DNA, 945 bp, Gossypium hirsutum
  Clone ID: GOSHI-09MAY01-C670_1
cccacgcgtccggccttttccaagaggtcatctgctttagctatcactggccgtttcacttccttcccttcaaaccctttcaatccgggtttcttggccatcttcctcctgcatccagagtttctctcgtctcttccaccaggtaacttccctccccttttcttagtgcctcctttgccaggtcatgcgctctaacattctctgctctttgtatgtatcgaaaagcaattctttgaaatcgggttttattgttctgaatatcgactatcatcgcacctagaaccgatttatctctgactcccattttgcactttttgattattgtttttgagtcccccattaccgtgactgagttcaaacccatactgatgcctaagttggttgcttctaaacatgctaatgcttctgctacatatggagaggaaacgttggagtgaatagtagacttggaggctgcgatttccccattctgacccctgactaccattcctgatgcggatctggaagttgttggtgtcgaaagctgcgtcaaactgtatggactcccctagtacctcttctctgtgttcgaatctaccagtcgtggtgataacccataagaacaaccacgtggacaccttgcagtagtggtcactctcttttgtctgaagttaacaagtgaagggatgtagttccaagatattcgccatacgagaattaggatttttgttggcacttctgactgtatattctccggacagttaccctttccatactttcatgtcatcacaatccgtgctcacaataggaatctgcagtatcttatgagcgatttcctttcgaaagatagatattgaatcccctcttccaactctccaggtgagaccatttagaaagagtctttttgcttgccaaatgcttcttcaggaaagtggatcgtgcttgctgtgagaaaacatcctacta

SEQ ID NO: 1817 - DNA, 438 bp, Gossypium hirsutum
  unsure (1)..(438): unsure at all n locations
  Clone ID: LIB3585-008-P1-K1-G2
cccacgcgtccggtttccannnnntcttctgctttagctatcttttgccatttcatttcatcttcatcaactctcttcaatcaagatttcgtggccatctccctccaagattcggttcttctctcgtctcccccaccagaggaaacgttggagtgaagaatagactttgagactctgatttccccattctgaccccgggctactattcctgacgctgatctggagttattgatatcaaaggctgcatcaaactgtatagactcccgtaggtccacctctttttgttcggatctaacgggcgtagagataacccataaggcgcaacaaaatgctcgaatctgctctttttttacctttgctgaatacctcgggcattgcctaaacacatggaagctattttcttttgagaggcagcatcgtggacacctaacattagtg

SEQ ID NO: 1818 - DNA, 339 bp, Gossypium hirsutum
  Clone ID: LIB3148-009-Q1-K1-D9
tattttttgagcgatttccttttgaaagattgatattgcgtctcctctcccgactctccagatgagaccattaagaaggagtcctttcgttgcccaaatacttctccagatatgatacatcatgttccatgaagttccccaagaaactaactaactgggcagccaagatttcagaaaaaaggccaatagggacatcatgaacctgaacctaaaaaggtgtcagaaatggagacatgtaacggatcctcccctaatttcaatttgtaaaggaccagcagatggaaccttttaaaaccctgttcattccatgatgtgaaagaattgaaacaaatacttttt

SEQ ID NO: 1819 - DNA, 287 bp, Gossypium hirsutum
  Clone ID: LIB3135-046-Q1-K1-F1
ggtcactctcttttgtatgaggttagcatgtgaagggatgtagttccaagatattcgccatgcgagaattaagatttttgttggtaactgtaaactccataatttcctgtagaaatctttggtatcggcctgtaataaataattactaggatccaagctagcttcttgtaatagtttgtaggcacttctgactgtatattctccggagagttcccctttccatacttcttgcaatagtatatgaattttaataaacaaacaaaacacacttggaaaaagattgtaaa

SEQ ID NO: 1820 - DNA, 798 bp, Gossypium hirsutum
  Clone ID: GOSHI-09MAY01-C660_3
tatctaagcctataaacaaaaacccaagtcaacaaaacccagaaatgaattaaagttttttttttcaatagcttttgtccgatttaatataaaaacgtaaaaggaatgatttatttcaatgtgggttattgtttatattataagatgtttgatagctgaaagttgatttttgggtgacttttgaaaatgtcgaagcgagggcgtggagggtcagctggtaacaagttcaggatgtcactgggtctgccagtggcagccacagtgaactgtgctgataacactggcgctaagaacctttacatcatctcggtgaagggaatcaagggccgtctcaaccggttgccctctgcttgtgttggagatatggtaatggctactgtcaagaaagggaagcctgatcttaggaagaaggtcttgcctgctgtcattgtgagacagcgcaagccctggcgcagaaaggatggtgtttacatgtactttgaagataatgctggtgtcattgtgaacccaaagggagaaatgaaaggttctgctataactggtccaattggaaaagagtgtgctgatctatggccaaggattgcaagtgcggctaatgccattgtttaggaactcacattttagtcattgtgtttctctgcatgggactaatatagtttgctggatcaagattttgtttatttttatttttccttcagaacatcatttggatggtatcttttgatttgatcttgattttggagggtaaattgtagtttgtggagagttttttaatgtttactggtgttttcattttct

SEQ ID NO: 1821 - DNA, 660 bp, Gossypium hirsutum
  Clone ID: GOSHI-09MAY01-C660_2
accggccggaattccggtcgacttacgtcgtcgccttttgtcgcagaaatgtcgaagcgaggacgtggagggtcagctggaaacaagttcaggatgtcactgggtttaccagtggcagccacagtgaactgtgctgataacactggtgctaagaacctttatatcatctcggtgaaaggaatcaagggccgtctcaaccggttgccctctgcttgtgttggagatatggtgatggctaccgtcaagaaagggaagcctgatctcaggaagaaggttttgcctgctgtcattgtgagacaacgcaagccatggcgcagaaaggatggtgtttacatgtactttgaagataatgcgggtgtcattgtgaatccaaaaggagaaatgaaaggttctgctataactggtccaattgggaaggagtgtgccgatctttggccaaggattgcaagtgcagccaatgctattgtttaggaagtcaaaatctgtgctttggactataatattatagtttgctgcttcaatattttgttgtatttctttttggatttgaagaaatgtactttatggacaggttttccgatataagagaagaaaatttttgttggcgtaaaaaataaatatgaagatttttgtataaattcaaaaaaaaataaagggtgg

SEQ ID NO: 1822 - DNA, 698 bp, Gossypium hirsutum
  Clone ID: GOSHI-09MAY01-C660_1
ctgcacggtaccggtctcggaagttctccgggctcgagcccaccgccggccgccgataatgtcgaagcgagggcgtggaggttcagctggaaacaagttcaggatgtcactgggtctaccagtggctgccacagtgaactgtgctgataacactggtgctaagaacctttatatcatttccgtgaagggaatcaagggccgcctcaaccgattgccatcggcttgtgttggagacatggtgatggctactgtcaagaaaggaaagcctgatctaaggaagaaggtcttgcctgccgtcattgtgaggcaacgtaagccttggcgccgaaaggatggtgtttacatgtactttgaagataatgctggtgtcattgtgaatccgaagggagaaatgaaaggttctgccattactggtccaattgggaaggagtgtgctgatctgtggccaagaattgcaagtgcagccaatgccattgtttagggatttgaatttttctagagttttttgttcccttgagtcatggctttttgctggatcaagattttgttatgtgttttttagggtttcttgaaaaatatcgtatggatagctttgatttggattttgatgctgggatgtagttaatggatttctcccatgtttaagcttattatttcgtttttctttgaggatcttgctgatcttagccatatttatc

SEQ ID NO: 1823 - DNA, 388 bp, Gossypium hirsutum
  Clone ID: uC-gsflnu33B081h02b1
tcgcctacgcgtccgatttgaaaggcttataaccaaggtacatacattttgtattttttaatttcagatctaacctttttacttatttttgtaattttattattgggtccaaattatttttcaaattgatttaagcattcaactgatgtatagagttattattggcccaacattgttacttgactatacttaaatgcatgtgacctggggacgggaaatgttctaagaagaatggatttggctgagacagttgttaggaatcgtaagcaatggcgcctaaaggaaggtggtctactgtgactgtgaggtatcgctggtgtcattgtgaatccgaagggagaaatgaaaggttctgccattactggtccaattggaaggagtgtgctga

SEQ ID NO: 1824 - DNA, 308 bp, Gossypium hirsutum
  Clone ID: LIB3189-011-P1-K1-G8
gcccacgcgtcgcccacgcgtcgcccactctctgaagcgaggacgtggagggtcaggtggggacaagttcagatgtactgggtttaccagggcagccacagtgaactgtgctgataacactgtgctaaaaccttatatatctcgggaaaggaatcaagggccgttcaccggttgccctctgcttggttggagatatggtgatggctaccgtcaagaaagggaagcctgatctagaagaaggtttgcctgctgcattggagacacgcagccatgttcataaggttgtgtttcatttatcttatttaatt

SEQ ID NO: 1825 - DNA, 1766 bp, Gossypium hirsutum
  Clone ID: GOSHI-09MAY01-C610_1
cccacgcgtcgcccacccctcccgtccctttttttcttaatcaaatctggttcagttcgcataatagtaacgcataaaagtatggttgggaggattttattactagttctttttatgaatgctgcctttttcatagtgaatgctgtaccagaaacatgccctgctgatctcggtggaaaatgtggtgaagatggtgaatgggaaggggaatttttccctggagttcccaaaattaagtatgagggtccttctagcaagaatccactttcatacaaatggtacaatgcagaagaagtgattctcgggaagaaaatgaaggactggttgagatttagtgttgcattttggcatacatttcgtggaacaggtgccgatccttttggtgcacccacaaagtattggccatgggaagatggtaccaattccattgctatggccaaaagaagaatgagagccaacttcgaattcctaagcaagcttggagttgataggtggtgtttccatgacagggacattgctcctgatggcaaaacactaaaggaaactaattcaaacttggatgaagttgtggcacttgctaaagaacttcagggggacaagatccgtccactgtggggtactgctcaactatttatgcatcctcgttacatgcatggtgctgctacaagctctgagttgggtgtttatgcctatgctgctgctcaagttaagaaagctatggaggtgacacattatctcgggggagaaaattatgtcttttggggtggtcgtgagggataccaaacactcttgaacacagacatggaaagagagctcgatcatatggcaaaatttcttgaagctgctgctgcctacaagaagaagattggattcaatggaactctactgattgaacctaagcctcaagaacctaccaaacatcagtatgactgggatgctgcaacaacacttaacttcttgcgtaaatatgggctgcttggagaattcaaacttaacattgagtgtaaccatgccacactctctggtcacagctgccatcatgatcttgagactgcaagaatcaatggaatgttaggaaatattgatgcaaacactggggatcctcaagttggttgggacacagatcagttcttgactgatgtcggggaggcaaccatgattatgctaagtgtgataagaaatggaggattagcaccaggaggcttcaacttcgatgcaaaattacggagagagagtacagatgttgaggacttgttcattgctcatattagtggaatggacaccttggctcgtggactccgaaatgctgctaagctgattgaggatggttctttggctgagcttgttagtaaacgatattctagctttgacacagaacttggtgcccagattgaggctggttaagctgattttgaaatgcttgagaagaaagccatggaatggggagagcccaaggttgcttcagccaagcaggaacttgcatagatgattttccaatctgcactgtaggataccttgattgaccgattatggtcaatgttttcggtttttccttttagttaggaataagtcatgatgcttatacaaataattagatttttgtagtttataacaatgcattagtgcttagttttttaagaaaaatggtatgttttagtagttgaactcttggtggaatgccaccttaccatgaagggaatccatgccctttttgggtactcttcttggaatgttgtgtattgataagtgatggcaagtgtggcttt

SEQ ID NO: 1826 - DNA, 923 bp, Gossypium hirsutum
  Clone ID: GOSHI-09MAY01-C600_2
ctccatactcgtcaacttcttcttctttttactttccttttggcttttcttgtcgtacaacaaaagaaaaaaaaatgtctgatttaagagatttgcacggcaaccccattccacttactgacgagcatggcaaccccgttcaattgactgatgaacatggtaaccccgtttacgtctctggtgtagccgccaagcagacagatatgtatggtggtcagatgggatatgatcccactctttccgccgctgctgagtatcagcagcagcagcagctgcggcctcagtacctgcagcaggaggaacagcagccgcagtatcagccacagcacctgcattacgaggtttccaccacagaagagattcagcgctccaacgcctccagccctagctcggtgaagaaaaccccctcatatcatctataaaattatttatattgatgatgccagttcagggttttggctgtattttgattatatataaaataactgcgtttttttttagtctgaggacgatgggatgggcggtagaaggaagaagaaagggctaaaggagaaaataaaggagaaactaacgggtggaaagcataagacggagggggggggaaggaggggcaatcacaaaccgtaacctacgttgccaaaaccagaatcccaacaaccagcaacgcaacaacgccgccgcctgaggagccctaccccccccatgatcaacatgagaagaagagtatgatggagaagataaaggaaatattgcctggtcatcccagccattgaagagctagccatgaataatttggatgatgttgttgtgtaataattaataaaatgcatggtttcccatgaatttatgcttttgatcttttgtgaagtgtgatgatatgtaataaatattcaattactagcccttgtgtttttttcttgccc

SEQ ID NO: 1827 - DNA, 810 bp, Gossypium hirsutum
  Clone ID: GOSHI-09MAY01-C600_1
cccagcgtccgcaactgtgtttcattcttcttctttttactttccttttggcttttcttgtcgtacaacaaaagaaaaaaaaatgtctgatttaagagatgtgcacggcaaccccattccacttactgacgagcatggcaaccccgttcaattgactgacgaacatggtaaccccgtttacgtctctggtgtagccgccaagcagacagatatgtatggtggtcagatgggatatgatcccactctttccgccgctgctgagtatcagcagcagcagcagctccggcctcagtacctgcagcaggaggaacagcagccgcagtatcagccacagcacctgcattacgaggtttccaccacagaagagattcagcgctccaacgcctccagccctagctcgtctgaggacgatgggatgggcggtagaaggaagaagaaagggctgaaggagaaaataaaggagaaactaacgggtggaaagcataagacggaggcgggggaggaggggcaatcacaaaccgtaacctacgttgccaaaaccagaatcacaacaaccagcaacgcaacaacgccgccgcctgagcagcactaccaccaccatgatcaacatgagaagaagagtatgatggagaagataaaggaaatattgcctggtcatcacagccattgaagagctagccatgaataatttggatgatgttatcgtgtaataattaataaaatgcatggtttccatgaatttatgcttttgatcttttgtgaagtgtgatgatatgtaataaatattcaattactagcacttgctttttc

SEQ ID NO: 1828 - DNA, 569 bp, Gossypium hirsutum
  Clone ID: GOSHI-09MAY01-C630_3
ccgttatccgtctccgcctctcttcccaagtatattacataaaatattatgaattaaagcaaatccccaatttccccctcatcccaatcctcaccaaaccctacaacgaaaaccctaattcagattttgctttaattctgatttgctggtccgtaattctattcaaaagaaagacccctatatattgcatttccccaatttattacgttttaatttttaagagaaattgagaagggaatggaaggtataccacacccaataccgagaacggtggaagaggtcttcaacgacttcaagggtagacgctctggcttgattaaggctctcacaactgatgttgacaagttctaccaacagtgtgatcctgagaaggagaacttatgcctatatggacttccaaatgaaacctggaagttaacttgcctgttgaggaggtgcctcctgagcttccagagccagcattgggcataaactttgctagagatggaatgcaggagaaggactggctatcattggttgcagttcacagtgattcgtggttgcttgctgttgctttctattttggtgca

SEQ ID NO: 1829 - DNA, 594 bp, Gossypium hirsutum
  Clone ID: GOSHI-09MAY01-C630_2
tttaaaacctagcttcgttttcccacgcgtccgcccacgcggccggaaaagagcgagagagagagtagagaaaaccaaggcaaaggagctagtttaaaaccccccggcctcaatcttttggtctaaaattggctttgagtttccgttatccgtcttcttctctctttcacaaagtgtatatttttatataaaataataatttgaagtaaatccccaattccccaaatctcaatcccaccaaaccctacaatgaaaaccctaattcatttttccctttaatttctgatttgctgctctcaaaattctattctaaagttctgtccacgtattattctcctttttgtttttctttaatatttcaatatttgcatatatatatataggtagagattaaggatttttgggttagtggggggaaatctttgaaggggaatttgagagaaacaaatggaagggataccacacccgataccgagaacggtagaagaggtcttcaacgactttaaaggcagacgtgctggcttgattaaggctctcaccactgatgttgacaagttctaccaacagtgtgatcctgagaaggaaaacttatgc

SEQ ID NO: 1830 - DNA, 1334 bp, Gossypium hirsutum
  Clone ID: GOSHI-09MAY01-C630_1
ggcttttgtgttccgttatccgtctccgcctctcttcccaagtatattacataaaatattatgaattaaagcaaatccccgggttccccctcatcccaatcctcaccaaaccctacaacgaaaaccctaattcagattttgctttaattctgatttgctggtccgtaattctattcaaaagaaagacccctatatattgcatttccccaatttattacgttttaatttttaaatctttgaaggggaatttgagagaaacaaatggaagggataccacacccgataccgagaacggtagaagaggtcttcaacgactttaaaggcagacgtgctggcttgattaaggccctcaccactgatgttgacaagttctaccaacagtgtgatcctgagaaggaaaacttatgcttgtatggactcccaaatgagacatgggaagttaacttgcctgttgaggaggtgcctcctgagcttccagaacctgcactaggcataaactttgctagagatggaatgcaggagaaggactggctatccttggttgcagttcacagtgattcatggttgcttgctgttgctttctattttggtgcacggttcgggtttggcaagaatgagaggaaaagactctttctaatgataaatgatcttccaagcatattcgaagttgttactggaaatgtaaagcaatcaaaggaccaatctgctaatcataacagtagtggcaaaagcaaatcaagtgctaagtctcgtcaatctgaaccccagagtaagatggtaaagatgtctccaccatccaaggatgaagatgagagtggggaagaagaggaggaagatgatgaacagggtgccacttgtggggcttgtggagatagctatggaacagatgaattctggatttgctgtgatatctgcgagagatggttccatggcaaatgtgtgaagattacacctgcaaaggctgagcacatcaagcagtacaagtgcccaagctgcagtagcaagagggctagagtttgaaagtagtaggttcagaaattgggctttaaatctatttaaaacgaaacagacaaggttggttttatagcctttttcgttacagtttagaagtaaaacagagcttggtccgtttagttgatgaatgaattttatgactgcatatgggatttaatgttttgctactctttgttcctgctttgtttaatttttattgacaatcgtgttctaaactgatgctggtttctatatttactttattatgcatacatatacacgaacacaagggaactacttatttattatatcaattggaactattatctgtattaatggtc

SEQ ID NO: 1831 - DNA, 882 bp, Gossypium hirsutum
  Clone ID: GOSHI-09MAY01-C180_1
gatatttttaagactgtaacaaaaacaatgccagagagcaatattcacaggggtgatcatgaactgggtggttgtcagaatcatgctcactatcacaatgtctatggcatgctaatggcaaggtcaacttatgaagggatgggattagctgatcgaagaaagcgtccttttgttcttactagagctggatttattgggagccaaaggtatgctgcaacatggactggagataacctttcaaattgggagcaccttcaaatgtctatctccatgatgcttcaattgggccttagtggtcagccactctccggacctgatattggtggatttgctggaaatgctacgcccaaactttttggccggtggttgggttttggtgctatgtttccattctgtcgtgggcactcagagactggcaccattgaccatgagccatggtcatttggtaaagagtgtgaagaagtatgtcgccttgcattaaaaaggcgctatcgcctcataccacatatatacactcttttctatatggctcatactagaggtactcctgtggcaactcctgcattttttgctgatccaaaagatcccaatttaaggacattggagagttgcttccttttgggcccacttttggtctattcaagcataatgccagatctggggtctgataaattacaacccttgttgcctaaaggaatttggttgagctttgactttgacgattcacatccggatttaccagctttatatttgcaaggtggatatattatacctttcggtccttctcatcaacatgttggtgaatctaaccccatggatgatttaacgcttattgtaagcgtagatgagcatgggaaagcaaaggctctctttttgagatga

SEQ ID NO: 1832 - DNA, 1102 bp, Gossypium hirsutum
  Clone ID: GOSHI-09MAY01-C150_3
cccacgcgtccgcccacgcgtccgcccacgcgtccgcccacgcgtccgcaagaaccatggggtcatcctcctgcctgaagggcttatagagagcattcctgaagtgtatgcgctattgaaggaaattcacagtttgctcaggcaaaatgtatctgctgataaaatttcttcccagttatcaccttgggcatctgctttgtttgaaccctcgcctccgttcataaggaaacagcttcttctccaacctgagtcagacgattctgcacagctatcacagattgagacggagaaactactggcgcaccttgtagagaatgaaattaataagcgcctgaaagcaggcacttacaaggggaagaaattcaatgctatttgccacttctttggctatcaagctcgtggatccttaccatcaaaatttgattgtgactatgcctatgttcttggacatatctgctatcatattcttgcagctggtctaaatggttatatggcaactataaccaacctaaagaatcctgtgaacaagtggcgttgtggtgctgcacctcttccagcaatgatgactgtgaagcgctggtctcaaaatcccaatgccgcgtcaattggaaaacctgctattcatccagctactgtagatttgaaaggcaaagcatacgagatgctgagacaaaatgcaacaaggtttttgctggatgatatctacagaaatcctggacccctccagtttgatggtccaggtgctgatgctaaggctgtgacattatgtgttgaagaccaggattacatgggccgcatcaagaaactgcaggaataccttgacaaggtccgtaccattgtgaagcctgggtgttctcaggaagttctgaaagctgctttaagtgtaatggcttctgtgacagaggttctgtcagtgatgtcttcatcgtcatctggcggacaagccctttgagaagaaagcagtgcttgtcatggtgctcacgttttccttaatgatcctaaactgtttgtgagaaactgatttttgaggtacccctgttttcatcccgtcgggttggttgttggttcagggctttctgaaaagagataatatattaataac

SEQ ID NO: 1833 - DNA, 777 bp, Gossypium hirsutum
  Clone ID: GOSHI-09MAY01-C150_2
cccacgcgtccggcaccctccaatctcatcccaatatggtaattcttggtgaagaagtggctgcatcaaagcttacactctttgacataacaaagcaaatttgtgatgcagttcaagctagggccgagcaagacaagaaccatggggtcatcctcctgcctgaagggcttatagagagcattcctgaagtgtatgcgctattgaaggaaattcacagtttgctcaggcaaaatgtatctgctgataaaatttcttcccagttatcaccttgggcatctgctttgtttgaatttttgccacatttcataaggaaacagcttcttctccaacctgagtcagacgattctgcacagctatcacagattgagacagagaaactactggcgcaccttgtagagaatgaaattaataagcgcctgaaagcaggcacttacaaggggaagaaatttaatgctatttgccacttctttggctatcaagctcgtggatccttaccatcaaaatttgattgtgactatgcctatgttcttggacatatctgctatcatattcttgcagctggtctaaatggttatatggcaactataaccaacctaaagaatcctgtgaacaagtggcgttgtggtgctgcacctcttccagcaatgatgactgtgaagcgctggtctcaaaatcccaatgccgcgtcaattggaaaacctgctatacatccggcttcgaaggcaagctataatctgaacaatgcacaggttttgctgagattctcgaattctgacc

SEQ ID NO: 1834 - DNA, 1467 bp, Gossypium hirsutum
  Clone ID: GOSHI-09MAY01-C150_1
cccacgcgtcccaaacaccccgccgcagcaaccatctaccatccatcttctcattctactctttacctaccaagatcaagaaacctcaacaatcaacaactaccaactagatttggattaagtcacccaaaaccaatcaaccaaccaagcaaccgagaagcaaaaagaatggattctgattatggcattcccagagaactttctgatcttcagaaactccgatctcaataccaaccacagctccctccttgcctcgagggaactactgtcagggttgagtttggtgataccactacatctttagacccggctgatgctcataccatagcccgagcttttcctcacacttatggcaagcccttggctcactttctcagggcaactgccaaagtacctgatgctcagattataactgagcatccagctattagggttggacttgtcttttgtgggagacaatcccctggtggccataacgtcgtatggggcctccacaaagctctcaaaatccacaaccctaatagcactttgctcggctttttgggtggtactcaaggtttatttgcccaaaaaacactagagatcactgatgatattctttcaacctacaaaaatcagggtggttatgatctcttaggacgaacacaagatcaaattagaacaactgagcaagttaaggctgcactagctgcctgcaatgatttgaagttggatggccttgtaattattggaggtgtaacatcaaacacagatgctgctcaacttgctgaaacatttgctgaagctaaatgtccaacaatggtggttggtgttcctgttacactgaatggagacctcaagaatcaatttgttgaaaccaatgttggttttgatactatatgcaaggtcaattcccaactcatcagtaatgtctgcactgatgctctctctgcggagaagtactattattttatccgtcttatgggaaggaaggcatcacatgttgccctggaatgcaccctccaatctcatcccaatatggtaattcttggtgaagaagtggctgcatcaaagcttacactctttgacataacaaagcaaatttgtgatgcagttcaagctagggccgagcaagacaagaaccatggggtcatcctcctgcctgaagggcttatagagagcattcctgaagtgtatgcgctattgaaggaaattcacagtttgctcaggcaaaatgtatctgctgataaaatttcttcccagttatcaccttgggcatctgctttgtttgaatttttgccacatttcataaggaaacagcttcttctccaacctgagtcagacgattctgcacagctatcacagattgagacggagaaactactggcgcaccttgtagagaatgaaattaataagcgcctggtagccggccctttcttgggcacctacctctttgatgctttcttgttgacattggaacaagctctt

SEQ ID NO: 1835 - DNA, 294 bp, Gossypium hirsutum
  Clone ID: LIB3083-119-Q1-L1-C3
tcgagtttttttttttttttttttgcgtagacacttaacatttgttattaatatattatctcttttcagaaaccaataaaatatctttcgggatgaaaacaggggtacctcaaaattcagtttctcacaaacagtttaggatcattaaggaaaacgagagcaccattacaatcactgctttcttctcaaagggcttgtccgccagatgacgatgaagacatcactgacagaacctctgtcacagaagccattacacttaaagcagctttcagaacttcctgagaacacccgggc

SEQ ID NO: 1836 - DNA, 983 bp, Gossypium hirsutum
  Clone ID: GOSHI-09MAY01-C140_2
gtccttctttttgagacttcaaagcgaagattgcagattttaacctctcaaaccaggctcccgcatggctgctcgtcttcattctactcgtgttttgggaaccttcggctatcatgcacctgagtatgcaatgaccgggcagttgacacagaagagtgatgtttacagtttcggggttgtccttttagagcttcttacggggaggaaacctgttgaccacacaatgcctcgtggacagcagagtctcgttacctgggctactccaagactgagcgaagataaagtcaaacaatgcgtagatccaaaactgaagggagagtatcctcccaaagcagttgctaagttggcagctgtggcggcattatgcgtgcagtatgaatctgagttccgtccaaacatgagcatcgtcgtcaaggctctccaaccgctgttgaaggctccagtgccagtaccagcgctggagacttaaaacagcagaggaatccaagtttcttcgccatttatcgaaatttcatcaacttttgatagtttggtttcgtaatcaaaatacagattttcatctgatcactaaatattaattatatacgtttttctattccttcctatataacattcaagtgtaggattgggtttggtctgtttagtatctgtcagttgccgggttttttcggactcgtaatgtcatgttttttcggatgtagtcgtaaaattgaccgagggattgggttgtgactgagggattgggtcgtgtcggtgagtatagtttggtttgtatcatttttttcgttttcttcgtcgtggttcgtaaatttgtatgaatattttcgcttagaatgattggaactaatcgaagcgtttgtagcatgaggcttgttctggtaaaaattttaacactgagataaaagaagaactgtatgttattagatcaagaagctttttaatgtgagtttttggactagttttaataaaagccccgggttgtc

SEQ ID NO: 1837 - DNA, 1414 bp, Gossypium hirsutum
  Clone ID: GOSHI-09MAY01-C140_1
cggacgcgtgggctctctctgtttttttttcctctctattgtctctctttagaacaatcccttcatccaaaaacccaatacaactgttaacaaaccctagaaagaggaagataaagtttcttccaacgattaaagagagaaaatagaggggaaatccaggcacatgcacctagtagaggctacttcgatcaactagaaaatacagacgatttgtatttgaagaaacgatcaaggatgcgtcgttggctttgctgttcctgtcaagcagaggagagttaccaagcacacgaaaacgagcacttgaaagcccccaaggatcatacagatggaaatcatagaaactcaagggtggcagctcctgtcaaacctgaagtgcaaaaatcaccaccacctatcgaagttcctgcactatcgttggaagaattgaaagagaaaacggacaattttggatcaaaggctttgattggtgagggttcttatggaagagtttattatgccagcttgaacaatggaaaagctgtggctgtgaaaaagcttgatgtttccactgagtccgagtcgaatgtggagtttttgacccaggtttccatggtttcaagattgaagcatgacaattttgtcgagttgcaaggttactgtgttgaaggaaatctccgtgtgcttgcttacgagtttgcaacaatgggttcacttcatgacatattgcatggaaggaagggagttcaaggggcacaacctggtccggttcttgactggatgcagagggtaagaattgcagttgatgcagcaaggggcttggaatatttgcacgagaaggttcaaccttcgattatccacagagatatcagatctagcaatgtccttctctttgaagacttcaaagcgaagattgcagattttaacctctcaaaccaggctcccgacatggctgctcgtcttcattctactcgtgttttgggaaccttcggctatcatgcacctgagtatgcaatgaccgggcagttgacgcagaagagtgatgtttacagtttcggggttgtccttttagagcttcttacggggaggaaacctgttgaccacacaatgcctcgtggacagcagagtctcgttacctgggctactccaagactgagcgaagattaagtcaaacaatgcgtagattcaaaactgaaggagagtatcctcccaaagcagttgctaaagttgcagcttgtgcggcattatgcgtgcagtatgaaatctgagttcgtcaaacatgagcattgtcgtcaggctcttcaccggttgtgaggctcagtgccataccacgctgcgacttaaacagcgaggatcaagttttcgcatttatgaatttatcactttgaagtggtcgaatcaaatcgatttatcgacctaatataatattcgttttatc

SEQ ID NO: 1838 - DNA, 379 bp, Gossypium hirsutum
  Clone ID: LIB3120-025-Q1-K1-D7
aggaaatattagagggcttggttactataatgcaacaatgggttcactttatgacacattgcatggaaggaagggagtttaaggggcacaaccgagagcggttcttgactggatacagagggcaagaattgctgttgatgccgcaaggagcttggaatattttgacgataaagttcaacctctgattatgcacagagataatacatatagcaatggacttctttatggagacatgaaagcgaacagttctaatggttacctataaaaaccagctcacgacatggatagctcgtcttcattctactcgagtggagggaaccttcggctatcatgcacctgagtatgcaatgaccgggcgagagacacagaagagtgatgc

SEQ ID NO: 1839 - DNA, 366 bp, Gossypium hirsutum
  Clone ID: LIB3196-064-P1-M1-H12
cggacgcgtgggaaccaacaaaaagcattagaaagaaaactgcctttaaaaattaaaattctattcaacttctttgtttatctctctctggtatatttttcctctctattgtctctctttagaacaatcctttcatccaaaaacccaatacaactgtttacaaaccctagaaagaggaattgaaagagaaaacggacaattttggatcaaaggctttgatcggtgagggttcttacggaagagtttattatgctagcttgaacaatggaaaagctgtggctgtgaaaaagcttgatgtttccactgagtccgagtcgaatgtggagtttttgacccaggtttccatggtttcaagactgaagcatg

SEQ ID NO: 1840 - DNA, 366 bp, Gossypium hirsutum
  unsure (1)..(366): unsure at all n locations
  Clone ID: LIB3148-008-Q1-K1-B11
cgtttttctattccttcctatataacatttaagtgtaagattgggtttggtctgtttggtatctgtcaattgccgggttttttcggactcgtaatgtcatgttttttcggatgtagtcgtaaaattgaccgacggattgggttgtgactgagggattgggtcgtgtcagtgagtatagttcggtttgtatcatttttttcgttttcttcgacgaggttcgtaaatgtgtatgaatattttcgcttagaatgattggaactaatcgaagcgtttgtagcatgatgtttgttgatgatgtcttatcttcgnnncnnnagangagactgcgttggaccatcaaacgaatctacataattatgaccctat

SEQ ID NO: 1841 - DNA, 287 bp, Gossypium hirsutum
  Clone ID: LIB3135-062-Q1-K1-D6
atcctaccaaagcagttgctaagttggcagctgtggcggcattatgcgtgcagtatgaatgtgagttccgaccaaacatgagcatcggtgtcaaggctctccaaccgctgatgaaagcttcagtgtcagcatcagcgacatcaccggtgacttaaaacaggcagacagatgaatatcatgatattcgccattgattgaaatttcgatgacttatgatagttagggttcggaatcaaaatacagaatttcatcagatcactaaatattaattatatacgtgtttatat

SEQ ID NO: 1842 - DNA, 1050 bp, Gossypium hirsutum
  Clone ID: GOSHI-09MAY01-C170_1
ctcttttcacatatttccacaattttcttttgacacttcattatgtcttttgccaatatcaaagcttatcttcttgattcaaaccaacccatttacactaatctgtattgaaaacccttgaaagacttgctttttcttcgtgggatttttgtgttctttattgggtttctttttttgtttttcttgagttttaagactccggggttttgttgaatgaaatcaagctttatgatggtggatggtggtggattgatggatcaaaggaagggtattatgaaaataagacatgtaaacaacaaggtgagatacgtttagagaccaatcaagaagaagaacaacagatcatcatacagggaaagaaaagatcctaaagtgctacaaaagctgtttgattcatgtaaggaagtgtttaaaggccctgaaactgttccatctgattctgatgtcaacaagctatgcagcattcttgatgagatgaagcccaaacatgtggggcttagcaaaaacatgcagttcttcaaatctaagagtgtggagaaaggaactccaagtgttgcatatacacccatttaccaatgcgatgagttctcgctttgcattttctttcttgcagcaaatgctgtcatccctctccataatcatcccgcgcggccggttttcagcaagcttttgctgggagatttgcatataaagtcgtacgattgggtggattctatgccgccacccgaatcccagccgagattggcaaggttgaaagtcgatagcgtgctgaaagcgccatgcaagacctcagtgttgtatcctacaacaggaggtaacatccatgaattcagagccgtaacaccatgcgcggtgctcgatgttctcggccctccttactctaaagacgaccgtgattggtcttattaccaagagattccaaccactcggctgtgtcagatggagaaagtagtacagggaatgaaggaggaggtgattatttgagatggttgaaagaaattgaactgccccagaattcacacatggagagaattgactactgaggtccta

SEQ ID NO: 1843 - DNA, 856 bp, Gossypium hirsutum
  Clone ID: GOSHI-09MAY01-C110_1
cccagcgtccgccagcgtcgtctttgctctataggctctgtgaatcattttgacactgaagtagcctgagttttgatcctcccaaaagaagacttatggattgcgaagccgttaatgatcctactcaagctgctattaaacctaatgtgactgtgtctagcagcgttcgtgagctgctggagtgccctgtttgcttaaatgcaatgtacccgccaattcatcagtgttcaaatggacacacattgtgttctggttgcaagccaagggtgcacaaccggtgccccacgtgcaggcatgaactcgggaatattaggtgtcttgcgttggagaagctcgctgcttctcttgagcttccctgcaaataccagagctttgggtgcaatggcatatatccatattatagtaagccaaaacacgagtctcaatgttcttatagaccatatggctgcccctatgctgggtcagaatgcacagtcattggtgatattcctcatcttgtggcccacctgaaagatgatcacaaagtcgacatgcacaatgggtgcaccttcaaccaccgctatgtcaaatcaaacccgcatgaggttgagaatgctacatggatgctaacggttttcagttgctttggtcagtacttttgcctgcattttgaagcattccatatcggattagctcctgtttatatagcattcttgcggcttatgggtgacaataatgaggcaaagaactatagctacagcctcgaggtgggtgggaacgggaggaagctgctttggcaaggggtgccaagaagcataagggacagtcatagaaaggtgcgtgacagtttcgatggtctcataatacaacccaacat

SEQ ID NO: 1844 - DNA, 430 bp, Gossypium hirsutum
  Clone ID: AF175125
cggctgcgagaggacgacagaagggtacggctgcgaggaagacgacagaagggagctaaaacatgagtcccaatgttcttataggccatatagctgcccctatgctgggtcagaatgcactgtcataggtgattttccttatcttgtggcccatctgaaagatgatcacaaagttgacatgcacaatgggagcactttcaatcaccgttatgtcaaatcaaacccgcatgaagttgagaacgctacatggatgctaacggttttcagttgctttggtcagtacttttgcctacattttgaagccttccagctcggaatctctcccgtctacattgcattcttgcggtttatgggtgacgataacgaggcaaagaactatagctacagcctcgaagtgggtgggaatgggagaaagatgatttggcaaggg

SEQ ID NO: 1845 - DNA, 1248 bp, Gossypium hirsutum
  Clone ID: GOSHI-09MAY01-C100_1
aaataagccaatttcttgaccatttcttcaccttccaaaaggctaacacacacaaaaatcagttgattgttgataatttgaaactgagacgaagacttcaatggcgtttccagtagtcgataccgagtatctcaaggagatcgataaagctcgtcgagacgttcgcgctctcatcgccttgaagaattgcgctcctatcatgcttcgcttagcgtggcacgatgctgggacgtatgatgtgagcactaaaaccggaggtccaaatggctctataaggaatgaagaagagttcactcatggcgccaatagcggcttgaaaatcgctattgatttttgtgaggaagtgaaggctaaacatcctaaaattacgtatgcagacctataccagcttgctggtgttgttgctgttgaagtcactggaggtcctaccattgactttgtacctggaagaaaggattcaaacatttgccccagggaaggccgacttccagatgctaaaagaggtgcacctcatctgagggacatcttctatcgaatgggtctttctgacaaagatattgtggcattatctgggggtcacactctgggaagggctcatcctgagagatcaggttttgatggcccttggaccaatgaacccctgaagttcgacaactcttactttctggagctgctaaaaggggaatctgaagggcttttgaaacttccaacagacaaggctttgttagatgaccctgagttccgcaagtatgtagagctctatgccaaggatgaggatgcgttcttcagagattacgccgaatctcataagaaactttcggaactcgggtttactcccacttcagctcgctccaaggtaatggtgaaggacagcactgtattggcacagggtgccgtgggggttgctgttgccgccgcagtggtgatcctaagctacttttacgaggtccgcaaaagaatgaagtgaaagccatattactcttttctataacagaacatccgttacaaatttagcagaacttaggtcaatcatctggctaatagttatgtagttcatgttttctcctacatgatatcgcgtcctacaaaccgtattggcagtaaaagatcgacacaatactctaagctcatctatttgaagtaaataacatggataaatgctctcgagccacttcaatccatgacatttctgttacgaaatgctttcgtttgtagttaggggggataattaaagctacaaattgctct

SEQ ID NO: 1846 - DNA, 509 bp, Gossypium hirsutum
  Clone ID: LIB3583-055-P1-K1-G11
cccacgcgtccgcccacgcgtccgcccacgcgtccgcccacgcgtccgcccacgcgtccgcaaaaatcagttgattgttgataatttgaaactgagacgaagacttcaatggcgtttccagtagtcgataccgagtatctcaaggagatcgataaagctcgtcgagaccttcgcgctttcatcgccttgaagaactgcgctcctatcatgcttcgcttagcgtggcacgatgccgggacgtatgatgtgagtactaaaaccggaggtccaaatggctctataaggaatgaagaagagttcactcatggcgccaatagcggcttgaaaatcgctattgatttttgtgaggaagtgaaggctaaacatcctaaaattacgtatgctgacctataccagcttgctggtgttgttgctgttgaagtcactggaggtcctaccattgactttgtacctggaagaaaggattcaaacatttgccccagggaaggtcgactgccagatgctaaaag

SEQ ID NO: 1847 - DNA, 365 bp, Gossypium hirsutum
  Clone ID: LIB3120-009-Q1-K1-C6
acggacatcctctatcgaatgggtctttctgactaagattttgcggcattatctgggggtcacactctggtatcatattcaataaaatgtttctgattgtctatattcctggttatgtccgttatatgatcaatatcaaacctttggcggtggctatggtgttacagggaacggctcatcctgagagatcaggttttgatggcccttggaccaatgaacccctgaagggcgacagctcttactttggggagctgctaaaaggggaatcagaacggcttttggaacttccaacagacaaggctttgttagatgaccctcagttccgtaagtatgtaaagcactatgccaaggatgaggatgcattc

SEQ ID NO: 1848 - DNA, 512 bp, Gossypium hirsutum
  Clone ID: uC-gsflmaxxa061b12b1
ggcacttcctggtgataatgttgggttcaatgttaagaatgttgctgttaaggatctcaagcgtggttatgttgcatcctggacaaattggaaacggatatgccccagtcctcgactgccacacctcacacattgctgttaagtttgctggaccgcggcatcaccttcttgcaccggatgggaatcgggtttttgatctcagtattagccactctcgtagcagggttcatagaagtgaagcgtaaacaagcagctgtggcacatgggcttgaggacaagcctcattctatcatccccatgtcagtcttttggctcgtgcctcagtacggtctacatggaatagctgaggctttcatgtcaattggacacttggagttcttttatgatcaatcaccagaaagcatgaggagcagtgctactgctttgttctggactgcaatttcagttgggaattatgtgagtacgttgctggtctctctagtgcacatatatagtgctaaacctgacggatc

SEQ ID NO: 1849 - DNA, 419 bp, Gossypium hirsutum
  Clone ID: LIB3585-027-P1-K1-C1
cggacgcgtggacggatttcttcgaaattaaggctgtcaaagaaatcgaaccagctttgaagaggcaggttattatatctactgttcttatgactgtggggatcgcaattgttacttgggttggtgtgccatcgcccttcaccatttaaaattttggggatcagaaagttgttaagaactggcaactatttttgtgcgttggtgttggtctctgggctggacttattattggttttgttactgagtactacaccagtaatgcttacagtcccgtgcaggatgttgccgattcctgcaggacaggagcagctaccaatgttatatttggccttgcttaagttgctgcccttggaatgttaagcaccattgcaactgggttggccattgatgcttttgggcccatcagtgacaatgctgga

SEQ ID NO: 1850 - DNA, 479 bp, Gossypium hirsutum
  Clone ID: uC-gsflnu33B066f09b1
ttcacgcgtccggatccttccttcgccgcctattgttttttgttaccttgatctcaagtgcatcagaatgggtaaggaaaagactcacattaacattgtggttatcggccacgtcgactctgggaaatcaaccaccactggccacctgatttacaagcttggtggtattgacaagcgtgtgatcgaaaggttcgagaaagacagctgctgagatgaacacgaggtcattcaagtatgcttgggtgcttgacaagctcaaggtttgagcgtcgagcgtggcatcaccattgatattgtcttgtggaaatctgacacccacgacatactactgcactgcgattgatgcactcggacaccgcgactttatcaagaatatgatttctggtaccccacaggctgactgcgccgtattgactcttgattccccctactgctggttctgaggctggcttcccccacgttggtctgattcttgagct

SEQ ID NO: 1851 - DNA, 513 bp, Gossypium hirsutum
  Clone ID: GOSHI-09MAY01-C120_4
aaactttctccgagtaccctccacttggacgttttgccgttagggacatgagacagactgttgctgttggtgtgatcaagagtgtggagaagaaggacccaactggagccaaggtgacgaagtctgctgccaagaagggcaagtgaacctcaggggattttgttgattcaacaacagtttatcatggttactacaataaaactttggttcatgttagtaggtccatcactggacgtttagttacatgttttaatggttcaccgtcatctcttggatattggtcccagaactgggttcttgataggcggtggtgaggtttatctttggagttcatagtgtgtcatcattaatgttattatgccttatcgagctataaacttcttgatattttttgttcccatttttccaccaaagtggtcctggagctttaggtctgttcctgggctccgttccttcactcaatgttctatctaaacgttttatattatacaactctaaaactgtttctgtttt

SEQ ID NO: 1852 - DNA, 735 bp, Gossypium hirsutum
  Clone ID: GOSHI-09MAY01-C120_5
gcttcaagtctctctctctctctctgtgtctgggtgctctaagatcctagctaacagtgcataatgggtaaggagaaggttcacatcaacattgttgttataggacatgtcgactctggaaaggtcgaccaccactggtcacttgatctacaagcttggtggtatcgacaagcgtgggggggaaaggtttgagaaggaagctgctgagatgaacaagaggtcattcaagtatgcttgggtgcttgacaagttgaaagcagaacgtgagcgtggtattaccattgatattgccttgtggaagtttgagaccaccaaatactattgcactgtcattgatgctcccggacatcgtgactttatcaaaaacatgatcactggtacctctcaggctgactgtgctgtccttatcattgactccaccactggaggtttcgaggctggtatttcaaaggatgggcagacacgtgaacatgctttgcttgcctttactcttggtgtgaagcaaatgatttgttgttgcaacaagatggatgccacaactcccaaatactcaaaggcaaggtacgatgaaatcgtgaaggaggtttcttcatacttgaagaaggttggttacaaccctgagaagattccattcgtccctatctctggttttgagggtgacaacatgattgagagatcgaccaaccttgattggtacaagggtccaactctgctcgaggctcttgaccagatcaa

SEQ ID NO: 1853 - DNA, 761 bp, Gossypium hirsutum
  Clone ID: GOSHI-09MAY01-C120_6
cggacgcgtgggcgaggatatgttgcttcgaactcagaggatgatcctgccaaggaggcagctaatttcacttcccaagtcatcatcatgaaccacccagggcagattggaaatggatatgcgcctgtccttgattgccacacgtcccacattgcggtcaagtttgcagagttggtgaccaagattgacaggcgttctggtaaggagcttgagaaggaacccaagttcttgaagaatggtgatgcaggatttgttaagatgattcccaccaaacccatggttgtggaaaccttctctgagtatcccccactgggtcgttttgctgtgagggacatgaggcagactgttgctgtcggcgttatcaagagcgtggagaagaaagatccaactggagccaaggtgaccaagtctgctgccaagaagggtgggaagtgaaccgtgcgggtttcagttgatccaaccgaactatatcatggctactacaataaaacattgcttcttattagtaggtcagccatcattggaggattagttgtgtgttttgatggtcatagttttaagtcatcaccgtcttgtagaggatgttgttcacagaactgggttcttgatagacggtggtgaggcttgtgtttttcagagtctgctgtctgtgagagtaattataaactttgaatggtgtctgtgttcccattatttatggcaatcagctcagagttttaagtctggtcctgggttttctgcttgaatttgttctatcaaac

SEQ ID NO: 1854 - DNA, 796 bp, Gossypium hirsutum
  Clone ID: GOSHI-09MAY01-C120_7
gtggtattggaactgtccctgtgggtcgtgttgaaaccgggagccttaagcctggaatgggtgttacattgggaccttctggattgaccactgaagttaagtctgttgagatgcatcatgaagctcttcaagaggctcttcctggtgacaatgttgggttcaacgtgaagaatgttgctgtcaaggatctcaagcgtggatttgttgcctccaactccaaggatgatcctgccaaggaggcagccaacttcacctcccaagttatcatcatgaaccacccagggcagattggaaatggctatgcaccggtcctagattgccacacctcccatattgctgtcaagtttgcagagctcttgaccaagattgacaggcgatctggtaaggagcttgagaaggagcctaaatttttgaaaaatggtgatgctggtatgattaagatggttccgaccaagcccatggttgtcgaaaccttctccgcgtaccctccacttggacgttttgccgttagggacatgagacagactgttgctgttggtgtgatcaagagtgtggagaagaaggacccatctggagccaaggtgaccaagtctgccgccaagaagggtggcaagtgaactttggtttagtcagtttttgttttgtgagatccgtaattaattccttgagtatttggtttttgctttttagacgatgagattttcagacaacatggttgtgtgttgaagtttttacttgagagttaacttgcaactgatctttcactactgataagaaaatgagtggacttcaagct

SEQ ID NO: 1855 - DNA, 643 bp, Gossypium hirsutum
  Clone ID: GOSHI-09MAY01-C120_8
aaattaactggagatccttatgtacctgcaggccaggtggcgtttcgagccagagttggtaaaagatatcaactcccacataatgggctaattcctgaagaatttggagtggttgctcgatataaaggacaagggaggcttgctgaaccaggctttcgaaatcctcgatgggttgatggcgagcttgttattcttgacgggaagtacatcaaaggagggccggttgttggatttgtatattgggcccctgaatatcacttcttggtgttcttcaatcgactaaggcttcaactataagtctattgtacatagtatttgagcatgtttattttccgttcagataacacggggtaagtacttcctcaccgtaaagtaaacgcattaatttaatttcattgccttccgacctttttgtttccatttgaaatttctgttttacaagtaatcccatcaattaagcatgcggcatcaattataatctgctaaaatcaattaggggccatgttttgtgaactattttccacgttcaggtcacattggtcgagtaaatatctgacttagctaccttcctttccagtcctcccgtggccagtcatgcttgctacagaaataattgaagttccctaatattggttcgtcttaa

SEQ ID NO: 1856 - DNA, 571 bp, Gossypium hirsutum
  Clone ID: GOSHI-09MAY01-C120_9
ggcgacgacgcgtgcgaagaacttaaaacttaacataaataaaaaacctaggtctgaaatcccattttccttaacgctgtgaggcaagggcgccattgtgcattagccgctgcagagacccttcacccatgaaacaaatagcttctgacttttcaatctccaatccctattattttttgcgagttaatcggaccgatccgtcgttaccaagtccagactcatcaatatcaattatcttccatcaccgtcgcgatttctgtcgcgatttacaagttcttccactgcgcgtggtacctcttccatctagtatcgtggtccatcatacttccgtccttccaacaccaatccatgccccgttttattggcttcccttggtacatgtttgaactgcaaacttctaaacttggaggttctccccttgatttcttggatcaaacttcaatgcatgatctatcttcaactgcagcgattagttttccaataacagtcaacgtatctctctcaacacatatgtcttggaaacccatttcttccgccatagtaacagcctataagcacgccctcgcctcag

SEQ ID NO: 1857 - DNA, 755 bp, Gossypium hirsutum
  Clone ID: GOSHI-09MAY01-C120_10
gccaacttcacctcccaagttatcatcatgaaccacccagggcagattggaaatggctatgcaccggtcctagattgccacacctcccatattgctgtcaagtttgcagagctcttgaccaagattgacaggcgatctggtaaggagcttgagaaggagcctaagttcttgaagaatggtgatgctggtatgattaagatggttccgaccaagcccatggttgtagaaaccttctccgcgtaccctccacttggacgttttgccgttagggacatgagacagactgttgctgttggtgtgatcaagagtgtggagaagaaggacccaactggagccaaggtgaccaagtctgctgccaagaagggcaagtgaacctcgggggaatttgttgattcaacaaaagtttatcatggttactacaataaaattttggttcatgttagtaggtccatcactggacgtttggttacatgttttaatggttcaccgtcatctcctggatattgttcccagacctgggttcttgataggcggtggtgaggcttatctttggagtccatagtgtgtcatcattaatgttattatgccttaatgagctataaacttgatgatattttttgttcccttttttccatctaagtggtcctggagttttacctctcttcgtgggctgctttccttcactcaatgttctatctaaaccttatattatccaagtctatagcctgcttctgtttaaaaaaaaaaaaaaaaaa

SEQ ID NO: 1858 - DNA, 1094 bp, Gossypium hirsutum
  Clone ID: GOSHI-09MAY01-C120_11
tggcttgcatgagccatcacattcgtgagagaactgatgcactagatgctgctggaaacactacagctgccattggaaagggatttgccattgggtcagcagcattggtgtcattggctctatttggtgcctttgtgagccttgcagctatctctactgttgatgtcttgaccccgaaggttttcattggtttaatagttggtgccatgcttccctactggttctctgcaatgaccatgaaaagcgtgggaagtgcagctttaaagatggttgaggaggttcgcaggcagttcaacaccatccctggtctcatggagggtcgtgccaagcctgattatgctacctgtgtcaaaatctcaactgatgcctctatcaaggagatgattcctcctggtgcccttgttatgcttactcccctaattgttggaactttctttggtgttgagactcttgccggtgtccttgctggtgcccttgtttctggtgttcagattgcaatatctgcttccaacactggtggtgcatgggataatgccaagaagtacattgaggctggtgcctcagagcacgcgaggaccctgggtccaaaaggattcggatcctcacaaggcagctgtcattggtgacacggtcggggatccactccaggatacctctggcccttcactcaacatcctgatcaagcttatggcagtcgagtcactcgtatttgctcccttctttgccactcacggtggcttgcttttcaagatcttttaaaggggatgggcggaagcagcagtagggagggtgacttgttagttacaggccctatgtaagagtgttgttcctgttcacccattaagtttctgtatccgtctaaactcttatagttagcgaagcttagctttagtcattgctatgtttgataggttgatatcgatgataactgagatatgggataggttgatcaccgaaaacgatcattggttatcgtgggcgagtcaaggtgggatatcgtacttattcagttctagagcagctgttgcttaatttagaaatttggtgctcacaaaaaatcttttcgagcatttaaccataatgatattttgatg

SEQ ID NO: 1859 - DNA, 1193 bp, Gossypium hirsutum
  Clone ID: GOSHI-09MAY01-C120_12
caacatctcgaggaatggtcatgctaatgaaaatggtgctggtaggcggaagaaaaagggcaatcaaggtaaaaggagattgaacaatatgacaagtatggcccatagagaagaggttatccgtaggactgtttatgtctctgatattgaccaacaggtcactgaagagcagcttgcaggtttatttgtgagttgcgggcaggtggttgattgccgcatatgtggtgatcctaattccgtgcttcgttttgcctttgttgagttcactgacgaagaaggtgcgcgagctgctctgaatcatgcagggactatgcttggattctacccagttagggtgctaccttcgaaaacagctattgcaccagttaacccaacatttttgccgaggaacgaagatgagcgccagatgtgtgcaagaactatctactgtacaaacattgacaagaaggttactcaagctgatgttaagctctttttcgaaacagtctgcggggaggtttatcacctgaggttgctgggggactatcagcattcaactcgcattgcttttgtcgagtttgtaatggctgaaagtgcgattgctgctctcaactgtagtggtgtggttctgggatcattgcctataagggtcagcccatcaaagaccccagttcggccacgagctcctcgccttccctcgtactaaatcattcactccaaaccgattttagttccaagtttatatatatatatatttaaatacatacacagccatgtaaagatggtttcccccatgttgctcttgctgatctacatatatatcgtccactgctgctatgtttcggcatcttcgtttaccataggagtcttgtcttttgtttatccacgcatgcaactttgcggtacatagagaattctgatggaacttcgagccttttcgaacaatgttatgcattattgccctctaatcttggacagaatttgacactttctggtaattaaagactatgtgaatgatgaagtggtacttctagtacacattttttgagttatttctactaatggatgatgcttttccttttggattttttttttttaccagcattggttcaaagttagctttgtgttctgctgcatttttatgacatgacattgcattactaggtaatgcccaaataatgaaataatgactggttcttgacccgttatcgatc

SEQ ID NO: 1860 - DNA, 895 bp, Gossypium hirsutum
  Clone ID: GOSHI-09MAY01-C120_13
atttctctctctcgattcccttttctttcccaattcccttttctttctcagcctttctcaacctattcttctattttatacccgaaaaacttgattagtctctcatttttgtttttaataggtaagaggtaagcctaagctctcatctcttcgacttagggtttattgtttatcctcctcctgtcaattgctttgattctttcccaaaatttcatcactcatgctttttagtgtctttttagtgtgcggggtattgtcatggagatacagacatgtggtaaaccgattgattcgctgttagagaaggtgctttgtatgaatatattatcctctgattatttcaaagagctttacccgactaaagacttaccatgaagtcattgatgaaatttacaatcaagttgatcatgtcgaaccgtggatgactgggaattgtcgtggtccttctactgcattctgccttctttacaagttttttaccatgaaacttactgtcaagcaaatgcatgggctactgaagcaccctgattctccttacattagagcaattggattcctctacttgagatatgctgccgatccgaagactttatggagttggtttgaaccatacatcaaagatgaagaggaattctcccctggatctagtggacgaatgaccacaatgggcgtgtacgtgcgtgatttacttcttggacagtactattttgatactcttttcccccgaatccctgttcctgtgttgcggcaggtgacattcaatcttgagaagatgaagcttgctacttaaccttcagggtcaactggggataataacccgcatggatctgatgacactgctcgccgcccaccttctgtaaaagcagcactttctgtctctttggtcagcgtgccc

SEQ ID NO: 1861 - DNA, 995 bp, Gossypium hirsutum
  Clone ID: GOSHI-09MAY01-C120_14
aaacaccactgctgccattggaaagggatttgccattgggtcagcggcgttggtgtctttggctctatttggtgcctttgtgagccgtgctgctatcacgaccgtagatgtcttgaccccaaaagttttcattggtttaatagttggagccatgcttccttactggttctctgcaatgaccatgaagagtgtgggaagtgcagctttgaagatggttgaggaagtgcgcagacaattcaacacaatcccaggtctcatggagggtactgctaaacctgactatgctacctgtgttaagatctctactgatgcttcaatcaaagaaatgatcccacctggtgcccttgttatgctcacaccccttgttgttgggatcttttttggcgtggaaactctctctggtgtcctcgctggatctcttgtctctggtgtccagattgctatctctgcatccaacacaggaggtgcttgggataatgccaagaagtatattgaggctggtgcttctgaacatgcaaaaactcttggtcccaaaggttcagatccacataaggctgccgttattggtgacaccattggtgaccctttaaaggatacatctgggccatcgctgaacatcctcatcaagctaatggctgttgaatctcttgtctttgctcccttctttgctacacatggtgggctgctttttaagatattttaagtgaagacaaacatcggctactagtctaccatttccgatacctgtctgttattctcttataattttcattttgaagtatatttaggtcgtagcacattttgactctagagatcatttcctctttaaagtcatattggtagtaaaagtttaccctttgtaacaacgacattgatgttgttgttgatgatgatgatgattatggtcaatctaggaaaaagagtgaaacttgaaaccacattgttactattgttactgttttgttcaatgaagaatgtttttttttgcttctctg

SEQ ID NO: 1862 - DNA, 1519 bp, Gossypium hirsutum
  Clone ID: GOSHI-09MAY01-C120_15
taaacaccgtgaacagtggtagaacaaaagagaaaagcaaaaattacagaaactgtcagaattagggaaaaagaattcctttttcttgactatcatactctgttttattttgctgttaattcatttcaatttcgtgttcttcgcggtgatctcgagggataatctaatctaatcatcaggccatggctgttgttgagaatgcttcgaatcaagacacggcggctgcaacagtgacgtcaaacgaccaagatcagtcaaagcttcggtcaacaaccgatctgagcttacacgacaacgaccaagggttgtacaacaagatcggtggaaccaacggtggtggtggtaaagatgagcttggggatagtttcaaaagagatatgagagagttacaagaactgttctctaagcttaaccccatggctgaagagtttgtacctcactcgcttgttaacaatggactcaatggtgggtttcacactaacaatattgctttacaaaacaacaataacaacatctcaaggaatggtaatgctaattgcaatggtggtggtaaaaggaagaaaaatttaggtcaagggaaacggaaatcgaacagcaggacaagtatggctcaaagagaagaggttatccgtaggactgtttatgtgtctgatatcgaccaccaggtcacggaggagcagcttgccggtttatttgtgggttgtgggcaagtggttgactgtcgcatatgtggtgatcctaactctgtactttcgtttgcttttatcgagtttactgatgaagaaggtgcacaagctgcgctgaacctggcaggaactatgcttggattctatccagttagggtgctgccttcgaaaacagctatcgcaccagttaacccgacatttttgccgaggaacgaggatgagcgtcaaatttgtgcgagaactatctattgtacaaacattgacaggaaggttactcaagctgatgttaaactctttttcgaaacagtctgtggggaggtttatcgcctaaggctgcttggggactatcagcattcaactcgcattgcttttgtcgagtttgcattggctgaaagtgcgattgctgctctcaactgtagtggtgtggttctgggatcattgcctataaggatcagcccatcaaagaccccagttcggccacgagctcctctccttccctcgtactaaatcattcaccctgaaccaattttagttccaagtttatatatatatttatttaaatacatacacacccatgtaaggatgcttcccgctgatgctcttgctgatctccatatatacacgactcactcgctgcctatatcattggactccactgcttgccgttttgaagctggtatttccaaggatgggcagacccgtgagcatgctctccttgccttcactcttggtgtcaagcaaatgatttgctgctgcaacaagatggatgccacaacccccaagtactcaaaggcaaagtatgatgaaattgttaaggaagtttcttcctacct

SEQ ID NO: 1863 - DNA, 1344 bp, Gossypium hirsutum
  Clone ID: GOSHI-09MAY01-C120_16
atcccgagctaaacagccttgattgaagcggcacctcataattccaatagcgatgagaacagttgacattatgactacttgaaagaataatcgttattctgactgctcttccatcttcctttaccattttcaattttggagaccacaaagctgtgaagaactggcaactattcttatgtgttgctgctggtctttgggctggcctaattattggtttcggaactgagtactatactagcaatgcatacagccctgtacaagatgtcgctgattcctgcaggactggagctgcgactaacgttatttttggccttgcgttgggttacaagtcttgcattattcctatttttgctattgcaatcagtattttcgttagttttagctttgctgctatgtatggcattgctgtttctgcccttggaatgctgagcaccatagctaccgggttggctattgatgcttatggtcccatcagcgataatgcaggaggcattgctgagatggctggcatgagccacagaatacgggagagaacagatgctcttgatgctgcaggcaacaccactgctgctattggaaagggtttcgccattggttcagcagcactggtttcccttgctctctttggtgcctttgtgagccgagctgctatctcaactgtcgatgtattgacccctaaagtttttatcggtttgcttgttggggcaatgcttccttattggttctctgctatgaccatgaagagtgtgggaagtgcagctttgaagatggtcgaggaagtgcgcagacagttcaacacaatccctggtctcatggagggcaccactaagcccgactacgctacctgtgttaagatctctactgatgcttccatcaaagaaatgatcccaccgggtgctcttgtcatgctcacacccctcgttgttggtatctttttcggcgtggaatctctttccggtgtcctcgctggatccctcgtctcaggtgttcagatcgctatctctgcatccaacacggggggtgcttgggacaacgccaagaagtacattgaggctggtgcttcaccacatgcaaaatctcttggccccaaaggttcagatccacacaaggcagctgttatcggcgacaccatcggtgaccctttaaaggatacatctgggccatcgttgaacatcctcatcaagctaatggcagtcgaatcactcgtcttcgctcccttctttgctacacacggtgggctgcttttcaagttattttgagtgaaggtcaacaaaaagtaaacagctaatggtccgtccacccattgctgactctctcaattgatccatttgaatctgtagaaca

SEQ ID NO: 1864 - DNA, 1402 bp, Gossypium hirsutum
  Clone ID: GOSHI-09MAY01-C120_17
tgatcttgtttgcaaggtggaaaggaacattcctgagggtgaccggagaaacccagctgggattgctgataatgtctgagataatgttggtgatatatctggaatgggatctgatctttttgggtcctatgctgaatcatcttgtgctgcacttgttgttgcttccatctcttcttttggcatcaatcatgagttcactccaatgttatatcctctcatcataagttctgttggtatcattgtttgtttaatcacaaccttatttgcaactgatttctttgaaatcaaggctgttaaggaaattgagccatcattgaagaggcaacttatcatatccactgttctcatgactattggaatcggggttgttagttgggtagctcttccatcttcctttaccattttcaactttggagatcagaaagttgtcaagaactggcaactattcttatgtgttgctgttggtctttgggctggtctaattattggttttgtaaccgagtactataccagtaacgcatacagccctgtacaagatgttgctgattcctgcagaactggagcagcaactaatgttattttcggccttgcattgggttacaagtcttgcattattcctatttttgctattgcagtcagtatttttgttagttttagctttgctgctatgtatggcattgctgttgctgcccttggaatgctgagcaccatagctactggactggctattgatgcttatggtcctatcagtgacaatgctggaggtattgctgagatggctggcatgagccacagaatacgagagagaacggatgctcttgatgctgctggaaacaccactgctgctattggaaagggtttcgccattggttcagcagccctggtgtcccttgccctctttggtgcttttgtgagccgtgctgcaatttcaacagttgatgtattgacccctaaagtttttattggtttgcttgtcggggcaatgcttccttactggttttctgctatgaccatgaagagtgtgggaagtgcagctttgaagatggttgaggaagtgcgcaggcaattcaacacaatcccaggtctcatggagggtactgctaaacctgactatgctacctgtgttaagatctctactgatgcttcaatcaaagaaatgatcccacctggtgcccttgttatgctcacaccccttgttgttgggatcttttttggcgtggaaactctctctggtgtcctcgctggatctcttgtctctggtgtccagattgctatctctgcatccaacacaggaggtgcttgggataatgccaagaagtatattgaggtatccataattttactgacttccatgagccgctcctttgattggcgtttcaaaacaatagttttatatttatgc

SEQ ID NO: 1865 - DNA, 1609 bp, Gossypium hirsutum
  Clone ID: GOSHI-09MAY01-C120_18
ctcccttcctccgagccgttaggttgtactgttttagcttcaagtctctcttttttgaaagttaatactacacaatgggtaaggagaaggttcacatcaacattgttgtcattggccatgtcgactctggaaagtcaacaacaactggtcacttgatctacaagcttggaggtattgacaagcgtgtgatcgagaggttcgagaaggaagctgctgagatgaacaaaaggtcattcaagtatgcctgggtgctcgataagttgaaggctgagcgtgagcgtggtatcaccattgatattgccttgtggaagtttgagacaaccaagtactactgcactgtcattgatgctcctggacatcgtgacttcattaagaatatgattacgggtacttctcaagctgactgtgctgtccttatcattgactccacaactggaggttttgaagctggtatttccaaggatgggcagacccgtgagcatgctctccttgccttcactcttggtgtcaagcaaatgatttgctgctgcaacaagatggatgccacaacccccaagtactcaaaggcaaggtatgatgaaattgttaaggaagtttcttcctacctgaagaaggttggttacaaccctgagaagattccattcgtccccatctctggttttgagggtgacaacatgattgagaggtccaccaacctcgattggtacaagggtccaaccctccttgaggctcttgaccagatcaatgagcccaagagaccctctgacaagcccctccgtctcccacttcaggatgtctacaagatcggtggtattggaactgtcccggtgggtcgtgttgaaaccggtacccttaagcctggaatggttgttacattcggaccttctggattgaccactgaagttaagtctgttgagatgcatcatgaagctcttcaagaggctcttcctggtgacaatgttgggttcaatgtgaagaatgttgctgtcaaggatctcaagcgtggatatgttgcctccaactccaaggatgatcctgccaaggaggcagccaacttcacctcccaagttatcattatgaaccatccaggacagataggaaatggttatgcacctgtcctcgattgccacacctcccacattgctgtgaagtttgcagagctcttgaccaagattgacagacgatctggtaaggagctagagaaggagcctaagttcttgaagaatggtgatgcaggtatgattaagatggttccgaccaagcccatggttgtggaaaccttctccgaataccctccacttggacgttttgccgttagggacatgagacagaccgttgctgttggtgtgatcaagagtgtggagaagaaggacccatctggagccaaggtgaccaagtctgccgccaagaagggtggcaagtgaactttggtttagtcagtttttgttttgtgagatccgtaattaattccttgagtatttggtttttgctttttagacgatgaggttttcagacaacatggttgtgtgttgaagtttttacttgagagttaacttgcaactgatctttcactactgataagaaaatgagtggacttcaagcttctatc

SEQ ID NO: 1866 - DNA, 1060 bp, Gossypium hirsutum
  Clone ID: GOSHI-09MAY01-C120_19
cgcccacgcgtccgactcaacgctctcttcttctgcttctggtcaagccaatatcaaaagacttcccttttagctcacagctcctctcttgagtactataatgggtaaaggagaaggttcacatcaacattgtggtcatcggccatgtcgactctgggaagtctacaaccactggtcatttgatctacaagcttggtggtattgacaagcgtgtgattgagaggtttgagaaggaggctgctgagatgaacaaaaggtcatttaagtatgcatgggtgcttgacaagcttaaggccgaacgtgaacgtggtattaccatcgatattgccctctggaagtttgagactaccaaatactactgcacagtcattgatgcccctggacaccgtgacttcatcaagaacatgattactggtacctcacaggctgactgcgctgttctcattattgactcaaccactggtggtttcgaagctggtatctcaaaggatggtcagacacgtgagcatgctttgcttgcgtttacccttggtgtcaagcagatgatttgctgctgcaacaagatggatgcaacaactccaaaatactccaaggcaaggtatgatgaaattgtgaaggaagtctcctcatatcttaagaaagttggttacaaccctgacaagatcccatttgtcccaatctctggttttgagggtgataacatgattgagaggtctaccaaccttgactggtacaagggtcccactctccttgaggctcttgaccagatcaatgagcccaagaggccttcagacaagccacttcggctcccacttcaggatgtctacaagattggtggcattggaactgtacctgttggtcgtgttgagactggtgtccttaagcctggtatggttgtgacctttggcccctctggtctgaccactgaagttaagtcttgtgagatgcaccatgaagccctctctgaggctctccccggtgacaatgttggattcaacgtcaagaacgttgctgttaaggatcctaaggatggtttcgttgcttcaaactcttaaggatg

SEQ ID NO: 1867 - DNA, 1845 bp, Gossypium hirsutum
  Clone ID: GOSHI-09MAY01-C120_20
ctgagtacaaaatagaactagaggcttgctcgaaaacctatactctctgattatctctcttcttcgagccgctaggtcgtactgttttagcttcaagtctctcttttttgaaagttcctagttaatactggataatgggtaaggagaaggttcacatcaacattgttgtcattggccatgttgactctggaaagtcaaccacaacgggtcacttgatatacaagcttggaggtattgacaagcgtgtgatcgagaggttcgagaaggaagctgctgagatgaacaaaaggtcattcaagtatgcctgggtgctcgacaagttgaaggctgagcgtgagcgtggtatcaccattgatattgccttgtggaagtttgagacaaccaagtactactgcactgtcattgatgctcctggacatcgcgacttcattaagaatatgattacgggtacttctcaagctgactgtgctgtccttatcattgactccacaactggaggttttgaagctggtatttccaaggatgggcagacccgtgagcatgctctccttgccttcactcttggtgtcaagcaaatgatttgctgctgcaacaagatggatgccacaacccccaagtactcaaaggcaaggtatgatgaaattgttaaggaagtttcttcctacctgaagaaggttggttacaaccctgagaagattccattcgtccccatctctggttttgagggtgacaacatgattgagaggtccaccaacctcgattggtacaagggtccaaccctccttgaggctcttgaccagatcaatgagcccaagagaccctctgacaagcccctccgtctcccacttcaggatgtctacaagattggtggtattggaactgtcccagtgggtcgtgttgaaactggaatcctcaagcctggaatggttgttacattcggaccttctggattgaccactgaagttaagtctgttgagatgcatcatgaagctcttcaagaggctcttcctggtgacaatgttgggttcaatgtgaagaatgttgctgtcaaggatctcaagcgtggatttgttgcctccaactccaaggatgatcctgccaaggaggcagccaacttcacctcccaagttatcatcatgaaccacccaggacagattggaaatggctatgcaccggtcctcgattgccacacctcccatattgctgtcaagtttgcagagctcttgaccaagattgacaggcgatctggtaaggagcttgagaaggagcctaagttcttgaagaatggtgatgctggtatgattaagatggttccgaccaagcccatggttgtggaaactttctccgagtaccctccacttggacgttttgccgttagggacatgagacagactgttgctgttggtgtgatcaagagtgtggagaagaaggacccaactggagccaaggtgacgaagtctgctgccaagaagggcaagtgaacctcgggattttgttgattcgacaaaagtttatcatggttactccaatgaaattggttcatgttagtaggtccatcactggacgtttagttacatgttttaatgcttcaccgtcatctcttggatattgttcccagaactgggttcttgataggcggtggtgaggtttatatttggagtcaatagtgtgtcatcattaatattattatgcgttatcgagctataagctccttgatagtttttgttcccgtttttccaccaaagtggtcctggagctttaggtctgttcctgggctcctttccttcactcaatgttctatctacacgttttatattatccaactctaaaacttgtttctgtttt

SEQ ID NO: 1868 - DNA, 1117 bp, Gossypium hirsutum
  Clone ID: GOSHI-09MAY01-C120_21
cttcttgaaggcttcttgaccagatcaattgagcccaagagggccttcagacaaagcctctccgtctaccacttcaggatgtgtacaagattggtggtattggaactgtcccggttggtcgtgttgaaactggtgtcttgaagcctggtatggttgtgacctttggtcctaccggtctgaccactgaagttaagtctgttgagatgcaccatgaagctcttacagaggcacttcctggtgataatgttgggttcaatgttaagaatgttgctgttaaggatctcaagcgtggttatgttgcatccaactccaaggatgatcctgctaaggaggctgcaaacttcacttctcaggtcatcatcatgaaccatcctggacaaattggaaacggatatgccccagtcctcgactgccacacctcacacattgctgttaagtttgctgaacttttgaccaagattgacaggcgatctggtaaggagcttgagaaggaacccaagttcttgaagaatggtgatgctggtatgattaagatgattcccaccaagcccatggttgtggagaccttttctgagtacccacccttgggccgttttgctgtgagggacatgcgtcagaccgtggcagttggtgttataaagaatgttgagaagaaggacccatccggtgccaaggtcaccaagtctgctgctaagaagaagtgaaccgtgctggttaaatctaatgaagtttccgcagatggagtattttattatcataataatagtttgatagactttatcatttatgatatagttggtcttttgcttggttttgcatgttatagtgtgttgccattgttgtctggtaactgttctcagtattgggtgcttgacagacggtggcatatctatgggtggtctctagcgttacctggttttgtttaatttactactgtatcttgtcattgtcaagaggtgcccccttggttttccaaggtggcttgaaacttttgtttatgattttcgttgaagttgcggaattatttattatgaaaaacaaaaacagttttacaaaagttaaactttttaccttgaaaattgaaaaacaaaacctttaaaaaggggccgcccctttt

SEQ ID NO: 1869 - DNA, 1910 bp, Gossypium hirsutum
  Clone ID: GOSHI-09MAY01-C120_22
gggatggcctttttgaggctattactggttatggtcgtgggggattctatatggcactgtttggaagagtcggtggtggaatatatacaaaggctgctgatgtcggtgctgatcttgtaggaaaggttgaaaggaacattccagaggatgacccaagaaacccagctgtcattgccgacaatgttggcgataatgttggggatattgctggtatgggttctgatctatttggctcatatgctgaatcctactgtgctgctcttgttgttgcttctatatcctcttttggaataaaccacgagttcactgccatgttgtatcctctgctcattagttctgttggtattcttgtctgtttgatcacaaccctatttgctacggatttcttcgaaattaaggctgtcaaagaaatcgaaccagctttgaagaagcagcttattatatctactgttcttatgactgtggggattgcaattgttacttgggttggtgtgccatcgtccttcaccatttacaattttggggatcagaaagttgttaagaactggcaactatttttgtgcgttggtgttggtctctgggctggacttattattggttttgttactgagtactacaccagtaatgcttacagtcccgtgcaggatgttgccgattcctgcaggacaggagcagctaccaatgttatatttggccttgctttaggttacaaatctgtgatcatcccaatttttgccatagcaatcagtatttttgttagttttagctttgctgctatgtatgggattgcagttgctgcccttggaatgttgagcaccattgcaactgggttggctatcgatgcttatggtcccatcagtgacaatgctggaggtatagctgagatggctggtatgagccatcgcattcgtgagagaactgatgctcttgatgctgctggaaacaccactgctgccattggaaagggatttgccattgggtcagcggcgttggtgtctttggctctatttggtgcctttgtgagccgtgctgctatcacgaccgtagatgtcttgaccccaaaagttttcattggtttaatagttggagccatgcttccttactggttctctgcaatgaccatgaagagtgtgggaagtgctgctttaaagatggttgaggaggttcgcagacagttcaacaccattcccggtctcatggagggtcatgccaagccagattatgctacctgtgtcaaaatctcaactgatgcctctatcaaggagatgatccctcctggtgcccttgttatgcttactcccctcattgttggaactttctttggtgttgagactctttctggtgtccttgctggggctcttgtttccggtgttcagattgcaatatctgcatccaatactggtggggcatgggacaatgccaagaagtacattgaggccggtgcgtccgagcatgcaaggaccctcggtccaaaaggatccgatcctcacaaggcagctgtcattggtgacactgttggagaccctctcaaggatacctgcggtccatcacttaacattcttatcaagcttatggcagtcgagtcacttgtgtttgctcccttctttgccacacacggtggtctactcttcaagatcttttagggaatggatggctggaaatgcacggtggcaaggctggttagcatctctgtttaaatagtgttgtttccattcagtcattacttttagtttcttgcatgattgtatccatccacagtttgttatgaggtctttttttagttttgcatagttgctaatgatgataactgagatgggttaggattggacctggcacttcgtatcctgtttgtgtaatttgttacagtcgtaatttttgataggttaataaattgtatcatagattttgac

SEQ ID NO: 1870 - DNA, 1813 bp, Gossypium hirsutum
  Clone ID: GOSHI-09MAY01-C120_23
cacctctcttactatcattaacggtctcctgctacgccgtcacgattgcagcttcagatcacttctattccaaagctagccgctaatactgcagaatgggcaaggaaaagactcacattaacattgtcgtaattggccatgtcgactctggaaagtcaaccaccactggccacttgatctacaagcttggaggtattgacaagcgtgtcattgaaaggtttgagaaggaagctgccgagatgaacaagaggtcattcaagtatgcttgggtgcttgacaagttgaaggctgagcgtgaacgtggtattaccattgacattgccctgtggaagtttgagaccaccaaatattactgcactgtcatcgatgcccctggacatcgtgactttatcaagaacatgattactggtacctcccaggccgattgtgctgtccttatcattgactctaccactggaggttttgaggcaggtatttccaaggatggacagacccgtgagcatgctctgcttgctttcactctcggtgtcaagcaaatgatttgctgctgcaacaagatggatgccacaacccccaaatactcaaaggctaggtatgatgaaattgtgaaggaagtgtcttcctacttgaagaaggttggttacaaccctgagaagattccttttgtccccatctctggttttgagggtgacaacatgattgaaaggtccaccaaccttgattggtacaagggtccaactcttctcgaggctcttgaccagatcaatgagcccaagagaccctctgacaagccactccgtcttccacttcaggatgtgtacaagattggaggtattggaactgtcccagtgggtcgtgttgaaactggtatcctcaagcctggtatggttgtaacctttggtccctctggattgaccaccgaagttaagtctgttgagatgcaccatgagtctcttcctgaggctcttccaggtgacaatgttggcttcaatgtcaagaatgttgctgtgaaggatctgaagcgaggatatgttgcttcgaactcaaaggatgatcctgccaaggaggcagctaatttcacttcccaagtcatcatcatgaaccaccccagggcagattggaaatggatatgcacctgtccttgactgccacacctcccacattgcggtcaagtttgcagagttggtgaccaagattgacaggcgatctggtaaggagcttgagaaggaacccaagttcttgaagaatggtgatgcaggatttgttaagatgattcccaccaaacccatggttgtggaaacattctctgagtatcccccactgggtcgttttgccgtgagggacatgaggcagactgttgctgtcggcgttatcaagagcgtggagaagaaagatccatctggagccaaggtgacgaagtctgctgccaagaagggtgggaagtgaaccgtgtgggtttcagttgatccaaccaaactattttatggttactacaataaaacattgcttctcattagtaggtcagccatcattggacgattagttgtgtgttttgatggtaatagttttaagtcatcaccatcttgtcgaggatgttgttcacagaactgggttcttgatagacggtggtgaggcttttgtgtttttcagagtctgccgtctgtgagagtaattataaactttgaatggtgtcttgtgttcccattatttatggcaatcagctcaggagttttaggtctggtcctgggcttttctgcttgaatgtgttctatcaaacatttatatacagtcaaaactagtttgtttttctgtt

SEQ ID NO: 1871 - DNA, 1915 bp, Gossypium hirsutum
  Clone ID: GOSHI-09MAY01-C120_24
gttcgtccatggcgctttttggaagagttggtggaggcatctatacgaaggctgctgatgtgggtgctgatcttgtaggcaaggtggaaaggaacattcctgaggatgaccctagaaacccagctgtgattgctgacaatgttggggataatgttggtgatatcgctgggatgggatctgatctttttgggtcctatgctgaatcatcttgtgctgcacttgttgtcgcttccatctcttcttttggcatcaatcatgaattgactccgatgttatatcctctcattataagttccgttggtatcattgtttgtttaatcaccaccttatttgctactgatttctttgagatcaaggctgttaaggaaattgagccatcattgaagaggcaacttatcatctccactgttctcatgactatcggaattgggattgttagttgggtagctcttccatcttcctttaccattttcaattttggagatcagaaagctgtgaagaattggcagctattcttatgtgttgcttgtggtctttgggctggcctaattatcggttttgtaaccgagtactacactagcaatgcatacagccctgtacaagacgttgctgattcctgcaggactggagcagcgactaatgttattttcggccttgctttgggttataagtcttgcattattcctatttttgccatcgcaatgagtatttttgttagtttcagctttgctgctatgtacggcattgctgttgctgcccttggaatgctgagcaccatagctactggattggctattgatgcttatggtcccatcagtgataatgctggaggcattgctgagatggctggcatgagccacagaattcgagagagaactgatgctcttgatgctgcaggaaacaccactgctgctattggaaagggtttcgccattggttcagcagcccttgtgtcccttgccctctttggtgcctttgtgagccgtgctgctatttcaacagttgatgtattgacccctaaagtttttattgggttgcttgtcggggcaatgcttccttactggttctctgctatgaccatgaagagtgtgggaagtgctgctttgaagatggttgaggaagtgcgtcggcaatttaacacgatcccaggtctcatggagggcactgctaagccagactatgctacctgtgttaagatctctactgatgcttccatcaaagaaatgatcccacctggtgcgctagttatgctcacaccccttattgttgggatcttttttggtgttgaaactctctctggtgtcctcgctggatccctcgtctctggcgtccagattgctatctccgcatcgaacacagggggtgcttgggataatgctaagaagtatatcgaggccggtgcttcagaacatgcaagaactcttggtcccaaaggatcagaaccacataaggcagctgttatcggtgacaccattggggaccctttaaaggatacatccggaccatcactgaacatcctcatcaagctaatggctgttgaatcacttgtctttgcacccttcttcgccacacacggtggactgcttttcaagatattttaagtaaaagaacacaaaaacggttccagtctgccggttctcttccaaatctcctttttttttcgtaagtatagttttagtgtgtagcacattttgacatatcctcttaaaggttgaatctatagcgaaaattttcccttgtaaagggttgacaatgaaatcaatgatgatgatgactatgataatggtcaatctagaaaagagttaagaactgtattgtcactttctttagttccatggaagaaggcgttttgtttgtattgctctgaaattcatgttataaattgcaggcaaaactcaacaattgagtgtatgac

SEQ ID NO: 1872 - DNA, 1361 bp, Gossypium hirsutum
  Clone ID: GOSHI-09MAY01-C120_25
acccgggcaaatactattgcaccgttattgatgcacctggacaccgtgtttttattaagaacatgattaccggtacgtcacggtctgactgtgctgttctcattattgactcaaccactggtggttttgaagctggtatctctaaagatggtcagactcgtgagcatgctttgcttgcttttaccctcggtgttaggcagatgatttgctgctgcaacaagatggatgcaacaaccccaaagtactcaaaggcaaggtttgatgaaattgtcaaggaagtctcttcttatcttaagaaagttgggtacaaccctgagaagatcccgtttgttccaatctccggttttgagggtgacaacatgattgagagatctacaaacctcgattggtacaagggtcctactctccttgaggctcttgaccagatcaccgagcccaagaggccctcagataagccacttcgtcttccacttcaggatgtctacaagattggtggtattggaactgtccctgttggtcgtgttgaaactggtgtcctcaaacccggtatggttgttacttttggtcctactggtctgaccactgaagttaagtctgttgagatgcaccatgaatccctcccggaagctttccctggtgacaatgttgggttcaacgttaagaacgttgctgttaaggatcttaaacgtggttttgttgcttcaaactccaaggatgatccggccaaggaagctgccaacttcacctcacaggttatcatcatgaaccaccctggccaaatcggaaatggttatgccccagtcctcgactgccacacctctcacattgctgtcaaattttctgagctgttgaccaagattgacagacgatctggcaaggaactcgagaaggaacccaagttcttgaagaacggtgatgcaggtatggtaaagatgattcccaccaaacccatggtggttgagactttctccgaatacccaccactcggacgttttgctgtccgtgacatgcgccagaccgttgctgtcggtgtcatcaagagtgttgagaagaaggacccaactggtgctaaggtcaccaaatctgctgccaagaagaaatgagagattattgcagagataattatatcagttttcattacagctttggacaattatcttaaatttggactttaaatttactttttgtgagacttgttgatttgctttttaaacaaattctagttttatgttttaatgtttttcaaaaaaaaaaaaaaaaaaaaaaaaaaaaaaaaaaaaaaaaaaaaaaaaaaaaaaaaaaaaatggttaggggttgtcgaggtacaaaattcaagttcacgtgcacgcgcatgcaaagc

SEQ ID NO: 1873 - DNA, 1662 bp, Gossypium hirsutum
  Clone ID: GOSHI-09MAY01-C120_26
cacgctctctcatcctgcttctggtcaagccaatctcaaaagactccccttttagctcacagctctctcgagttctgtaatgggtaaggagaaggttcacatcaacattgtggtcatcggccatgtcgactctgggaagtctacaaccactggtcatttgatctacaagcttggtggtattgacaagcgtgtgattgagaggtttgagaaggaggctgctgagatgaacaaaaggtcatttaagtatgcatgggtgcttgacaagcttaaggccgaacgtgaacgtggtattaccatcgatattgccctctggaagtttgaaactaccaaatactactgcactgtcattgatgcccctggacaccgtgacttcatcaagaacatgattactggtacctcacaggctgactgtgctgttctcattatcgactcgaccactggtggtttcgaagctggtatctcaaaggatggtcagacacgtgagcatgctttgcttgcgtttacccttggtgtcaagacagatgatttgctgctgcaacaagatggatgcaacaactccaaaatactccaaggcaaggtatgatgaaattgtgaaggaagtctcctcatatcttaagaaagttggttacaaccctgacaagatcccatttgtcccaatctctggatttgagggtgataacatgattgagaggtctaccaaccttgactggtacaagggtcccactctccttgaggctcttgaccagatcaatgagcccaagaggccttcagacaagccacttcggctcccacttcaggatgtctacaagattggtggcattggaactgtccctgttggtcgtgttgagactggtgtccttaagcctggaatggttgtgaccttttgcccctctggtctgaccactgaagttaagtctgttgagatgcaccatgaagccctctctgaggctctccccggtgacaatgttggattcaacgtcaagaacgttgctgttaaggatctcaaggatggtttcgttgcttcaaactcttaaggatgatcctgcaaaggaggctgccagcttcacctctcaggtcatcatcatgaaccaccctgggcagattggaaacggatatgccccagtccttgactgccatacctcccacattgctgtgaagttttctgaattgctgaccaagatcgacaggcgatctggaaaggagcttgagaaggagcccaagttcttgaagaatggtgatgcagggatgataaagatggttcccaccaagcctatggttgtggagactttctctgagtacccaccccttggacggtttgctgtcagggacatgcgtcagactgtggctgttggtgtcatcaagagcgttgagaagaaggatccaaccggtgctaaggtcaccaaatctgctgccaagaagaaatgagattgcatttgatagtatcaaagccttttgattttggttttctatgtagtctggtacttaacagttttttagaccaattttgatatgtgttcatttggttgagactggcatctgcccacggattgtgtgtttgctttttgccgtgtcaattgtagttgaattccttcaaagaatgctagtttgatatttccttgttttcttaatgttatgatggtcctaagccttcgattttcaact

SEQ ID NO: 1874 - DNA, 1851 bp, Gossypium hirsutum
  Clone ID: GOSHI-09MAY01-C120_27
gaccccgggggacccgaccccgaattccccgtctaaccacacccttccgctcttttctggtcacctcaatttcaagtgaatcagaatgggtaagggaaaagactcacattaacattgtggtcattggccatgtcgattccggaaaatcgaccaccactggccacctgatctacaagcttggtggtattgacaagcgtgtgattgaaaggtttgagaaagaagctgcggagatgaacaagaggtcattcaagtatgcttgggtgcttgacaagctcaaggctgaacgtgagcgtggtatcaccattgatattgccttgtggaaatttgagacgaccaaatactactgcactgtgattgatgcgcctggacaccgtgactttatcaagaacatgattactggtacctcgcaggctgattgtgctgttttgattattgattccaccactggtggttttgaggctggtatctccaaggatggtcagactcgtgagcatgctttgcttgcttttacccttggtgtcaagcaaatgatttgctgttgcaacaagatggatgccactacccctaaatattcgaaggctaggtatgatgaaatcgtgaaggaagtctcttcctacttgaagaaggttggatacaaccctgacaagattccatttgttcccatttctggttttgagggtgataacatgattgagaggtctaccaacttggactggtacaagggccctacacttcttgaggctcttgaccagatcaatgagcccaagaggccttcagacaagcctctccgtctaccacttcaggatgtgtacaagattggtggtattggaactgtcccggttggtcgtgttgaaactggtgtcttgaagcctggtatggttgtgacctttggtcctaccggtctgaccactgaagttaagtctgttgagatgcaccatgaagctcttacggaggcgcttcctggtgataatgttgggttcaatgttaagaatgtcgctgttaaggatctcaagcgtggttatgttgcatccaactccaaggatgatcctgctaaggaggctgcaaacttcacttctcaggtcatcatcatgaaccatcctggacaaattggaaacggatatgccccagtcctcgactgccacacctcacacattgctgttaagtttgctgaacttttgaccaagattgacaggcgatctggtaaggagcttgagaaggaacccaagttcttgaagaatggtgatgctggtatgattaagatgattcccaccaagcccatggttgtggagaccttctccgagtacccacccttgggtcgttttgctgtgagggacatgcgtcagaccgtggctgttggtgttatcaagaatgttgagaagaaggacccaaccggtgccaaggtcaccaagtctgctgctaagaagaagtgaaccgtgctggctaaacctaatgaagtttccgcagatggagtattttattatgataataatagtttgatagactttatcatttatgatatagttggtcttttgcttggttttgcatgttatagtgtggtgccattgttgtctggtaactgttctcagtattgggtgcttgacagacggtggcatagctatggcaggtggtctctagcgttatctggttttgtttaatttactactgtatcttgtcattgtcaagagggtgccccctttggttttccaaggtggctcgaaacttttatgattttcgttgaagctgcggaattatttattatgaaatcatgctgtattttttgcggtttggttaacaaaagttttttattttttcatctttgttttttatattataatttttatatctttttta

SEQ ID NO: 1875 - DNA, 1899 bp, Gossypium hirsutum
  Clone ID: GOSHI-09MAY01-C120_28
cgacggatgagaaagaaaccctagttgagccaaagctgagagtgtggctggctacttaagttaaagcagcctgctgctctcgccctctctttctctcactcaacgctctcttcttctgcttctggtcaagccaatctcaaaagacttcccttttagctcccagctcctctcttgaggtactataatgggtaaggagaaggttcacatcaacattgtggtcattggccatgtcgactctgggaagtctacaaccactggtcatttgatctacaagcttggtggtattgacaagcgtgtgattgagaggttttagaaggaggctgctgagatgaacaaaaggtcatttaagtatgcatgggtgcttgacaagcttaaggccgagcgtgaacgtggtattaccatcgatattgccctctggaagtttgagactaccaaatactactgtactgtcattgatgcccctggacatcgtgacttcatcaagaacatgattactggtacctcacaggctgactgcgctgttctcattatcgactcgaccactggtggtttcgaagctggtatctcaaaggatggtcagacacgtgagcatgctttgcttgcgtttacccttggtgtcaagcagatgatttgctgctgcaacaagatggatgcaacaactccaaaatactccaaggcaaggtatgatgaaattgtgaaggaagtctcctcatatcttaagaaagttggttacaaccctgacaagatcccatttgtcccaatctctggatttgagggtgataacatgattgagaggtctaccaaccttgactggtacaagggtcccactctccttgaggctcttgaccagatcaatgagcccaagaggccttcagacaagccgctccggctcccacttcaggatgtctacaagattggcggcattggaactgtgcctgttggtcgtgttgagactggtgtccttaagcctggtatggtagtgacctttggcccctctggtctgaccactgaagttaagtctgttgagatgcaccatgaagccctctctgaggctctccctggtgacaatgttggattcaatgtcaagaacgttgctgttaaggatctcaagcgtggtttcgttgcttcaaactctaaggatgatcctgcaaaggaggctgccagcttcacctctcaggtcatcatcatgaaccaccctgggcagattggaaacggatatgccccagtccttgactgccatacctcccacattgctgtgaaattttccgaattgctgaccaagatcgacaggcgatctggaaaggagcttgagaaggagcccaagttcttgaagaatggtgatgcagggatgataaagatggttcccaccaagcctatggttgtggagactttctctgagtacccaccacttggacggtttgctgtcagggacatgcgtcagactgtggctgttggtgtcatcaagagcgttgagaagaaggacccaacgggtgctaaggtcaccaaatctgctgccaagaagaaatgagattgcatttgatagtatcagagccttttgattttggttatctttgtagtttggtacttgcagttttttagaccaattttgatgtgtgttcatttggttgagactgtcatctgcatacggattgtgtgtttgctttttccgtgtcaattttagttgaattccttcaaaaaaaaaaaaaaaaaaaaaaatacaacaaacaaaaagaaaaaaaaaataaaataaaaaattaatggggggggcgatatagaatttttgttaagactttgactggaaagaacctttacatgttttgtagagagtccacataccattgtatatgggacggggtgtcccccttgttgggattggaaatcccctggccttacccaact

SEQ ID NO: 1876 - DNA, 1748 bp, Gossypium hirsutum
  Clone ID: GOSHI-09MAY01-C120_29
ggcagagcccttagctcttagcccagttcttcattttcattttcttgttccttccttcgccgtctattgctttttgttacctcgatttcaagtgaatcagaatgggtaagggaaaagactcacattaacattgtggtcatcggccacgtcgattctgggaaatcaaccaccactggccacctgatttacaagcttggtggtattgacaagcgtgtgattgaaaggttcgagaaagaagctgctgagatgaacaagaggtcattcaagtatgcttgggtgcttgacaagctcaaggctgagcgtgagcgtggtatcaccattgatattgccttgtggaaatttgagaccaccaaatactactgcactgtgattgatgcacctggacaccgtgactttatcaagaatatgattactggtacgtcacaggctgactgtgctgttttgattattgattccaccactggtgggttttgaggctggtatctcaaaggatggtcagactcgtgagcacgcattgcttgcttttacccttggtgtcaagcaaatgatttgctgttgcaacaagatggatgccactacccctaaatactcgaaggctaggtatgatgaaattgtgaaggaagtctcttcctacttgaagaaggtgggatacaaccctgacaagattccatttgttcccatttctggttttgagggtgacaacatgattgagaggtctaccaacttggactggtacaagggccctactcttcttgaggctcttgaccagatcaacgagcccaagaggccttcagacaagcctctccgtctcccacttcaggatgtgtacaagattggtggtattggaactgttccagtcggccgtgttgaaaccggtgtcttgaagcctggtatggttgtgacctttggcccgtctggtctgacaactgaagttaagtcagttgagatgcaccatgaagctcttacagaagcacttcccggtgataatgttgggttcaatgttaaaaacgttgctgttaaggatctcaagcgtggttttgttgcatccaactccaaggatgaccctgctaaggaggctgccaacttcacttctcaggtcatcattatgaaccaccctggacaaattggaaatggatatgccccagtccttgactgccacacgtcacacattgctgttaagtttgctgagcttttgaccaagattgacaggcgatctggtaaggagcttgagaaggaacccaagttcttgaagaacggtgatgctggtatgattaagatgattcctaccaagcccatggttgtggagaccttctctgagtacccacccctgggtcgttttgctgtgagggacatgcgtcagaccgtggctgttggtgttatcaagagtgtcgagaagaaggacccaaccggtgccaaggtcaccaagtctgctgctaagaagaagtgaagaggccaaaaggttttagcggtgaagcagattgagtgtttttatctttggttatatgtggtttgaagtttttgcctgttttatgtaggatttttaaagtttgagatgctttggtttgccaaggcatcttagtcaagttttgtgtctgatcttgcggaactatactttgtttttttctatatatttgtctgtttcatttttctatttaacaagtttcattgcctagagaggtaagggccctctggatttttatttcttaaaaaaaaaaaaaaaaaaaaaaaaaaaaaaaaaaaaaactcga

SEQ ID NO: 1877 - DNA, 1762 bp, Gossypium hirsutum
  Clone ID: GOSHI-09MAY01-C120_30
ggagagccttttttttgtgtagcgattctcagttagtcttttctttaagcttacagcttctctccagagttatataatgggtaaggagaaggttcacatcaaccttgttgtcattggccatgtcgactctggcaagtcgaccactactggtcatttgatctacaagctaggtggtattgacaagcgtgtgattgagaggttcgagaaggaggctgctgaaatgaacaaaaggtcattcaagtatgcttgggtgcttgacaagcttaaggctgagcgtgaacgtggtatcaccattgatattgccctgtggaagtttgagaccaccaaatactattgcaccgttattgatgcacctggacaccgtgactttatcaagaacatgattaccggtacctcacaggctgactgtgctgttctcattattgactcgaccactggtggttttgaagctggtatctctaaagatggtcagactcgtgagcatgcctttgcttgcttttaccctcggtgttaggcagatgatttgctgctgcaacaagatggatgcaacaaccccaaagtactcaaaggcaaggtttgatgaaattgtcaaggaagtctcttcttatcttaagaaagttggttacaaccctgagaagatcccatttgtcccaatctctggttttgagggtgacaacatgatcgagagatctacaaacctcgattggtacaagggtcctactctccttgaggctcttgaccagatcaccgagcccaagaggccctcggataagccactccgtcttccacttcaggatgtctacaagattggtggtattggaactgtccctgttggtcgtgttgaaactggtgtcctcaaacccggtatggttgttacttttggtcctactggtctgaccactgaagttaagtctgttgagatgcaccatgaatccctcccggaagctttccctggtgacaatgttgggttcaacgttaaaaacgttgctgttaaggatcttaaacgtggttttgttgcttcaaactccaaggatgatccggccaaggaagctgccaacttcacctctcaggttatcatcatgaaccaccctggccaaattggaaatggttatgccccagtcctcgactgccacacctctcacattgctgtcaaattttccgaactgttgaccaagattgacagacgatctggcaaggaactcgagaaggaacccaagttcttgaagaacggtgatgcaggtatggtaaagatgattcccaccaaacccatggttgttgagactttctctgaatacccaccacttggacgttttgctgtccgtgacatgcgccagactgttgccgtcggtgtcatcaagagtgttgagaagaaggacccaactggtgctaaggtcaccaaatctgctgccaagaagaaatgagagattatttgagagagaattatatcagttttcattacagctttggacaattatcttaaatttggactttagaatttacttttgtgagagactttttgatttgctttttaaacaaatcctagttttatatttcaatgttttccatttctgagtgttatatattatatcgattgcttccaatagcgacagataatcacagcctttactgtctttttagtggctctcactgccaaagtgaggaatttacatactatacctttagttgacgagacccattaaaaagtgttaatgactgtgatatgtgatcataaatcagtaaatggctgtaaaaaaaaaaaaaa

SEQ ID NO: 1878 - DNA, 663 bp, Gossypium hirsutum
  Clone ID: GOSHI-09MAY01-C380_1
aatttccaaagctctttgaaatccaggtttttgattaaaacccatttttcattttggtctgcttcagcttcctctttactgctaacggctatggaaccaaacttctttgagcaagaagggcaatctgagcctggaaatatatccctcaagcacaaatgggattcaatatcatcaccaacgggagaccaaaacaaggataccagcggctttgattgcaacatttgcttcgactctgctcaagatccagtggtcaccctctgtggtcacttatactgctggccttgcatttacaagtggcttcatgtccaaacttcttcccttgatgcagatcaacgacaacggaactgccctgtgtgcaaagcgaacatctcttctagttcattggttcccctctatggtcgtggcacagcttctgactgtcaatccaaggatcctcattcagatttggacattccccaaaggccaccttctctcggattgaaccctatgaccacatattcacagccaagtcaacaactccatgaaaatctttttcgtcaccagcaatactttcctcacccttatgagactatgcaacttagcatcatctagcctcgtggtttacgatgaccaattctcaatccatgtttggaattagagaatggtgttgcccgatatcgggac

SEQ ID NO: 1879 - DNA, 652 bp, Gossypium hirsutum
  Clone ID: GOSHI-09MAY01-C350_1
cccacgcgtccgattagactttgcatcgtgttttgctggtacctttcagataaatagaagagagaataggtcagttcttcatgttgctgtcccggcaccgtgggatgctgttatgttcgcgatggaaagcatgtggtgccagatgtttgtaatgttctggataagatcatggattttgcagagaaagttctcagtagctcctcctgaggagcttcctgttttcttaaacatctagtcgaatatgttgttcctcaattgctgatatgcaggtaaatgttggcaggttggagctaccgaaaaccaccgaaggatatgcttgcagttggtattgatgccagcttctgaggtcctttatgtgttcatttggctctccaaacagaccctcaggctcgcgaatttgctaaaggacgccatctatgtgtcttgttgaaaagtttggcattgatcataacgatgcttttgcattctgggactgggttagtggtcattacagtggtttttaatggggacttcaagcatcgatcaacatttccgttcagctcctttcaagaataatatattatatatgcctgaatatagattgtgcgccaattgatggtgtgctgctaacttacgaggctggtgacaggtgaaaggcaaatctgggacaaat

SEQ ID NO: 1880 - DNA, 1266 bp, Gossypium hirsutum
  Clone ID: GOSHI-09MAY01-C340_1
gtggttaaagagctaatggaaaagcaaattttgagttacaatgcaaaagctctttgtgtgggtaaaggctcaatgtcagctgttatggcattgaaagacttgggattcagtgatgttactggggtttataggcacccttgtttctctctcaagcataagaaatttgtttatgagcttgattatgaggaccggtcgcgtgggtttgtgatatctagggacttagataaggcttcagcccctgctatgctggtgcttgaggttgaacgtgttcttactcctggtgggatagggtccatgcttgttggtcgtagtggtagcttgatcaggtctgtaactccagtttcttccttattgaaagcttccagtgttgttcatgttgattacgtgaatggctttgcattgattgtattcaagaagaaactcaaaaacggcacttacttcgagcagtatcggctaccagccgattgtcggtctatggcaaacaccaaacctatgttggataacattgagcctcttttggagaagaggccagttggatttgagaaaactattgcttatttgcctgaatttgttaaacatttctcataagcaacgtttggtgtatattgatgttggggcaagtgagcatttgaactctaacgttacagattggttcttgccatcttatcccgtggatcgaaaagcattccatgtttatttcatcgatcacaatacttcagtgatgctatcctatgtcaacaagcctggtatcaactttgtttattatcctagccttgctggaaatagagctacatccaattctgaggcttccattgattctgatgattccgatccgtatgttgaagacgaaggattcgacttccttctttggattaaagaaacagtgcaaaatgcagactttgtggttctgaagatgaatgcaggggaagtggagttgaaaattctctcagatttgtttgaaagtggaaccatatgctccattgatgagctattcctgcactgttccaaccgagcggtgaacagagattggatggatctcttcaagtcccttagaggaactggtgtttatgtccatcaatggtggggagatcagtgacccccattgccatggtgggactctgtttcagattaactgtcttgtttgagtcatgagtcagtctatgtatccttatggtggttgagcattatagctataaaataagcagccactagggtctctactttccttaataaaaagttcgcaaattatttgtgtgcttattgctt

SEQ ID NO: 1881 - DNA, 1086 bp, Gossypium hirsutum
  Clone ID: GOSHI-09MAY01-C370_1
caaattaagggaaaatttgcaagaggaagaggatttgatggttaagattcttaaaacagatgaagatgaacatcaggtgaacaccacaacacgatgctacggttttgagcatcgaatcagccacaaatcgaggttgccacgatcccatttcggtcaagttccacatgtaaaccaattggtctctcgggattgtggacttgcttgtgtgttaatggctgtaactactattggtgctaatgatggtggtattgagtgtttagctgagctttgctgtacacctagcattgggacaggcgatctagctgacttactgcataagttttcggttagattttcctattataccgtaacattcggagctaacccgaactactccggtgagacatattataaggagcaactgcctaacgatctggttcgagtagatacgctatttaaaaaggcggtggaagcaggaatcaatatagggtgcaggtccatcagtggtgaagaaatctcttgttggatcttgtcgggaaagtatattgcaatcgctttggttgaccagtacaaattgagtcagtcttggatggaggatgtcatcatccctggatttcagggaaacgatgtaggatataccggtcactatgttgtgatatgcggctacgattccggaacagacgagttcgagatcagagatcccgcgagttctcgggaacacgacagggtctcatcaaagtgtctcgaagaagcacgcaaatccttcggtaccgacgaagatcttcttctgatatcactcgaggagagccggaaaccaaattactccgtcttataattttctacacttcatgtatatgccacgatccatgccatgtaactgtttgtcgagctctcctcaccatttctgcacttgctcgtatttgaagattgtgtatagtaagctcttggaagaaataactagtctttgtatggtgtagttggtctaatgatttgatttttaatctgcaaattactggcaatttgtacaacaatgcactcattttgtacatgaaattgtatattgcaatatataattgttgtataataaatcatgtttttttttttttt

SEQ ID NO: 1882 - DNA, 549 bp, Gossypium hirsutum
  Clone ID: LIB3582-005-P1-K1-H11
accaaccagattcatgcaattgaaagaaaaaagcttctgcatttccaatcgaaacccaaaaaaatcaaatattttcccactcaaaaaaggaaaaatttgcaagaggaagaggatttgatggttaaggttgttattaactaattaaaataattgctctcagtggcataatttttataatttaatccaaaacaggtctcacctgatgtggcctctatatttgctgttaaacaagattcttaaaacagacgaagatgaagatcgaatgaacaccacaacacgatgctacggttttgagcatcgaatcggccacaaatcgatgttgccacgatcccatttcgttcaagttccacatgtaaaccaattgttctcttgggattgtggacttgcttgtgtgttgatggcgttaactactattggtgttaatgattgtagtattgagaatttagctgaactttgctgcacaactagcatttggacagttgatctcgcttacttactgcaaaagttttcggttagattttcctattatacttgtacatttggagctta

SEQ ID NO: 1883 - DNA, 377 bp, Gossypium hirsutum
  Clone ID: LIB3120-060-Q1-K1-E3
tttttataatttaatccaaaacaggtctcacctgatgtggcctctatatttgctgctaaacaagattcttaaaacagacgaagatgaagatcgaatgaacaccacaacacgatgctacggttttgagcatcgaatcggccacaaatcgatgttgccacgatcccatttcgttcaagtgagcgaaattatgggattttttttgaagttaccttgggttacaagctgtaattatgaatttgttttaatggtgttttataggttccacatgtaaaccaattgttctcttgggattggggacttgcttgggtggtgaagggggtaactactattggggttaaagaatggagtattgaaaatttaactggacttttgtggac

SEQ ID NO: 1884 - DNA, 565 bp, Gossypium hirsutum
  Clone ID: GOSHI-09MAY01-C360_1
gtgaaagatgagcattctggaaatggaatcacattgctaggatctagtcgccagaatgatttttgccatttagaatctgcgcgctgcacaatctggtagaaatgttcaggattcttctaataccatagagatggataataacaagaataatctgtccactggtgaaagcagccttcagcatctgctgccttggggaagtgaaaaagttgacaaggataagcatgagaaggtgggagccgttgcctctgcaaatttagttgaccacacaagaactaatgttggtgggccgtcttgctctcaaaataatgttgacagaaatgtccggcagaaaggtcctcgcattgctaaggtagtgcgtaggatcaactgtaatgttgagcctctggaatttggagttgtgctctctgggaaattatggtgtaacagccaggccattttcccaaaaggatttaagagccgggttaggtatatttagtggtttagatccaacaaatatggcatactatgtctcagaaatttggatgcggagagggatggacctctggtcatggtatctgtggagcac

SEQ ID NO: 1885 - DNA, 349 bp, Gossypium hirsutum
  Clone ID: GOSHI-09MAY01-C310_14
gacccacgcgaccgaggaagagaagcagcaccgaagaagaaggaagtagtttttcggcttaagttggctatgaggtgtggtgtgatgaatccatctattttaggaaaagttttatgggaacattacatgagaaagaagggtgcagcagcttcggcttaagttggctatgaggttgttttgatgaatccatctattttagtaaaagttttttgggaacattacatgagaaatgtcatttattgcatttggatgcctttaaatattggcgggttctattttcatgtgctgttagctatggtgcttgcctaattctgatttttgggcaagtatatgtgctgtcgttatgcaa

SEQ ID NO: 1886 - DNA, 669 bp, Gossypium hirsutum
  Clone ID: GOSHI-09MAY01-C310_13
attgctcgttacgccccctcagcgtggattagggattccgcttgcttttcatattttcttttccatttcttgtcctcatcaagcttccgagtctcccacgtttcccttccagggaaagggaacaaggagttttggtaaaagaaggaacaagacccacactctctgcattaggtgtggtcgccgtagcttccatctctagaagagtcattgctctgcctgtgctttccctgctgctcataactggagtgtgaaggcaaatataagaaagaccactggaaccggtaggatgaggtatctactccatgtccctcgcaggttcaagactggtttcagagaagttccggtgttggatcatgatctacgtactggatgcagcaccgacgaattaggctgcagcagctgctgcttgaggattacaaggttgttttggatgaagccttctctttttaggaaaactcttacgagaacattactcttgaggggtgtcattacattgaatgctttagttgtttatagtttatgattatggagttgcataaaaatttgaacaaggatgaatgctttgcattgaaaactgatgctggaaatgttgtatgcaattaaccgtttagaattccaaggattctatctaatcataaaagatcaactaattcgtgaagaaaatggcta

SEQ ID NO: 1887 - DNA, 498 bp, Gossypium hirsutum
  Clone ID: GOSHI-09MAY01-C310_10
ccatcgcttagggtttctcctcctctctacctccaatgggaaagggaactgggagttttggtaaacgaaggaacaagacccacacgctctgcgtcagatgtggccgccgcagcttccacctccagaagagccgttgctctgcctgtgctttccccgctgcccgtaagaggacatataactggagtgtgaaggctatccgaagaaagacaactggcactggtaggatgaggtatcttcgccacgttccacgcaggttcaagacgggtttcagggaaggtactgaagcagcaccaaggaagaaggttgcagcagcttttgcttaaaaggcaaattgtaatggtatgaggtttttgttttggatgaagccatgtttatgaggaaacatttagtgaatgaagagtggaattatgttccatcggatgctttaggtattatagttcctatttgaatgtagctgtcttaaattttgaacaattattggagctaatgtttgaccct

SEQ ID NO: 1888 - DNA, 804 bp, Gossypium hirsutum
  Clone ID: GOSHI-09MAY01-C310_8
atcgctttttatttctcttttatttctctttttccacccattgatctagttgtatatttgaaaatgaaattaaaaaaagtggtaatgtacagggaaagagaacatggagttttggtaaaagaaggaacaagacccacactctctgcattaggtgtggccaccgtagcttccatctccagaagagccattgctctgcctgtgctttccctgctgctcgtaagaggacatgtaagtgcctcatgcgctttgtcctcgcgtccgggagtgtgaaggcaatcagaagaaagaccactggaaccggtaggatgaggtatctgcgccatgtccctcgcaggttcaagactggtttcagagaaggtactgaagcagcaccgaggaagaaggttgcagcagcttctgcttgaggtattacaaggttgttttggatgaagccttctttttttaggaaaacttttacgagaacatttttcttgaggggtgtcattacattgaatgctttagctgtttttagtttatgattatggagttgcattaaattttgaacaaggatgaatgctttagtttttctctagtttatttttgaggagttgcttcaaattttgaacgaggatggacaaggctattgttggttgacacttagttacttgatacatttttttgggatgaaggtaatgtatgttcttgttctttggtagaaatgatatcacctctcattttttcttttctcttatatttactacatcattcatccccttctattcttcactcatttcatactacatctttatatttcttcttatcttc

SEQ ID NO: 1889 - DNA, 651 bp, Gossypium hirsutum
  Clone ID: GOSHI-09MAY01-C310_7
cccacccgtccgcccaaatataacaacccaatcttttttccgccgctctctttcttccttcagacaccatatcttagggtttctcctcctctctacctccaatgggaaagggaactgggagttttggtaaacgaaggaacaagacccacacgctctgcgtcagatgtggccgccgcagcttccacctccagaagagccgttgctctgcctgtgctttccccgctgcccgtaagaggacatgtagctggagtgtgaaggctatccgaagaaagaccaccggaactggtaggatgaggtatcttcgccatgttcctcgtaggttcaagaccggtttcagagaaggtactgaagcagcaccgaggaagaaggttgcagcagcttcggcttaagttggctatgaggttgttttgatgaatccatctattttagtaaaagttttatgggaacattacatgagaaatgtcatttattgcattggattcttttaaatatttgtagtttctattttcatgtagctgcttaggctattgttgcttgacacttaattactggatatttttgtggacgaagttaatcatgtgcttgtttcggttatgatgcccttcatctcgtttcaaattatagtcttctttattcgagtattgttgtttg

SEQ ID NO: 1890 - DNA, 440 bp, Gossypium hirsutum
  Clone ID: GOSHI-09MAY01-C310_6
gtctcccacatttcccttccagggaaagggaacagggagttggggtaaaagaaggaacaagacccacactctctgcgttaggtgtggccgccgtagcttccatctccagaagagccgttgctctgcctgtgctttccctgctgctcgtaagaggacatataactggagtgtgaaggcaatcagaagaaagaccactggaaccggtaaaatgaggtatttgcgccatgtccctcgcaggttcaagactggttttagagaaggtactgaagcagcaccgaggaagaaggttgtagcagcttctgcttgaggtattacaagatctgcaaattgcgcgagggtttgggcatagcaaccaataatgctgctgaatatcgtgccataattttttttaaggttacaggcttgatggcttcttcgttctctatgacttcaaatggttg

SEQ ID NO: 1891 - DNA, 1057 bp, Gossypium hirsutum
  Clone ID: GOSHI-09MAY01-C310_4
ctgaagccgcatactaattagatactttgaatttgtatcctgcttggaatggggggggtttaatttagatgggagatgggtgaagaagctaatgctgtggatcccgaatcactattgaagaagaataagaggaatgaacaatggcaacttgctaaaaagcaacagcttgtctttccacagaagaagaaacattgctacgcctgtgctttccctgctgctcgtaagaggacatgtaagtgcctcatgcgctttctctttgttatcaagatcgtgaaggcaatcagaagaaagaccactggaaccggtcggatgaggtatctgcgccatgtccctcgcaggttcaagacttgtttcagagaaggtactaaagcagcaccgaggaagaaggttgcagcagcttctgcttgaggtattacaaggagctaatgcctataataaattgggagatgacaacctttagtactccaatgctggcagttctagtctttgcctctgtggcattattccctacaatacttctaccatctacagcatcaatctgggtggcagggatgactttatttttcaatgtttcaaacattttggtcttttccacttgattgtacttgacctttgtaccgatttctgtttcttgtgcagatcaaaatagtattcaaagtgattttagcaaacagaatgttgattggagagaaaggttggatctgcaatctatcaaaaaccttttcactaaggagaattttggttttgatggaaaactggtggttaattatgccctgttctatggcatggggctaactcttgatgatggatcttcaaagagattagataaaaattgtcaactctgtaactgtttcctacaattctccattatgcatattcctcatagaaccatcttctataatttcccccccccctttttctctgagaaactggtgatcctgtaacagatactaacttcttgcttctacttaagcaagggaatattggtgttctgaagattctgataatggcgacatcaatttgaaccaaaaaaaaaaaaaaaaaaaaaaaaaaaaaa

SEQ ID NO: 1892 - DNA, 590 bp, Gossypium hirsutum
  Clone ID: GOSHI-09MAY01-C310_3
ggatctttttggagcgctcatgccctgccctttccaggagccggcttcttctaaaggtgaaacatctcatggggagggaaccaaaaagacgcccccgggggcgctcccgtcggcggacgcggggctgggatcacttggttcaatagccgtagccgatcccgcgagaaagcatgtcaagttggatccacatgctgaggctcaaataacatcctctggtcatcaatcttgtactcttgagtttgatggtgcatcaaaaggaaatcctgggcctgctggtgcagcagctgtattgaaaactgatgctggaaatgtgatctgcaaattgcgcgagggtttgggcatagcaaccaataatgctgctgaatatcgcgccataattttagggttgaaacatgctcttagaaaaggttatacaaacattcgtgtacgaggtgactcgaagctcgtttgtatgcagctgcagggtttatggaaagtcaaacatgagcacatgtctgagttgtatgagcaagcaatgaaactgaaggataagtttctttcatttcagatcaatcacggtttaagggaaccgaatggcgcggctgatgctg

SEQ ID NO: 1893 - DNA, 1002 bp, Gossypium hirsutum
  Clone ID: GOSHI-09MAY01-C310_1
cagatggtttggcccctttttaatgggcaaggagcgaaggcctataatcaattgggaggatgacaagcctttagtactccaatgctggcagttctagtctttgcctctgtggcattattccctacaatacttctaccatctacaccatcaatctgggtggcagggatgacttttggttgtgggtggggatttctactaatcatatcaacagctgctgtgggtgtatcacttccattctttattggctctcttttcctccacagaattcaaggctggttagaaaaatatcctaagaaagcagccattctaagagcagctggtgaaggaaattggtttcatcagtttaaagctgtaacattaattagaatctctccattcccatatatcatatataactattgtgcggtggcaacacatgttaaatatggtccttacatcttgggatctttgataggaatggtgcctgaaatttttgttgcaatatacactggtatcctcatacagacattggcagatgcttcacaagaacaacacaccttatcggctccacaaattttgttaaatgttggcggtttccttttaacagtggttacaacaattgttttcacagtttatgctaaaaggcaactaaaagtgttgcagggagaagaattgctattacagtgagatgcgttataggggttgatgaaattttatttattgagcaatccccggatggaaatgtgccacaaaattggttctttgtaacattgtgaaggaagtgacaggggaaacccaaacccaagccaaaaattataacatcttcctgtctcccatttatttaaagagtttattctttggtgcctctctcacacacacgcctactcataattgagatttgtatatgaatgaagctgctaaagtcaatattatttgacattctgtacatcattcaatgtcattttgttgttgacttgttgagttgaatatgatattctgcactgtagaatcctttgttttggt

SEQ ID NO: 1894 - DNA, 542 bp, Gossypium hirsutum
  Clone ID: uC-gsronu33B178f08b1
tttttgcgtccgtttttaaagggattcgtgctttagctcaggtaatcatggcagctgagtctcccagttcagcacgaaaagttgttgtccatttgagagcaactggggatgcccccatactaaaacaagccaaattcaagatacttggaactgacaaatttgctaaagtaattgattttttgcgtcggcaattgcaccgtgatacactgtttgtgtatgtaaacagtgccttctcaccaaacccagatgaattggtgattgatctgtatgataattttggttttgatggcaaactggtggttaattatgcctgttctatggcatggggctaactcttgatgatggatcttcagagagatgagataaaaactgtcaactctgtaactgtttcctacaattctccattatgcatattcctcatagaaccatcttctataattttcccccctttttctctgagaaacgggtgatcctgtagcagatactaacgtcttgcttctactcaaagcaggaaaatatgggtgttctgaagattctgataa

SEQ ID NO: 1895 - DNA, 515 bp, Gossypium hirsutum
  Clone ID: uC-gsronu33B170g12b1
tccatgcgtccgcccacgcgtccgcgaaaggcaccggcaccctttctctcccaacatcaaacggaatcgccccttacattttccttccttcttttgttcctgaaggtaactgcaaaaaaaattggaggaccggccacacaagttcatcgttttcgagcaggaactagggcttcaagagattcgaaaataccagcttcatcagagaagtctcaagatttccttgatctccatcctttctggaattttggttttgatggcaaactggtggttaattatgcctgttctatggcatggggctaactcttgatgatggatcttcagagagatgagataaaaactgtcaactctgtaactgtttcctacaattctccattatgcatattcctcatagaaccatcttctataattcccccccccctttttctctgagaaactggtgatcctataacagatactaacttgcttctactcaagcaagggaatattggtgttctaaagattctgataatggcgac

SEQ ID NO: 1896 - DNA, 408 bp, Gossypium hirsutum
  Clone ID: LIB3272-030-P1-K1-C12
cagctaagtctcccaattcagcacgaaaagttgttgtccatttgagagcaactggggatgcccccatactaaaacaagccaaattcaagttgttgtccatttgagagcaactggggatgcccccatactaaaacaagccaaattcaagatacttggaactgacaaatttgctaaagtaattgattttttgcgtcggcaattgcaccgagatacactgtttgtgtatgtaaacagtgccttctcaccaaacccagatgaattggtgattgatctgtatgataattttggttttgatggcaaactggtggttaattatgcctgttctatggcatggggctaactcttgatgatggatcttcagagagatgagataaaaactggcaactctgtaactgtttcctacaattc

SEQ ID NO: 1897 - DNA, 391 bp, Gossypium hirsutum
  Clone ID: LIB3165-032-P1-K1-D3
cccacgcgtccgggtcattcgttgtttataaaatcattcatctccccaatttctggcgcttctttccttcctttcttccttaacctccaaccagtagaactcctctcacttatctccttattgtaaacattttcctctattcttttgttcctttcattttcctatctacaaatttttcttagcctaaaatttttcttctctttttgttatccatttgagtagatttttctttcttcgccttcatcggagtcttcttcagataactggagtgttaaggcaatccgaaaaaagaccactggaactggtaggatgatgtatcttcgccatgttcctcgtaggttcaagattggtttcagagaaagtactgaagcagcaccgaagaagaaggttg

SEQ ID NO: 1898 - DNA, 351 bp, Gossypium hirsutum
  Clone ID: LIB3147-046-Q1-K1-C1
cggacgcgtgggcggacgcgtgggcggacgcgtgggcggacgcgtgggggacatatagggggagtgtgaaggctatccgaagaaagacaaccggaacaggtaggatgaggtatcttcgccatgttcctcgcagtttcaagacgggtttcagggaaggtactgaagcagcaccaaggaagaaggttgcagcagcttctgcttaaaaggcaaaattgtaatggtatgaagttttgttttggatgaagccatgtttatgaggaaacatttagtgatgaagagtgaaattatgttccattggatgctttaagtgatatttagtttctatctgaatgtagctggcgtatattttga

SEQ ID NO: 1899 - DNA, 433 bp, Gossypium hirsutum
  Clone ID: GOSHI-09MAY01-C300_4
ataaaaaggaaagaaaaaaatgaagctcttgtttctaactttgctgctttgttctcttcttctatgttcttcagtttttgcaccaacaatggctcagcctcgttcacgtaagcaaacatatttttttcataatctaagccttgggtgtgtgtgtgtgtgttttaatctttgatgtaattttttttggggggggggaatggcagctttttgtgaagggaaatgcaaagggaggtgcaataaagcggcggtttgggatcggtgcttcaaatattgcggcatatgttgcgaggagtgtcaatgcgttccgtccggtacttacgggaacaaacacgagtgtccttgctacagagataaggtgaacaacaagggcaaacccaaatgcccttgaaaatgaaatatattcgagttcgggatttaatcaagcttaaagatc

SEQ ID NO: 1900 - DNA, 528 bp, Gossypium hirsutum
  Clone ID: GOSHI-09MAY01-C300_2
aagggggtccacccactcttccgaccacgcgtcagaaaaaggaaaaaaaaatgaagctcttgtttctatctttgctgctttgttctcttcttctatggtcttcagttttggcaaccaacagtggctcagcctcgttcacctttttgtgaagggaaatgcaaagggaggtgcaataaagcggcggtttgggatcggtgcttcaaatattgcggcatttgttgcgaggagtgtcaatgcgttccgtccggtacttacgggaacaaacacgagtgtccttgcttcagagacaaggtgaacaacaagggcaaacccaaatgcccttgaaaatgaaatttattccagctcgggatttcatcaggcttaaagatcggggaccaaagaggcctcatatttttttttttatgcgcatcctggtggtggtattttttaaaaataaaccggtttttttgccttgcggtttttccctttgggggtttttgggtttggaggtggggttgcaatataaattttccctttttttttttttcc

SEQ ID NO: 1901 - DNA, 651 bp, Gossypium hirsutum
  Clone ID: GOSHI-09MAY01-C300_1
ccccgcgtcccgccccccccttttaagatatcataaaaaggaaaaaaaaatgaagctcttgtttctaactttgctgctttgttctcttcttctatgttcttcagtttttgaaccaacaatggctcagcctcgttcacctttttgtgaagggaaatgcaaagggaggtgcaataaagcggcggtttgggatcggtgcttcaaatattgcggcatatgttgcgaggagtgtcaatgcgttccgtccggtacttacgggaacaaacacgagtgtccttgctacagagataaggtgaacaacaagggcaaacccaaatgcccttgaaaatgaaatatattcgagttcgggatttaatcaagcttaaagatcgaggacgaagaggccatatatatatatatatgcatgttgatgatgatgttattataaaaataaacttgttttgttgctgttattttcctttgggtttttgtgttggtagtgttgaataatatttcccttatattttcccatcaccgccgtgtccaccgccatgcacacatggtttgttgtcttttgatcatgggtggcggtggtggtggtgaaaatggtgccattcacaggtgtctgcagggtcggtaaaatgcatctaaaaagtagaaaaatgttgtaacctt

SEQ ID NO: 1902 - DNA, 546 bp, Gossypium hirsutum
  unsure (1)..(546): unsure at all n locations
  Clone ID: LIB3585-019-P1-K1-D12
cagtccagcccacgcccgtccagcccacagcagtccagcccacgccagtccagcccacgccgnntccgttttaaagaatatcatagaaaagggagaagaaatataaaatgaagcttcttggtttctaaactttgctagctttagttctcttttcttctatgnttcttcaagtttttgcaaccaacaatgagctcatgcctcgttcaacctttttgtgaatgggaaatgcaaagggaggtgcaataaagcggcggtttgggatcggtgcttcaaatattgcggcatatgttgcgaggagtgtcaatgcgttccgtccggtacttacgggaacaaacacgagtgtccttgctacagagataaggtgaacaacaagggcaaacccaaatgcccttgaaaatgaaatatattcgagttcgggatttaatcaagcttaaagatcgaggacgaagaggccatatatatatatatatgcatgttgatgatgatgttattataaaaataaactngttttgttgctggtattttcctttgggtttttgtgttggt

SEQ ID NO: 1903 - DNA, 397 bp, Gossypium hirsutum
  Clone ID: LIB3146-037-P1-K1-G5
ggccggccgacgcgtgcgtgaaaaaaaaatgaagctctcgattctaactttgttgttgtgctcacttattttatgtactggggcggtgtgaaccaacaatggctcaccctccttcacctttttgataagggaaatgcaaaaggagttgcaataaacacggcagtttggtatcgatgcttcaaatattgcggcatatgttgcgaggagtgtaaatgtgttccttccggtacttttgggaacaaacacgagtgtccttgctacagagacaaggtgaataacaagggcaaacccaaatgcccctgaaaatgaaatatattctagttcgggatttcattaagcttaaagattcgtggccaaaaaggctatatttatatattcatgcttgaggggttaatat

SEQ ID NO: 1904 - DNA, 324 bp, Gossypium hirsutum
  unsure (1)..(324): unsure at all n locations
  Clone ID: LIB3146-037-P1-K1-F7
ggaaggaanggccggggcgacccacgcgttcaaaatttatgaaaaccctaattctacctttgttctttatcaaagagcaagtctaacaatgagggccaagtctgacccagcacaagctcgtcgctcacctttgatcgaaagaaaatgcagaagccggtgctatatagccgcggaatgggatctatgcttcaaatattgcggcatatgttgcgatgagtgtaaatgtgttccttccaatacttttgggaacaaacactatgttccttgctacagagacaaggtgaattactagggcaaacccaaatgcccttgaaaatgaaatat

SEQ ID NO: 1905 - DNA, 504 bp, Gossypium hirsutum
  Clone ID: GOSHI-09MAY01-C330_1
ctaatggcgaaacctttctaaaccctaaaccacctcactgtttcaatgacgatcccaaccattgcttctaatttctcactcaacccatcactctttcctcttaaaacttcttcaatttctcggcgcactgtcctatcccgtcatcaaacccccccttcatttctctcaataccccaagctttcattcccaggccggccccaaatttccttttactttctgggaaacggttggggctttctctcaatcgaaaatccaagttttatgctaatgctggcaatggaggagaagatggtggtgttgatgaagcggagaggttggcaagaggagagagtacaatgccggagaggttccgatacttgaccaaagaagctcctgatcctcctgttaggtggcctttctttgttgctgtggcattccttctctatgcatggagggctgttttgttaaagctatctaattggagaaacgctgcttttggtgttgttcgttttgtgcaaactaac

SEQ ID NO: 1906 - DNA, 747 bp, Gossypium hirsutum
  Clone ID: GOSHI-09MAY01-C290_3
tcttgatactactttaactaccaaaggtgactctaaagaaactttctatcttggtccactagctgatggcctcaatcaatggcctttagaagaagatctaccatcttggagaagcgcaatggagacttatcatcaaaaagtgctgtctgctgggactaaattactctccttaattgccctgtcccttaaattagatgaagacttcttctggaaagtgggtgcccttaatgaacaagtaggagttattcgtttattacattatccaggctcaggggactcggactcttcaagtgaagaaatatatggtgcttctgctcattcagattatggaatgcccacgcgtccggatgacggatggtgttccggggcttcagatttgcagggagaaatccaaacaaccacaggtttgggaggatgtgccaagcataagtggggcattcattgttaacattggggacatgatggagaggtggaccaattgtttgttcaggtcaacactgcatagagtgctgccacctagacaagaacgttactccgtaatgattcacccttttgctgtttatgcagaacagttccatttttttggaaagttcaactatgttaggaaataggaacagtttgttgaatgtccttttgatttcgaaatcttcatgttgaatgatattatctgttcataatctgattatttgatgagggtgcaaaagattgaaatgtattcaccagtcattgcacattgtttattctata

SEQ ID NO: 1907 - DNA, 970 bp, Gossypium hirsutum
  Clone ID: GOSHI-09MAY01-C290_1
gcgaccacgcgtcagacaaaacggtctaccgcccttcaacttccgatcatggactgggcctcaccagatcggttttccaccgccaactctatccgtcaggcatgcattgaccacggtttcttttacctcgtgaatcatggggtcgatgaagaattggttaagaaagtttttgagcagagtagcaacttcttttcattcccaattgaagagaagatgaagttagctatcaagaatcacagaggttatacagcactttatgctgaaaaacttgatactactttaactaccaaaggtagttctatctatttttaattatttaaacttccctttcccttttcctttttttaatgtttaacattcttcctaagttgcatgttcaatgactatttatcaacgactttgatttgagatgctagtgggtttgttcaagattttccaatacacccatttcagtagcgttatttttctttcctaattcctttctggtttactgtaaagatcatttgaggtcagattgatcactttcgattgcttgaacaacaggtgactctaaagaaactttctatcttggtccactagctgatggcctcaatcaatggcctttagaagaagatctaccatcttggagaagcgcaatggagacttatcatcaaaaagtgctgtgagtccctgctattagttcacatattggtatttatgggtttctgcaagagtttctattataaatttatagatatactcaacctttttctagattcctttgtcatcccagttcataacttacttttgaagtctgaattcaactctatcttgcttggaaaactaacaatgacagtcagccacctgtgaaaggttaaatggtgctacatttgcttcctaagtctgctgggactaaatactctcctaatgccctgtccttaaatagatgagacttctctgaaagtggtgccttatgacagtgagtattctt

SEQ ID NO: 1908 - DNA, 536 bp, Gossypium hirsutum
  Clone ID: LIB3583-061-P1-K1-C8
gcagaaaccacgaaacaaagaaaaatgtctaacgcccttcaacttccgatcattgacttggcatcaccagatcgcttctccaccgccaactctatccgtaaggcatgcattgaccacggtttcttttacctcgtgaatcatggggtcgatgaagaattggttaagaaagtttttgagcagagtagcaacttcttttcattcccaattgaagagaagatgaagttagctatcaagaatcacagaggttatacagcactttatgctgaaaaacttgatactactttaactaccaaaggtgactctaaagaaactttctatcttggtccactagctgatggcctcaatcaatggcctttagaagaagatctaccatcttggagaagcgcaatggagacttatcatcaaaaagtgctgtgagtccctgctattagttcacatattggtatttatggtttctgcaaagagtttctattataaatttatagatatactcaacctttttctagattcctttgtcatcccaggtcataacttac

SEQ ID NO: 1909 - DNA, 564 bp, Gossypium hirsutum
  Clone ID: GOSHI-09MAY01-C250_15
ttatatttttttttctgctcttcgggtttggctttagatggtaaccaagaaagaaagcgggaaccggcacagcttcctttgctacttctctatttaaagcctcctataaggtgttattgctctattttagtgcctattatccttttattatttttgctctctccttgtttttgagatctgcgtgtttcttcaagcttcttgaaagcgtcattttggttcagaactggaaaccgctgctgtgatggctccaccaattgagactacagtcaagtcctctgactctcactgcgctccacatcctcctttgaatgaaaggatcctttcgtcaatgaccaggaggtccgtcgctgctcacccatggcatgatcttgaaattggacctggagctcctacggttttcaactgcgtgattgaaattgggaaagggagcatggtgaaatatgaacttgacaagaaaactggtttgatcaaggttgatcgtgtgctttattcatcagttgtgtatcctcacaactatggtttcattcctcgtactctttgtgaagacaatgatcccttggatgt

SEQ ID NO: 1910 - DNA, 740 bp, Gossypium hirsutum
  Clone ID: GOSHI-09MAY01-C250_10
ctttgatctcaaaggcaataggacggtaaaggttttttctggtagaaaactggattacgaacccaaacattgtgagaagcagaagaacgaaggtgactttatgactgctgttgaattttctgttgaacatccatacggaaaagctgttgcattgcttaacttgaaatctagatgcttgaaggcaaaggagggatggtttgttttgcccggattggtatcgatgtttatactttctcacattttgaagaaggaaggacgctttggcttcactgttgatggcaaaagtacgaaagagatagatggtgcaacacgaaaggtaattgttgacaacgaccagcatgcctccatggaaactgaagtccattcggatgtgacattagaaaatgcagtgatacctaaaaaagatggttcatgcaatggggactgtggaagtgagaaaggcaacacggtaagcagtggtggctgcggtggttgtggtgctggatgtggaaacgtggtgaagagtggtggttgtggtagtggctgcggtagtggatgtggcggtggttggggaagcgttgtgaatagtggcggctgcggtgccggtggttgtggtgctggatgtggaaacatggtgaagagtggtggctgtggtggtggctgtggtggtggttgcggtagtgggtgcggcggtagttgttcatagcattccgtctttatagtatattacatagttatgaatatgtttctggtatatactg

SEQ ID NO: 1911 - DNA, 1185 bp, Gossypium hirsutum
  Clone ID: GOSHI-09MAY01-C250_9
ttttctttgctcctccttaagtgtttctatagggttttaattcgttcttctcattacctctcttttaacctttctcttttttgcttgctctctttgtttttcgagatctgtgcgttttcttcttttcaattagcttcttgaaagctttattttcttaagaacaggaaaccgctgaagagatggcaccaccaattgagactccaaccaagtcctctggctctcaccacgcttcacatcctcctttgaatgaaaggattctttcatcgatgagcagaaggtctgttgctgctcacccatggcatgatcttgagattggacctggagctccaatggttttcaactgtgtgattgaaatcccaaaaggtagcaaggtgaaatatgaacttgacaagaaaactggtctgatcaaggttgatcgtgtgctttactcatcagttgtgtatcctcacaactacggattcatccctcgtactctttgtgaagacaatgatcccatggatgtcttgatcattatgcaggaaccagttattccaggatgctttcttcgcgctaaagctataggtctgatgcctatgattgatcagggtgagaaagatgacaagattattgctgtctgtgctgatgatcctgagtatcgtcactacaatgatatcaaggaactcccacctcaccgcctggctgaaatccgtcgcttctttgaagactataagaagaatgagaacaaagaagttgctgttaatgactttctgcctgcctctactgcatacgaggcaatccaacactccttgaatctctacgcggactacatcgtggagagcttgaggcggtagttgtcggttcaccgtgccccgtctatatacaaatatatatattaatatgaatatgaatatgttgctgctatacaagaaattcatcgtctccttgtgcgggcagaaacaccctgcactcactggttttgcgacaaagaaaatgtgtttttcattttataggtgacatggctgttggtgttttatgacaattatgcaatgatggcgataattttagataattctcagtgtaatgagtgattgctacattccattatctcttaaatttttttgttctattttgggttgtatgatgcccactcacttttatttactgtttgatgtgccttaccttatgaactgtttttattatcacgga

SEQ ID NO: 1912 - DNA, 932 bp, Gossypium hirsutum
  Clone ID: GOSHI-09MAY01-C250_6
cttcactcaaagaagccaaacactttggattctctcatttttctagaagtttttgagtattgaaagaagtatggcaaacaatgacggagaagcaacaagcgggaagagcactggattctctcgcgtcgcccttaatgaaagaatcctttcttcgatgactcgaagatcgattgctgctcatccttggcatgatttggagattggacctggtgctccagcagtttttaactgtgtggttgaaattggaaaaggtagcaaggtcaagtacgagctcgacaaaaccagtggtcttataaaagttgatcgtgttctgtactcatcagttgtttacccacacaactatggtttcatcccaaggactatttgtgaggacagtgatcctatggatgtcctgatactgatgcaggagcctgttttgcctggttcttttcttcgtgctcgtgctattgggttaatgcctatgattgatcagggtgagaaggatgacaagattattgctgtatgtgctgatgatcccgagttccgtcattacacagacatcaaacagcttcctcctcatcgtctggctgaaatccgccgcttcttcgaggattacaaaaagaatgagaacaagaaggttgatgtagaagactttttgccagctgagactgctattgcagccatcaagtattccatggatctatatgcatcttacattgttgaaagtttgaggaagtgatcatctttgcgactatttggtaaaaattacagtaaaatttgggtattatattagtgtgcccagacttaatgttgcatacctctcgtggttaaacattatcaaatgctcaagctgtgatattgatttatgttgcacttcttatatgacttccttaatagcatgtaatacattgtccatgagacttgactaatggaaaggaaatattcgacttcct

SEQ ID NO: 1913 - DNA, 1098 bp, Gossypium hirsutum
  Clone ID: GOSHI-09MAY01-C250_3
gcttattctatctggtgcagcacctctttcaactcacgtggaagagttcttgcgagttgtggcatgttgtcatgttctgcaaggatatggtctgacggagagttgtgcagggagttttgtctctttacctaatgaattgtcaatgcttggtactgtggggcctccagtaccaaacatagatgtacgcctggaatctgttcccgaaatgaattatgatgcccttgctagcacaccacggggggaaatttgtatcaaaggaaatacattattctcaggatactacaaacgtgaagacctcacccgtgaagtattgattgatggatggttccacacaggggatattggtgagtggcaacctaacggaagcatgaagattattgatcggaagaagaacatttttaagctttcacaaggtgaatatgttgctgttgagaacctggagaacatttacggtctcgtgtcagctattgattcgatatggatttacggaaacagctttgagtcgttccttgttgcggttgttaaccccaataaggaagcacttgaaagctgggctgctgacaataacgtaagtggtgacttcgagtccctctgtaaaaaccccaaggccaaagagttcatacttggggagctcgcaaagactggcaaagagaaaaagctgaaaggttttgaaatcataaaagctgtccatcttgacccaatgccgttcgacatggaacgagaccttctcactccaacatataagaagaagaggccccagttgcttaaatattatcagagtgtaatcgatgagatgtacaagagtgcaaacaaaccaaatgcttgataaaatgcttccaaaggcgtcggtgatatgttagatgatatggggttaaaacttgtgtattctttggtagtttggactgtacatgtagttccttcatcatcagaatttgtttaccaaaaaccaaattccctttgacacaactttgggaataatattacttggtaagttgtttaatgacccaaatgttaaaagttccaaaattacttatgatccggttttcaagacaactatttatggagttattgattatgatttttttttaaaaaaaaaaa

SEQ ID NO: 1914 - DNA, 1109 bp, Gossypium hirsutum
  Clone ID: GOSHI-09MAY01-C250_2
gcgggaaccggcacagcttcctttgctacttctctatttaaagcctccccgcggccgccccgcctccgccccgcggccgattatccttttattatttttgctctctccttgtttttgagatctgtgtgtttcttcaagcttcttgaaagcttcattttggttcagaactggaaaccgctgctgtgatggctccaccaattgagactacagtcaagtcctctgactctcactgcgctccacatcctcctttgaatgaaaggatcctttcgtcaatgaccaggaggtccgtcgctgctcacccatggcatgatcttgaaattggacctggagctcctacggttttcaactgcgtgattgaaattgggaaagggagcaaggtgaaatatgaacttgacaagaaaactggtttgatcaaggttgatcgtgtgctttattcatcagttgtgtatcctcacaactatggtttcatccctcgtactctttgtgaagacaatgatcccttggatgtcctgattattatgcaggaaccagttcttccagggtgctttcttcgggctaaagctataggtctgatgcctatgattgatcagggtgagaaagatgacaagattattgctgtatgtgctgatgatcctgagtatcgtcactacaatgacatcaaggaactcccacctcaccgtttggctgagattcgccgcttctttgaggactataagaagaatgagaacaaggaagttgctgtcaatgacttcctgcccgcctcaactgcttatgaggcaatccagcattccatgaatttgtacgcggactacattgtggagagcttaaggcggtagttgttcatagcattccgtctttatagtatattacatagttatgaatatgtttctgctatatactgaagtactgtcatgcatactgcattcacctacgaagtattgtgtgcttatcccctaaaatacattttcattttctggatggaagaaagaaaaaggtttgaagttatgataattatgcaatgatgatgaccataattttggatatttctcattgtaatgataatgcctataattctttttcctttttgtcatttgattctcttgattttt

SEQ ID NO: 1915 - DNA, 1948 bp, Gossypium hirsutum
  Clone ID: GOSHI-09MAY01-C250_1
cccccgcgtccgattatttttcctgcattttctccctcgccaaacagaaatcttagatcatttctagacgcagcgaacgatggagaaagcgatcaaccgacagcaagttttgcttcaacaccttaatccttcagcttcttctttttcgtcgcaccaaaacaactctgccctctctgcatcggcttgtttagctggagatagcgctgcttatctaagaactaatgtatttggagatgatgtggtgatagtagcagcatataggaccgcgctttgcaaatccaagcgagggggtttcaaggatacttatcctgatgatttacttgcacctgttttaacggcagtgatagagaaaacaaatttgaatcctagtgaagttggggatattgttgtgggaacggtcttggcaccaggatctcaacgagctagcgaatgtcggatggctgcattctatgctggcttccctgaaactgtgcctgttagaactgtgaacaggcaatgctcatccgggcttcaggcagttgctgatgtagccgcagcgataaaagcagggttttatgaaattggcattggagctgggttggaatctatgaccactaatccaatggcatgggaaggttcagttaacccaagggtgaagcaaatggagcaagctcagaattgtctccttcctatgggtattacgtcagagaacgttgctcatcgctttggtgtgacaaggcaggagcaggatcaggctgcggttgaatctcacaggaaagcagctgctgctacagcttctggtaaattcaaagatgaaatagtccctgtggccaccaagattgttgatccaaagactggtgatgagaaacctgtcacaatctctgttgatgatgggatccgagctaacacatcagtgtcagatctgggaaaattgaaacctgtattcaagaaaaatgggaccactactgctggaaattctagtcaagtgagtgatggtgctggagctgttctgcttatgaaaagaagtgttgcgatgcgcaaaggactgccaattcttggtgttttcaggacttttgctgctgttggtgtggatcctgctatcatgggtgttggcccagctgtggcaattccagcagcagttaaatctgctggtctagaacttgatgatgttgatctttttgagataaatgaggcatttgcatcccagttcgtatattgtcaaaagaagttggagctcgatccacaaaagattaatgtaaatggaggcgcaatggcaattggacatccattgggcgcaacaggtgctcgttgtgttgctacgcttctgcatgaaatgaagcgtcgtggcaaagactgccgattcggagtggtttcgatgtgcataggcacaggaatgggggcggcagcggtcttcgaaaggggtgattgtgttgatgagctgtgcaatgcccgaaaagttgaaactcacaatctcttatctaaggatgcccgataggatacctagttttcttgttaaaaatatcctaaatcgagttggaaaatttaataaagcaatgtaataagtcaccgatcatgttaccccagaaaagagtagtattcagacgttctggctattatctttcataaaattatatctcagctatataataagtgtcaacttctttgtttcttcagccccataatggaagtagatttcgttagcagtgcaactgatgttgatctcgaaatgattcgttttcgtaagcggtgggttattttttttgtaaccacaattgtgtagctgttatgcttagcaaaacctcaagaagattattaccattttatatgtcaaaatgagttgtttgaactttttaactttatagagatgatctgtcttaatcgctttagttatttttattgacttcagtatttatcaagttacttgcattcagcttacagatattataaacttttactggtattagctttc

SEQ ID NO: 1916 - DNA, 600 bp, Gossypium hirsutum
  unsure (1)..(600): unsure at all n locations
  Clone ID: LIB3543-037-Q1-K1-E6
gcgttcgnttattttatacccctactttttttaattccaaacaaggttctcaaattttttccgtgtaatctctgtgcaagatactgtgctaggaaacgttgntagaaaatttaattatctgctatgcttattttacgaaacagagatgaggaaaatttttaataagttaagttatttggtatattttcccaatttacttttaggttcttgagagttttgccttgatatgtttgcttcttgtcctttatcataataatctgctgctaagaaaaacctttagcttgccaagcagaaaagctccgcgttaaaagaaattcaagttttatgaaagagaaggccaatgcctgggcgaaaaatttcttgttttagatgcttattttggttaagcaatatgatctataaattaaaagaaaaagaaatgtaacagatcaatgggactttcagcatttaatcttgagaattttatatggaactgtaatcctttcatgaactttttatagtagttattgatacattgtttgtaactcacagagatggcaccaccaattgagactccaaccaagtcctctggctctcaccacgcatcacatcctcctttga

SEQ ID NO: 1917 - DNA, 561 bp, Gossypium hirsutum
  Clone ID: LIB3825-008-Q1-N6-H5
gctaacaaaatccacttccattgtggggctgaagaaacaaagaagttgacacttattatatagctgagatataattttatgaaagataatagccagaacgtctgaatactactcttttctggggtaacatgatcggtgacttattacattgctttattaaattttccaactcgatttaggatatttttaacaagaaaactaggtatcctatcgggcatccttagataagagattgtgagtttcaacttttcgggcattgcacagctcatcaacacaatcacccctttcgaagaccgctgccgcccccattcctgtgcctatgcacatcgaaaccactccgaatcggcagtctttgccacgacgcttcatttcatgcagaagcgtagcaacacaacgagcacctgttgcgcccaatggatgtccaattgccattgcgcctccatttacattaatcttttgtggatcgagctccaacttcttttgacaatatacgaactgggatgcaaatgcctcatttatctcaaaaagatcaacatcatcaagttctagaccagcagattt

SEQ ID NO: 1918 - DNA, 577 bp, Gossypium hirsutum
  unsure (1)..(577): unsure at all n locations
  Clone ID: LIB3584-004-P1-K1-F9
gcgttcgccccgcgtccngatgcttggtactgtggggcctccagtaccaaacatagatgtacgcctggaatctgttcccgaaatgaattatgatgcccttgctagcacaccacgggggngaaatttgtatcaaaggaaaacattattctcaggatactacaaacgtgaagacctcacccgtgaggtgtggattgatggatggttccacacaggggatattggtgagtggcaacctaacggaagcatgaagattattgatcggaagaagaacatttttaagctttcacaaggtgaatatgttgctgttgagaacctggagaacatttacggtctcgtgtcagcttttgattcgntatggntttacggaaacagctttgagtcgttccttgttgcggttgttnaccccnttnngggagcacttgaaagctgggctgctgnccntntcgttagtggtgacttcgngtccctctgttttttcccctttgccctcgggttccttcttggggtgctcgctttgtctggccctgtgttcctttctttcggttctcgttctcctttgtgttggttctttttgaat

SEQ ID NO: 1919 - DNA, 458 bp, Gossypium hirsutum
  Clone ID: LIB3048-010-Q1-L1-A5
gcgtctaactatgaactacggatcctgcaggcatagtagaacgcagcacgagggaatctatgaccactaatccaatggcatgggaaggttcagttaacccaagggtgaagcaaatggagcaagctcagaattgtctccttcctatgggtattacgtcagagaacgttgctcatcgctttggtgtgacaaggcaggagcaggatcaggctgcggttgaatctcacaggaaagcagctgctgctacagcttctggtaaattcaaagatgaaatagtccctgtggccaccaagattgttgatccaaagactggtgatgagaaacctgtcacaatctctgttgatgatgggatccgagctaacacatcagtgtcagatctgggaaaattgaaacctgtattcaagaaaaatgggaccactactgctggaaattctagtcaagtgagtgatggtgctggagct

SEQ ID NO: 1920 - DNA, 354 bp, Gossypium hirsutum
  unsure (1)..(354): unsure at all n locations
  Clone ID: LIB3189-027-P1-K1-H2
atcgcgagcggtcgntcgccgcgagcggcctcttttttttttatcttagatcatttctagacgcagcgaacgatggagaaagcgatcaaccgacagcaagttttgcttcaacaccttaatccttcagcttcttctttttcgtcgtaccaaaacaactctgccctctctgcattggctttgttagctggagatagcgctgcttatctaagaactaatgtatttggagatgatgtggtgatagtagcagcatataagaccgcgctttgcaaatccaagcgagggggtttcaaaggttcctattcctgatgaattacctggaccttgtttttaactgccagtgattggagaaaacaa

SEQ ID NO: 1921 - DNA, 317 bp, Gossypium hirsutum
  Clone ID: LIB3148-016-Q1-K1-A11
gtgatatgttacatgatatggggttaaaacttgtgtattctttggtagcttggactgtacatgtcgttccttcatcatcagaatttgtttaccaaaaaccaaattccctttgatacaactttgggaataatattacttggctagttgttcgatgacccaaatgttaaagttccaaaattacttatgatccgcttttccagacaaatatgattctaacaagcttctaccgattattgggataacaaaagattacagattttttaagaccttgagctaagtacattccaactgggtaggcagaaccaggtcaaggcaaa

SEQ ID NO: 1922 - DNA, 302 bp, Gossypium hirsutum
  unsure (1)..(302): unsure at all n locations
  Clone ID: LIB3148-013-Q1-K1-F5
agagtgcaaacaaaccaaatgcttgataaaatgcttccaaaggcgtcggtgatatgttagatgatatggggttaaaacttgtgtattctttggtagtttggactgtacatgtagttccttcatcatcagaatttgtttaccaaaaaccaaattccctttgatacaactttgggaataatattacttggtaagttgtttgatgacccaaatgttaaagttccaaaattacttaaaaaaaaaaaaaaaaaaaaaaaaaaaaaaaaaaaaaaaaaaaaaaaaaaaaaaaaaaaaaaaaaaanaaa

SEQ ID NO: 1923 - DNA, 481 bp, Gossypium hirsutum
  Clone ID: LIB3147-036-Q1-K1-C5
gcagtccccggcgcgacccacgccttcgaaaaattttcttgctggacctggagcttcaatggttttcaactgtgtgattgaaatcccaaaatgtagcatggtgaaatatgaacttgagcaagaaaactgttctgatcaaggtcgatcgtgtgctttactcatcaattgcgtattctcacaactacggattcatacctcgcactctttgtgaagacaatgatcccatggatgtcttgatcattatgcaactacgctttttgatccacatctgtctctaaaatatcaatctgattcatgatcgagaaccatgttacatgctttggaactctcttgtaatgcctccgattgcctagtgcactatgtttgacacaggattataaattccatacatcggccaatgccacatgcaatacttataaactatcattgatcatagctctaaaaatttttatgatgtgactgatgctaccattaaaacata

SEQ ID NO: 1924 - DNA, 282 bp, Gossypium hirsutum
  Clone ID: LIB3148-016-Q1-K1-A10
atcaagtagtccaataaccatgggactctttaaatgtctacattgatcctttcattagctggtgcaaaatgggctaatcatgaaagaaattttcactgcatttctgtagtggttgtggttccatgatttataggtttgaactaattgaacaacattccagtggcttttctgtttgttcagctctcctcgtgcataaccacagaaatatgattctaacgagcttctaccgattattgggataacaaaagattacagattttttaagaccttgagctaagtaca

SEQ ID NO: 1925 - DNA, 426 bp, Gossypium hirsutum
  Clone ID: LIB3148-028-Q1-K1-C9
caaaaaccaaattccctttgatacaactttgggaataatattacttggtaagttgtttgatgacccaaatgttaaagttccaaaattacttatgatccggttttcaagacaaaaaaaaaacccacgcgtccgaagatgacaagattattgctgtctgtgccgatgatcctgagtatcgtcactacaatgatatcaaggaactcccacctcaccgcctggctgaaatccgtcgcttctttgaagactataagaagaatgagaacaaagaagttgctgttaatgactttctgcctgcctctactgcatacgaggcaatccaacactccttgaatctctacgcggactacatagtggagagcttgaggcggtaattgtcggttcaccgtgccccgtctatatacaaatatatatattaatatgaatatg

SEQ ID NO: 1926 - DNA, 373 bp, Gossypium hirsutum
  Clone ID: LIB3145-054-Q1-K1-F11
tcgatacactctggattctctcatttttctttgtatggagaagtttttgagttttgaaagaagtttggcaaacaatggcggagaagcaacaagcgggaagagcgctggattctctcgcgtcgcccttaatgaaagaatcctttcttcgatgactcgaagatcgattgctgctcatccttggcatgatttgaagattggacctggtgctccagcagtttttaactgtgtggttaaaattggaaaaggtagcaaggtcaagtacgagctctacaataccagtggtcttataaaatgcgagatggatgacaagatttttgctgtatgtgctgatgatccctagtttcgtcattacacagacatcaaaacagttcct

SEQ ID NO: 1927 - DNA, 367 bp, Gossypium hirsutum
  Clone ID: LIB3197-003-P1-M1-E9
cttttcaattagcttcttgaaagctttatttggttaagaacaggaaaccgcgtgaggagatggcaccaccaattgagactccaaccaagtcctctggctctcaccacgcttcacatcctcctttgaatgaaaggattctttcatcgatgagcagaaggtctgttgctgctcacccatggcatgatcttgagattggacctggagctccaatggttttcaactgtgtgattgaaatcccaaaaggtagcaaggtgaaatatgaacttgacaagataccagcgagggggtttgaaggatacttatcctgatgatttacttgcacctgttttaacggcagtgatagagaaaacacattttgatcctactg

SEQ ID NO: 1928 - DNA, 1367 bp, Gossypium hirsutum
  Clone ID: GOSHI-09MAY01-C240_1
ctcaacccaagttgtggtgcatatcccattttccacactccatttccccagattttcacggtgcacaaacagccataattctcaacaactcgttatatatataatttctgggttcaatcgtttcttgttgtttgtagttttggttttaatctttgaaggaagcaaaaaagaagggaaaaaaaaaagtttgaattaatgctagctgtgtcacctttgaggaacaacacaagcaaagatgatgacgaaggagagatggagagtactttcacaatcagctccgacgagttcccggatttcgctgacgggaacttacttgaaagtatcgatttcgacgatctttttctcagcatcgatgttgatggcgacgtcttacctgatttggagttggaccccgtaattttggctgtattgccccccgccggcgaggaatcggagatgaatgcgtcgggagaaaaaaccgaggaaagtgataatcagaggaaagatgaagaagaaaataaggtttcgacgagtaaaggcgacgaggaaaccgtcagtaaaagagaggagcctaaagcagttaaaacaggctctaaagatggtgataagggaagaaaatcgtcaataaaaggaaagagcaacaacaacaatcaaggcactcgaaaagtgaaggtggattggacgccggagcttcaccggagatttgtacaagcggtggagcagctaggggtggacaaggcggtgccgtcgagaattttagagcttatgggaattgattgtctcactcgccataacatcgccagccatcttcaaaaatatagatctcataggaagcatttactagctcgtgaagcggaggcggcaagttggatacacagacggcaaatatatggcagcgctacgccggttggtggtccgcggaacccgggggggaaccattggcttccacccacaatgggtttcccgccatcagcttcacccatgcaccaccagaaccacctttttaggccattgcatgtatggggtcatcccactatggatcagtctttagtgcacttatggccaaaacacttagcaccccctccgccaccaccgcggccggcggggggacctccaccaccggcagacccttgcttttggcacctgcggcacccccgggtaccaaatggacaaaccccgggaacaccgtgctttcccccgccattgacggcggcaccaacgagatttggtgtagtaccggtgccgggcattcctcctcaccatgcaatgtacaaagctgacaccggcatcggtgtccctgccagccaattacgtcgccaccctctcgtcgacttacatccgtcgaaagagagcatcgatgccgctatcggggacgttttatcgaaacc

SEQ ID NO: 1929 - DNA, 422 bp, Gossypium hirsutum
  Clone ID: LIB3148-030-Q1-K1-G6
cccacgcgtccgtttacatgcagagatttggtgtagtaccggtgccgggcattcctcctcaccatgcaatgtacaaagctgacaccggcatcggtgtccctgccagccaattacgtcgccaccctctcgtcgacttacatccggttagtagcttatactttgttatcaatgaattagttataaaacactgaaaaaaaaattaaatttcgaatcttaaacttaaacgaggattttagttatattttcaataaacaaataaaagcaaagcaatttaaaaaaaaaatttcttggataaacattaattcacatacttacgatataagataaaaattttaagcatttttaacaaaataaccctcaataattattattgacgttaaatctatgatttcatccataatatttatatctacaaattatgt

SEQ ID NO: 1930 - DNA, 506 bp, Gossypium hirsutum
  Clone ID: GOSHI-09MAY01-C260_10
cccacgcgtccgcgttctggtcgattctgtttaaagggtgttgctattaatttcgcgaaaagcgacgacatcaagattcttagagacatagaacaatactaccgtacccaaattggccaaatggccatgaatggcgcaaatctgatattaaaaatgctttcattagtgcttggaccggaacttggaaggtaccggtggacatttttcattggggtggggtaattcaattaatctatctggtggaatgttgggggggaatggggttggattgctacccgaaggtcaattaactgattgtttttcgtaccaaattaaccttttaactatcaaaacacagtgattttcgtgcttttgttcactgttgtatgtatgtgtagttggattgctcaaatttctatagttttatttattattaccaagagtttgttagggattttaaagggttttgaagtctcgtccctcttcttcaccatttatttttatggttttggagtttgaatttgttc

SEQ ID NO: 1931 - DNA, 670 bp, Gossypium hirsutum
  Clone ID: GOSHI-09MAY01-C260_6
cacccaagctgtgattttctgcaatacaaacgaaggttgattggctaactgagaagatgcgtagcaataacttcacagtatcatcaatgcatggagatatgcctcagaaggaaagagatgtgattatggctgagtttcgtgatggtgcaacccgtgttcttatcacaacagatgtttgggccagggggctcgatgttcaacaggtgtccctggtgataaattatgaccttccaaataatcgagagctttacatccacaggattggtcgttcaggtcgctttggacgaaagggtgttgccattaactttgtaaaaagtgatgacatcaagattctgcgagatatagagcagtattatagtacccagatagacgaaatgccaatgaatgtggcggatctgatataagaatggcatggttgaagaagaatgtcatttgtgttatttgcagcgtcttttaagagtgatgggatttgtagtttgtacaccgtggaaactgaaggcacatatcagattaggattgacttttgctttttgtgtagttgatttgggatttgctccattttaatttcaagtatattcgaaaggttttggggtgtatgtcttttcgtctatcgtcacattttatgtgttcttctcccaagttaaaatctgatttattttataattcatgt

SEQ ID NO: 1932 - DNA, 1010 bp, Gossypium hirsutum
  Clone ID: GOSHI-09MAY01-C260_5
cggccgcgtgggcggccgcgtgggtttccccctgagaatcggtatcctcaaaaccctttaggtgtttctctctaccgcttttgctactttccaattttcccaggtggagctgcatttgaatgcatcaaacagccatggaagctctcctctctcaattcactttcctctcagatcaagctttacaaggcaacaagaatttcgatccatccgccatggaagacctaatgaagcttttcgagatcgaatcttacaaagcatgggcagctttggagctagaggaagaaaaacaagtgaaaggagctgaaataaccatgcaacaagcagaggattattttgactcagtcatggaaaccgccgtggatgagttcaggtgattcgaggaagaaatggaacgcgaggcaaaagctgaactcagtggtgttgatgatactgctgagaaagttaaaaaaatggggggtttgatagaaagctaaatttctatttttaataatcttttatatttactcttttcttttcaattaactttccctgctagacaatcacagcttagcgaaggccgaaaaaacgagggatggcggcggcgacgacgagcagagcggctcggcggatgggagccgaggatgagaagctagtgttcgagacgacggaaggaatcgagccgatattgagtttcgatcagatggggttaaaagacgatctcctccgtggaatctacaattacggctttgaaaagccgtcggctattcagcagagagccgttatgccgataatcaatggccgcgatgtgattgctcaagcccaatctggtaccggtaaaacttccatgattgctctcaccgtttgtcaagtggtcgacaccgctagcagagaggttcaagcgttgatattgtcacctacaagagaactggcgtctcaaacagagaaagtgataaggacaattggcgatttcatgaatatacaagcacacgcatgtattggaggcaaaagtgtgggtgaagatataaggaagc

SEQ ID NO: 1933 - DNA, 417 bp, Gossypium hirsutum
  Clone ID: GOSHI-09MAY01-C260_3
gtgcatggagaggaagagtagctcgtaaagaactgcggaagcttaagatggctgctagggagacgggagctctgcaagctgcaaagaacaaactggaaaagcaagttgaggaactgacatggagattacaactggagaaacgaatgagggttgacctggaagaagctaaaacacaagaaaatgcaaaactgcagtctgctttgcaagacatacaacttcagtttaaagaaactaaagaattgcttgccaaggaacgtgatgctgccaaaaaggcagctgaggtagtccctataattcaggaagtttcggtggtggaccctctgatgttggagaagcttacaaatgagaatgaaaaactgaaagcattagtgaggtccgtggaaaagaaaattgatgaaacagagaaaaagtttgaag

SEQ ID NO: 1934 - DNA, 582 bp, Gossypium hirsutum
  Clone ID: GOSHI-09MAY01-C260_2
gcgcaccgctagtaaagagctactagggagacgggagctctgcaagctgcaaagaacaaactggaaaagcaagttgagggactgacatggagattacaactggagaaacggatgagggttgacctggaagaagctaaaacacaggaaaatgcaaaactgcagtctgctttgcaagacatacaacttcagtttaaagaaaccaaagaattgcttgccaaggaacgtgaggctgccaaaaaggcagtggaggtagtccctataattcaggaggttttggtggtggaccctgtgatgttggagaagcttacaaatgagaatgaaaaactgaagtgagttcgttggaaaagaaaattgatgaaacagagaaaaagtttgaagagacaaacaaaataagtgaagaaaggttgaaacaagctttggatgcagaatcaaaaatagttcaattgaagactggtatgcacagtcttgaagaaaagatttcagacattgaatttgaaaaccaagtttttgaggcagcataccctatttaatttctgaagaatgcttgagaaaggaaaggcagagatgtgtcttattacctac

SEQ ID NO: 1935 - DNA, 1711 bp, Gossypium hirsutum
  Clone ID: GOSHI-09MAY01-C260_1
ccggtcgacccagcgttctttcaataaattttcttctcgttcccgttagccccccacgaacttaggcaaagcagaggctagagagatgtcggcggcggcggcggcgacaagccgagcgactcgacggatgggagccgaggatgagaagctagtgttcgaaacgacggaaggaatcgagccgatattgagttttgatcagatgggactaaaagacgatctcctccgtggaatctacaattacggcttcgaaaagccatctgctatccagcagagagccgtcatgccgataatcaatggccgcgacgtcattgcccaagctcagtctggtaccggtaaaacttccatgattgccctcaccgtttgccaagtggttgacacagctagcagagaggttcaagcattgatactgtcacccacgagggaactggcttcacaaacggagaaagtgatacggacaattggtgatttcatgaacatacaagcgcacgcatgtattggaggcaaaagtgtgggtgaagatataagaaagctagaaaatggagttcatgtagtgtcgggaactcctggtagagtttgtgatatgatcaaacgaagaaccctacgtacaagggctattaaactattgattcttgatgaatctgatgagatgttgagccgagggttcaaagatcaaatttatgatgtttaccgacatcttccaccagaacttcaggtttgtttgatatctgctaccctccctcatgaaatattggaaatgacgagcaaatttatgactgatcctataaggatccttgtgaagcgtgatgagttgactctggagggaattaagcagttttttgtagcagttgaaagggaagagtggaagtttgatacactatgtgatctttacgacacgttgacaatcactcaagctgttattttctgcaatacaaaacgaaaggtcgattggctaactgagaagatgcgtagcaataactttacggtatcctcaatgcatggagatatgcctcagaaggaaagagatgcgattatggctgagtttcgggatggtgcaacccgtgttcttatcactacagatgtttgggccagggggctcgatgttcaacaggtgtctctggtgatcaattatgacctgccaaacaatcgagagctttacatccataggattggacgttctggtcgattcggacgaaagggtgttgctattaatttcgtgaaaagcgacgacatcaagattcttagagacatagagcagtactacagtacccagattgacgaaatgccgatgaatgtcgcggatctgatatgagaaatgctttcataagtgcttggaccggaacttgaagggtacggttgaacattttccatggtgttggtgtaatcgaatcatctatcttgttgcatgtttgtgtgtgattgggtttgtatgctacgcggaggtcgattaactgaatgcttgtcgtaacaggttaagcatttaactatcaaaacacagtgaatgtcgtgcatttctttcactgtttgtatggtatgtgtagttggatttgctcaaattttctggagtttttattatatttattaccaaagaagtttgtataggggattttaaagggccccctcaagctcttcatcccactttctctcgccaattattttttaatggtttttggagatatataaatttgttcaaaaaaaaaaaaaaaaaagggcg

SEQ ID NO: 1936 - DNA, 734 bp, Gossypium hirsutum
  Clone ID: AI055063.1
aaaaccctttaagtgtttctctctaccgcttttgctactttccaattttcccaagtagatctgcatttgaattcatcaaacagccatggaagctctcctctctcaattcactttcctctcagatcaagctttacaaggcaacaagaatttcgatccatccgccatcgaagacctaatgaagcttttcgagatcgaatcttacaaagcatgggcagctttggagctagaggaagaaaaacaagtgaaaagagctgaaataaccatgcaagctgcaaagaacaaactggaaaagcaagttgaggaactgacatggagattacaactggagaaacggatgagggttgacctggaagaagctaatacacaggaaaatgcaaaactgcagtctgctttgcagacatacaacttcagtttaaagaaaccaaagaatttgcttgccaaggaacgtgaggcttgcaaaaaggcagtataggttagtcctatattcatgaggttttggttgtggaccctgtgagtgtggaaagcttataatgagatgaaaactgaagtgagtctatgaaagaaattgtcatctgattatattgtgaggccatctcttagttatgatagtaattattttgatgctgataaattgacttgtaattgtatgcatttttaatatttattttataaatattgtgtgttatttctttattaattgtgtaagtggtggttatttcttcgatgataatgtg

SEQ ID NO: 1937 - DNA, 596 bp, Gossypium hirsutum
  unsure (1)..(596): unsure at all n locations
  Clone ID: LIB3829-028-Q6-K6-H5
tgnacctcacccaacctttcgttttgtattgcagaaaacacagcttgggtgatggtcaatgtatcataaagatcacatagtgtatcgaacttccactcctctctttcaactgccacaaaacgaaaggttgattggctaactgagaagatgcgtagcaataacttcacagtatcatcaatgcatggagatatgcctcagaaggaaagagatgcgattatggctgagtttcgtgatggtgcaacccgtgttcttatcacaacagatgtttgggccagggggctcgatgttcaacaggtgtccctggtgataaattatgaccttccaaataatcgagagctttacatccacaggattggtcgttcaggtcgctttggacgaaagggtgttgccattaactttgtaaaaagtgatgacatcaagattctgcgagatatagagcagtattatagtacccagatcgacgaaatgccaatgaatgtggcggatctgatataagaatggcatggttgaagaagaatgtcatttgtgttatttgcagcgtcttttaagagataggatttgtagtttgtacaccgagtggaaactgaaggcacata

SEQ ID NO: 1938 - DNA, 403 bp, Gossypium hirsutum
  unsure (1)..(403): unsure at all n locations
  Clone ID: LIB3145-057-Q1-K1-C3
tttccgagtcttataaacatgcttaatgcctttgcttttcaacattggaacagtaacctctctaaccgcgttcctaattgtactagnttttgacatgctattgtattgaggtctgcctgtgtgattattgcttttgtgacaggttgattggctaactgagaagatgcgtagcaataacttcacagtatcatcaatgcatggagatatgcctcagaaggaaagagatgcgattatggctgagtttcgtgatggtgcaacccgtgttcttatcacaacagatgtttgggccagggggctcgatgttcaacaggcaagtctcgggagattattatgtctgccatttttttcatgtattttgctagttaaatgctttctagttgagtaaatgttaattttctttttc

SEQ ID NO: 1939 - DNA, 559 bp, Gossypium hirsutum
  Clone ID: LIB3828-005-Q1-N6-D5
aacttgaacaaaatgttttaaataataattgttaacaataataaaagccctaactgattatatatattatggtttcttgtttgtcagcggtaagtgtttaaagaacccttcacctacaacgtaggtgttatacaaataaacatcaaatggaagaaagtataaacgaccaaaaagtacattacacaaactccatggattaatgctctcaacaatattttttaatcactccatcaatccaagcacatgattctttttatataacatcagcgacattcatcggcttttcgaccatctgggtactatagcactgctagatatctcgaacaatcttgatgtcatcacttttcacaaaatttatagcaacacccttttttccaaaacgacctgatcgaccgatcctatggatgtaaagctctcgattatttgggaggtcataatttatcaccagtgaaacctgttgaacatcgagccccctagcccatacatctgttgtgataagaacacgggttgcaccatcccaaaactctgccataattgcctctatttccttgtgaggcat

SEQ ID NO: 1940 - DNA, 488 bp, Gossypium hirsutum
  Clone ID: LIB3584-044-P1-K1-G5
gataaattatgacctcccaaataatcgagagctttacatccataggattggtcgatcaggtcgttttggaagaaagggtgttgctataaattttgtgaaaagtgatgacatcaagattcttcgagatatcgagcaatactatagtacccagatcgacgaaatgccgatgaatgtcgctgatcttatataaaaagaatcatgtgcttggattgatggagtgattaaaaaatattgttgagagcattaatgtaatgtactttttgcgctcatctttcttccatttgatgttatttgtataacactacgtcgtaggtggagggttctttaaacacttaccgctgacaaacaagaaacaccaatatatataatcagttagggcttttattattgttagcaattattatttaaaacactttgttcgagttgcttaggatggatattaagttggagtatattttttatttatgaataaagtagagattatgaat

SEQ ID NO: 1941 - DNA, 411 bp, Gossypium hirsutum
  Clone ID: LIB3048-013-Q1-L1-H11
ggatggtactaatgcgagtagttatttatactgccaggatgctggtgacgcgtttaaggtcatgagggacaagggtgaacttggtcatcatgacaatcgactcaacagataaggaccagagatttaaaaatattgttcgaaacgactgcaagcatttttcccatatttagtttacatccaattggactaaaagacgatatccttcgtggaatctacaattaccggttttaaaaaccatctgctattcaacagagaaccgtcatgcccattatcaatggccgtgacgtcattgcccaagctcagtctggtaccggtaaaacttccatgattgccctcaccgtttgccaagtggttgacacagctagcagagaagttcaagcattgatactgtcacccacgagggaactggct

SEQ ID NO: 1942 - DNA, 398 bp, Gossypium hirsutum
  Clone ID: LIB3149-037-Q1-K1-E7
atcgaatcttacaaagcatgggcagctttgtagctagtggaagaaaaacaagtgaaaggagctgaaataaccatgccgatattgagtttcgatcagatgggattaaaagacgatctcctccgtggaatctacaattacggctttgaaaagccgtcggctattcagcagagagccgttatgccgataatcaatggccgcgatgtgattgctcaagcccaatctggtaccggaaaaacttccatggttgctctcactgtttgtcaagtggtcgacaccgctagcagagaggttcaggcgttgatattgtcacctacaagagaattggcgtctcaaacagagaaagtgatacggacaattggcgatttcatgaatatacaagcacacgcatgtattggagg

SEQ ID NO: 1943 - DNA, 1256 bp, Gossypium hirsutum
  Clone ID: GOSHI-09MAY01-C210_1
cccacgcgtccgcagtaaaacagcaattgtagcagtagtgaagtttttagattttagtgagaaagaaaaaggcataaccaattagggccttgtcggaaagttgcccacaaaaaggttctatgatgaatcaacacgacatatctttccaatcagctgctattgacagtagttccgagatgtttccgatgggtggttactttgcacctccccccatgaatttctctgggaattccagtatttttactacctcccctgctttaatcgaacctgggaactcttctggctcttcccttattgactcagtcgcagggttcacacatgatacagggttggctgtcgaatggtccgttgacgagcagtacgtattgaaggagggccttgaaaaatcccaggtcgacccacgcgtccggaagtacataaagattgcggctaccttgcctgataaaactgtacgtgatgttgcattgaggtgtaggtggatgcaaagaaagcgaaggaaacctgaagaacttaatgcgggtaaaagggtgaacagtaggaaggataagctggtggaatcatcttcaaagatgaatatgccttcagatttgccacaaaacacagctccatatcctctcacaatgcaccctctagaccagaatgggagaataccttctgaaggaatatttggtacaactatgcatcttctgaagcaaaattctcaagtacttagtcaaatcacatccaacctttctgcatacaagttacaggataacgttgatctcttttgtcatgcaaagaacaatattactgccatgctaaaagacatgagagatatgccgggtttaatgagccatatgctgccattgcctgtgtctgttagtgaggatttagcaaatagcatgttttgtagtgcaactcaggcaacgattctcgggatcaatctcaagcaggagccaagggtgctgattgggaattgttgagggtcgagtttcgatgtatctgggatggataaattacggaaaaaaaattctactgtaaattcataagaaactgatatgaagaatttgtagaaatcccatttttggaacctcaaatatttagatatcaaataaaccaagacccagataataggaatggtgaaatattcatcatctcatatctcaagttagaaaagggagagaaaaaaaaattatccaacaggttcagctgaattttgcgttgaagctttcatgtgtttaatttgtaacttgctaaccttatttggtacttgattt

SEQ ID NO: 1944 - DNA, 400 bp, Gossypium hirsutum
  Clone ID: LIB3197-050-Q1-M1-C8
ggaaaagaaaaaaatacaaagaaaaaaaaatcagaggagaactcagaaatcaaaagaaacaaagcaagagttgaatcgatctacactctgttatcaaagctgcgaaatttttgtgttaaaggaaaaagacttgaaagtcataagagaagctaagatccgagaagagatgttagaccgggaagcttcacttagacaagcaagagcagaagcatctctttctgatggtatctcatgggtaagctttgaccagaaaaaggcaaagccaattagggattttagaaaagttgccctccacaaggtataaagatgaaccaagtattatgaagtacataaagtttgcagctaccttgcctgataaaactgtacgtgatgttgcattgaggtgttggtggatgcaaca

SEQ ID NO: 1945 - DNA, 521 bp, Gossypium hirsutum
  Clone ID: GOSHI-09MAY01-C200_3
cccacgcgtccgcccacgcgtccgcttcaccatcttctctttactccttcactttaattcccacaaaaaagaccagacctttgctcaaaaatggagtcttctggtccttcaaggaggccttgttttattgaagaagatgatggtttggcttcccttgtagacatggaagctggatattcaggaacccattaccaaagttgtaaccaaaatgggtttttttcaaggcctcttttgtgttactcaaggaggagtagtttgaggaatttggcttcttcttcttcttcttcggttttctctccgaggtttactaggttttatgatgccagatttgaagatcatcattatcatcaaccccatttcttggatgcttgtttcctttgcaagaagcctcttgggggtaaccgtgacatctttatgtatagaggggacacaccgttctgtagtgaagagtgcagacaagaacaaatagatatggatgaagctttggaaaagaacagaaacctttcttcttctatgaaagc

SEQ ID NO: 1946 - DNA, 911 bp, Gossypium hirsutum
  Clone ID: GOSHI-09MAY01-C200_2
gtttctctcatttttccttcaaagattccaccgtttttgaaccaagatggactgttttgtaccttcaaggaagccttgtttcgttgaagaagatgatggtttagcttcacttgcaggcatggagggtgttggatattcagatggaagctattacaaaaaccatagccaaaatgggtttttctcaacacccttttgtttctcaaggaggaataatagtttaaggaacatgtcttcttcttcttcttcttcttctttctcatgtttgattccttcttctccaaggtctactaggttttatgatggcagatttgaagatcatcatcaaccccatttcttggatgcttgtttcctttgcaagaaacctcttgggggtaacaaggacatcttcatgtacagaggggacacacctttttgtagtgaagagtgtaggcaagaacaaatagacatggatgaagctaaagaaaacaatttgagcttttcttcatcaatgaaagcattgaggaagaagaaagaccaaaggaaatcatccaaatctccaaccaaagctgaagattatccttttagaacaagcactgttgcagctgcttgaaaccaacatatctaccatataaatagttgaaaatatatatatatatatgaagatccatgaagaagcctatttttaggggtttctttgtttttttaattgtgaatgttatataacacactatatgagaatgtgatataagcttgtattaaccctatcatgctgtgttttctttttgggatattttttgccaaacgttaatgcataaatgaaaagaatggtgagaagggtatggtttttttattggcccttctgggtatatttgtgtagtaaatgtaaattgatattaagtggaagttaataaaaagatgttcccttttgcttt

SEQ ID NO: 1947 - DNA, 782 bp, Gossypium hirsutum
  Clone ID: GOSHI-09MAY01-C200_1
cccgccccgccgcccgccccgtggctttgttttgctttgaaacaacccaaagatcagaccttctctaaaaccaaaaaaccgaaccaaaacgctaaaaatggaatcatctggacgttcaaggaggccttgtttcattgaagaagataatgggttggcttctcttgcagttatggagtctgggtatgcaggaatccattgccaaactcataagcaaaatggatttttttcaagacctctttgttactcaaggagaagtagtttgaggaatctgtcatcatcatcatcttcatctttttattgttcttcggtttcttctccaaggtctggtaggttttgtgatgccagatttgaagaccatcagccccatttcttggatgcttgtttcctttgcaagaagcctattgggggtaacagagacatcttcatgtacagaggggacacacctttttgtagtgaagagtgtagacaagaacaaatagagattgatgaagctaaggaaaagaaccataacctttcatcctccattaaagctatgagaaagaaggaccaaaaaaaatctacatctccaacaaaagctgaaagctaccctttccgaccaggcactgttgcagctgcctaaatcacctcaccaagcaaaataaaacaaacatatatctaccttgtataaacagagtgaaaagaaagaccttgaacaaaggacatggagatccatgaagaaaagggccaaggagaggaagaacaagaagaagcagcctctatgagggtttcttttttcgggtttt

SEQ ID NO: 1948 - DNA, 565 bp, Gossypium hirsutum
  unsure (1)..(565): unsure at all n locations
  Clone ID: LIB3582-023-P1-K1-A10
aacaaacagaaggagagtagccccctcttccccattttcatttgtgctctgctagggtttcaaaagaaacccatcatcgcacaaagccaccgaggggggtggctccagccacgcgaagaccagattttcagcccttttcaatagagccgaaagcaaagcgccttacaaactcagaaaatgcgaaagaaaaggtctctctcttttccctttaagtcagattctgacgatggagaatagatccgtcgaggtgacacgggatttcggcatacaaggggtcaacgaggctgtagacggccatttcgatgaaacggaggttgaaccttgggcgccgtgcatgccgagggcgcacatggaggcgcaacaccctaagctgctaggtttttttttgttttatattttgggctatttttctaggctaggttctttggtttgggcctgtattttgtttgggccttgtagtgaaatggaccattattattattttttattttgattttggtttctgatgggtccgggcaattttggcccattaataactattaatgttattttgttnannnaaaaa

SEQ ID NO: 1949 - DNA, 363 bp, Gossypium hirsutum
  unsure (1)..(363): unsure at all n locations
  Clone ID: LIB3189-012-P1-K1-E9
gttttattggtttcctttttttctgcaaaacaaacagtagtagagcagccccttcttccccatttgcgtttgtgctctactagggttgcaaaagaaacccatcatcgccatcatcgtacaaagccatcgagggcggtggccggagccacgcgaagaccaggttttcaacccttttcaagagagcccgaaagcaaagcacctcctaaactcagaaaatgcgaaagaaaaggtccctctcttttccctttaagtcagattctgacgacggagaatagatccgtcgaggtgacacgggnattcggtgagatgccttcttttattatatttttaaaaatagatttctaatagaatcataagaataat

SEQ ID NO: 1950 - DNA, 449 bp, Gossypium hirsutum
  Clone ID: LIB3189-051-P1-K1-H9
cccacgcgtccgggactttggccttgctgtgactactgaatctcagaacaaaaacgttaagttgtggggaacattgtgctatgtaggtgcagagtacctcttagagggtaaattgaccgataaaagtgatgtatatgctttcggagttgtacttttggagctgctaatcggaaagaaaccgatagagaaaatgtcaccaactcagcaccaatctattgttacatgggtcatgccccagcttaccgacagattgaaacttccgaagttagttgatccagtaataaaagacacaatggatttaaagcacttatatcaggtcgctgctgttgcggtgctgtgcatacagcccgaaccaagttataggccactcataactgatgtgctgcattgtctcattcgtcttgtaccgatagaactcggtggttcgttaagacttacatagccggtcg

SEQ ID NO: 1951 - DNA, 357 bp, Gossypium hirsutum
  unsure (1)..(357): unsure at all n locations
  Clone ID: LIB3147-003-Q1-K1-B8
cggacgcgtgggcttttggagctgctaatcggaaagaaaccgctagagaaaatgtcaccaactcagcaccaatctcttgttacatgggtaatttctttggaccatacattttgaatttctttcagccatggcttaatacttcatttatatactatttttataggtcatgccccagcttaccgacagattgaaacttccgaagttagttgatccagtaataaaagacacaatggatttaaagcacttatatcangtcgctgctgttgcggtgctgtgcatacagcccgaaccaagttataggccaactataactgatggactgcattctctcatccctcttgtaccgatagaactcgg

SEQ ID NO: 1952 - DNA, 552 bp, Gossypium hirsutum
  Clone ID: GOSHI-09MAY01-C38923_1
agccctgctccggttgttgctaagattgttattgttgaggaaggtgaagctgaagttgagaggaatgagaaaaagaagaagaaacataagaagagtgaagaggatgctgatgctgaaactgaagagaaggttgggaaggaaaaaaagaagaagaacaaggataaggttgaagcttcttcaccagatacagagaagtctgagaagaagaagaagaagaagagctaggagagcgaggaaactcctgttgctgttaatggtgcaggggatgataaaagcgagatgcaaaaaaagaagaataaaagcaaagatgcagtagagccgtaggtgatgaggttttaaaacatttccttttagtaggaactcaaattgttttgcagttgtatgtttggtgcctacattaacctttttaagaagtgttttgcagtttctcaatgtacgttttggcataaacaattttatgatttacttttatgtcatggaatgcgtgcactttctgcctaaacacctatataaaaaaagaaaatgatcttaaccttggggcggtcgttttta

SEQ ID NO: 1953 - DNA, 514 bp, Gossypium hirsutum
  Clone ID: uC-gsflnu33B081b04b1
gtgccttatcgcccgatcccttcaggagcaatatctgagaatgaggttattagccaaatctggttgctactcttagggggccttggcatatctggtttactagacgtgtgggcagggcatgacttccctattgtattctaccttgctttgggaggatccttgctatcatacatatactctgctcctcctttaaagttgaaacaaaatggctggataggaaattttgctcttggagcaagctatatcagtttgccctggtgggccggtcaagcattgtttgggacacttacaccagacatagttgttctcacactcttgtacagcatagctgggttgggtatcgccattgttaatgactctaaaagtatcgaaggagacaaagctctaggattgcagacactttctgtagcctttggtgctgaaacagctaaatggatttgtgttggtgctattgacataactcaattatctatagctgggtatcttctatgggctggtgagccgtaatatgcac

SEQ ID NO: 1954 - DNA, 446 bp, Gossypium hirsutum
  unsure (1)..(446): unsure at all n locations
  Clone ID: LIB3147-001-Q1-K2-C10
accacgcgtccgagtaaatatttgggacactgatgagttctgcagaccccttactttctttgatccttggaagaacggagttatttgtatgcttgttatggttgagcagtcacttcctgtagcctttggtgctgaaacagctaaatggatttgtgttggtgctattgacataactcaattatctatagctgggtatcttctaggggctggtaagccgtattatgcactcgccctagttggtttaatagttccacaagttgtatttcagttccagtactttctaaaggatcctgtcaagtatgatgtaaagtatcaggcaagtgcacaaccatatctggttcttgggttactggtgactgctttagcaacgagccattgatgaagtataactggtggaggacangaaagagatgaagtaagctgatgagcagagtaaattgtgatcg

SEQ ID NO: 1955 - DNA, 530 bp, Gossypium hirsutum
  Clone ID: GOSHI-09MAY01-C38523_1
cccacgcgtccggtcccttcccgccgtctagttcttgcaaaagttcagatctatcttctatgattccttatccgaggtttgtttcttcagatccggtaccacagtttcatgatcttctctttgatatcagatatttgacgagggctaacgttgcctgatctaatgttctaaaaagtccttagacggcaagatccaaaggttggcaggaatcgttatctatttgaagatatatatcttcctaacgatggtgaaagatttgatctcgccagaggtcgtgggtctttttcttgatcttaggatctatcggagtagaacaagcgatgttctcagacaagcgatgctggatcgaaaggtggtttatgtttggaaggatgtgtaagatgtcagggcagaggtcctaattattttgaaaataaaaatagggctgagtcctgatctatctttgtcatccaagacctttgccatgtcgggtgcgcttgcatggcaggtcaccgaaacttaataaaaattctattttttcggtgttttca

SEQ ID NO: 1956 - DNA, 573 bp, Gossypium hirsutum
  Clone ID: GOSHI-09MAY01-C38473_1
aactttttggggaactttgccactaccagtttcacttctccgcccacgcgccccgcttcgagtgccaaaactatgcccagtattcgccttcttgtactcttcttcttcctcttcttctcagttcattcccaagaagacactcccatagctcgattccttcgttaccttcaattcaacaccgctcatcccaatccaagctacgctgaccccatctctttcctcatatcccaagccaacgccattggactccatgcccgaacccttgaattcaccccttctaaaccacttctccttctaacatggcctggctccaacccttctcttccctcagttctcttcaattcgcacctcgattccgttccggctgaaccttccaaatggatctaccctcctttctccgccactctcgcccctgacggtaaaatctacgcgcgcggtgctcaagatgacaagtgcatcgctatgcaatacttggaagccattcgcaacctcaaggctaacggctttactccttcacgaacagttcatatttcttatgtccctgatgaagaaattggagggtttgatgggagt

SEQ ID NO: 1957 - DNA, 1083 bp, Gossypium hirsutum
  Clone ID: GOSHI-09MAY01-C38413_1
gtgaatttgatctggagaatattgttacagctgcaaaagttcctggcaggaaggttaatgtgttgcttcggatcaacccggacgtggttccacaggtccatccatatgtcgctactgggaacaagaactctaaatttggtattaggaatgagaagctgcagtggtttctggatgccgtaaaggcacaccctaatgagctaaagcttgttggggcccattgtcatcttggttcaaccattaccaaggtggatatattcagggacgctgctgttctcatggtcaactacattgatgaaatccgtgcccaaggtttcgaggtagattatttaaacattggaggtggtttggggatagattactaccatagtggtgccgtccttcccacaccgagagatctcattgacactgtcagagaattggtcctctcaagaaaccttaaccttgtcattgaaccagggagatcactcattgcaaacacttgctgcttagtgaatcgtgtcactggagtcaaaactaatggaacaaaaaatttcattgtcattgatggcagtatggctgaacttatccgtcctagtctttatgacgcttaccaacacatagaactggtttctcctacacctcctgatgcagaggtctctacctttgatgttgtcggtcctgtctgtgaatctgcagatttcttgggaaaagagagagaacttccaaccccagctaaggggaccggcctggtggtgcatgatgcacgtgcttactgcatgagcatggcatcaacatacaatctcaagatgcgccctcctgagtactgcgtcgaagaagatggatcggtgaccagaatccggcatggggagacatttgaagaccacattcgttttttcgagggtctgtgatttgaacaaaacaagtgtccattttgaggcttgaaattggatattgtttttgcaaacttcatggatttatgtggtgtacttgaagtttcatttaacaagctgctgaattgggtatgatttcttttttataactttgaattggaattaatgtaatggcaatttcagcatctaaaagggtatgaacaagatttagaat

SEQ ID NO: 1958 - DNA, 542 bp, Gossypium hirsutum
  Clone ID: GOSHI-09MAY01-C38783_1
gttttatgcctccatggattcagaacaagcggtgaaatcctgaagaaaatgatggtccggtggcctcattccgtgctcaacaacttcgatttcgattttctcgacgctccctttcctgctagaggaaaatccgacgttgaatccctttatgatcctccttattatgaatggtatcaagtcaacgagatagagtgtgttcatttcgatgaatgtattgcatgcatagaagattatatgattaaacatggtccctttgatggtctactgggtttttcccagggtggaatgctagcatctgtggtgcctccaatgcaaagagagggtgccgcttttactagtgtgccaaagataaagttcgtgatcataatatcaggttttgaacttcgagaattgaagtctgggccgccgaaattgcttgctaatgtttattcagttccaattgactgcccatctcttcatttgattggagacccggatgtcctgcttgtacgacgggccacgcgttcgtcgctcttagaaaatgtcaatttcttaatcaggag

SEQ ID NO: 1959 - DNA, 1046 bp, Gossypium hirsutum
  Clone ID: GOSHI-09MAY01-C38743_1
aatttttctgtgatccctatcgttgtcacagaaactggatggccttggcaaggtggatccaatgaacctgatgctactgtggaaaatgctgagaccttcattaataaattgatccagcgagtttccaataattcaggtccacctagtcaaccaactattcccatcaacacatacatttatgaattgtttaatgaagacaagagactgggccctatctctgagaaaaactgggggttacttttcacaaacggcactgccgttttccctctgagtttaggtggtcctagtcagatcactggaaattctactgcagttttctgtgtggcaaaagatgatgctagtgatgttccgcgccgccgtgggattaactgggcatgtgggcaaggccaggccaattgcagtgctatacaatcagggcagccgtgctatctcccgaataacatcaagaaccacgcatcttatgcttacaatgattattatcaaaaaatgcatactgttggtgggacatgtgattttgatggtacagccacaactactacaatcgacccaagttatggatcctgcatatttactggaagttctaattcgagcacgggtagagagtctttgcctcctacagcacttggtccaataagtcccggagggagtacaaagcttccgctgtacaagattcaatttctaatctcagcaacttgtcttcttgtagtcttgctatgacactcgatttacgcctcggtggtggactcaaactgcgatgaatcattccatttgataggcaagattaagtgtgatagagaatgtaatgatatccacttaagttcaataatgaccgatgggtatttctttcagggcggtgttcgcacgttcatccttaccgcttttgattccatttttaagctagttcatcggttttacttatcagttgccttgtggtattttattacatttgcattgcattgcattgtaatgaccttgaagtggtagtagccattgtagcattgaatttttgggacaggaaatgagaaaacttggatttgttagtgggt

SEQ ID NO: 1960 - DNA, 784 bp, Gossypium hirsutum
  Clone ID: GOSHI-09MAY01-C38713_1
cttttccttaatctccgagcaagacatacaacgaaatccataaccaagtcaaactagctcaactcaactcaacacttcacttcactagtctttgattgttttttctatagttataatgcaaaagagtccttcagcttcttccttgggtccaggtggtctagacctggctcaagccttcttcaagcccatcctaaacaccgatccaccttcctccaccaagcgccataccaagatctccgtcatcggagttgggaacgtcggtatggctatcgcccaaactatcctcacccaggacttagccgatgaactcgccctcgtcgacgccaagtctgacaagctccgcggcgaaatgctcgatctccaacacgccgcggcgttcctcccacgcactaaaatcaacgcgtccgttgattactccgtcaccgctggatctgatctgtgtattgtcactgctggcgcccgtcaaaaccctggcgagtctaggctgaatctgctgcagaggaacgttgctctgttttcgaacattattcctccactggcaaagtactcgccggattcgattctattgattgtttcgaatccggtggatgtgctaacttacgtgtcttggaaactgtcgggatttccatcgaatcgggtcatcggttcgggaacaaacttggattcgtcgaggtttcggttcttgatcgccgatcatttggacgtcaacgctcaggatgtgcaggccttcatagttggtgagcatgggagacagctcgtagcactctggtctagcattagtatt

SEQ ID NO: 1961 - DNA, 652 bp, Gossypium hirsutum
  Clone ID: GOSHI-09MAY01-C38683_1
gggtttgtcggagagtatgaaccacttccaacaccggtgttaaccttcgagactcgtgctcctaaggaatcagcccttttcacaaagttgcagcatgctgctgatgttcatcctcgaaaggatgatgctactcataggacgaccccggttcctgcaactgatgttcgaaaggatgttggaacttataggaccccagttcctgctaagccacatcctcttgatgtccccgtttctgaatcgaaatcctcttcattttgttccgcaaatgggtcaacatcagaagggaggccatctttgtttactccaccagctatgccatctgttccacctattagaagagatgagtccagcaatgctgccgctgtcgctgctcgtgcatggatgtctataggagctggagcctttaaggaagcaaatgaaaactttggcacttcgaaaggaaaaatatccgcagattcgttatacaacccggctagggaacttcatccacaagctccacaagttcgagggcaattccctctttctgcggggatgcattttcaacctcagccagagaagaataattttcccctccatggtttcccaccgcaacatgttcgcatgatgaatgaagctcagtttccaaaaaccgaacccatgggttttccctcgg

SEQ ID NO: 1962 - DNA, 746 bp, Gossypium hirsutum
  Clone ID: GOSHI-09MAY01-C38623_1
aagaaatctgatgcagtaacttcatcttagagtaataacagtaatacaaaggaacgtggaaaaaatgctactcaaacacttgaatatggcggtgttagttatcacatggttaactgtggcttaatattgctgaaaatgctgtcagagtacattgacatgaatcatcttctgccagcactatccttggaggtggttcatcgtgttgtggagattctaaaatttttcaacacgagaacatgccaacttgttttaggtgctggagccatgcaggtttctggtttgaagtccattacttctaaacacttggccttggcaagtcaagtcattagtttcatatatgctatcattcctgaattgaggcaaatcctgttcctcaaagttcctgaacctcggaagtcacttttgctgtcagagtttgatcgagttgcccaggattataaggttcaccgggatgaaattcatacaaagcttgttcagataatgagagagaggttgttggttcatctgcgtggactaccccagattgttgagagctggaatagaccagaagaagctgacccacagcccagtcaatttgctaggtctctcactaaggaagttgggttcctccaacgagttttatctcgtacattgcatgaagtagacgttcaagcaattttcaggcaagttgttgtaatcttccattcacaaatttcagatgcattttcacgcttagagatcagcactccccaagcaaaaaatagact

SEQ ID NO: 1963 - DNA, 919 bp, Gossypium hirsutum
  Clone ID: GOSHI-09MAY01-C38133_1
cccacgcgtccgagaagaaccacctcttgggcctgctgctaatttaggtctttttacaaccaatgatgaatttgacatacctttgtggtcattacctacgggaacacaagatggctcagggtttcaactatttaatacagatcccgatgttgcagataccttagttgatctgcagcgtagttctctcaattgcccttcgactatgaatggttatccattggctcctgagacaactatgggatctacaaatctagtacctacttcttccattggtcaggtggatacaaatctaaatgacagcttggttgacagtaccttctttggtggagaagatccctcacttcagatatttcttccaacgcatccttcaggtgcatcagcagaggctgatttgagagatcaggctgatgtaccgaatggcgacgattggatctcccttaggcttggaggtggtgcaactggtggtcacggagactcaacaattgtgaatggattgaagtcgaggcagcagataccttccaaagagcgtgctatggatgctgcttctctgttgcttggtatgaacgacagtagaaatgggaagtcaagtaggcaaagaacagagagccctttctcatttcctcggcaaaaacggtcagttcgaccaagattatatctctctatcgactcagacaccgagtaattgtgtttgcttaaatttaactgcaacttgtggataattttggtgatcactcatgaagaactggactggcatttcagttaaaacacgaaattaaaattttcaatacgaaagtgccgccaaattaaaaagataggggcagcttcaacgttgctgtgttgacgacttttccacgagaggccagagcttgagggcgttatacctgtaagtgttgaatgctcaaattctaattctagtgta

SEQ ID NO: 1964 - DNA, 580 bp, Gossypium hirsutum
  unsure (1)..(580): unsure at all n locations
  Clone ID: LIB3825-005-Q1-K6-E12
ccggntgttgcagnaaccttagttgatctgcagcgaagttctctcaattgcccttcgacaattaatggttatccattggctcctgagacaacaatgggatctacagctctagtccctacttgttccattggtcaggttgatacaaatctaaatgacagcttggttgacactaccctctttggtggagaggatccctcacttcagatatttcttccaacgcatccttcaggtgcatcagcagagtctggtttcagagatgaagctgacgtatcgaacggcatctgtaccgatgattggatctcacttagtcttggaggtggtgcaagtgtcggccatggggactcgacaactgtgaatggattgaattcaaggcagccaataccttccaaagagcgtgctatggacactgcttctctgttgcttggtatgaatgagagtagaaatgggaagtcaagtaggcaaagaacagagagccctttcttatttcctcggcaaaaacggtcagttcgaccaagattatatctctctattgactccgacaccgagtaattgtgttcgcataaatttaacggctacttgt

SEQ ID NO: 1965 - DNA, 399 bp, Gossypium hirsutum
  Clone ID: LIB3145-050-Q1-K1-E6
ggaaatcacctttccttgtatcagaaaggaaaggttgtggtggaaatgggcattcaagcaataaagttccacttgacgcaaactctaatggaagttctacagtcacttgtcacaaatgtggagaacaattcagcaaatgggaagctgctgaaactcaccatctatctaagcatgctgttactgaacttgtggaaggcgactcatctaggaagattgttgaaatcatatgccgaacaagttggttaaagtctgagaaccattgtggccggattgaaagggttttgaaggtccacaacatgcaaaagactctggctcgattcgaagattatagagaaattgtgaagattaaagcaagcaaacttcccaagaaacattctcggtgcattgctgatggaaatg

SEQ ID NO: 1966 - DNA, 319 bp, Gossypium hirsutum
  Clone ID: LIB3145-050-Q1-K1-E9
gaaagcccgggccgacccacgcgtacgggaaagcacctatacttgtatcacaattgttatgttgggggggaaaagaacattcagggggttgttttccacttgacgcggactctaatggaagttttacagtaacttgtgacaaatgtggagaacaattcagcaaatgtgaagctgctgaaactcaccatctatttaagcatgctgatactgaacttgtggaaggcgactcatctaggaagattgttgaaatcatatgccgaacaagttggttaaagtctgagaaccattgtagtcggattgaaagggtattgaacgtcca

SEQ ID NO: 1967 - DNA, 927 bp, Gossypium hirsutum
  Clone ID: GOSHI-09MAY01-C38053_1
cccacgcgtccgaacggttgaagtcacatgtgagaccgagggtgaagagggtatacaagagggtgatgttgtgacagttcaagcttggataacccttgagcgcggcaatggcttgatcggtgctcttccccatgccccctgtttcccattccacaaggaagaaaatttctggttcttgcttgcagattctgtctcaaacaatgtatggttttcccaaaaggtgagcttcatggacgaagctacagcaataactgccgcttccaaaacaattcaggagacaatggaggtttctggagtaagtgccaaggagacaagcgaagctgtcaaaagaaccatagagaaggttcgaggtggttccagattggtgatgggcaaattccctgccccaactgaaggaaactacaacttgacttgtttctgcttatgcgactcctggataggttgcgataaaaagacaaactttgagggtaaaaatcctgaaaagaacaagagccggcactcgggtggtctcgtatcggaagacccacccgttcgggaggatggaatcgaagaagaagaggagaacgaagaggactatgacgattatgagagtgaatacagcgaagaggaggaagaggagaaggatacgaaaaagaagggccctgctgctaatggtgcagtgcataataaaggctcaagctctgaaggttcaggctcagatgaggaatgaaaaataaatgccaaatttcatttagaagaataaaaccctactttatttttctcttccagaatatctctataactttttttttaaatagtgattaaattaaggaggataagcttcagagattcaaagtaactatgatactacagggattagacactagcgtactatttattaaaaaaattacatggatgtatcggattcgggttattttagagtttaaa

SEQ ID NO: 1968 - DNA, 837 bp, Gossypium hirsutum
  Clone ID: GOSHI-09MAY01-C38003_2
caatgctctactgtcacccaaccaaaatattttcctcatgcttgaagtagcttttttgacaatcgttttcacatgcagacccccaccctaaaatctgctacttttttctagatctaagcctgaaaattctttttcttttcttcaataatcagataaagtttccatttttttctgaaaaagtacagtatttgcatgcagatcctaacgcagaatctttccgaggcgagactagatcatttcttagaggaatcgacgtgaacagattgccatctacggtcgattgcgaagaagcagctgccctcgcgtccccgaacagcacgatatcgagtgtgagtgggaaaaggagcgaaagggaaggcactaatggagatgagcttgatattgaaagagcttgttctcgtggcatcagtgatgaggaagatggtgacgcttcgagaaaaaaacttaggctttcgaaggatcagtctgctattcttgaagaaagctttaaagaaaacaacactctgaacccagtaagtaattccaacgcaagctttgatgttataatataactgttttcttagtaaccaaacagaaaatatttggagtggtttttttggtaaataagctaataaaacgatggctgttttgtatctttacagaaacaaaagatggctttggctaagcagctgggattgcgacccagacaagttgaagtttggttccaaaacagaagggcgaggtagaacgatttgccttgttagtaaatttactgttatgtccttctggtgtaacattatttactaaatactggacttcttaaaattctttttgcaggaccaagctgaagcaaactga

SEQ ID NO: 1969 - DNA, 1287 bp, Gossypium hirsutum
  Clone ID: GOSHI-09MAY01-C38003_1
ctctctctctctctctcccccttatcaaagcccaagtcttttcctctcctttttctctctctggttctcaccctttttcatacagggaaaagaagaacgaagctttgtttggcacaagagaaaataatctaaaacgatggtgggaaaagaagatctgggtttgagtcttagtttgggttttcctcagaatcaccactccttgcagctgaatctaaggccttctttgcttccttcctccgttgattcttgctcttcggtcccttctgggtttacagcctttcacaaatcgtcgtggaacgatgtttctgctccttcagatcctaacgcagaatctttccgaggcgagactagatcatttcttagaggaatcgacgtgaacagattgccatctacggtcgactgcgaagaagaagctggagtttcatctccgaacagcacgatatcgagtgtgagtgggaaaaggagcgaaagggaaggcactaatggagatgagcttgatattgaaagagcttgttctcgtggcatcagtgatgaggaagatggtgacgcttcgagaaaaaaacttaggctttcgaaggatcagtctgctattcttgaagaaagctttaaagaaaacaacactctgaacccaaaacaaaagatggctttggctaagcagctgggattgcgacccagacaagttgaagtttggttccaaaacagaagggcgaggaccaagctgaagcaaactgaggttgactgtgagttcctaaagagatgctgtgagaatctgacggaggaaaacaggcggttgcagaaggaagttcaggagctgagagcactgaaactttctcctcagttctacatgcaaatgaccccacctacgaccctcaccatgtgcccatcgtgtgagagagtaggtgcatcatccaccgttgatccaagatcccatcatcagctaccccagaaccaccacagggccatccccatcaacccttgggctccggctgctgccccaatccctcatggaccgttggatgctcttcggcttcgatcgtaatttttcaaccaatgctcaagggcgtttttgtcaaatgaaaaaaaaaagcatcacaaattgagtacggagaatatctagtgttgtttagagcatcgtaccaatcccatgttctaagatatggtggttagaatgtgattttggtgggacatcatgttttgtattattgggcccacctaaatctaatccctgtttaatgttgacatattcaattagtttttttttttaatgttaatcaatgatgcctaatt

SEQ ID NO: 1970 - DNA, 1341 bp, Gossypium hirsutum
  Clone ID: GOSHI-09MAY01-C38393_1
cccacgcgtccgcccacgcgtccgcccacgcgtacgtccacgcgtccgaagtctcactctttttttcttaaaactttgaatctttcttgtatttttccttatttagcttcaagcaacaaaaatggctgatgaagcgttagtgaagaacaagcaagtggttctcaagaactatgtgaatgccggtttgcccaaagaatcagatatggaaattaaagaaaaaagcattcaattgaaagttccagaagggactaaagattcaattttagtgaaaaatctctacttatcttgcgatccttacatgaggaatcgtatgaagaagctcgaagattcgtatgtgccgtcttttgagcccggatcggctatatccggttacggagtggccaaagtcgtggattcgactcatccggaatacaaaaacggcgatctcgtgtgggggatgaccggttgggaagagtattctctcttaacggtgcctggtcttttgttcaaaattcaacacacggatgtgcctctcacctactatactggacttcttggtatggctggtatgactgcttatgctggtttttatgaaatctgcaccccgaagaaaggggaatatgtctatgtatcggctgcatccggagcagttggtcagcttgtcgggcaatttgcgaaattgttaggctgctatgttgtcggaagtgccggaagcaaagagaaaattgatctgctgaagaataagtttgggttcgatgaggcattcaactacaaggaagagccggacttggatgctgctttaaaaaggtacttcccagaaggcatcgatatttactttgaaaacgtcgggggaaagatgctcgatgcagtgctgctcaacatgagagtccatggtcgtatcgctgtatgcggaatgatctcacagtacaacaatgacaaacccgaagcaacgcacaacttgatgtacatcattccgaaacgggtccggatgcaagggtttatcgtcagtgatttctatcacttgtatcccaagtatctagaaatggttatacctagcatcaaagaagggaagataacgtacattgaagacgtagccgaaggtattgagagtgctccaacagctctcattggcctcttcatcggtcgcaatgtcgggaaacagttagtcgtcgtcgcccgtgattgatgcacttatacggaaaataacaccggtataattcgtgcatgtgtgttgtgttttatttcaatgtattttgtatttatgttcggatatgcgttggacatgtgcgtttgaacaagagtctatttggggtttttcatacaaataatataaaaaagttaattacgaaaaaaaaaaaaaaa

SEQ ID NO: 1971 - DNA, 497 bp, Gossypium hirsutum
  Clone ID: LIB3585-056-P1-K1-B7
ggggaaagatgctcgatgcagtgctgctcaacatgagagtccatggtcgtatcggtgtgaggcggaatgatctcacagtacaacaatgacaaacccgaagcaacgcacaacttgatgtacatcattccgaaacgggtccggatgcaaggatttatcgtcagtgatttctatcacttgtatcccaagtatctagaaatggtcatacctagcatcaaagaagggaagataaagtacattgaagacgtagccgaaggtattgagagtgctccaacagctctcattggcctcttcatcggtcgcaatgtcgggaaacagttagtcgtggtctcccgtgattgatgcacttatacggaaaataacaccggtataattcgtacatgtgcttgtgttttatttcaatgtattttgtatttatgttcggatatgtgttgaacatgttcgtttgtacatgtggttgtgttttatatgttcggatatgcgttgaacatgtgcgttta

SEQ ID NO: 1972 - DNA, 774 bp, Gossypium hirsutum
  Clone ID: GOSHI-09MAY01-C38333_1
cggaagttatcaaagcgtgtagctttttatacagttgactgtagaggctcttgtggtgaaatttttgtcgatttaaaggactataaatattcgaagaaaaaacttgaggaaaccgttgaatgccaactagaattcccaagctttgaggatactatttcagtaccttggaaagcacttccgaagagagtgtcaaagctttactttgctatgagagtgatagagcaatttgaagatgctgaaggtcgtaatcccggggaaacctcaattgctgatcttcctggtgttctgaagctcagaaaggaactttgtgaaacgaattcagtgaacgagtctcaaatacccgatgcactcctagaaagactgctaatggatacaagtgagtaccctccagtttgtgccatcattggaggaatccttggacaggaggtgatcaaaccaatatcaggcaaaggagatcctctcaagaatttcttcttcttcgatgccatggatgggaaaggcttgatagaggacatatctgagcctaaaccagttagctgagctactttgatcgatgagggtttgtgtatgcaactttttcccctccttcgcttgaactattaccatggggcgaagctaagttgatgttgaaccctttaataggatcagctaacattctcacctactgattttgttgcctaaaaccgaaactccgggaaacttgaaactgttaacctgttttaaagactttggagacaacagtgttgctaatgaatcatgattgacggaagtttt

SEQ ID NO: 1973 - DNA, 548 bp, Gossypium hirsutum
  Clone ID: GOSHI-09MAY01-C38323_1
cgaaaacccctcctcaagaaatattcagtctctgtgcaattacaactcctagaaaaaatggcaacggaactaccaaaaccggcaaccgaagacgtgaagtttgatttgtttgaagatgatgatgagtttgaagaatttgagattgatgaagagtgggaggataaggaagaaggaaaggagattacacagcaatgggaagatgactgggatgatgatgatgtcactgacgatttctctttacaactgaggagggaacttgagaataacactgagaacaacaactaagctggacttatgcattcctctgcactgaactcgtctgaatcggggttttttttttttcgtttgattttcttttccatgcaaagcgaatgaaggaatgagctgtaactctttatgcttggatgtactggtagaaacttaaaatgcagaaactggtttgatggttctctaaaatatagacatttgatttaaaaaaaaaaaaaaaaaaaaaaaaaaaataaaaaaaaaaaaataaaaaagaaaataataaaaaaaaaaaagggcgg

SEQ ID NO: 1974 - DNA, 934 bp, Gossypium hirsutum
  Clone ID: GOSHI-09MAY01-C38223_1
caacaacaagcttgtttcccaaatcaagagttcaaccaaaattcctgttcttggtcatgcagatggaatttgccatgtatatgttgataagtctgctaatatggatatggcaaagcgggttgatttggatgcgggggggggggcttttttcgtttgcaatgcaatggaaactcttcttgtacacaaagatttagtgacaaatggtgcacttaatgagctaattgttgatcttcgtatacaaggtgttactttatatggtggaccaagggcaagtttattgttgaatatcccacaagcacgctcttttcatcatgaatacaattcaatggaatgcactgttgaaatagtggacgacgtggctgcagccatcgatcacatccatcaccatggcagtgcacacacagattgtatcatcaccgaagaccaagaaactgcagaaatcttcttgcatcaagttgacagcgctgctgttttccacaatgcaagcacaagattttgtgatggtgctcgattcggtctaggcgctgaggttgggataagtacaagtaggattcacgctcggggtccggttggagttgaaggattgttaacaacaagatggattctgaaaggaagtgggcaggtataaatggtgataaaggggtcacttacacccacaaagacataccaataaattcttgaaaatgtatcagaaaatacccctaaaatgcaaaggggaaaatggctgaagctgctgaattggtttcttgaagggggttgaattgggataaaaatgttttgtcaggtgttaattgttatactattaatattgtgaaattattggtaatgccttatgtttttaaattaggaagttaatcctttcttttccagtttaaattaaaatttaaggatttgaatatttgtgtcgggaaaattggatttaaaaaatagaatg

SEQ ID NO: 1975 - DNA, 709 bp, Gossypium hirsutum
  Clone ID: GOSHI-09MAY01-C39983_1
gggatgttcttgatgacctcaagacaaatgttgagttgtctcatcctggtgctgaacttagattacttgaggttttttatcacaagatttacaggcccctcccccgcagtgaaaagatagagaacataaatgatcaatattggacattacgtgcagaggagataccggaagaggagaaagaccttggtccccatgatcgcttgattcactgtttacccatttcatgaaagacgcaacacaaaaccagcaggtacagaattttggggagccatttttccttgttattcatgaaactgaaacattagctgaagttaaagtgcgagttcagaaaagattacaggttccagatgaggaatttgcaaagtggaagtttgcatttttatcactgggtcgtccagagtatcttcaggactctgatgttgtgtctacctcgtttccggagaagggatgtatatggtgcttgggaccagtatcttggactggaacattctgacaatgcccctaagcggtcatatgcagcaaatcagaaccggcatacatttgagaagccagtaaaaatctacaactagatcaaaaactggaagagctacaactactgtatgaggtgaaacgtgtagccgacagtacgtccaacttttgtgtaataagcgaagaagccagaaggaggctgattgttggaatgcaggaacggttattaagtaaattagat

SEQ ID NO: 1976 - DNA, 857 bp, Gossypium hirsutum
  Clone ID: GOSHI-09MAY01-C39953_1
cttgcttatgatcagtactccctccagaaactagaacctccacttgttcttcaggagtttgttaaccatggaggtgttctctttaaggtttatattgttggagaagccattaaagtggtcaggcgtttctctttacctgatgtaactaaaagagaactctctaaagttacgggtgtttttcggtttccacgtgtttcatgtgctgcagcttctgcagatgatgcagatttggaccctagtgtggctgaacttccccctcgccctttacttgaaagactggccaaagagcttaggtggcgactgggtcttcggctatttaacctaaacattatccgggagcatggaactagagatcatttttatgtgattgacataaactactttcctgggtatgggaaaatgccggggtatgaacatatatttacagacttcctcttgagccttgtgcagagtcgatacaagaaaagatctagctagaaacttaatggaagcctaggacactccaaagcatcagatggtgtttttaataatcatatgcaagatatgatgtgttcgcggttgttccgttacccctttgtatagcatcgagctggtggagggtgcacatcgaagcacaatagaagccaagcctccaaattaagtagtttacatggagctggtagaggattgtcctccctactactacataggtgttaaatgatgtaaacagctctttgaaaatctgatttgtggtggctcaattcttttcttctactttgtatttacccttttgctgttgcatgttgcatgtaaacatgttgatgggtggagctcttctgcaaccagccaataacatcactgatgttcatctttttatt

SEQ ID NO: 1977 - DNA, 1240 bp, Gossypium hirsutum
  Clone ID: GOSHI-09MAY01-C39933_1
gccactgttcaggttgtcgatttgcaagtttttgctgttcctcgaattactctgaagcctttgctcagtgtctttccttgttttgccaacatatatgtctccctaatggacaagccacatgttgactttgggcttaaggtactcggggcagatggtaatggccattcctggattatccaggtttgtccaggagctcataaaagatcaagttgcaaatatgtacctatggcctaaagccttacaagtgccaataatggatcctacacaagcaatgaagaaacctgttggaatgcttgatgtgaaggttgtcaaggcaatgaagcttagaaagaaagatttcctaggcaaatccgatccttacgtaaaactaaagttaacagaggaaaaactctctgccaagaagactactgtgaaacaaagcaacttgaaccccgaatggaatgaggaatttagttttgttgttaaagatccaaacactcaagcgctggagataattctctatgactgggagcaggttggcaaacatgacaagatgggcatgaatgttgttccattgaaagatcttacacctgaagagccaaaagtttttactcttgatctgctgaaaaatatggatccaaatgatcaacaaaatgagaagtcacgggggcagcttgtcttggaagccttgtacaaacctttcaaggaggatgagataccaaaagacgttgacgactcaattatggtacaaaaggctccagaaggaacacctgcaggtggaggtttacttgtagttattgtgcatgaagctgaagatatcgaagggaagtaccacacaaacccacatgtgcggctgttattcagaggggaggagagaaaaaccaagcgtgtaaagaaaagcagagatccgagatgggaagaagaatttcagtttatggtggatgaaccacccacgaattataaaattcacattgaagcgttcagtacatcctccaggatagggctactgcatcccaaggaatctttgggttatgttactataagcctagctgatgttgtgaataacagaagaatcaatgaaaggtatcatctgatcgactctaagaacggtcggattcaaatcgagatgcagtggagaacttcttagatatgccagcaatttgtttatgaggaaaggaaggtagtcgtgttacttgagactgtactgtcactatgtttctttcttcccttcccttttcctgttgatcaagcttcttgactc

SEQ ID NO: 1978 - DNA, 437 bp, Gossypium hirsutum
  Clone ID: GOSHI-09MAY01-C39863_1
atatccggacgaggtagtcggttaggccacgctcctcgcggaccgaggcaggggttgatgcgtgggacatgaagcacggcaggctgatgagggacttcacgctcccgaagctgactgttacgctgaagtacttggtggtctccacgacgtgctttgagagggccagtgagccggtgagaaaactgagaacagagcccgctccctttgcctgcgaatagtgtaaagctcgcccaggatggtcaggaagcccagcgtagtttacttgcttgaccctcgggtgagacgccaggaattcagcgttcttctgggcattagcctgttgtgtcttcacccgcagagacatggttttatttcccttaaaccaaacccagcagtaaaatgggcccagaccttacctttaaccattttgcaaaaaccctacctttttatccaaactt

SEQ ID NO: 1979 - DNA, 540 bp, Gossypium hirsutum
  Clone ID: GOSHI-09MAY01-C39533_1
cggcgcgacccacgcgtacgatttttgggtaactaattggccttttgatcttattttattttatagcaaaatatcccagatggaaaggttgtacgttctcaagatggagctaggtctgtaacttcacagaagccaatggtcaggtcgagtttgaagtcaatgacataatgtgttgtggatgatgcatgtggagagttgttaccaaaggagtaaggccggtgcctcaagttagtgttcctttaattgcttgcatagattgcctgtcttgctctgaagttttagatcggacgatccatgaagctaacaatgctggtgctttgaatggctgctatctcaattttaaacactcgtactgtggtggcagtcggttctcgctctatttatgaatcaaggattatcaatcgaggaactgtataatatcataatggcagagctctgtatcagctattgttagtttatcttattgtttgccactttggttaatcctttgtacacagttgatacctaataatacaattcgatgctttctttctagttggt

SEQ ID NO: 1980 - DNA, 824 bp, Gossypium hirsutum
  Clone ID: GOSHI-09MAY01-C39523_1
aatacttgcctaaactatatgatcctttcttgcatggaccctaccgcggaagaatcaaggaatggggttcccctttaagcataaatcaaacttataaaaaaaaaaacacggatccattttggataaataagattcatgctctacttcttactactgattatcacgaccttgaacagacactagatacactcaatataaaatcattagcaacagaaaaagaactctctttattgacattgacagaagatgaacagggaaatatcgattccgaggatcgagtcaaaattttgaaatttttattcaatatagttataactaatcccaacaatcaaacaattagaaaaaaatctattggaataaaagaaataagtaaaaaagttcctcgatggtcatacaaattaatcgacgatttagaacaacaggagggagaaaacgaggaaaatgtaacagcagagcatgaaattcgttcaagaaaatccaagcgcgtcgtgatttttactaataaccaggcaaacgccgatacttatactaataccaaggatgctaatgatcctgatcaaacagacgaagtggctttgatacgctattcgcaacaatcggattttcggcgcgacataataaagggttccatgcgtgcccaaaggcgtaaaacaattacttgggagctgtttcaagcaaatgtacattcccccctttttttggacagagttgacaaaccactctttttttcttttgatatttctggaccgctgaaacgaatatctcgaaattggatatgtaaaaacaaagaatcaaaaatttctgattatacagaaaaaaagatc

SEQ ID NO: 1981 - DNA, 869 bp, Gossypium hirsutum
  Clone ID: GOSHI-09MAY01-C39433_1
gataagaagctgatcgaagaaagatgtgagcagctgaggacagccatggatacgagcagtgccatgtttgacagggagaaagcacaagaaagattatcaaaactatctgggggtgtggctgttttcaaggttggtggagctagtgaggcagaagttggagaaaggaaagatagggtcacagatgctttgaatgccacaagagcagctgtggaagagggtattgtgccaggtggtggtgttgctctcttatatagtacaaaggctttgcagaatcttcaaaccgaaaatgaagataaaaaaagaggcgttcagataattcaggacgctcttaaggtacctacttcaactatagcttctaatgctggttatgatggctctctggttcttgggaaactactggaacaagatgatgataatttgggttttgatgcttcaaaaggtgcatatattgatatggtgaaagctggaatcatagaccctctcaaagtcattagaacagccttagtcgatgccgccagtgtctcattgctattaacgacaaccgaggtatctgtcctggaaaatccagatgagaagaaaccaccaagtcgtatgccagacattgataatgactactaggtggactataccagttggagtacttaaaacactctttgtcatcctgcttaatatagcagagaacttaaattgagagccaaggttcatccctgatgaactcatttaagagcaatacatgcggatggtaccccatttttaatggatagataaataggatcatgcttattgatgtcattgcacaattagtgatctgggatttttgtagtacaaagaaaattagttgaggactcgtttattgcaactgttatttt

SEQ ID NO: 1982 - DNA, 459 bp, Gossypium hirsutum
  Clone ID: GOSHI-09MAY01-C39793_1
ggctaactctatcctgtttgattatcgtatccctgctgttggcacctgtggagccggtgccgccatggacagtcctttgcagatgaacgggctgccaatcagtgtctacgctccggagacagtcgggtgcgtggtggttgacaagcaagggcgatgtgctgccgccacctccaccggtgggctcatgaacaagatgagtggaaggatcggtgactcgccactaataggatcggggacctacgcatctgagttatgcggggtgtcgtgcaccggcgaaggggaagcaatcatccggagcacactggcgagggaagtgtctgcagtgatggaatacaaagggttgaatctgcatgagtcggtggattatgtcataaagaatacgttagatgaaggcaaagcggggctgatcgcggtgtccaaggacggggaagtggcatgtgggtttaacaccaccgggat

SEQ ID NO: 1983 - DNA, 1137 bp, Gossypium hirsutum
  Clone ID: GOSHI-09MAY01-C39723_1
ggacgttggaattgctaggtcatccgagtatcccgaagtgcagagaattacggataagggtttgggtacacttgaaggatttttgaacccgggtcgacccacgccgtccggggaaatggggccaatggccaggaagagtccggagagaactcagggaagagaaaccaccggttaagggaggagcctgaaacaaacatgaatgaaataaaggctcttcctgcacctgagaattataacccacctcctccaccacctgaacctgaacagcctaagactgtcccaccgcaggttacggaggaccttgtgaatctaagggacgatgcggtttcagctgatgagcaagggaacaaattggcgttggctttattctctggatcacccacctcaaatgctaatggttcgtgggaagcatttccttcaaatggagagccagaggtgacttctgcatggcaaacaccagctgctgagcctggtaaagcggattgggaattggcgttggttgagtcagctagtaatttatcgaagcagaaagctggattagcaggtggttttgatccgttgttactgaatggcatgtatgatcagggggcggtgaggcagcatgtgagctccagtcagctaagtggtgggagtgcaagtagtgttgcgatgcctggccctggcaaggccgctactcaagtgctggctttgcctgccccggatggcacagtgcagccagtaggacagcaggatccttttgccgcatcgcttacagtgccaccgccttcgtatgtgcagatagcggacatggagcagaagcagcagctactggtacaggagcaacagctatggaatcaatacggaagggatggaatgcaagggcaatcaagtttggccaagatcacagcaagttccgtctactatggtgctgctgcacaactggtaatgatgccgtatgggatgccacaagtgaatggcatggggcaggcaggagggtactattatccgccctactaaaatacacatctgaatcatggttcaacattataactatcacatcaaccatcttcgttgatgtattttggaattatataatatttcttgcattggagtttacatgtatttacagcgtcacctgtacaaaggtattatactcac

SEQ ID NO: 1984 - DNA, 394 bp, Gossypium hirsutum
  Clone ID: LIB3147-015-Q1-K1-B10
ggacgttggaattgctaggtcatccgagtatcccgaagtgcagagaattacggataagcttttgggtacacttgaaggatttttgaaggaaatggccaatggccggaagagtccggagagaatcaaggaagagaaaccaccggttaaggaggagcctgaaacaaacatgaatgaaataaaggctcttcctgcacctgagaattataacccacctcctccaccacctgaacctgaacagcctaagactgtcccaccgcaggttacggaggaccttgtgaatctaagggacgatgcggtttcagctgatgagcaagggaacaaattggcgttggctttattctctggatcacccaccttaaatgctaatgggtcgtgggaagcattttctttaaat

SEQ ID NO: 1985 - DNA, 1086 bp, Gossypium hirsutum
  Clone ID: GOSHI-09MAY01-C39663_1
agccttcggccaacccgtccggtttctcctcttcctttgaacgccggcctctcaaactccaaccaaggaagcaccaagcatttatttgagtttcttcctctggtttcatcatcgatccatttttttttcgctttataatggcaactaggctacagtttgaaaattcatgtgaagttggagtgttttccaagctgaccaatgcttattgcttggttgcaattggagggtctgaaaacttctacagtgcttttgagtctgagttagcggatgtcattcctgtcattaagacctctcttggcggcactagaataataggacggctctgtgctggaaataagaatgggcttcttgtccctcacaccaccacagatcaagaacttcatcacttgcgaaatagtctaccggatcaagttgttgttcagcgcatagaggagaaactatctgctcttgggaactgtatagcttgcaatgaccatgttgctctgacgcatacagatctagatcgggaaactgaggagataattgctgatgttcttggcgtagaagttttcaggcaaacaattgctggaaatattcttgttgggagctactgtgcattttcaaaccgaggtggcttggttcatcctcacacatccattgaagacttggatgagctttcgacgcttcttcaggttccattggtggctggcaccatcaaccgtgggagcgaagtgatagccgccgggatgaccgtaaatgactggactgccttctgcgggtcggacaccactgcaaccgagctttctgtcatcgagagcgtctttaagctgagagaagcacaacctactgctatcgtagatgagatgaggaaatcgttgatagacacctatgtttaattcgttggtgtttggttggttgttgctcatcgtcgagacaatgctcgctctgtcgtattttatgtcatgcccccattacaacactaatgaataaattcgttggtgtttggttggttgttgctcatcgtcaagacaatgctcgctctgtcgtattttatgtcatgttaaaattacaacactaatgaatgtgtaaatcttaatctgactgttc

SEQ ID NO: 1986 - DNA, 417 bp, Gossypium hirsutum
  Clone ID: LIB3146-049-Q1-K1-B1
gccttttctaacagaggtggcttggtccatcctcatacatccattgaagacttggatgaactttcaacgcttcttcaggttccattggtagctggcaccatcaaccgtgggagcgaagtgatagccgccgggatgaccgtaaatgactggacagccttttgcgggtcagacaccactgcaacggagctttctgtgatagagagcgtgttcaagctgagagaagcgcaacctagcgccattgtcgatgagatgaggaagtcattgattgatacctatgtttaagcttccccttcctttggttaatctaaaattgaagtccttcatataaatatggtattacactgttttatgtgagaaacataatataagtgtaaattaagtgagatgttgattgttgatgaaaatcacttggatgca

SEQ ID NO: 1987 - DNA, 339 bp, Gossypium hirsutum
  Clone ID: LIB3135-026-Q1-K1-D5
cccactcgtccgtccacgcgtccgattccagttgttaagacctctattgctggcaccagaatgatgggacgtctatgtgctggaaataagaatgggttacttgtaccccacaacacgaccgatcaagaacttcaacacttgcggaatagtctaccggatcaagtcgttgttcggcgcatagaggagaaactatctgctcttggcaactgtatagcttgcaatgaccatgttgctctgacacacactgatctatacaaggaaaccgaggagataatcgctgatgttctcggcgtaaaagttttcaggcagacaattgctggtaatattcttgtagggagc

SEQ ID NO: 1988 - DNA, 892 bp, Gossypium hirsutum
  Clone ID: GOSHI-09MAY01-C39163_1
gtcgaccccgcgtccggtacaatgtgatggtatgcttattccttatctgcctattccctaacatcattttaaccaaacaaacaacatattcctatttgttatctattctattcaatgaaaaacactgcataatacagaattctccttttattccattgccattgaaaagctattctgttcctcctctattccattaactaaacataatgttggtgtttctctttatttctttcaatatgcttgcaaatattgccatctatgcaggttgctagttcatgggcttctcagacaagttcaactgaaggcgatccagagtcgattgaatgcgtttcatttgcaccaaagttcccttgggctgtttctggtggcatggatcgaaaccttacaatttgggatctacaaaactcatcaccacgtttcatatgtaaccacgaggaaggagtgacatgcttagcttggcttggagcatctaaattcttggctacagggtgttgtgatgggagaatatgcatatggaattgtctatctggggaatgtgtcataaccttcaaagggcatgaacatgctatccagtctctctctgtatcttccaatctggaatttctcgtttctgtttccatggacagcactgcacgtgtattcgaaatcaggaacttccattgataaaagtaagcctccaagatcctcacttcttgattaattagtgatttctttttttttacggtgaggaatttgcttacaagtatgtatactgaaatactttgtattctttttttcttttcaaatctttataagttgcgggcaacagtgaacatttaaaagaatatctcctaattgtaagcttttatgagtgcgtcttttgcatcagattaaagaaaatttaatttttacg

SEQ ID NO: 1989 - DNA, 981 bp, Gossypium hirsutum
  Clone ID: GOSHI-09MAY01-C39113_1
tgtgcgtcctcacaaagccaatcatctagtttcactcaaaatgttcctcctgaaaagggctgttccgaggagcgtctgcatgatttgtccatggaggcaattaaagaattttacagcgccagagatgagaaagaagttgctttgtgcacggacgcgtggggttcttcaagctcccatccgacgatgattgcgctatgggtaacggactgttttgagaggaaagacatagagcgggatcttttggcgaagctacttgtcaacctgacaaggtcccatgatggtgtattgagccaggctgaacttgttaaagggtttgaatctgtcctgagtacattggaggacgcagtgaatgacgcgccaaaagctccagaatttctgggacgtatttttgggaaaatgatagtagaaaatgtgatgagtctgaaggagataggacggttaataggtgagggtggggaggaacctgggcagctagtggaaatagggctgggcggggatgttatgggaagcaccttggggatgattaaaagagagaaaggagaaagtgtgttgaatgaaattaggggtagctcctgtttgcggctggaggactttcggccttcgcatcccaacagatcaaggattttagaaacttttctttatttagcacatagcaaagtgtagtgaatagtgattgctccctttgattttggtagaagaaaattcatgtctggcctagcctaatctagcattgggttcttgttaagttccatgcttcttggctatgtctgaactttattattattatcgtcgtaatgcaaatattcacttcacaacaaagaaaaaaaaaaaaaaaaaaaaaaaaaaaaaaaaaaaaaaaaaggaaggacaaaataaagaaaaaaaaaataacaaaaaacagaaaaggaaagaaacaacgatagaataaaggatagaaaaaaaaaaaacactggcacgaaatattactggggggcccctttt

SEQ ID NO: 1990 - DNA, 357 bp, Gossypium hirsutum
  Clone ID: GOSHI-09MAY01-C39123_1
tcgtccacgcgtccgcggacgcgtgggcttgcagtttgttaggagccaagattctaatcgatgataatcccagatatgctgttgagtgtgctcaagttggaatcagagttctgctttttgattacgagaactcgtatccatggtgcaagacagagtcaattgataaacatcctttggtgactagggtaaataactgggaagaagcggagcaacaaatagctgcttggatttttagttctactatcccataggatgggctctatagagccttccactgcatatcattgggcattggttcttatgccccgaacattcgatgaggccaaaatggtggcttattgggtgattcaacccata

SEQ ID NO: 1991 - DNA, 580 bp, Gossypium hirsutum
  Clone ID: GOSHI-09MAY01-C39393_1
ccagaaacagaaaaaaaaaacacaatcaaatcggttgttggaaacaaatcgattcgtcgtcttttaatcatcacttaagttcaagtttaggaagttagatcattagaacttaaaaagggatttaattgattatcacaagcaatcgttgggagaaacaaaatcaatgtagaaaattgtgcttgcttcaatagaaatttgctccaaatctcgattctactacaacatcgataaacccaattcattatcggagcaaagaagctttgtttttgaatcttgaagacgtttatcatcttttcagttgatatgattgcatgagcatattgacggcgaatttggacggaaaatggtgaattttgatggaaaatacgaattttgacggaaaatacttcaaacgaagcagatgggttctggggaagggaaccctcatttcagtgtttttgatggagtgaagactttcccattaacacccgaagctctcatggccgatatcaacaccgctatcactaatctcgaatacgcacgtgccacggctttcctcgattccccgtcttcgtcattgtcgagaaacaaaagccttgat

SEQ ID NO: 1992 - DNA, 536 bp, Gossypium hirsutum
  Clone ID: LIB3828-021-Q1-N6-E4
attcatagaaagaaatacaaataattatgaaattaaattttgagatggagctatggaataaacgaactattgagagataacattacacatacgattcccacaatagagacatgttacagaaaaattcaggctcttacctatcctgactatatctaactcacttaaagattcgcagaaacatagagacggcaatcaggaattaaagctacttacgtgtttatcgtctcaatttgctccgtgattgttcccaagatttgccgattctaaactaaaagtgaagtcagccttgttcggaggaatcgacaacgtcgttgaattcaccgaatatattcgggcagccatcccatttcgcttgttttcttgattcccagtaaccacccacgtagcggaaggacccattttcactgtctctctgaaaccatctaggcttccacccattttcttgtagttttctagacattctctgcctcctctctagtcgttgtttctctgaatttgctctatcatattctccattctccaaatgacgttggtct

SEQ ID NO: 1993 - DNA, 437 bp, Gossypium hirsutum
  Clone ID: LIB3147-007-Q1-K1-E5
ggagaagctcccacccacggattctaggcttagaccagaccaacgtcatctggagaatggagaatatgatagagcaaatgctgagaaacaacggttggaaaggaggcagagaatgtcaagaaaactacaagaaaatgggtggaagcctagatggttccatcaagatagtgaaaatggatccttccgctacacgggcgggtattgggaagcaagagaacaaggaaaatgggatggatgtccaaatatatttggtgtattcgatgaagaatttgttgattcctctgaatgatcctgatttcaattttagatcaatattgagatggtctttccaggagacattcaaggtggatcatttggtgggggtagataatggaaaggtcaaagtgtaaaagtttaatgtaacaattataatatatatatatgtagggggggaattg

SEQ ID NO: 1994 - DNA, 619 bp, Gossypium hirsutum
  Clone ID: GOSHI-09MAY01-C39253_1
aaacaggttgcgggtttcaaaccaagcaaagatacagatttgggtggtttagcatgaggctgaagttggtcggaggtgactctgctggcgttgtaacagcttactatatgtgttctgagaacggggcagggccagaacgagatgaactggattttgagttcttggggaatcgaacagggcaaccgtatttaatacagacaaacgtgtataaaaatggtgttggaggccgtgaaatgaggcacatgctttggttcgaccccactgaagagtttcattcatattccattctatggaacaaccaccaaattgtgttttttgtggatgaagttcccataagagtattcaaaaacaatggtgatgagaaaaacgacttctttcccagtgagaagccaatgtatttgttctccagcatatggaacgcacatgaatgggcgaccagaggtgggtgggagaaaacacactgggaaagagccccatttgtgtcgtcttacaaggatttcagcgtcgacggtggccaatgggaagacccttaccctgcctgtgtgtccaccaccaccaagaactggtgggatcagtacaaggcttggcgtttatctgattcccagaaaatggattatgc

SEQ ID NO: 1995 - DNA, 803 bp, Gossypium hirsutum
  Clone ID: GOSHI-09MAY01-C34993_1
cccacgcgtccgcccacgcgtccgcggacgcgtgggcgaaagctgaggacttcccattttcttttactctaaagaacccagatgatttggctccgattctcctctagatgatcttaaggtctctccctccagatgcaatattttcataaagggttgactttgctgcaacgatcctaccctcctcatttctaacaagtaggcctgacgcagatctggagttctattaaccagagcccgcaacagaaacccctgcactgttcgtttgtcccttggctgagaacccagggcacagatggaaaacatggaaactatcttctccttcctgaccgcatctcgagcatcgatcctcagccatcactgtccgcagcttcagattggagaaagtgggaatgtagttccacgctattctccatactgtaatcttgatttttgagggcatatgtaaattccatagttttctgtagaaattttttgtatcggtctgtaaataaacactaggatcaattgtagctttctgtaatagtttataggcgctccttacggaaaagtcaccagttgcctcccctctccacacctggatgtcttcctggattgactttgacagcggaatctgtagtattttcctagcgatatccgagctaaagccattctcggcacccatagatcatcccatactgaaatgtggtctcctttaccaaccctccagcataatccatctgtcaagagtttttttgacgaccaaatactcctccaggtaagtgaaggtgagttactcagaggagcatttaagaattttgttctgg

SEQ ID NO: 1996 - DNA, 600 bp, Gossypium hirsutum
  Clone ID: LIB3829-018-Q6-K6-F4
tcggatttggtaccatttctcctctagagatcgaaggtctctccctccagacctgccactgcttccgccgtaaatggagatacgatatcttcatgaagggtcgactttgctgcaacgatcttaccttcctcattacaaacaacaaggcctgtcgcagatctggagttctttaagtcgaaggccgcataaaaaaggatgattaaccagagcccacaacagaaactcctgcactgttcatttgtcccttggctgaaaacccagggcacagatagaaaacatggaaactatcttctccttcctgaccgcatctcgagcatcgatcctcagccatcactgtccgcattttcagattgaaaaagtggaaatgtagttccaagctattctccaaattgtaatcttgatttttgagggtaaatgtaaattccatagttttctaaagaaattttttgtatcggtctgtaaataaacactaggatcaattgtagctttctgtaataatttataggcgctccttacggaaaagtcaccagttgcctcccctctccacacttggatgtctttctgaattgactttgacagcggaatctgtagtattttcct

SEQ ID NO: 1997 - DNA, 634 bp, Gossypium hirsutum
  Clone ID: AI731200.1
gctattccacccatttcaagcgtcgtcccatatactaaacgctgaagtcttcccatttcttttactctgaagaaacccgatgatttggcaccatttctcctctagatgatcgtgtctctccctccagacctgccactgcttccgccgtaaatggagaggcgatatcttcatgaagggtcgactttgctgcaacgatcttaccttcctcattacaaacaacaaggcctgacgcagatctggagttctttaagtcgaaggccgcatcaaaaaagatggcatttttccccctttgtgaactttgtctagacctcgcgctagttccctcgataaattgaccagagcccgcaacagaaattcctgcactgttcatttgtcccttggctgaaaacccagggcacagataaaaaacatggaaactatcctctccttcctgaccgcatctcaagcatcgatcctcagccatcactgtccgcatcttctgattggaaaaagtgggaatgtagttccacgctattctccatattgtaatcttgatttttgagggtaaatgtaaattccatagttttctgaagaaattttttgtatcggtctgtaaataaacactaggatcaattgtaaaaaaaaaaaaaaaaaa

SEQ ID NO: 1998 - DNA, 410 bp, Gossypium hirsutum
  Clone ID: uC-gsflmaxxa090a09b1
ttttgtagtatttatcctagcgatatcctatctgaagttatttgaagcacccgtgtgttatcccatactgaaatatggtcacctttaccaaccctccaacataatccatctgtcaagagattctttgacgaccaaatactgctccaggtaagtgaagggtgccacaaattcgccattgtactcctcattgctggaaaatgaacaatacttgcagttaaaaagcatcccaccaattgcaaaacttccgtttctctggctgaatcagatacaatttgtacttggaaaatatcatcttcctcctccggaagagcatcttaatgctatatatgggtcaccagatagttgcaatcagcaggacaaaataatttgcttgataaacagtgtaacatggtaatattggggtgaacttt

SEQ ID NO: 1999 - DNA, 373 bp, Gossypium hirsutum
  Clone ID: LIB3145-008-Q1-K1-H5
atcccaactagtgtttgatatgttttcatataataatttattcctatttgtccagagtaacgagagcccacaacagaaactcctgcactgttcatttgtcccttggctgaaaacccagggcacagatagaaaacatggaaactatcttctccttcctgaccgcatctcgagcatcgatcctcagccatcactgtccgcattttcagattgaaaaagtggaaatgtagttccaagctattctccaaattgtaatcttgatttttgagggtaaatgtaaattccatagttttctaaagaaattttttgtatcggtctgtaaataaacactaggatcaattgtagctttctgtaataatttataggcgctccttac

SEQ ID NO: 2000 - DNA, 578 bp, Gossypium hirsutum
  Clone ID: GOSHI-09MAY01-C34973_1
aaaagacccaattattagggtttcaaaacatcagatttttgaggctttccccttgcttttgcgatcactcgattgctactttccaccattgaaaccgatggatgatagctcaccatggagacgttttgttttcttactctaaacctctcccaaaagggtatggaggtgccagggaatggtgcttgcagaggcgtggggtggcaaatggcatgggggtgaccagggtttttccttttttgctgtttttttattattggcccgggctagagttagtggcctgagctgatgtaatttgggttcgggtatttgggttttgggccgggcataattaggcctgttcatggcttttatccatgttaccagagggaaaaaaatgactttttccagcttatttgagctttgcattggataatttaactcatcatatagggcccacttctccacatgatctatactccagcccgcactagtagctcctaatctacagaccaagttgccactctaatgctatgctggtcccaggttctggattggagcaaccgtatcattctcatgcaaagccatataaaaaagttgac

SEQ ID NO: 2001 - DNA, 586 bp, Gossypium hirsutum
  Clone ID: GOSHI-09MAY01-C34863_1
gaattggaaaaagaagattagatttgagagaatttgaagatggggaatgctctgagatgggtgtatagccattgctgcaagccaaccacagctggtgactcccaaggcaaggatggagtttcagctctttcccatgatctcttccaatttgatatcacctctcaggttcctgaagggctaagttatcacgtcgtttcatccaagaaagctcaggctaactggtatagaaagctattagatgcttggagagaagcaaaaccaccaccaaaaacacctgaggaagcttcaagccttgtcattcagacactgaagagacaccaaaaggcagatgtcgagggattattggcgtactatggtcttcctcagcagccttctgccagcgccacaacatcattgcctcaaggagttaagtttgaattgcagactttaccagtggacaccaaagcagtacctgatggagataccataacagtgtatgtaagtactacagatcccagggaatcattgaatgtaccttgagatgtccaatcggcagctgatcaaagatcgagagcccgtgctgccaagaactataccaaagctgatg

SEQ ID NO: 2002 - DNA, 500 bp, Gossypium hirsutum
  Clone ID: GOSHI-09MAY01-C34553_1
cccgcgcggccggtggaattgaacgcgtagatgtatctattgatggcggaaaaacatggatggaagccactaggtttcagaaaactggtatcccttacatagcagatggcataagcaatgacaaatgggcatgggtgctttttgagctaacagttgatatcccacagagcactgagattattgccaaagcggtagattcagctgcaaatgtgcaacctgaaaaggtgcaagatatttggaacctaagagggattcttaatacttcatggcacagagttcatgtccgcattggccactcaaatatgtaaaacgaacccgaatggaacagttaaataacttggctagcaacctgaaatgtgaaccaaactctcttttaccatttggtttcgttcaaaacagtatcctctggctttaatttagtgagttctttgagggaacaagatagagttgttgaaagctttgcatcacagttccttttatatattgcatgatttcattta

SEQ ID NO: 2003 - DNA, 815 bp, Gossypium hirsutum
  Clone ID: GOSHI-09MAY01-C34503_1
ccccgcgtccgcccagcgtggccccgtctgggcgatctctatgaaatcttaggttttaaagcatggaccaatctatttctcaacagtcatctaatgctcttagagggtttcgagttcaagctccattggttgattctgtatcttgctattgtaaagtggattctggattgaagacagttgttgaggcaagaaaatttgtcccaggatcaaagctttgtatccagcctgatatcaatcccaatgctcacaagagtaaaagctctcgcaaagagaggagtcgagtccagccacctctcctccctggccttcctgatgatcttgccattgcatgtctgattcgagttcctcgtgctgaacaccgaaaactccgcctagtttgtaagagatggtatcaccttttggctgggaacttctttttttctcttaggaaaagtcttggaatggcagaagagtgggtttatgtcttcaaaccagatcgtgatggaaagatatcatggaatgccttcgatcctatccatcagctatggcagccacttcctccggttccaagggagtactctgaggcacttggttttggttgtgccgttctaagtggctgccacctgtacttgtttggaggaaaggatccactaagggggtcaatgagacgagttgttttctatagtgctcggacaaacaagtggcacagagcaccaggtatgcttcgaaaacgtcatttctttggttcctgtgtaataaataaccgcctttatgtggctggctgagaatgtgatggaattcataagactttacgctttgctgaaatttatgatcct

SEQ ID NO: 2004 - DNA, 1530 bp, Gossypium hirsutum
  Clone ID: GOSHI-09MAY01-C34523_1
cggacgcgtcccacccgtccccccactttattaagcaataaaaagaaagctataatggcaatcccattgtcctttctactgcttttccctctcttggctcccacatttgttttctcctcaccagttcaggaccccgagcaagtagtccaacaagtcaatgagagcataagaaatgctactatggcgaggaggagcttggggtttctctcatgtggaaccggcaatcccatcgatgattgctggcggtgcgaccatcattgggagaagaaccgtcagaagctagccgattgcgccattgggttcggcaagcatgccattggggggagagatgggtttttttttgtggtgactgaccctagtgaccatgaccctggtaatcctaaacccgccaccctccgatatgctgtcatccaagatgaacctttatggatcattttcgctcgtgacatgaccatcaagttgaaggaagaattgcttatgaactcgttcaagaccatcgacggccgaggcgtcagcgtccacatttccggtgggccatgcattactgttcagtacgtgaccaacatcataatccatgggatcaacattcatgattgcaagagaggagggaatgcttatgtgagggactctcctacccattacggccggacgccggggccggcccggggcggggtatcgattttcggaggcagccatgtttgggtggaccattgctctttgtctaactgcaacgatgggctgatcgacgccattcatggatccaccgccatcaccatttctaacaattacttgacccatcataacaaggtcatgctattgggacatagtgacacttacaaacaagataagaacatgcaagtcaccattgcctttaatcactttggagaaggccttgtacaaagaatgcctagatgtaggcatggatactttcacgtggtgaacaatgattacacgcactgggaaatgtatgcaatcggtggcagtgctgatcctacaatcaacagccaaggcaatagatttcttgcaccaaatgatgcagacaacaaagaggtgacaaaacatgaggatgcgccgcaaagtcaatggaagcattggaattggagatcaaaaggggatttgatgttgaatggagccttcttccccgcatccggaaccggggcttcttcaagttatgccaaggcgtcgagcttgggtgcgagcccgtcatcactggtgagctcactcccagcaggagcgggtgcactcgtttgcaagaaggggtcgcattgctagtgaaatggctaataggagtaaagataagaaggctggaacatgaaaattatcccaaattgtaattaaaaagaaggcagaattcatgtttctgtatattggtgaaataatgttgtattgttaagtttggaagatgtataatataagtgtacaaatactgaatcagcctgcttctgtgaaaccagaaaaaagagctgaaagaagtgtttgataaattgaaagttgagttctatcaatgaacttactcattattgattcaaa

SEQ ID NO: 2005 - DNA, 434 bp, Gossypium hirsutum
  Clone ID: GOSHI-09MAY01-C34483_1
gccacatacatgattctcgtgccgatcataggtgtttcggtgatgaggaatgcggaggggactctagtacgtgtagaagaagatcatgctgcatggctgcttactgcgggttgcggatccaatgatcactgaagagcaaaaccatgtattctttctagcatagacttatacattgaaatcacaaaacacaaaagtcaaaaagtatttcctcagtttgtaaactacttagatgaaacagaaaaagcaagcttagaaacacatgtagcacttgcaagataatatggatacgcattgtcacctaattttccttcaggaagtagctattaggctgccatattgtccctgaatccattatccaacaaatacaacctattgggcgacgctttgtcttttcttttattcattttttgaggtgtaatagtgcgtcgtcaata

SEQ ID NO: 2006 - DNA, 912 bp, Gossypium hirsutum
  Clone ID: GOSHI-09MAY01-C34473_1
caaacaccctcgcatactcaaaactattcaccagagccaccactgaaaacatggccgccacaaacgttgggaggatcaagttgggttctcagggcctggaagtgtcggcacaaggccttggatgcatggggatgtcagctttctatggtcctccaaagcctgaacccgacatgatagctctcatccaccatgctatcaactctggagttacctttcttgacacctctgatgtttacggtccacataccaatgaaatccttcttggtaaggccctaaaagatggtgtaagaaacaaggttgagttggctactaagttcggtatagattatactgatggaaaaagggaaatccgaggtgaccctgtttatgtaagggctgcttgtgaaggtagcttgaaacgtcttggtgttgattgcattgatctttattatcagcatcgggtggatacaagggttcccattgaagtcacgattggagaactgaagaaactagttgaagaaggtaaagtgaagtacataggtttatccgaggcttctgcatcgaccattaggagggctcatgcggttcatccaataactgctgtgcaattggagtggtcattgtggtctagagatgttgaggctgacataattcctacttgcagggaacttgggattgggattgttgcttacagtcctctgggaagagggttcttttcatctggccccaaaatgatggaaactttgtccgaaggtgactttagaaagtatctcccaaggttccagccagaaaatatggagcataacaaacgcctgtacgagcgagttaatgagatagcagtgaagaagggatgcaccccatcacagcttgcatttggcctgggtccatcacccaagggaccgtgtctgtcccattcctgggactaccaagatc

SEQ ID NO: 2007 - DNA, 734 bp, Gossypium hirsutum
  Clone ID: GOSHI-09MAY01-C34433_2
tttcccgcgtccgcccagcgtccggccacgcgtgcgggtctttgacaaagttacatccatttgtggtgtcctatttcctcttccaaaggaggaacgccgggctggcatcaggagggagttggagaaaattcaagtgcaaggtgatgacctttatttgccaactgctcctaataagcttgtgaggggcattcaggttgatagtggaatacccttacaatcagcggcaaaagttcctattatgatcacatttaatgtggttgatcgggatggcgaccagaatgatataaagccccaggcttgcattttcaaggttggagatgattgtcgacaaggtccgcttgctcttcaagtgatagctcttctaagagacatatttgcagctgttggacttaatctctatttatttccctatggcgttctcccaactggtccagagagaggtattattgaggttgtgcctaatacacgaagcagaagccagatgggtgaaacaactgatggtggcttgcacgagatttttcaacacgattttgggcctgttggctctcctggtttcgaagctgcacgcagaaactttataattagcagtgcagggtatgctgttacaagccttctacttcaaccgaaggatcgacacaatggcaaccttctttttgaccatgtcaggaggactgttcatattgattttcgcttcatcttggaaacatcacctggttgaaatatgccgttcgaga

SEQ ID NO: 2008 - DNA, 689 bp, Gossypium hirsutum
  Clone ID: GOSHI-09MAY01-C34433_1
cacatattttaatatggcatctgcagggtgagacatgtgatcttgggaaagatgcaagtggaaagaatagtgcatttctagaactgttaccaattgttcgacaacatattattgatggtttcacgcccaaggcccttgatgcatttcgaagagaatttgagttctttgacaaagttacatccatttctggtgtcctatttcctcttccaaaggaggaacgccgggctggcatcaggagggagttggagaaaattcaagtgcagggtgatgacctttatttgccaactgctcctaataggcttgttaggggcattcaggtcgatagtggaatacccttacaatcggcggcaaaagttcctattaatgatcacatttaatgtggttgatcgggatggcttgatccagaatgatataaagccccaggcttgcattttcaaggttggagatgattgtcgacaagatgttcttgctcttcaagtgatagctcttctaagagacatatttgcagctgttggacttaatctctatttatttccctatggtggtctcccaactggtccagagagaggtattattgaggttgggcctaatacacgaagcagaacccagatgggtgaaacacctgatggggggtcggatgttcccggatattgctgtggtctctaatcgagttccgcagaccttataat

SEQ ID NO: 2009 - DNA, 539 bp, Gossypium hirsutum
  Clone ID: GOSHI-09MAY01-C34743_2
agatgtggcaaaacttggccgtcgttacggtggggggagctgtaaaaggggtacactccaggcatgagggcgtaccagagtgcaagaaaaaccgagacttcattgtctaaatgtgcactcatggcaagaatgacaacaaagatctcttgtgatgagaacataagttctcccggttccggtcgtgtttcgagggaagacgaaaacggtcaaagtacgggtattattaagaggaagaacgataacagccttaattggaagtggatcgccatagccgggaccgtggcgctggctttcggacttcgctcgggcgtagttggtaaggcattgttagttggagcagggcagagaattggccgacggtgagatttcttttttctttggtctttttacatttgataacatttgtggtagtatctggtttttttttttaaaagattctaaaacaactgcttcacattaaaaatgcactgattctcattgtttcagaagaatttatttaatacgataagatacgtaatgaataaatagaattattatat

SEQ ID NO: 2010 - DNA, 743 bp, Gossypium hirsutum
  Clone ID: GOSHI-09MAY01-C34743_1
cgcactccaagtggttagggatttcttctgggatgatgaatttcgaccaaattgggatactatgcttgcatacttcaaaactttggatgagtgcccttgtacgggattaatgattgttcactggataagaaagttcccatttttctgcagtgatcgagattatataattggtcgaaaaatatgggaggatggaaagacttactattgtgtgacaaagggggtaccatatcctggtttgccaaagcgtgataagccaagacgagtggagctttacttttcaagttggattattaggcctgttgaccctcgcgtccggcgacggacagctatccgcatgcgaaggggctcttgtacattacgaagacatggggatcccgaaagatgtggcaaaactgggcgttcgtcacggcatgtggggagctgtaaaaaaggtaccactccaggcatgagggcgtaccagagtgcaagaaaaaccgagacttcattgtctaaatgtgcactcatggcaagaatgacaacaaagatctcttgtgatgagaacataagttctcccggttccggtcgtgtttcgagggatgtcgaaatctgtcaaagcacggatattattaagatggtgtatttttttatccttatttggtgtggcattttatattattatctatatgaatatgtttatttattatataatattcttcttgaattattattttgttatcttcaaattcttagtctatgtatattta

SEQ ID NO: 2011 - DNA, 547 bp, Gossypium hirsutum
  Clone ID: LIB3585-018-P1-K1-B5
cggacgcgtgggcggacgcgtgggcggacgcgtgggcggaaactccaatcaatggcgcttgattctaagttgattgacgacggacttgcggctgacaacactctccaagctatctgctataaacgtggctccctccagttgcttgaccagagaaaacttccattggaaacgatgtacttagatattcatggttcaacagatggatggaacgcaatccgagatatggtggttcgaggggctcctgctattgccatagctgcagccctttcactggcggttgaagttgccaacttaaaggactttaatggcggatcgaaggatgccgcttcttttcttgaatcgaaattagaatatcttgtctcaagtcgaccaacggctgtgaatctttcggatgctgctataaagcttaaagaaattatatcaaaggctgcttctactgttacagtgcctgagagtgttttccaggcttatatagaagctgctgaaatcatgcttgatgatgatgttgctactaacaaagcaatcgggtctcacggtgcaaattttt

SEQ ID NO: 2012 - DNA, 486 bp, Gossypium hirsutum
  unsure (1)..(486): unsure at all n locations
  Clone ID: LIB3585-030-P1-K1-C10
cccacgcgtncgcccacgcgttcgcaaaaaaaaaaaggatctgtagcagtaacaaacagagctaaaaaggtggctgcgatcccattccgttcatttcatcaattaatcatctcggaaactccaatcaatggcgcttgattctaagttgattgacgacggacttgcggctgacaacactctccaagctatctgctataaacgtggctccctccagttgcttgaccagagaaaacttccattggaaacgatgtacttagatattcatggttcaacagatggatggaacgcaatccgagatatggtggttcgaggggctcctgctattgccatagctgcagccctttcactggcggttgaagttgccaacttaaaggactttaatggcggatcgaaggatgccgcttcttttcttgaatcgaaattagaatatcttgtctcaagtcgaccaacggctgtgaatctttcggatgctgctataaagcttaa

SEQ ID NO: 2013 - DNA, 398 bp, Gossypium hirsutum
  Clone ID: LIB3145-005-Q1-K1-C1
tcgaattaaatttaaccggaacttcattaaaattttattaaatggaattttaattttcaatggagccacttataaaaactctatttttgctatttaatacggacaaatttaattacatcatttatttcaatatgaccattcttttgaaaacatgtacttagatattcatggttcaacagatggatggaacgcaatccgagatatggtggttcgaggggctcctgctattgccataactgcagccctttcactggcggttgaagttgccaacttaaaagactttaatggcggatcgaaagatgccgcttcttttcttgaatcgaaattagaatatcttgtctcaagtcgaccaacggctgtgaatctttctgatgctgctataaagcttaaagaaatta

SEQ ID NO: 2014 - DNA, 338 bp, Gossypium hirsutum
  Clone ID: LIB3582-009-P1-K1-A10
cgaaaatttcaatcaatggcgcttgattctaagttgattgacgacgtacttgcggttgacaacactctccaagctatctgctataaacgtggctccctccagttgctggatcagagaaaacttccattggaaacggtgtacttagatattcatggttcagcagatggatggtaatgcagtggttattcctatgaattgggattttgttttttgaattgtattgaattaagcaaactcgatttgagttattttattttgacggagtttttaaggaacgcaatccgagagatggtggttcgaggggctcctgctattgccatagctgcagctctttcact

SEQ ID NO: 2015 - DNA, 802 bp, Gossypium hirsutum
  Clone ID: GOSHI-09MAY01-C34613_1
ttctgcttgaaattttgcaccatcagggactcgtccgaccagttaatcccttctgtttcggttattcgcttctgttgctaaaatatgtgctaagctatttgtagatctagggatatgctcaaacttgcattctttaaaataaaacgaaagctgatggatgtcatggataaacgcactcaccactgatttatctgggctttttgctttgcacttttttattattgatagagaatctccttcgataataactctttcccactgtttgtgaacgccgatttggagagctttccggcacgccattgcttccgctccaaaagctgaggagaccctttgatgaacctccgaaaaagataagagaactaaaccctctttgtctctggctacaactccaatagccgctttattctgtcctttttcatatgctgcatcaaagttaattttgacaaagttatcctctggtttttttccattttgtaacaatagatggagtttgtctactattttgtgcaaccgattctaactctaaaatgtatctgttaacaaatcttcctatgtcttttccagatttacaccctttattatgcagtctgttattcttatcaccccagatggcccatacagcaacacagaagggcattaacgaaaaaggtgatccatagattcaggtccagatccacaccgaggacacactgaaaagattgttagtcttctaagaagcatattaacccaagttgctagaaaattccaagagatcttccaaactgtaatttttatttttgaaggaagatcaagaagccatagc

SEQ ID NO: 2016 - DNA, 555 bp, Gossypium hirsutum
  Clone ID: GOSHI-09MAY01-C34623_1
cggtacattcccgattcaaatcaatcaaacaaattcccctgatattttcttcctccaccttccggtttcgttatatatatttcatgttcaatccttttcatgcttggattaacaccatcatcggttttaagttttcagcactcgttcttaaatatctggttgtttttctgttgggaaaaaaaagttgggtcggtgatgatggagggggaacctgctttaccttcttattataacgttctgggggtcaaggttgatgcttctattcaagatatcaagcgtgcttatcgaaagcttgcaatgcaatggcatccagataggtggacgagaacaccctctctattgagtgaagctaagcataaattccagcaaattcaagaagcctattcggttttatcagaccagaggaagagaactctgtacgatgctgggttatatgatcctgaagatgaagaggatgagggtttttctgattttatgggcggaatgatctctctcatgtttcaaacgaggaaagaggtaatacatttggcctacattttaaaaactccatttttt

SEQ ID NO: 2017 - DNA, 340 bp, Gossypium hirsutum
  Clone ID: LIB3148-003-P1-K1-A2
cccacgcgtccgaaggtagagaagacatgttagctgttataggcctaaattctcaaaaggactcgactttggaaccttctcatcagttacagcaaagtcttgtactgcactcagacttcagtgccaactccaacgcatgtcatggttttgggtgctattgattttcttccaaaagaggccaagttggcggatagttcaatcgctttacattctggaaatgcaatggctgtggagcctgaaatggtgtcacatgcggtggcaactaaagtcgggcttcagcggagttcctataatgaaccgaatttccttccatttgcccctgatcttaatgtgagatttc

SEQ ID NO: 2018 - DNA, 245 bp, Gossypium hirsutum
  Clone ID: LIB3135-014-Q1-K1-H1
cgtccggccacgcgttcgcccacgcgtccgcccacgctttcgcccacgcgtccgctttgtctgaaaagactacagtgccgactcaaacacatgtcatgatttctggtgctagtgattttcttccaaaagaggccaagttggccgatagttcaatcgctcttacattctggaaatgcaatggctgtggagcctgaaatggtgtcacatgcagcggcaactaatgtcgggcttaagcggagtttcta

SEQ ID NO: 2019 - DNA, 386 bp, Gossypium hirsutum
  Clone ID: GOSHI-09MAY01-C34143_1
acaacctaaatccagtctggaacgaaagcctaatgttgtcaattccagatagcattcctcctttgaaagtgattgtgtatgataaagatactttttcacatgacgattttatgggggaagcagagattgacattcaaccgctggttgctgcggcttaagcccatgagcgttcagagattcacgaatcaatgcagctagggatatgggttgcgagcaaagacaacacccttgtaaaatgaccgtataattaccgtgacagatgggaaagtaaaacaggatatctctcttcggctacataaggtagagagaggggtgctcgagattgagctcgaatgtgttccacttactcaatagctcgtaaaagggaggaaaaatagtcaggttca

SEQ ID NO: 2020 - DNA, 707 bp, Gossypium hirsutum
  Clone ID: GOSHI-09MAY01-C34173_1
tcgtttactcggatatgtaggataggtagtcataataagaatcagtggccggggagggtaggaggtggcaaatcaaggtgccaagaagcgcatagaagagaacacccgccacatggccaatcttcgccgcctcatcattgcttgtaatgttgtatacgtcttggttaggatgctgatcttccattcctcattcacatggaaacattgggttggtctacttttgacctctgtggcttactttataccctatcaacaactttcacagatggcaaaacctgcttattctgatgatggagaacttcttgacggtggatttgatatgagtactggtggaatatgtggctatttacatgatgtcatctacattacaagttttgtgcaactgatgtccatcatctctgacaagttttggtatacatatcttgtgatcccggcatttggagcatacaaatcttttgggttcattagaggttttctatcattaggctcagagggagaggtggaggatgaaaagactcgcaagaaaagagaaaagatggaaaagaaggcttcaaggccaaagttggtcaagacaaggaataggtgagtttaacagtgaaatgaagagagtaagcacttggctgaaagtagttcatttgataatttccgatatttctttgaaatttgaaaagttaagaccacagtttgaggaaagcatgttgtagtgg

SEQ ID NO: 2021 - DNA, 599 bp, Gossypium hirsutum
  Clone ID: GOSHI-09MAY01-C34163_1
cccacgcgtccggtacggagttgcgtcagctgtagatatagactaggctaagggacggagccttccactgtagaccgggactacgcaaaggtagaacaccatagaaacttcgcttactttctcataaaccttgattttgctacgaaaaataagaacccggaatagcggaaatcggttcgtgttccgctttcaaagtaagttgtctttgcccaagtgtgaactgcagacgactctccagtggttccatttccttcttactttacttttgggtcaacccaacccgaatgggaataagagggtcagccaaacagcgggcagctccactttgtacattttctgaggcagaccaatcaggtttagaaaagggaggggaacttctcaccgaagcgaaggaggcagtacgaatgaaggaggcgggaagctaccgcttctagaatgcaagcttatccttgactttttttagagaaaaaaaaaaaggtttttggatgaacgaattggagtgacaaatggttacggttgcggaaaccggagaaagtcgggaaccgtcggttcacttttgaatcaaatagcgacgagccgaggactacgactacaggggg

SEQ ID NO: 2022 - DNA, 792 bp, Gossypium hirsutum
  Clone ID: GOSHI-09MAY01-C34103_1
gtttagtggtaacgagtggagtgcataagcccctttagagagaggggcgagcagcaagcagacccttgtatagggttccaaacctatcttactaataataagaaaggggcaagccaaaacctactcctaacaagttgctggcttttcagccgttgcgcgctagcgcgcttctgtttttcagcaggcttcttcaaatatcccaaaaaagtaggggttataactaaaagtagctagctagcgcgctagcgttttcccttactagtaaaggcgctgctagttgtagcgcgcagtgtactagtgaataggaaaagcggattgatattactaatgacagatggaggttgaggatagaacatgttcggtgcctcgcccttgtctccttcgccggagactcaaaatgataggaatcctatcgataaagaagaggcataggcatcgcctctcgatccaatccgtcttccctggcctccccaacacactcttgatacgaaataaacctcccgccatagagaagagatctaaagtctgggtcccctcgatcacccttcccttgaacctgaactggtcgagagagatgaacccgcaccacattttttaaccttcgaaccgaaacccccaactagagatgtaattccataacctaaacaactcagttgagagctccgtgactggttcaagggaaggtccaccaataattgataggccagagggatgggctcattcgactaatcagagagccctggccctacctaacacagagatgtccctgaaataggggaatagttgatcgga

SEQ ID NO: 2023 - DNA, 586 bp, Gossypium hirsutum
  Clone ID: GOSHI-09MAY01-C34123_1
ttcttcgcgtccgcccacgcgtccgcccacgcgtccgcccacgcgtccgcccacgcgtccgcccacgcgtccgcccacgcgtccgcccacgcgtccgcccacgcgtccgaaaaaaaaaaagaagcagaagaagaaagaaaagattaaagagctttgcaaaaatggtgcttcaaagattggagatgtgcgttgaattgatgaaactagccgtagagttcgtcgtggttgtggccgaagcagtcggaatagtcattcatcaaaaccactcgccgccagtaatgacggctagccggtccttcgctactccggttcccttagtcgggtttcttccttgctgatcagtttcaattttccgaatttttcttcttctttccttttcattagagaaaatgatcggtttgaatcctcttctaatttttgctgttgttgctttactagctacgtttgggaatttgaatgtgtaaatttaggctaatcatgtattttaaggactggagaagtctattttctatttgaatttctaagataactcccctttcaacaaccaaatattttgcgcctttactgatttcaattttaatcttat

SEQ ID NO: 2024 - DNA, 493 bp, Gossypium hirsutum
  Clone ID: GOSHI-09MAY01-C34393_2
cccatgcttccgcccacgcgtccgaaacaagaacggggggttttttgattcctgtttggacaacaaatggggttacagttctcgtgtgattgatttgatcgttcacatggcatccaccaaagcatgttgaagtttcttctgaaggccagtgaagaagttgtgtttctggtctaaagaatatgaggtgtttgagagaagcttcttgttatatggaataaaaaacccaatgattttaccccttcttgcatgtttacatttctgcggttttgaaggtgtagtgaacaagtttaccagtttgatgttatgaagtaaaatggtgtttatacatcaatcaaattagtgctgtcgtttttttcccttttaattggtgctatttgctttcaagtttacccaattgtatgagaagggatatgggttttcgaatgatttggggcaacccattcggttttttcagtattgcagaaaatatgaatcagatatgaatgttcattaa

SEQ ID NO: 2025 - DNA, 646 bp, Gossypium hirsutum
  Clone ID: GOSHI-09MAY01-C34393_1
gatctccccgttaggcttgagaaatttgcatcttatgatgagatgaaagccgctatcaaggaagagtttgagggcaagcttaagggcattttgggttaggttgaggaagattttgtgcccactgccttcgttggtgacagcaggtggagcatatttgatcccaaggcaggtattgctttacacaagacctttgcgcggccggtttcctggtaccacaacgaatggggttccagttccccgtgtggttgatttgatcgttcacatggcccccaccaaacgcatgttgaagtttcttcaggcccagtgaagaagttgtgtttctgatctaaagaatatgaggtgtttgagagaagctctcttgttatatggaataaaacccccaatgatttccccccctctcgcatgttcacatttctggttttgaaggtgtagtgcacaagttccccagtttgatgttatgaagtaaaatggcgtttaccctcccgaaaaaaatataattaaacgtttttattttgttaatctaaaccttatttatcttaatagattagtctggtgttttatttttcgatggattttctgttttcatttccattgaagattttagatattgaagtttgggggtgcctttttttggggttttaatttt

SEQ ID NO: 2026 - DNA, 295 bp, Gossypium hirsutum
  unsure (1)..(295): unsure at all n locations
  Clone ID: LIB3148-015-Q1-K1-B10
ttccaccaaagcatgttgaagtttttttttgaaggccagtgaagaagttgtgtttctggtttaaagaatatgaggtgtttgagagaagcttcttgttatatggaataaaaaacccaatgattttaccccttcttgaatgtttacatttctgcggttttgaaggtgtagtgaacaagtttaccagtttgatgttatgaagtaaaatggtgtttatacatcaatcaaattagtgctgtcgtttttttcccttttnaaaaaaaaaaaaaaaaaaaaaaaaaaaaaaaaataaatanat

SEQ ID NO: 2027 - DNA, 795 bp, Gossypium hirsutum
  Clone ID: GOSHI-09MAY01-C34313_1
gccatggcaatgtcgttgccggtaataacaactaattggtcagggcctactgagtatctgacagaggagaatagctatccattgccagtggaaagaaagagtgaggtaacggaaggaccatttaaggggcatttgtgggctcaaccgtcagttattaagcttcaagctcttatgaggcatgtgatcagtaacgtggaggaagccagggctaaaggtaggcaggcaaggaaagacatgatcaatagcttttctccggaaattgttgcagagattgtcacaggtcatatacaaaatatacttgacaaataggatgatgtatgggcattgctcttctggttttgagatgatgtttacaggtggagatatgatcagtaagtggtgattttacaagagtttgcttgtttaacaattaaacttaatgcttgtcagttcagtttggaagcataccaattaggcacattagaaccttcgttctcccatctagctggtcgaatcagttcagttgaggccaatccataacaatatgcaaatgtagtctgcttcatttaatggctgttcatctttgtggtgtaacatttttgccattcctttgataatgcaaacccgtcttatattgtacccgtattacatgtgttcgtacttcatagcttgtacaagtttctaactgttaaaatgtccattggaacttaggagacaaattcgaatatagttattcattaatgttctttaactctagataaaaaggagctatcttccaagccatttacatgggaaatgttcacgaaatgaatgggg

SEQ ID NO: 2028 - DNA, 289 bp, Gossypium hirsutum
  Clone ID: LIB3135-019-Q1-K1-E12
ccacgcgtccggtcggggacgcttctttgaaattgctgacctatccactgtccacgggaggacagtggagcggtgcgtgttttagtgaggtggattgctattcattgtcaggcgagagaaagagtgtggtaaccgatgcaccatttctcgggcatcttaaggctcaaccggcacttattaagcttcaagctcttatgaggcatgtgatcagtaacgtggaggaagccagggctaaaggtaggcaggcaaggaaagacatgatcaatagcttttcttcggaaattgttgc

SEQ ID NO: 2029 - DNA, 304 bp, Gossypium hirsutum
  Clone ID: GOSHI-09MAY01-C34243_1
ctctgaaaaataagaaatgccattctggcattgctgctgctgtcaccgccactgctgccagtgccggtggtggcgaactctaaaaccgtttctccaacctattattgtacatttgttgggtgattattctctttgaatgacttgatttctgcctcctaaatagcccctgccattattggtttcttgaattttaaaactattcttttctcttgatttctaagactaaaagtatttgtttggtttaaaaaatattataatataattttgtattataatttctttttattttaatttattaattggt

SEQ ID NO: 2030 - DNA, 702 bp, Gossypium hirsutum
  Clone ID: GOSHI-09MAY01-C34223_1
gtctcgtctctcaccttagctccagtgatcacaatctttgagaacatatatcctgtacttacagagttcagggaaaaaccagcaatgaagaatgttgtggatcagacagaggcgagatccacaacattcttcattgctggcaaataataccttggaatgggaactgccttttcagatataatttggtggcaaaacacaaccttcctcgacttgtttgtggatattaggttttcctctgccatgttcaggagttggatttcaagtatgaatatacaatgaatagagattggcaaagtaaaggaggggagttggatacatcggaccgttacctggctttttggctgtggttgtcatatggggtttcctttcccttaaagtcagtgtggtgcttaaatgcttggcatatgctgtaattagtaaattcggaaggaagaacaaactggaaaaaagaaaatggaaggaacaacttgaagattatatgttggagacattttgctttatattaaaagtaataataacttaattaaagttgtggcccttaatggtgccttttttattgctcattctgttgttgtcttggcttatatggatttgtaaattgatgctgtaaaatgcagggaaactgtaaatgaaagtatatttagcctgttagtgacatgatatttaatgattatgaaatatatgtacaactgttttttgctt

SEQ ID NO: 2031 - DNA, 432 bp, Gossypium hirsutum
  Clone ID: LIB3146-053-Q1-K1-F4
cgaatcccgggcgacgacgcgtcgtcttatttttggtaggaaagattggatcactggagctaggtgagagacgagacatgcgcagcctttgagaacatatatcctgtacttacagagttcaggaaaaaccagcaatgatatattttggtggcaaaacacaaccttcctcaactcgtttgtggatattaggttttcctctgccatgttcaggagttggatttcaagtatgaatatacaatgaatagagattggcaaagtaaaggaggggagtcggatacatcggatcggtacctggctttttggctgtggttgtcatatggggtttcctttcccttaaagtcagtatggtgcttaaatgcttggcatatgctgtaattagtaaattcagaaggaagaactaactggaaacaaaaaaaaaatggaaggaacaac

SEQ ID NO: 2032 - DNA, 664 bp, Gossypium hirsutum
  Clone ID: GOSHI-09MAY01-C35943_3
ccctactctcctctcttccaaaccaaatttctgacgcaatgagcagatccggccaacctccagagctcaaaaagtacatggacaaacaactccagatcaagctgaatgctaatcggatggttgttggtacacttcgcgggtttgatcagtttatgaatctagtggttgacaacaccgtggaggtgaatggcaatgagaaaactgatataggcatggtggttatcagaggaaatagcgttgttactgttgaagcacttgaacctgtaggcagaatgcagcgattcggttttttctactggaaattccggaatcacttgatggtatctggtggttggataacatagatgctggcctcctagtttgtgatggactattaaatttagttaagaactcataggaactttagactgtttttggtggattctgctccttttccttctctggaccggattgattgcccttgagcattccgaatagggtgttaattgaatgtagagaagggtagtaacagtgaatacttaccatcttaaatgctcaggtctagagtgaaacttatggtgcatatgttaaagcttgtttctattcaaaaaaaaaaaaaaaaaaaaaaaaaaaaaaaaaaaaaaaaaccaaaatacaaaaaaccaaaaacccaaaaaaataataa

SEQ ID NO: 2033 - DNA, 830 bp, Gossypium hirsutum
  Clone ID: GOSHI-09MAY01-C35943_2
tgtttcatgagtaacgagccccccgtttcccctctttctcgctctcccgctccgcagtagaccaacctgccgtcactatgagcagatcaggccagcctccagatctcaaaaagtacatggacaagaaactccagatcaagctgaatgcaaatcggatggttgttggtactcttcgtgggtttgatcagtttatgaatctagtggttgacaacacagtagaggtgaatggcaatgagaaaactgacataggcatggtggtgatcagaggaaatagcgttgttactgttgaagcccttgaacctgttggcagaatgcagtgattctggtttttctattgatttatcactttgatgtatctcttcgctttgttgtttcaatggcatccctgctagtttgggattgggattgggatattttatgtaattgagaatttgtcggaagttagatgggtctccatggaatctgcttttcgtttctcaactttacccgatggattgccctttgtgcatttcaaacggatttaactgaatgtagagaatggttactgcaattcttatttttagtgcttaggcctcattgaaacttcggtgctgaatatgttaaagcttttattgttcttgttcttcaaaaaaaaaaaaaaaaaaaaaaaaaaaaaaaaaaaaaaaaaaaaaaaaataaaaaaaaaaataaaaaaaaaaataataataataaaaaaaaaatattaaaataaaaaaatataaatttaaaatataaaaagggggggcccctttaaaaatccaaatttaattccccgtgattgcaaattaataactttttttttggggccccaa

SEQ ID NO: 2034 - DNA, 618 bp, Gossypium hirsutum
  Clone ID: GOSHI-09MAY01-C35943_1
ctcctcccataaccctactctcctctcttccaaaccaaatttctgacgcaatgagcagatccggccaacctccagatctcaaaaagtacatggacaaacaactccagatcaagctgaatgctaatcggatggttgttggtacacttcgtgggtttgatcagtttatgaatctagtggttgacaacaccgtggaggttatcagaggaaatagcgttgttactgttgaagcacttgaacctgtaggcagaatgcagtgattcggttttttctactggaaattccggaatcacttgatggtatctcttccattctctggtggttggataacatagatgctggcctcctagtttgtgatggactattaaatttagttaagaactcataggaactttagactgtttttggtggattctgctccttttccttatctgtaccggattgattgcccttgagcattccgaataggtttaattgaatgtagagaagggtagtaacagggatacttaccatcttaaatgctcaggtctagagtgaaacttatggtgcttatgttaaagcttgttccttccttgagggttaatgctcaatgcgaattgattaaaaaaaaaaaaaactcga

SEQ ID NO: 2035 - DNA, 1139 bp, Gossypium hirsutum
  Clone ID: GOSHI-09MAY01-C35973_1
caacttgcatcagccatgttcaagccaattaagtcgcacgaactatggattcgacctccttttggtggtcgtggtagaaagctgacaggttcactggaagctcacacaaatggattcaggctttctactttaaggcctgatgaacgtgttgatgtgatgtttggaaacatcaagcatgccttcttccagccagcagagcgagaaatgatcactctggtgcactttcatttacataatcacatcatggttggtaataagaaaaccaaggatgtgcagttttatatagaggtgatggatatagttcagacattgggtggtgggaagagatctgcctatgaccctgatgagattgaggaagagcaacgcgagcgtgaccgaaagaataaaattaacacggacttccagaactttgtgaatcgggttaatgatttgtggggacagcctcaatttaaagcatttgaccttgaatttgatcagcctatgagagagcttggcttccatggggttccccataaagcctctgctttcattgtgccaacatcaaactgcctggttgagctaatagagactccttttgtggtgatcaccctaagggagattgaatagttaacctcgaaagagttggtctggggcagaagaattttgatatgactattgtattcaaggacttcaagcgagatgtccttcggattgactcgattccctctacatcactagatggcatcaaagagtggcttaataccactgatctcaagtactatgagagcagactaaatttgaattggcgtcctatactgaaaactatcactgatgatccagaaaagttcattgaagatggtggatgggaatttttgaacatggaagtcagtgattccgagtctgagaactcagaagagtctgaccaagggtatgtgccttcagatgtgcagtctgaatcaggatcagaggatgaggatgatgatagtgaatcgttggttgaatctgaagatgatgacgaagaagactcagatgaagattcggaggaagatgaaggaaagacttgggaagagttggagagggaagcgagctatgcagatagagagaaaggagatgattccgatagcgaggaagaacggaagagaagaaagatgaaagctttc

SEQ ID NO: 2036 - DNA, 644 bp, Gossypium hirsutum
  Clone ID: GOSHI-09MAY01-C35963_1
ggcttttggttttcacctcggttgcctcgaaggaagcagaggaagggattgcttaccaggggaagtacatattagaaaatgaagctggagatccaggggtaaagccaggctcatgcccgaatagaaaagaatcacggccactcaattcaaaaagcgcttctcttttcctcatgaattatttcccaagttacccggttgaaaccgaagcttgcaaagagcattcagcacgactagctgacatgatcggcacctgcttcaaagcagcagggagtatgatgccaaactttttagcagtcaacttctacatgaggagtgatggaggcggtgttttctatgatttggatagcatgaatggccaaagattatgtggatgtaatacaattgctgcttgccaggctggagcaccatttggatcttgcaagaacattacaatgccttcttcaagtccaatgaccaatactgccggaagcttttctggatctgttcaattctcgaaatccgcttcaacaatctattatcctaatcaattcgctatcgggttcttttctattccatggatgttgtttttattgtgactagaaatatagatagtttttcaggatagcatctacacttttactgagggcctataatatttcttagta

SEQ ID NO: 2037 - DNA, 403 bp, Gossypium hirsutum
  Clone ID: GOSHI-09MAY01-C35513_1
cccacgcgtccgatttgaagaagttgaacttcctaggcttaaggaagagaagccggggcgggctcacacccaatacaaggatttgatatggaaactatggaagaaatctccagacaatcctctaaaccagatgtccgagtgatcgatacaaaattttcctcaggtgtgtggggggttatctgataaactttatgtgcagtgtctgctaagtgctgaaaactaaataaaaaattatttgtagaataatactggctatctattattactgttcaagatcctatatatgtgtttagttagtttaacttggtttgttgcccactttcataaaagattgactgatgtacgcacagaggaatagtgcaaattactgattaattttctattataatgaaagttttacatt

SEQ ID NO: 2038 - DNA, 1172 bp, Gossypium hirsutum
  Clone ID: GOSHI-09MAY01-C35423_1
gatgaagtttatggtaaggctgagagtgaaggtgaagccgaaggaattgctgatgcacatgtgggaggagatgggacctccttgtcattctcggaacgttttctttttacagtgaagcctctttcaaagcacgtaccaccagctttacctgaagatgagaaatacaattcttgggttttttatgcaaatgacgatttctatgttcttttcagacttcatcaaatcctgtacgaaagaatactttcggcaaaaacaaatttagccggtggtgaaataaaatggaaacatttaaaagacaccggggcttcagatttatatgccaggtttatgagtgcattgtacagtctgctcaatggatcgaccgataatacgaagtttgaggatgaatgccgagctataataggaaaccagtcatatgtgttattcacattggacaagttgatatataaattggttaaacagcttcaagctgttgcagcggatgagatggataataagcttcttcaattgtatgaatatgaaaaatcccggaaacattggaagacaatggattcagtttattacgagaatgcacgtgtcctcctccacgaggagaatgtttatcgactgaaatgctcgtcttcgccgcctcgtttgtctatccagctgatggacaatgtcattgaaaagcccgaggcatttgctgtttccatggaacctaacttttcagcctttttgcacagtgactttctgtcggtctttcccggcaagaaggagccacatggcatcacactaaagagaaacaagacgaactacgcaaccctggatgaatttgctgctacttgcatggccatggaaggtgttgaactggttaatggtttagagaacaagatagcttgcaactcatacaagatctcttatgtgttggacaccgaagatttcttcttccgtaggagaagaaagtcaccgcaacgcagatcttcatacatttatcaggcaagagtacaacggttccagagatttttatctgcttcgcagtaattcaccattctttctcagaccggcataaatgcagcccttgctttaacccaaccttgaaaaggccttcaaaactgaaacatgtttcttgaatgttcatagtttgatgctaattggtcatactagtagtgaaggatgatgaatggttaggaaat

SEQ ID NO: 2039 - DNA, 536 bp, Gossypium hirsutum
  unsure (1)..(536): unsure at all n locations
  Clone ID: LIB3829-021-Q6-N6-G4
ggaacaatgattctttttttttttcttttacctttttccttttctttacaaattatcatgcaaattgcaaatcctatttacaggataattggtcagatcctgctcatatcatcttacaaatatgctacatttcctaacagttcgtcctttcttcagtctgagcatcgaccatgtttgaacatacacaaaacatgtcgttttcgaaagccttttggggtttggtttccaccaatgggttctttcgtgccgctgagagagaatgctaaattattgtgaagtggataaaaatctaaggaaccgttgtattcttgcctgattattgcgtgatctgcgccgtgatgaatttcttctacgaaagaagaaatcttcagtgtccaatacataagatatcttgtatgagttgcaagctatcttgttctctaaaccgttaaccagttcaacgccttccatggccatgcaagtagcatcaaattcatctagatttgcgnagntcttcttggttctctttagnatgatgccatgtgggtctttctttc

SEQ ID NO: 2040 - DNA, 488 bp, Gossypium hirsutum
  Clone ID: LIB3585-003-P1-K1-E5
tcgctccgacccggaatgacaggctggaccgacgccatgcgtccacatggcattacgctaaggagaaacaagaaaaagtatgcaagtctagatgaaatttgctggctacttgcatggccatggaaggtgttgaactggttaatggtttagagaataagatagcttgcaactcatacaagatctcttatgtgttggacaccgaagatttcttcttccgtaggagaagaaagtcaccgcaatgcagatcttcatacaataatcaagcaggagtacaacggttccataaatttttatctgcttcgcagtaattcagtattctttctcagaccggcataaatgcagcccttgctttaacccaaccttgaaaaggccttcaaaactgaaacatgtttcttgaatgttcatagtttgatgctaattggtcatactagtagtgaaggatgatgaatggttaggaaatgtaagcatattttgtaaaagttcatatc

SEQ ID NO: 2041 - DNA, 332 bp, Gossypium hirsutum
  Clone ID: LIB3145-014-Q1-K1-D6
gcgaaaacaaattcaacaggttctgaaataaagtggaaaattccaacagaggcgactcctacagaattatatgccagatttatgagtgaactgtacagtctgcttgatggatctgctgataatgctaagtttgaagacgaatgtcgagctataataggaaaccaatcatatgtgttattcacattggacaagttattatataaattggttaagcagcttcaagctgtctcagcagatgatatggatactaagcttctccagttgtttgagtatgaaaaatcccggaaacatgggaagacaatggattctgtttattatgagaatgcacgtgt

SEQ ID NO: 2042 - DNA, 763 bp, Gossypium hirsutum
  Clone ID: GOSHI-09MAY01-C35763_1
ctgactggcatccttttaaacgcattaagcttgaatgaggagaagaaggttaggaagtgattgatgatgaagatgaaaagttgagagatttgacggatcatatgggtattgaagcgtataagtcagttacttcagccataaaggaaataaatgaatacaatccaagtggaaggtacataatttctgagttgtggaattacggagaaggaagaaaggcaaccctgaaagagggtgttacattcttactgaagctttgggacaacgctaaacgcaagcgaggaatgacctgaaggtcgctaatttgtttttcaggaaataatttgctgactgcctataaggagcagtacccgtggggggggggggaaagcaaaggatgcatctccataatatcggattaggtttgccgagtgtagtgtttaatgctgtctttattgttgtctgtgttctacataattgaattccatgttaaataatattcagctcccaagccaggaaacaggttccttactgggaagaaactgcattcatgtaacatttagaattcaagctcatgtcaactaagaactgcttatgcagtatagtttacagattaggctcatgtccaacttgaacttcctttggtaacgtgggagtcgagtcatgatgcagccccgcaaacagggacatgtttttaatatattgtattgtgtgttttaagttaacctcgacactcactcatttttttttaaaatttctggtttatcaattattttggtcctccgat

SEQ ID NO: 2043 - DNA, 889 bp, Gossypium hirsutum
  Clone ID: GOSHI-09MAY01-C35693_1
gaaaagaaaagaaaatggaggtcggtgaatgcattgcaacagaagcacccaaggcaccggtgactaaggaaagaaagatcggaacggacttggaaaaatatatagcaaagccatatgtggcaagagcactgcaagctccagatgtgggaaatcccgatgggacaaaaggatatccggacaatggaatgactgttcttcaacaacatgttgcctttttcgatcaaaacaacgatggagttgtttatccttgggagactttcaaaggtattcgagatcttgggttcgatccattttcctcttttgtcataacttttgtaattaatgcagcatttagttatcgcactctcccggggtgggtgccaaatccgttacttccgatatacatagagagaatacacagagataagcatgggagtgattcagcaacatatgatactgaaggaaggttcatgccagtgaacctggagaacatgttcaccaagtatgcactcacaaagcccgacaatttatcactcaaggagttgtggcagatgactgagggaaatcgggccgctttcgactatcttggatggttggcatccaagttggaatggttgttgttgtattatgtagccaaggacaagcagggttttctgtccaaagaagctgttagagggtgttttgatgggagcttgttcaagaccatttccaaaatgtacaaggactcagatagaaagagtaaataaaaacactacccatcacctttcatttcctacttatatcccaaaataaaggatttgtatttgataccatatttatgcttacgttcatacattaaactttaaccaatactgcgtaattcattgtttctatttttatatcccccaaataaaagtatgtatttgatacc

SEQ ID NO: 2044 - DNA, 384 bp, Gossypium hirsutum
  Clone ID: LIB3145-048-Q1-K1-D4
cactttcgaaattgataagaattcaattactccgtgttttttagagagacagaatttgctaaggctagagaggtgtttttaccaaattggtgtatgaaactaaattagtcatacatggtgatactgttaatgcatttcaaaggggtgggtgccaaatccgttacttccgatatacatagagagaatacacagagataagcatgggagtgattcagcaacatatgatactgaaggaaggttcatgccagtgaacctggagaacatgttcaccaagtatgcactcacaaagcccgacaatttatcactcaaggagttgtggcagatgactgaaggaaatcgggccgctttcgactatcttggatggttggcatccaagttggaatg

SEQ ID NO: 2045 - DNA, 800 bp, Gossypium hirsutum
  Clone ID: GOSHI-09MAY01-C35653_1
agagcagcatataatttctgggtcaaatatacttctggtacagacactacactttgcggatcaagcaaaaactgaggcagctatcacggagcttcttgttggccttaattacgtgtataggattggcggagcccacaatgacaaatctttgccagaatctgctggcaatggctgtgcccaatatttgctcaaaagggatgacaagagatgacactcaacttcgtgaagcatttatgaatgccaccccgagacttgttccaacatccacaacgaggaagaagtcaatcccatcattaaggtactacatcgagttttatgtgaaactcgtcgtatcttatttcggagcaagcctttgttaatatatatatatactcatttgaagatgatagatctcttttatcagttaatatagtttttgtaagccccacatgttcagtatgtttttgcagtttcactgctgttagtccgttgttttgaaatcaaaaagagctacggtgacattgatgttgtagggttgataagttggctttgttttccctagccatcagaattagttctgtttttggttcttcaaacaacttttactcttgcatacggtttttcagtcttgcttccgatggtttgagcaaggtcccgatcaagtggagtgatgttgctcccaagcttataaaggtatgaggcggtgtcatggaacactcctatgagacctgggaacggtccttggctcatgaagggagtgatgtaaggtccgaacttaaaggctgcatgatcgtgaagttgtagtctcggtacatgacaca

SEQ ID NO: 2046 - DNA, 435 bp, Gossypium hirsutum
  Clone ID: GOSHI-09MAY01-C35663_1
cccacgcgtccgttttgtttaaaaaaaaccctcatgctctccaatctctcactctccccttgcttcctcgccgaaatactagcaccccggccctccgttcgcgcccagcgaaggccctccgacagtgactccggtcgtgaagatgtggatgcgaacgtggagcagggcgtgcgtgcgtgacgggagtgatcgtggctgaaggctatggtgcgactgaagcttttagggatttaggatttcagttttctgattgtttaggttagagcatgagtattgggcttacgtaaacgggccaaaattatttgggttattttatgcaattgggctggttaaaaaaattaggattggctgtttttggttttattttttgtatatgtatgggcccgggctaaaaaatgggtctacatccatcaatcgaggtgtctcccctccgtg

SEQ ID NO: 2047 - DNA, 431 bp, Gossypium hirsutum
  Clone ID: LIB3145-017-Q1-K1-D2
cccacgcgtccgtaaacacttaaaaacgaaggcttttataaccaaaatacaaacagtttttagctatttttgctcaacttgcaggtcatgaagatgtggatgcgaacgtggagcagggcgtgcgtgcttgacgggagtgatcgtggctaaaggctatggtgctaatgaagcttttaaggatttaggatttcagttttctgattgtttaggttagagcatgagtattgggcttatgtaaacgggccaaaattatttgggttattttatgcaattgggctggttaaaaaaattaggattgctgttttttgttttattttttgtatatgtatgagctcgggttaaaaattgggtctacatatatcattttgctattcactactttaaagatttttattcatgtttctttactaatttcaataaataaggcaatg

SEQ ID NO: 2048 - DNA, 558 bp, Gossypium hirsutum
  Clone ID: GOSHI-09MAY01-C35633_1
tttttatagaagatcatacaagtttattagacaaagaagtgaacaagcaaatatgaagggttgtaaaaggttcgtgttgattgctgttggaggtcttggatcttgggatgagccactgaattctggtgaaatctatgattctttatcaaataaatggagtgaaatccagaagctgcctatagactttggggtcgtttgtgctggtgttgtttgtaatgggatgttttatgtttgctctgagaatgacaagttagcgggctatgacatagaaagaggtttctggattggaatccaaacctctgcatttcctccccacgttcatgagtactatccaaaacttgtttcttgtaatggttccttgtttctgctgtctgtctcttggtgcgagggagatgggcatattggtcggagaaacaaggccgtgagaaaattgtgggagctagatctgatgtatcttacatggaccgaggtctcagtacaccctgatgctccaatggactggaaccctgtttttgttgctgacaggaacttaatatttggtgttgaaatgttaaaata

SEQ ID NO: 2049 - DNA, 752 bp, Gossypium hirsutum
  Clone ID: GOSHI-09MAY01-C35193_1
ggacatgaaagcaatggatccggttgaacttctcggaatcttgcctacctgcaatttgggcaagttctgctcgaaaaagtaccttgccatcgttcatcccaagatggaagaatgcttgttcggggacttggagcatcgcaaccaagtgatggccgggattcatacaaggagtcagatttatggggagttcttggggctgcccaaggcaattgggctgcttcatttgctggcttttctcacttgacccttccccaagccaattcgaagcaagtcggggagcagagtttcatccaccctatatggaaagcgtcggcaagatttctggtgggcgagtacctacaggtcagattgttggattcccagttagccctgggttcaagctaggaaatggttctgttgtgaaggctagggtttacctggtggctaggacttaaagactttttgtatctgccttaataggttttaggatttacggtaggggaatcggatttagcttgctgttgctattaccggacatcactcggaggaatttttggggattgttattaccctgatctgatgttaggattatttaggtccttttttcagctgtatgtaacaaaagtatttgctttttaaaaaattgatttaaactccaaaaaaaaaaaaaaaaaagggcggcccgcccttttttttttttttttttttttttttttttttttttttttttttttttttttttttttttggatcgatactggtcatttgctatt

SEQ ID NO: 2050 - DNA, 602 bp, Gossypium hirsutum
  Clone ID: GOSHI-09MAY01-C35163_1
tttatttaagaatcaaatatgctggaagacaatcttggaggcttgaaatgtgcattggattctattgcatctcaagttggttcttctatgttatttcattttgaaataaatttggaagtcaaacttcaacagttagctttttcacttttttgttgtaggagagagaagaagaggatccaggcttcggctcttctatgaatggtgaaaatcagttaaatctgctagatgcaaatgaagggcaaaagtttgagattttggagctagagagtcagattgagaagaacaacttaattttgaagtctttgcaggatcttgattctacattcagaagattagatgccttagaacagattgaagatgcattgacaggcttgaaagtcattggctttgatggaaactgcattaggctgtcgttacagacatatattccaaaagtagagggtgttttgtgccaaaacgtgagtgaggatatttctgagccatctgaaatgaatcatgaattgctggtagaaattgtggatggaatcatggaggtcaagaacgttgaaatgttcccaaatgatgtttacataggcgatatagttgacgcagcaaagtctttc

SEQ ID NO: 2051 - DNA, 472 bp, Gossypium hirsutum
  Clone ID: GOSHI-09MAY01-C35103_1
gttcaaaccttgggaaaatttcaaaacggcgaagatgactgagctgttgcaggctgttcaagaaaacatgagagaaaaccaagcatctcggatcgaacagccagccatcagttctgaaggaaccatgctcagagataaagcaacgcatgattcaaacaagcagtcataagtttggagtgtggaatgttgtagagtgttttagtataatgaaatagactatgtaaaatgttttaaaatcctaaacaaggtgaaggagctagacttccccgaagggctaacctaaccttaaaagttagagaaggctgcagcatcggattttctttgctctaacccttttaggattagaactgttgccattacttagaataaaagcttttcgtttttcagtttatagatatatatagaaaagctatctttatgtaacttaggctttgtcataacttagtaaacagggaaagaccagtttcttgtt

SEQ ID NO: 2052 - DNA, 545 bp, Gossypium hirsutum
  unsure (1)..(545): unsure at all n locations
  Clone ID: uC-gsronu33B089f06b1
aaaaattctaaaaaaaaatttaacaagaagagattgtattcaaaaagaaaaaaaggagaggaaattggatgcaccaaaaacgattcagcatgaaatggaagcaatacgctgaagatctgtttgtgagaatcggaagaggaccagttcacttttacgaaatctgcttgatgttattgaggaagtacagatagcacggttagaaattaggggtctgattcttactagcttccgttctccatctgatcacccgtcaagagggacaaccagaggaaatgtctttaatcataaatttactgccagagagagtagaaaatttaaaggtgcctagccaagagatgttctgaagggaagactaatgttatgaaaaagattaagtttccacagatggagtagaaatctgctagtaaaactgttcaacgacaagcaaagaggcagcactaccttgtcctctaagagaaattttggaaaaggagaagaagagctattttaaatatattatcgttggagaatgtgaagattntgacatttttcaatcacaagatgag

SEQ ID NO: 2053 - DNA, 411 bp, Gossypium hirsutum
  Clone ID: LIB3148-032-Q1-K1-E5
cccacgcgtccgcccacgcgtccgcaaaaatctcaaaaaaaaatttaacaagaagagattatattcaaaaagaaaaaaagaagaggaaaatggaggcaccaaagacgattctgtatgaaatggaagcaataagctaaagatctgtttgtgagagtcggaaggtactagaacgaagctatattcacttttacgaaatctgtttgatgttattgaggaagtacagatagcacggttagaaattaggggtctgattcttactagcttccgttctccatctggtacactattatctcctctttattatgtttcttaaatttgtggttgggatgcccggggctgaaattcttgctttgagaatttgacttttgattcttttctttatgaaaacaaagtagagatgatggatgaata

SEQ ID NO: 2054 - DNA, 490 bp, Gossypium hirsutum
  Clone ID: LIB3582-008-P1-K1-C3
ccgcacgcgtccgctcgctttctcttcctccctccctccctgcgacattataacaaaaatctcaaaaaaaaatttaacaagaagagattatattcaaaaagaaaaaaagaagaggaaaatggaggcaccaaagacgattctgtatgaaatggaagcaataagctaaagatctgtttgtgagagtcggaagttcacttttacgaaatctgtttgatgttattgaggaagtacagatagcacggttagaaattaggggtctgattcttactagcttccgttctccatctgttctaaggggaagactgatgttatgaaaaagattaagtttccacagatggagtagacatctgctagtaaaactgttcaacgacaagcaaagaggcagcattaccttgtcctataagagaaattttggaaaaggaaaaggtggtggatctatatcctgatgctactctattgttggtggatctgtaaattgaagtggaagtgc

SEQ ID NO: 2055 - DNA, 436 bp, Gossypium hirsutum
  Clone ID: LIB3145-009-Q1-K1-D9
cggaatgcatgactattttcgcaacacttatgaacccatttactcttgaaagaaagctgaggggctgtttaagagccaacaagatcacccgtcaagagggacagccagagaaaatgtatttaatcataaatttactggcagagagagtagaaaatttaaaggtgcccagccaagagagggtttccacagatggagtaaaaatcttctagtaaaactgttcaacgacaagcaaagaggcagcactaccttgtcccataagagaaattttggaaaaggaaaagaagggacaatatttgaatggggagcatcatttatctgattttgtagagccaggtaagacacaatccatttgactgaagtgggtacatgaaaaaggaaaagaagaaagcaaaggaagaaatgagtgggtatccatatgccaccgtctcactctttc

SEQ ID NO: 2056 - DNA, 443 bp, Gossypium hirsutum
  Clone ID: LIB3145-012-Q1-K1-H9
cccatttctcaatttaagaaagccagaaaagaaaacactcgaaaagctagaaagaaaaagaaaatgagccaagattatgaaatgatgacaagccaaatgaatgaacatgaagatcatattgctcttatctcccaaatctaccctggattttacacccaaattgcaacacaccaaggggaaccgaagccccgacggcggcggaagaagaacaagggaggggagaacagccagtgggcggtggctaaaaaaaggaagcttaaccaggaacaagtcactctccttgaacttaattttggtaacgaacataaactagagtcagaaaggaaagaccggattgcttcagagctgggacttgaccctcgtcaggttgctgtttggttccaaaatcgtagagctcgttggaagaacaagaagctggaggaagagtatagcaagctcaagtc

SEQ ID NO: 2057 - DNA, 383 bp, Gossypium hirsutum
  Clone ID: LIB3145-012-Q1-K1-H11
ccggcgttcggcattttttattttaagaaagccagttagtaatctctctacacgcttgaatgaaaaagagagggtgccaggattatgaattgatgacaagccaaatgaatgaacatgatgatcatatcgctcttatctgccaaatctaccctggattttacacccaaattgcaacacaccacggggaaccgaagcccccacagcttgagattatgaacatggtaggggagaacaggcagtgttcggtcgctcaaaaatggacgcataacctggaacaagtcactctgcttgaacttaattttggtcactaacataaactacaatcagaaaggaaagaccggaatgctttagagcttgggacttgacccgttgacaggtttgct

SEQ ID NO: 2058 - DNA, 611 bp, Gossypium hirsutum
  Clone ID: LIB3543-030-Q1-K6-D12
tccgattccgggtcgaccaccttccccacctcccccacctccgggggggggggggaaggaactgtgaagaggcagctctagggtttcgattaagtgaaattgttttatgcttgatatctttctctgttatggctgctgataaaacctcaggctggagcggtgactctttcgaccgctataaagaatacagggattgccggtcggtaaatgtgattggatttgtatatgcggggtttcaagcctatgctctagcttatcatctcatcatgccgaaaacatgtcattcgccattaccttcgtcagcattttgatttcttcatggatcagatactagcctatcttttgctttcagcatcatctgcagcagccacccgaatagatgattggcaatctaattggggcaaagatgaattcactgagatgactagtgcctcagttgcaatggcctttctggcttttactgcatttgcattaagctcgcttttatctggttacgaactctgtacccatgaatctgcttgatctctgaggcaattacaaaatcatagcacgattggattcaatcaacttgagctgcacattcggttttcgttattgaacagagaacatat

SEQ ID NO: 2059 - DNA, 359 bp, Gossypium hirsutum
  Clone ID: LIB3145-013-Q1-K1-C2
cccacgcgtccgaaccgatcggtgagggaggaaggacaggggatgacgacgaagacgaaagtgagtggtggagggggaagaggaggaggagcaagggcagtggcggctgtgctgaggagatcgaaggtgaaggagactgtgaagatggcagctctagggtttcgattaagtgaaattgttttatgcttgatatctttctctgttatggctgctgataaaacctcaggctggagcggtgactctttcgaccgctataaagaatacaggtattgcctatcggtaaatgtgattggatttgtatatgcggggtttcaagcctatgctctagcttatcatctcatcatgcgaaaacatgtcat

SEQ ID NO: 2060 - DNA, 634 bp, Gossypium hirsutum
  Clone ID: GOSHI-09MAY01-C35283_1
cccacgcgtccgcaaagcccttgaagaccctaggcatttcagtcataacaatggggagaggggggaacccaaaggttctgcgccgttcggccatagtttcatcactgcgacgatgaatgacgaccttcggtgacctccttttgctcctctgtttactctagcgtggtgttcgtcgatgggggccttgaaatcccatcttcgacttcgatttcagcgaagtagagaaggtctccgatggctcgtatgcgaaggtaagtccttttcccttcactttatttgctttcgaataaaaaaaaaaacaacacaaaacgaagaacaataaaaaaagaggaacgcccgcaaatctaaatcggaaaatcgccttcgaataggtggccttttctttgtattcaatatgcaaatagtgtctgtttgtattgcgttcgtattgcttgcgttcgttccccaaaaaaaaaaaaccagtttacaatcgaaattaataggctttatagcccaatgtaaaaaaaataaaataaaattcatttcttctttcttcgtatttttgttgctttcgtttgttctcttttgcaggtaagagtacggagctgtgtgttggcccttgcgtgaggcatacgaggactgcgtgctggtcgta

SEQ ID NO: 2061 - DNA, 433 bp, Gossypium hirsutum
  Clone ID: GOSHI-09MAY01-C35213_1
cccacgcgtccgggagactcttcagtggtggttaacgatgagaaccgcgatgcggcgcggtgggctaaagccaaagccatggatgctatttctgaagggaagttagaggaagctatagagaatctgacacaggcgattttgctgaatccaacatcggcaatcatgtatggaacccgagctagtgtttatatcaagatgaaaaagccaaatgctgccattcgagatgccaatgcggctttggagattaacccagattctgctaagggctacaagtctcggggcattgcacgagcaatgcttggtcaatgggaagatgccgccaaggatctacgcttggcatcgaagttggatcacgatgaggaaataaacagcgtccttaagaaggttgaacctaatgcacaccgcattgaggagcaccgtagaagtatgatag

SEQ ID NO: 2062 - DNA, 565 bp, Gossypium hirsutum
  Clone ID: GOSHI-09MAY01-C35233_1
cccacgcgtccgcccacgcgtccgccgaggtgcaagcagaagcatccaatgttgctccaggaggtgagacaagtattactaatcaaggggtgtttttatctaatttgcttcatcagatcatgccatacatatctcagcatgcgggttcacaacgaagtactcccgaagaagcaactacttctgccccggctgacctctctagtaccgggaattcacgcagaccaaatgacactgaacaaaatccaccgaactcgaaacgtcagaagacggagtaacttatcaagaggacgatttaccgaagcttcccgtggttatgaaaattcgtaattgctgatttgagaactttattggtatatgaacagcggcatgacttatatgttaaaatgtggtaatatcatggtcccttttattgcaaaaatgagatgacattctattatttatattataggggaaatttgtagtcacattttttttggtttttgacttttataacatagtagtaatgttggttttatttgtttaatcctcatcccactaaaaaaaaaaaaaaaaaatatatttatta

SEQ ID NO: 2063 - DNA, 476 bp, Gossypium hirsutum
  Clone ID: GOSHI-09MAY01-C36913_1
cgattttcatgcaaagttatccacattacaagcgttttccatttgtgttgcagttctacgtggtacagaaacctctgctgctgctactggggagacagaaggcaaacattcatcacaatacaattccttaaaaatgcttatcgaggaggaagtgaaatcgttaataaaagcggccacggcggtagagacgaagacttagaagactaagagagtctgctggacgggggaagctatcccaccatcctatgtgattaaccctcctttctcaccaatcgctcgtgtctaagcccgaaacaatgccttgttgaatcgaaactggcctattgatccttctccaggcattctgccatgttctgactaagaacagcattgatccacggttaatacaaaatgtcttatcttgcacgaatcgatgtgtagatcactcaagcaagaacttcactgcactaccaactcgttctatgttagaaacacct

SEQ ID NO: 2064 - DNA, 934 bp, Gossypium hirsutum
  Clone ID: GOSHI-09MAY01-C36903_1
ggatttggtggtcacagtggccgttttccactaccatcttcaagcccttcagcttcctcacaggagacagtggggccatcagaatctaacagccaggggaataatcaaccatgcccaaggttagcattaatattggagagacatgatgatgatgttcttgggatggcccattcattacgagcattggctgctgatattgaagggagacaccgactaatttctgagattcgccaagtcttaaatgccgtccacaggggggagaacttacaaattgaggattatatgccgtttgatccattcatctatcatggtatggctgctatgcatgacagacatagagacatgcgtcttgatgttgataacatgtcttatgaggaactgttggcattacaagaacgcataggagatgtgagcactggactgagcgaggaaatgattctgaagttgatggaacaacggaagcattcatctacttcaacagaatcccaacaagatctggaaccgtgttgtatctgtcaggaagaatatgcaaatggagatgacactgggatactagattgtggacatgacttccactctaactgcattaaacaatggttaatgctaaagaacttgtgccctatttgtaagacaacaggcttgcttaaatgatagcaaaagctgatgttagagccgggaaatttcgttatcttttgatcgtcattaagatcctataataagggtttaggcgcgcgtgaaccatacaaaatttgaagatgctgctgctaattttatgtactgcaggatgagttgtttgtcgaataacttggcataaaagcatcaatgacaatgataacatatttgaaacaaaaaacagctgcattggatttattcaataattttctctgcacactacccgatgtgtcctgtgtagctctaatttgggggctccctt

SEQ ID NO: 2065 - DNA, 460 bp, Gossypium hirsutum
  unsure (1)..(460): unsure at all n locations
  Clone ID: uC-gsronu33B078a06b1
gccgcgccgtacccgccgcgaccaaccccgccgcccactttgctgcctcgcataggagatgngagcaccggacggggggatttataaaatcttttttttggttgaacaaccgaagcattcatctacttcaacagaatcccaacaagatctggaaccgtgttgtatctgtcaggaagaatatgcaaatggagatgacactgggatactagattgtggacatgacttccactctaactgcattaaacaatggttaatgctaaagaacttgtgccctatttgtaagacaacaggcttgcttaaatgatagcaaaagctgatgttagagctgggaaatttcgttatcttttgatcgtcattaagatcctataataagggtttaggtgcgcatgaaccatacaaaatttgaagatgctgccgctaattttatgtactgcaagatgagttgtttgtcgaataacct

SEQ ID NO: 2066 - DNA, 712 bp, Gossypium hirsutum
  Clone ID: GOSHI-09MAY01-C36843_1
ctttggcttacttaaccgaaccgattgcaaggctttgcaatgaagaggaagctgaacaaaacacggattatatgcatctgccagaggcttttattgataacaattatatcgtggataacctttggcatcatcccaatcgactatctgaagaaatggtcttacgcatgagagatattttcattttcttagcagattcatccaagctttcttcttcatcgtcgtcttcttcggtgtcacccgcttcacctcactgcccccttgccaattttttggcatcatcctcggactcacccgttgtaacttcctttgtaagtagtccctcaggaggtggtgcatatgacccttatggaatctctgacaaagttgactggacatttagtattgggacctatagtaaagcgattgaagtctcgtggttgtctgttgggaagaaagaacttgaatatgccgctatggctctaaaaagattcagattgcttgttgagcagctgttgagggtggatccttctcaaatgagttccaatgagagactggcattttgggttaacctgtataatgctttgattatgcatgcatatttagcatatggagttccaagaaacgatatcaaactattttcctttatgcagaatgctgcgtacaccattggaagactctccgtgagtgcagctgacatagaatgcacccgtctaaagatgaatcctgctactta

SEQ ID NO: 2067 - DNA, 534 bp, Gossypium hirsutum
  Clone ID: GOSHI-09MAY01-C36473_1
cccacgcgtccggaaattcacccttgacagtaatatatgttgtatatgtaaatcctagatgtgaaaacaggcgtaattcggccctgaaatgaaaaaaaagggaatatagatggaaaaaggggggagaggttggacgtagggtaaaaaaaaatcgatatgctaaaataaaatatgaaatgaaattgaaacaaggctaatgagatagaaataaggaatcataaatagagttcgggttcgaattccatagataatatggatggtgttgcctataatgatggacaaatgaaagactctcccaaaatttttatttatccacttcctattttgaaaataggttggttgaacttaaaaattccttcattgaataaggaaacaatccaattgcatgcacttgaattggatgggaccaacgaaatcgagcgctaacccccatttcttattgaattaaccgatcaacctcctgtcgaagatttattttgtattagataattttgtaaaaaaaaattgacatatttcacttaattatggaaataa

SEQ ID NO: 2068 - DNA, 363 bp, Gossypium hirsutum
  unsure (1)..(363): unsure at all n locations
  Clone ID: LIB3145-028-Q1-K1-C9
cccacgcgtccgtatggctaggctcttcctcaacacttgttgaacatcaatgaaattgaaagcaaacttgattgatactttgaaaacttgatggacaaatgaagggctctcccaaaatttttatttatccacctcctattttgaaaataggttgttgaacttaaaaattcttcattgaataaggaaactcattttagagaaaaaaaaaaaaaaaaaaaaaaaaaaaaaaaaaaaaaaaaaaaaaaaaaaaaaaaaaaaaaaaaaaaaaaaaaaaaaaaaaaaaaaataataaaaattcaaaattaaaaaaanattttattaaaaaaaataaaaggggtgggggttttaattaaaaaaatttaa

SEQ ID NO: 2069 - DNA, 814 bp, Gossypium hirsutum
  Clone ID: GOSHI-09MAY01-C36783_2
cggacgcgtgggcttcgaatccgtgctggccaaagccaagcacttgttggagctagtggctcgggcaagagttcagtcattgcattgattgaacgattctacgatccaacagccggaaaggttatgatcgatggaaaagatatccggagattgaacttgaagtctcttaggcttaaaatcggattggtacaacaagaaccagccctctttgctgccagcattttcgataatatcgcttatggaaaagaaggagcaaccgaagctgaagtaatcgaagcagctcgagcagctaacgtgcacggtttcgtcagtgcgttgcctgatgggtacaaaacacccgttggtgaaagaggcgttcagctctccgggggtcaaaaacaaagaatcgccatcgcacgggccgtgcttaaggacccaacaatactactactcgacgaggccaccagcgcacttgatgctgaatccgagtgtgtactacaagaagcactggaacggctaatgaggggtcgcaccacagtacttgtggctcaccgtctctcgacgataagaaatgtagacagcatcggagtagtgcaagacagtcgaattgtggaacaaggcagccactcggaattgatagcccgacccgaaggagcctattcaaggctgttgcaactacaacaccatcacatatgatataatatagctgtagatatgggaatgttgtagactggctgtatcaatggcccccatttccaatgagattgaaaaaatgttaaattattgagatatatatgaatggtggataagccccaatatgtgttgattggctttt

SEQ ID NO: 2070 - DNA, 824 bp, Gossypium hirsutum
  Clone ID: GOSHI-09MAY01-C36783_1
cccagcgtccgaatcctgctggtcaaagccaacacttgttggagctagtggctctggcaagagttcagtcattgcattgatcgacgcttcttgatcctacagctggaaggttatgatcgatggaaaagattccggagattgaactcccagcctccgccccgcgtcggcgggggggggcaacaagagccagccctctttgctgccagcattttcgataatatcgcttatgggaaaggaaggagcaaccgaagctgaagtaatcgaggcagcccgagcagctaacgtgcacggtttcgtcagtgcgttgcctgatgggtacggagcacccgttggtgagagaggcgttcagctctccgggggtcaaaaacaaagaatcgccatcgcacgggccgtgcttaaggacccaacaatactactactcgatgaggccaccagtgcactggacgcagaatcagaatgcgtgctacaagaagcactcgaaaggctcatgaggggccgcacgacggtacttgtggctcaccgtctctcgacaataagaaacgtcgacagtattggagtagtacaagacgggcgaatcgtagaacaaggcagccattccgaattgattagccgaccggaaggagcttattctaggctcttgcaactgcaacaccatcacatatgaaagtttttattttttattttaattgaatcaacatgggcttgttgggtggtataattatgtttgggtccctttaacctcttatgtttttcatattttccttttttgaatgatgatagttgtagatattgttaaagtggagactgtatctttgggttctact

SEQ ID NO: 2071 - DNA, 331 bp, Gossypium hirsutum
  unsure (1)..(331): unsure at all n locations
  Clone ID: LIB3145-032-Q1-K1-D10
aattcgtggagaaatcgagcttaggcatgttgattntgcatatccttcacgacctgatggcatagtgtttaaagaccttaaccttcaaatccgggctggtcaaagccaaccactggtgggacctaggggttttgccaaaagttcagtcttggcttggttcgaccgcttttttgatcttccagttggaaaggtattaaccatggaaaaaaaattccgagaatggaccttaagtctcttatgcttaaaattggattggtacaacaagagccagccctttttgctgctagcattttcgataatattgcttatgggaaaagaggagcaactgaag

SEQ ID NO: 2072 - DNA, 239 bp, Gossypium hirsutum
  Clone ID: LIB3148-038-Q1-K1-F4
cggacgcgtgggcggacgcgtgggcggacgcgtgggcggacgcgtgggcggacgcgtgggatgggcttgttgggtggtataattatgtttgggtccctttaacctcttatgtttttcatattttccttttttgaatgatgatagttgtagatattgttaaagtggagactgtatctttgggttctactgccccatttccaatggggtttccaatgttaaattattgatatctatggtgc

SEQ ID NO: 2073 - DNA, 722 bp, Gossypium hirsutum
  Clone ID: GOSHI-09MAY01-C36773_2
caacagaatccggatcacttgatactgttggtacagtagggattttggagctttacccgggagcaatcaatagcatccctagtaaagctcaccttgaaattgatgtacgagatatcgaggaaagctttaggaatgctgttattaataaaatccataaagctgcaaaatcaattgccaaaaagcgcaaggtcaccttatcagaattcaagatcataaatcaggacccaccagctcattctaacggatcagtaatcaaagcagtggtagacgccgcggatgagctgaacctaacgtataagtatatgatcagcagagcttaccatgactcactgtttatggcaaggatagctccaatgggcatgatatttattccatgttacaaaggatatagtcataagccagaagaatatgcgtcacctcaggatttagaaaatggggtgaaggtattagcgctaaccttggccaagttgtctttgcgttgatgtgttgttgtatattgtagtttttattaggctggttaatgccactctttgtcaatattttcaataataacaactttggcatttatgaaaactttgtatcatgtttgagaatccaatctcaaagataatggaactcctacaatttggctttcttctttttcttggtgcagtggaagatactgtaagatgcttgaggtgaaagttgagataataagtgttgaatttagctcccaacctttc

SEQ ID NO: 2074 - DNA, 652 bp, Gossypium hirsutum
  Clone ID: GOSHI-09MAY01-C36773_1
gggattttggagctttacccggggagcaatcaatagcatccctagtaaagctcaccttgaaattggtaagtatcatgctatattaatcggacttggttgtgcctaacacgggtatgttcagatcttttttttatatttggaaggtctttggagggtctatcccagttctcatattcatatatgcgttggacattggtgttgaagatggttatttcaggaaaaatgaagaattggagcaacatggtatcatgttagcaagtattcttccaagagaacataagtttactatgagaatctttagttgtctcacatgcttaatccaagtcaaaaaaagcctacttcaacaaagatagaacctgttttgctccaactttatttttcttgaagtacctacgtctgatactggtctttgatgcacatttggatctagatgtgatatatgaccctccaaatacatggaaaagcttctaaaattttgaatatacttgtatcagacacatactcgtatctaacactctcacacaaatcctagtaacagaagatagaaccattcttaaatttgcctgacctcactcttggataatctgggctgtatatctggattactatctgataatcagatatgttttcgtttcttattactttttttttt

SEQ ID NO: 2075 - DNA, 292 bp, Gossypium hirsutum
  Clone ID: LIB3145-032-Q1-K1-B6
cacaattttactgtaaatacacaattaaacatgccaatgtagtctcaatttcacaatcatcagcattgtcatcatgattaaatactacaattagatgctgatattcagatttcatattcatccaggatagctccaatgggcatgatatttattccatgttacaaaggatatagtcataagccagaagaatatgcgtcacctcaggatttagaaaatggggtgaaggtattagcgctaaccttggccaagttgtctttgcgttgatgtgttgttgtatattgtagattttatt

SEQ ID NO: 2076 - DNA, 755 bp, Gossypium hirsutum
  Clone ID: GOSHI-09MAY01-C36683_1
cccacgcgtccggtgtggtttctgttgtatggaattggtttgggaaggagaagagagggttgattatgggggtttggacttcacatacatctgttgggaatattattgggtctgttgtggcttctggggttttggagtttggttggggttggtcttttttggtgcccgggattttgattattgtagttgggattttggtgtggggtttcttagtggtgagccctgatgatttggggtttgaaatgatggcgtctggaaaagagattgagatgtgtgtgggggaagaaaatgtggcgaatttagaaaaagcggaatcagaggaagcagggttgctcgagaacaaggattctgattccctggctgccattggattcttggaggcatggaggttgccaggtgtggcaccattttctttctgcctcttcttctccaagttggtggcttatacatttttgtattggttgcccttctacataagacacacagccattgcaggagtgcatttgtcacataaaactgctgggatcctctctacaatattcgatattggaggagtcttaggtggggtgctagcaggcttcatttcagatgtcattgatgctcgtgcagttacttcggttactttcttattactatcaatacctgcactcattttgtaccggattttatggaagtgtctctatggttaccaatataggattgatgtttatctctgggttgctagtgaatgggccttattcactaattacaacagc

SEQ ID NO: 2077 - DNA, 788 bp, Gossypium hirsutum
  Clone ID: GOSHI-09MAY01-C36643_1
caaaaattcgactacgttgaaggtttcgtgattgtagctgaagggctcatcaacaattggggatcatctttgttttcccctcaaaaccctgttaaaatctccactctttttcccactagtggtgtcttgtattgcttggaaatcgcaaagaactaccatgaatctactgctcaaaccattgaccaggaagtagagtttctgttgaagaaattaaattttatatcgacatcagtgtttacgactgacctgttgtacgtggatttcttggaccgggttcacatggctgagatgaagctccggtccaagggtttgtgggaggtccctcatccatggctaaacctttttatacccagctcaaagattgctgagttcgataagggagtcttcaagggcattttggggaataaaacaagtggcccaattctcatctatccaatgaacaagaacaaatgggaccataggagctccgtggtgacaccggatgagggtttgttttacctggtggcattgctaaggtcagccttggatagtggggaggaaacccagagcttagaatacctgaacaaccagaaccgtcagattctgagatactgtgatgaagctgggatcaaggtgaagcgatatttacctcattacactacgcaacaggagtggatggaccactttggcaataagtgggatcggttctatgaaatgaaaatggaatttgacccgaggcacattttagcctcaggccaacggattttcacacccacattcccttcgttatcgaacatgccttcatggcc

SEQ ID NO: 2078 - DNA, 552 bp, Gossypium hirsutum
  Clone ID: GOSHI-09MAY01-C36663_1
ttcaacactactttttagaaattaaaataacacctctattctcttctgtaacagcttaataaaaaatggcggcttcttctagaaggtctagtggtccggttctccgatctcattccccatcttcccggtttacttctttctacgcttcacagtcacactctccatcttcttcttcctccgcttttgcctattccagttcaggtttctcttcacgttcaactttcttcaatcaaccaagatctacttctccaccacgtgttaacctgcacagaaactcttcatcagcgtcatctgtgcggttctcgctcgacaaccgtccgatctcaccgaaccgttcaatcaccaccgtccggagaaccactgaggcgttgaagaatttacagagcaaacagacgaagcggacttgcatgtgttcacctacaacgcatcggggatcgtttccgttgcagtcttcataagagcttcaatacttcgcatgccgggacaggttacgcgccgagttatcggcttaacgcgcgtagatctgcgatgacgaactcgctcgtgagaatc

SEQ ID NO: 2079 - DNA, 535 bp, Gossypium hirsutum
  Clone ID: GOSHI-09MAY01-C36143_1
gtatcttgatgagatagcaagcaagttgtcacgaaattgcagtggaagtgagactatccgcatggcacgatcacttataaccgcacgccatgctggtgagcggctcctcagatgctggggaggtggaactggctgggctgtagaagatgcaaaggacaagataatgaagctccttgaggaatacgaaagtggaggtgttgtagctgaagcttgccaatgtatccgtgaccttggaatgccattctttaaccacgaagtggttaaaaatgcacttgtgacggccatggagaagaaaaacgataggatgctaaatctgttacaggtatgtttcgacgaagggctaattaccattaatcaaatgagcaaaggcttcacccgagtaaaggacggccttgatgatctagctcttgatattccaaatgcaaaagataaattcagtttctatatggagtatgcccagaagaaagggtggcttattacatccttcgggtcatctgcaatggaagctccaccaatcgccacagctcctgagata

SEQ ID NO: 2080 - DNA, 585 bp, Gossypium hirsutum
  Clone ID: GOSHI-09MAY01-C36173_1
gacccacgcgttcgcggagaaggaaaagaagaaacatcagaccaaggatgtagagaatgctgaagttggagagaagaaaaagaaaaagagaaagcacgaagaacaagaagataaagaatctgaagtgcagaccacagaagagaaaaagaagaagaagaagaagactgaagattgagaaaaatcaaaggccttacgtggtgattgactaccagacaaattttgggtccgaaaatagaatagaacttatgcttgtaaaatgtggtattgtgttgggttaatcatctgggaatatcaaaacaaattttttgttatccttttaatttgagtttaatatcttcttgcaatgatatgggaatgggtaaccaagagcctccaattggttactcttgaaggaatgagatgtttagcttaaccacttttttttcttgtgtactgtcaaagacacttgtgatgtttggagtacaaattctagaatgttcaattcctttcaagatccttgggcgcaccacgagtaatcaaacactagacttgtgcttcatcagaaccagctgctgcctgcttctgctcccgcaccaaacacaaata

SEQ ID NO: 2081 - DNA, 453 bp, Gossypium hirsutum
  Clone ID: LIB3135-031-Q1-K1-D5
cggacgcgtgggcggacgcgtggggcgcgagcgagaaaatgaacatgaaaaagaaatgaaagaaaaagaagatgagtgggagatagagaaaaatcaaaggccttacgtggtgatcgactgccagacaaattttgggtaagaaaatagaatttaacttatgcttgtaaaatgtggtattttgttgagttaatcatctggtagtgtgttctttaaacccaattatgatgtattttcaacttccttaaggatgcaattgcaggggaatatcaaaacaattttttgttatccttttaatttgagtttaatatcttcttgcaatgatatggaaatggtaaccaagagcctccattggttactcttgaaggaatgagatgtctagcttaccactttttttttcttgtgtactgtaaaagacacttatgatgtttggagtacaaattcaatatgttcaat

SEQ ID NO: 2082 - DNA, 982 bp, Gossypium hirsutum
  Clone ID: GOSHI-09MAY01-C36093_2
ttttccacgcgtccgatcgaagcgacaaagggctgaatctcagtggatcgtgggttccatttgatgctgatccttatctaggcatcaatgaagactttcaagtgtttgtaaggcctcaagcggatgtcaaatgttatggattggtttctgataaccaactggcctcttctttgctatcggagttgcgggataaaatagatgaatccaacaacatcttgatggatatcttggttcgaaatttatcgaccattactgagctcgagatagatgatcttacgaagcagttgacagagccattcacacctgatgatgcgttcatgtttggtccacgatctattcttgacttggaccacaatcaaatgactccctactcaaaagagtctctttcttttgatggggatgttcaaacaagtcaattactcgaagatgatgcaagaagtgaagcatctgtcctcgacctgtcccacttcattcctaaagcgcctgcatcccttctatctccaatgttattaacattggacaactcttgcaatcggtaatctcttgtaattttctgcaattacatgccatgactcgccgtgtgtccttgtgtgtgcttaaattaccgtattttttaggcactcgaggtggctggtcaagttgcagcaacatccgtctctacatcacctctcccgtacgataccatggctagccaatgtgaagcattcggcacaggtacaaggaagaagctctccaactggttggcccatgaaaatcatcaaaatgaagctgccgataaaactatactgacaaccgctgctgctgacagacacgcgatgatgctgaagaagagttcaaacgggaatgcttttaacggtgctgtctcgcagctcgacccatgcttgtcaatgaggttgcctcctgctagcccgttcgacaatttccttaaagcagccagacattaaacaaggatattgtagttgtttttatgttgaaaagttgt

SEQ ID NO: 2083 - DNA, 1275 bp, Gossypium hirsutum
  Clone ID: GOSHI-09MAY01-C36093_1
tctttacaatagcaccagggggggggggggggtcataaacgcttcttccaacttcccttgtctctaaaggaatctccttggaccctagcaatgggacgttaactccagcgttccagcgatcaatccttatgctgtcaatgagcatgctgatgtttgcagctaagggggggggggggggtttttttttcatctcatcaatccatagttccatttgatgctgatccttatctaggcatcaatgaagactttcaagtgtttgtaaggcctcaagcggatgtcaaatgttatggattggtttctgataaccaactggcctcttctttgctatcggagttgcgggataaaatagatgaatccaacaacatcttgatggatatcttggttcgaaatttatcgaccattactgagctcgagatagatgatcttacgaagcagttgacagagccattcacacctgatgatgcgttcatgtttggtccacgatctattcttgacttggaccacaatcaaatgactccctactcaaaagagtctctttcttttgcatgaggatgttcaaacaagtcaattaccttgaatagatgcaagaagtgaagcatctgtcctcgacctgtcccacttcattcctaaagcgcccgcatccccttctatctccaatgttattaacattggacaactcttgcaatcggcactcgaggtggctggtcaagttgcagcaacatcagtctctacatcacctctcccgtacgataccatggctagccaatgtgaagcattcggcacaggtacaaggaagaagctctccaactggttggcccatgaaaatcatcaaaatgaagctgctgataaaactatactgacaaccgctgctgctgatagacacacgatgatgctgaagaagagttcaaacgggaatgcttttaacggtgctgtctcgcagctcgacccatgcttgtcaatgaggttgcctcctgctagcccgttcgacaatttccttaaagcagccagacattaaacaaggatattgtagttgtttttatgttgtaaagttgtaggaagtaactagattgtagtaacccttaggttttgaaagctagtgataatttgagggcatacattccctactattactaatccttcttgtggtctgtgtgtatcttctctcgtcaaagtcgaatgaactaatttgaagccaacttttagtcagttaaatgtaatcatgccattctgtctggctttcgtgctccgggcaacaaaataacagagaaaacaaag

SEQ ID NO: 2084 - DNA, 472 bp, Gossypium hirsutum
  Clone ID: LIB3585-006-P1-K1-H5
acgcgtacgcgtaacgcataaaaagctcgcgtgtcgattttgatgggtatctcggttcgaagttaagcaaccattactgagctcccgatagatgatctcatgaagcatttctcagatccattcacacctgacgatgcattcatgtgtggtccacgatctattcttgactgggaccacgatcaaatgactccctactcataagagtctcgtccttttgatgaggatgttcatacaagctaattactggaagatgatgcacgaagtgaagcatctgtgctcgacctgtcccacttcattcctaaagcgcccgcatgcccttctatctccaatgtgattaacattggacaactcttgcaatcatcactcgaggtggctggtcaagttgcagcaacatcaatctctacattacctttcccgctcgaatccatagctagccaatgtgaagcattccgcacaggttcaagggagaagc

SEQ ID NO: 2085 - DNA, 400 bp, Gossypium hirsutum
  Clone ID: GOSHI-09MAY01-C36003_1
cacaaaaccgcaccaaaacaaaactcatttgcctctttatctcccaaaccaaacccctatctctcgaggattcaccatgaaaggcggtcaaacaaagtccgattcgatgcaggctggaaacaaactgaaaggcaacggcgcaggcgccgggaaacgtgcgaagaaagccgccatggatccaaacaagccgaagaggcctgccagtgctttcttcgctttcatggaggagttcaggaaacagtacaaagaggcgaatcctgataacagatccgtgtctgctgttggcaaagctggtggagaaaaatggaaaagcatgacagatgctgagaaagctccttttgtacagaaggcagagaagcgcaaaagtgaatacaataagaagatgcaggcatatagtctg

SEQ ID NO: 2086 - DNA, 643 bp, Gossypium hirsutum
  Clone ID: GOSHI-09MAY01-C36023_1
ctttctttcttaaaactcaaaattagggtttgcgtttagcaaaatccctcagcatgctctgctagatttccctccttttcttcaaattttcctgctcgttgctttgcaagcttggtttactagattacataaaatgccaaggacaagggaagagattgaagagcaggtggaccttgatggagacaatgatcctgaggagactatagaggaagaggttgaatatgaagaaatagaggaagaggaggaagtggaagttgaggaagaggtagaagaggaagtggaagtagaagaagaagaagaagaggacgaggatgaggatgctgagcttgttgatttccacaaaggctctgatgctaatgaggggatggatgattttgaaacacaggaagaaaagaaaaagaagcatgcagagcttcttgcacttcctcctcatgggtcagagagtctaccttggtggcattcctcatgatgcttctgatgaggacttgaggagatcttgcgaatctataggagaagtcatagaggttaggataatgaaggagaaagattcaggggtggccaagggttatgcttttgtgaccttcaggtccaaaaagttggcttccaagctattgaaaatctgaatggttctgaattcaaggcc

SEQ ID NO: 2087 - DNA, 624 bp, Gossypium hirsutum
  Clone ID: GOSHI-09MAY01-C36383_1
ccaggttatccagccataactctgtttcccggcgcggagactatttttactaaattctttttgattggaacgtgctgacagactatagttttatttttggttctgttatgtgtattattataactggcaattctctgattggaccggtacatactagtgtatgacagttggataacagagcctctccgatctccatatttagggttctgatgcacttgttttccctttgttgcctatccattcccattaaaacagctgagatttaccaagcctgaagcccgcctagtgcctactttgatgaagcctgcctaaaccggaagaccagatgaaccagggcccaccttgatgctactacctagaaggaccaaatatatgtggagatattactattctctttgaaatttgccatgtccatgccaccaaaataccaagctctataatatgtgctcccaagaaccttgctagccggaaatgcctgttgctgccttacagttccttttttgtttgatgtcgtttctgcttagtagttttgcatttgtttagtcgttcaaaaccttgttgctttcttccatcttctgactggtgtaccaagtgcctggtttataatttggcttctgctttctc

SEQ ID NO: 2088 - DNA, 428 bp, Gossypium hirsutum
  Clone ID: LIB3145-026-Q1-K1-C6
cccacgcgtccggtgaaagctatggaacttatggtgccccccagattggtgttagtaacagtgcttatggagcttatggaggttattcatcaggacgcagtggtccctctgggttatccagccataactctgtttcccggcgcaaaaactatggttactaaattctttttgattgttggataacagagcctctccgatctccatatttagggttctgatgcacttgttttccctttgttgcctatccattcccattaaaacagctgagatttacgaagcctgaagcccgcctagtgcctactttgatgaagcctgcctaaaccggaagaccagatgaaccagggcccaccttgatgctactacctagaaggaccaaatatatgtggagatattactattctctttgaaatttgccatgttcatgccac

SEQ ID NO: 2089 - DNA, 1096 bp, Gossypium hirsutum
  Clone ID: GOSHI-09MAY01-C36323_1
cggtttttctcgaattctcttcatattaattcgtcgttctttgttaaaagtacataggaatttctccctccctccgcggccgcgtggcctctggtctttcaggcgacgtattttttagcttttcggccaaatttcgtaaatgggctgcttgcaatgtaaagcaaaaagactatgccccaaacgggaaaaccctgtcaaacttgcttcacagactgcttttagtgtcagtgaagttgaagcgctcggggagctatttaagatcattagcagttctttgattgatgatgggctgattagcaaggaagagtttcggttagctctggttcacaataataagaagaaaaacatttttacagatcggatctttgatttatttgatgctaataagaagggagtcattgattttgctgactttgttcgagcactcagtgtcttccatccgaatacctcgcagaggacaagataaatttttcatttaggctttatgacatggatggaacaggctttatcgaacgtcaagaggtcaaggaaatgttaattgcgcttttaagtgaatgtgaaatgaagttttctgaagaaatcattgaggcattacttgataagactttcatggatgccgacactaaccaggacggaaagatagatatgcatgaatgggagagctttgtctaccgtaatccatcattattgagagtaatgaccctcccatacctaagagacataacaactacatttccaagctttgttttcaataccgaagtagacgaggtcgctacgttgtcggagaatactcgctcgggttagcatattcattcggctttaagccattttttgtttttttttttatttttttggtttgtattgttgacattgatcacaaggctaaaaaaagcatgctatcgagtttttttcttttcaaagggtagcggctaaaatatgattgatgtacagagtcggcaaattaacctaaattcatcaggttttgatccgaccttgtaggctttgttacttttggaaaattaagttcagggttgaggtgggttgttggtatttaattgaaagtttcatggcccaattgcatcgagcttagagaatt

SEQ ID NO: 2090 - DNA, 598 bp, Gossypium hirsutum
  Clone ID: GOSHI-09MAY01-C36233_1
cctgaaacgagaacaaaacccagaaacccatcaaaaaaatctttcctccaatttttcttcaaattttcattgttaaagaccaaaacccggaaatccttacgttggaaagtggaataaagagcaatgggaagcgcgcccgcacagattccgacgagtttcggacacgagctccgggcttgcctccgttgccgcctcgtcaaaacctacgatcagtttcgcgtaccgggatgtgagaactgccctttctttaaaatggatgaggctaatgaacgcgtcgtcgattgggccacgcctaacttcaatggggttatcgctgtgatggatccgtctagaagttgggctgctcgttggctgcgaattggaagatttgtccccggttgttacactcttgctgtttcagaggcgcttccagaagtcttgcagaatttatgcgatgaagtgcatgtgcagtttgtgccacctaaacgggtatgtgacatgagtcctggtaacattgtttgttaccatcgtaaaactgaattgctttttacgagttgtgatcgttttttgatgcttttgtaaaagtttttgctccgttgtcctaggcttatcagaaata

SEQ ID NO: 2091 - DNA, 515 bp, Gossypium hirsutum
  Clone ID: GOSHI-09MAY01-C37883_1
cccacgcgtccgcccacgcgtccgcccacgcgtccgcccacgcgtccgcccacgcgtccgccagtttttttttttaccatccaaaaaaggagaaaattgacattatatggatagtaaagtaccgtctgaaaagtttactcaggagctagctcgcgagttgcttattgcgatatcttattctgtacctgataccgacccgaattcagatcatgcattgaaaatcgtagatggcgcaaatggcgctgtggctgcaatcgacaaggctgaaaaatataggtctgaactgatttcgatatccgatacgtctcctgatgctcaagtgcctcctgttgtgcttgggaaccatgcaggttaaaggagacaaaattgtaatgggagattttaatacatgcagtggctgttaatgatttctagaactgaacctgttgtagtgttgtgtgatttttacacctaatgtggatttgtttcgcttgtgattctccccatatcaatgtaaataaggaaacatacttttg

SEQ ID NO: 2092 - DNA, 462 bp, Gossypium hirsutum
  Clone ID: GOSHI-09MAY01-C37813_1
aacacgaatccgacacatccaactaattttttttaaaaagtggagtcaaggtaccgacaggtttcagttgggggctgcaaaggtttggttaaatgggaaattttgatccaaaagagggattggttggcagaagaggtgtacaaagaaatttttggttggaaaagcttggatgataccatggtggatgatcttgtagacaaggacatgagcacaaagtatggaagatggcttgattttgacatggaagcatttgaagagggtgtagaaattgagaagattgtattaacttctttagttgatgaattagtttctgatttattattattgctttaaggtagcctctcttcttcttttttagtattttttgaggttccattgttaaaatcttctttgctcagaaagaagatatatatatacttgctgtataattcaaaattgtgaactttgcattcatgaaaatcg

SEQ ID NO: 2093 - DNA, 720 bp, Gossypium hirsutum
  Clone ID: GOSHI-09MAY01-C37833_1
aaaatattattccatcttcatcccttttaaccgccggccgtctttcacttctccggcgatatcattttttccgtcaagagctactctcagcagaatttgtcacagatggcttcttccttccgagcattcttgaacagtccagttggtccaaaaacaactcacttttggggacctgttgccaattggggatttgttcttgctggactggtggacatgaataagcccccagaaatgatttctggcaacatgacttcagcaatgtgtgtctattcagcattgttcatgaggtttgcatggatggtacagccacgaaactatcttctgttggcatgccatgcttcaaatgagacagtacagctctatcaactttcacgttgggctagagctcaggggtatttgtctgagaagaaagaggaggcctcatctcagtaaagtacccttttttcctgcttttctttccattttgagattctgctattttcttgtgatccctgtaagaatctattctgagctttactttataaagaaactgatttaattctaccttcatctggccgaagcttaagcacatagtaagccgattactgttaagtggaatcatgatcggccgcctttcttattatgcatgagtggtaaaacagcttagaattctacaatcaatgttgattcaataaactttttcttgatttagctgaccataaaagaaaaaaaaccggggaa

SEQ ID NO: 2094 - DNA, 329 bp, Gossypium hirsutum
  Clone ID: LIB3145-047-Q1-K1-A6
aaattctgccgtataagagaataatatttgtttgtagtggtgaaaggcaagtttcagtatatctaatgtaatttttccaatgttctctaggtatttgtctgagaagaaagaggaagcctcatctcagtaaagtacccttttttcctgcttttctttccattttgagattctgctattttcttgtgatccctgtaagaatctattctgagctttactttataaagaaactgatttaattctaccttcatctggccgaagcttaagcacatagtaagccgattactgttaagtggaatcatgatcggccgcctttcttattatgcatgagt

SEQ ID NO: 2095 - DNA, 747 bp, Gossypium hirsutum
  Clone ID: GOSHI-09MAY01-C37553_1
cccacgcgtccgttttgatcttaaatttttctcttccattatcgtcaaagcaaaaattaatccagcttcatacatttccttggcaaaatcccactgctttgcttcgattatcaatggggacaatggcggtgccgccatggctagagtcattgctaagtacagcctttttcacagtttgcacaacacatggagatgcagctaggggtgaatgtaacatgtattgtttagactgtaaaggggatgcgttttgcttttattgccgctcttctaaacacaaagtgcgtcttgttgttcagataaggagatcttcatatcatgatgtagtgagggtcacagagattcaaaaggtattggatataagtgggggtcaaacatatgtgataaacagtgccagggttctatttctgaatgagaggcctcaaccaaaatctggaaaaggtgtagctcatatctgcgaaatctgtggaagaagcctcttggacccatttcgcttttgttccttgggatgtaaggaataaagagaaatgggaatgcaagttttagcttacaggctaagaatgaggtggtggtaatggatagaactagaagagaaggcatatcaaaggaagatgaagaattgcgtgaaggctcacaacaagacatttacccgaccacgcctgctgcaccttcttaaagtgcaaggagaatgaaaggaatccctcaccgtgcaccttgtggctcctaaaaatttcactaaaaaaaaccaag

SEQ ID NO: 2096 - DNA, 677 bp, Gossypium hirsutum
  Clone ID: GOSHI-09MAY01-C37533_1
cccacgcgtccgggcactcaaaggcagccaatgtgcattttgatgggctttgctctattaagtccaaggtttatttatcaccgaaactttggtatttgagggtatcagtgattgaagcacaagatgttttgggtgaaaaagggtctactttattgaggtaccctgagctctcagctaaagtacaagtggggaatcaagtttcaaggaccagaatttcaggagttagtcctaacagaagcttatcaaatccattttggaatgaggatttcatgtttgtagttgcagagccatttgaggattacttgttggtgtctgttgaggatcgagttggccctggaagagatgaggttgtaggcagagtattgcttcctgtgatggcagtcgaaagaagaactgatgacaaacaagtggtctctaggtggtttaatcttgataaccacttcggcaaccctgctgagactaagcttgtgacaggattcggttcaagaatccatcttcgggtctcacttgatgggggataccatgttcttgatgaggccacaatgtatagcagtgatgtcaggccaacggcaaaacagctctggaaggctcacattggtgtacttgaaatggggatcttgggtgcaacagggcttatgccagtgaaagtaaggaaggcaaaggtggcaccactgatg

SEQ ID NO: 2097 - DNA, 1162 bp, Gossypium hirsutum
  Clone ID: GOSHI-09MAY01-C37403_1
gtcaaatccaaggttcttttgccaatctatcaagcttacttggatgcaacttctcttataatgacttaacagggcccataccttctttaccgcgcctcgacaacatggccgtcagcagctttattgagaacaatggtctctgtggtggacctctcggtggttgtaatccaactccatcttccctctcgcttcagcccaatgcaaaagataaaggtactgggctaggcaaggttgtggccatagttgcagcagccattggtggagtttcccttgttttaatagtagttattttatatttcatgagacgaccagttgaaatagttgctccattgcaagaaaaaccttctactgctcgagtttcggacatttacttttcaccaaaggaagggttcactttccaggacttgcttgaagccactgacaattttgatgagagctttgttgttggcaggggagcatgtggaactgtatataaagctgtcttacctagtggccatgtcattgctgttaagaagcttgcatccaacagggagggaaataacaatgtcgacaacagcttccgtgccgaaattctaaccctggggaacatccggcatcggaatattgtgaagctttatggtttctgctaccaccaaggttccaatcttctactttatgaatacatgtcaagaggcagtttgggagagctgcttcatggagcatcttgcaatcttgattggagaacaaggttcctgattgctttaggggctgcccaaggtcttgcatatttgcatcattattgcaagcctagaatttttcaccgtgatattaagtccaataacatattgcttgatgaaaagtttgaagctcatgttggtgactttggactagcaaaagtcatcgacatgccacaatccaagtcaatgtctgcaattgcaggttcttatggttatattgcaccagaatatgcatataccatgaaagtgaccgaaaaatgtgacatctatagctacggtgttgtcctacttgaattgctgaccggcaaaacaccggtacagcctctagaccaaggcggcgatctcgtaacatgggtgaggaattacattagagatcaatcgttgtcacctggaatactcgatactcgcttgaatcaacaagatgagactaccatctcgcatatgat

SEQ ID NO: 2098 - DNA, 487 bp, Gossypium hirsutum
  Clone ID: uC-gsflnu33B037h06b1
ctcatcctttcttattccaaatctgtcattaacagtaaccgattctcctgttccttctgtaaaccaaagactggatatttgtatttccatatatatccccacctctcctgagtttatgaaccttatcagatggaagagcaacttgagtttcgtcactgggacgaactaattcctgatgcacttgggttgatcttaagctacctgtccctacaagaggtcttaacagtcattcccagcgtctgcaaatcctggaggaaggctgtcacagggccctattgttggcaagaggtagacattgaagagtggggcagtcgatgtcagccccaccatcttgatcggatgcttcgaatgctcatcacccgaagctccggatctctccgcatgttatgtgttacgggcctccacaatgattccatttgctccttcatcactgagaatgctggattccttcagactttgcgagtgcggagaagcgaaatgagtgatt

SEQ ID NO: 2099 - DNA, 372 bp, Gossypium hirsutum
  unsure (1)..(372): unsure at all n locations
  Clone ID: LIB3145-042-Q1-K1-B2
gcaaatcctggaggaaggctgtcacagggccctattgttggcaagaggtagacattgaagagtggagcagtcgatgtcagccccaccatcttgatcggatgcttcgaatgctcatcacccgaagctccggatctctccgcaagttatgtgtttcgggcctccacaatgattccattttctccttcatcactgagaagtaagtgtatgataagattataggtgctttgatgttcttgtatgataagattccaaatgagacaattataatattacaagcaacatagtattatactttccctcacctttaagtgatcattgttcaatggacatttttcagtgatacagnatttctttttgtgtttcttgcttttt

SEQ ID NO: 2100 - DNA, 1045 bp, Gossypium hirsutum
  Clone ID: GOSHI-09MAY01-C37423_2
tttttcaagtaagggtaaaaatgatgggatggtagtggtggtaaaaagaaggttcccacaatggaaatggaggcaatggtggtggtggaaacaataatggcaatggagctaaaaaggtggaggcaaaatggtggtggtgggggccatgagatgatgaacaaaattaaaagtggtgggtttcaagacattgatgttattaatcatggcaaaggaggtgggggtgggggtggtgccggcggcggcggtaagaatatggggcagatgggccaaatgggtggtcagatgggtcacatgggtccaatgggtggtcagatgggttataacatgggccaaatgggaaaccatccgatgaaccagatgagtaattttgctgcagtgcaaggactaccagcagcaatgaataatggtggtgggtattatcaagggatgggaccaggaaatccttataatcagcctcaatatatggcagccatgatgatgaaccaacaacgtgcaaatggagggatgtatccacccatgatgtatgctcatcaaccatatccccaaccaaattatggacctccacccatgcatccacccccatctgaatcttatgctcattacttcagtgatgaaaacgcaaacagctgtagtatcatgtaaaattttccccattttagtgccattttctcccttctttgcttttgggtttttctttttagggtgctttttatacatgctttgcgaggttcaagaagacatttgcttatgtttttcttgccaatggaaaatgtttagttttccctatagtcattccccaaacagtctttgggtcactatgtagaacagaagtgtagttaaagtttgagggatatataatgaagtatatatagttgctttctcaaaagatgtaccaaatgtaggtttttatgtattgttggtttcaaatataaaaaagaacatgggtgggcattccgctttaatagatatttatttatttctttctattttacttttttataataatctttactttgttgccctaataaattaatcctattttaat

SEQ ID NO: 2101 - DNA, 664 bp, Gossypium hirsutum
  unsure (1)..(664): unsure at all n locations
  Clone ID: AI727372.1
cctcgtgccggcacgaggatttttcaagaaggataaaggtgaaaaagatttttcaagtaagggtaaaaatgaatgggatggtagtggtggtaaaaacaaaggttcccacaatggaaatggaggcaatggtggtggtggaaacaataatggccatggagctaaaaagggtggaggcaaaaatggtggtggtgggggccatgaaatgatgaacaaaattaaaagtggtgggtttcaagacattgatgttattaataatggcaaaggaagtgggggtgggggtcctcccccccccccgcccccccctcctcgcgcgggggggcccccccggcccctccgncgtgtccctttcttttcctcctgtctctctcttggccttcttccccttgccttcctgtgtccttctccccctccctcttcctccctgtgtcccgcccccctctctctccgctcgtgcttctcctctcgcttctctctctcgccttcttcctctgcgtccggtcctctctctctcctctgcccgcctctcgctttgcggtcttctccctttttctccccttcctttcctctcctcccgctctccttgtttcttcctgtccttggtcgttgctgctcctttctctctttgtttctccttgtctcgctccctgccctcgttctggcgtta

SEQ ID NO: 2102 - DNA, 363 bp, Gossypium hirsutum
  unsure (1)..(363): unsure at all n locations
  Clone ID: LIB3145-042-Q1-K1-A2
attttagggtggtttttttatacatgctttgcgaggttcaagaagacatttgcttatgtttttcttgccaatggaaaatgtttagttttccctatagtcattccccaaacagtctttgggtcactatgtagaagagaagtgtagttaaagtttgagggatatataatgaagtatatataggtgctttctcaaaaaatgtaccaaatgtaagtttttaatgtattgttggttcaaatataaaaaagaacatggttgggcatcaatccctatctaaagggtccatttggttttccaaangtncanntnntnattttnntttntntaaaattaatatttatttaaaatggatactatttattcttt

SEQ ID NO: 2103 - DNA, 335 bp, Gossypium hirsutum
  unsure (1)..(335): unsure at all n locations
  Clone ID: LIB3148-051-Q1-K1-D3
ggtgaaaagaacaaaggagggaaaggaaacaatggggaaggagataaaaagagtggtaaaaaaggaggaggtggtggtggtttgcttggatttttcaagaaggataaaggtgaaaaagatttttcaagtaagggtaaaaatgaatgggatggtagtggtggtaaaaacaaaggttcccacaatggaaatggaggcaatggtggtggtggaaacaataatggccatggagctaaaaagggtggagctggatttggtgggggcgctggtgctggtggtggcgttggtggaggtggtgggcttggaagaggtggtggtggaaggttcngaagaagtgg

SEQ ID NO: 2104 - DNA, 585 bp, Gossypium hirsutum
  Clone ID: GOSHI-09MAY01-C37763_1
ctcccctcgttgttcatcaatcccttcatctaaatctaacccctagttaagttctctgactattgaagaaatttgaattccttaattatcattcaatttatcagttcatattaaatattcttccggataaaaaaaaaagaacaacacttgctatggcttctttgcaaaggtcagcgagttcatccgattcggatccgcagtacgcaaacatcgatgagaggaaaaggaagagaatgctatcaaaccgtgaatcggcaaggcgatcaagaatgaggaagcagaagcggctccaagatttggttcaggaagtgaacgcattacagaaagataacagtcagatctctgaaaagatcggcgtcgccacccaatactacatcgagatgcaatcggccaataatgttttaagagctcaggcgatggaattgaccgagagattacggtctctgaattcggtgctgcaagttgtggaagaagccgacgggtatgccattgatatccccgagattccggagccgtggcagctcccctgttcgatacagccaattatggctttggttgatatgttcgagtatgatggatagactc

SEQ ID NO: 2105 - DNA, 934 bp, Gossypium hirsutum
  Clone ID: GOSHI-09MAY01-C37713_3
tccacgcgtccggtataatcaatgggtttgctttgccattgaaggaagaacataagctctttcttgtccgtgcactgataccgcttcataaaccaaagtgtatacccatgtaccaccagcagttatcttactgcattactcaattcgtggagaaggactgcaagcttgccgataccgttatacgggggttgctaaagtattggccaatcacaaatagctcgaaagaagtcatgttcttaggtgaactggaggaagttttagaagccacacaacctgccgagtttcaacgctgcatggtaccattgtgccgtcagataggccgttgcttgagtagttcccattttcaggtggcagagagggctttgttcttatggaacaatgatcatattgagagcctaataagacagaaccggaaagttatacttccaattatcttcccctccttgggagaaggaacggctagaagccactggaatccagcagtgcagagcttgcactctgaatgtccgcaagattttctcggataccgaccctgagctctttgaggagtgcttgcataagtttgaggaagaccaagcacaagagaacgaggtcaaatcgaaacgcgaaaccacatggaaacgattagaagagattgctgcaatgaaagctgcaagtaatgaacccgtgctcgtctccccgaaagcaactactcgcaacccatcttgctaggacaagagattgccgttttagctacctgacattttcatgtcaagaacggttcggggaaccataggtcggtggacatgatggtttcaagaacaaaaatgaagatgaagcggagttttccatcatatcaagtgttcactcacaccttctgaaaatctggtttgctggattctttgctgtgtcctcttggattcatcaacatgcgtgggggtaaaaactaaaaccc

SEQ ID NO: 2106 - DNA, 899 bp, Gossypium hirsutum
  Clone ID: GOSHI-09MAY01-C37713_2
ccgcgtccgcgcagactattggggggggggggggggggtaatcaaagggttcgctttgccactgaaagaagaacataagctctttcttgttcgtgcattgataccacttcacaaaccaaagtgcatacccatgtaccatcagcagttatcttactgcattactcagtttgtggaggggggggggggggttttttttctgttattcaggcttgctaaagtattggccaattacaaatagctcaaacccacgcgtccgcccgcgcgtccgggaggaagttttagaagccacacaacttgctgagtttcaacgctgcatggtacccttattccaccagataggccgttgcttgagtcgctcgcattttcaggtggcagagagggctttgttcttatggaacaatgatcatattgagaccctaataaaacagaatcgaaatgttatacttcccattatcttcccctccttggaaaagaatgctagaagccactggaatccagcagtgcagagcttgactctaaacgtccgcaagattttctccgataccgaccctgagctctttgaggagtgcttgcataagtttgaggaagaccaagctcaagagaacgaggtcaaatcgaaacgcgaagccacatggaaacgattagaagagattgctgcaatgaaagctgcaagtaatgaacccgtgctcgtctccccgaaagcaactactcgcaacccgtcttgctaggacaagagattgccgttttagctacctgacattttcgatgtcaagatcggtattgcacgccatcggggaaccgctggtaggtggacatgatgcgttcaagaacaaaaatgaagatgaagccgagtttctcatcctatcaagggatgactcacaccttgtggaaatctggct

SEQ ID NO: 2107 - DNA, 716 bp, Gossypium hirsutum
  Clone ID: GOSHI-09MAY01-C37713_1
aaagggagtatcttaaaaccgttctgcatcgggtctacggaaaatttatggtccatcgtccattcatcaggaaggcaatccataacatcttttaccgctttattttcgaaactgaaaaacataacggaatcgcagagcttctagaaatactgggaagtataatcaatgggtttgctttgccattgaaggaagaacataagctctttcttgtccgtgcactgataccgcttcataaaccaaagtgtatacccatgtaccaccagcagttatcttactgcattactcaattcgtggagaaggactgcaagcttgccgataccgttatacgggggttgctaaagtattggccaatcacaaatagctcgaaagaagtcatgttcttaggtgaactggaggaagttttagaagccacacaacctgccgagtttcaacgctgcatggtaccattgtgccgtcagataggccgttgcttgagtagttcccattttcaggtagggatttcctcgtttctctacttgcaacttttgcttcttttccgtatgaatgtcccttaacagaatatacctagataagtaaattgaattttaaaacgaggggaactcatcgatatgagttaaaggctttattgtctgacgatatctggacattgttgctatgtgaaactgtatcgagttggttatgctagcatgaaatatgcccttgtgtttataatttgt

SEQ ID NO: 2108 - DNA, 1193 bp, Gossypium hirsutum
  Clone ID: GOSHI-09MAY01-C37733_1
ctgattactttttgttaagattaaatgattctcctgaagccaaaggcgcttcatttttctattttttatgttgtttctagcttataattgcctgcagcaagggaggaaccagcattgaagaccttgcagagaaatatcctgatatgattattaaggtacctgttgatgtcttcaagggaattactgatgaagatgctgccagagttgttgatggtttggctcccaaggttgccgatagaaatgattctattgaacaagtgaagaaactatataagcttttctgtgaacgtgattgcacgttgttggaaatcaatcctcttgctgagacttctagcaaccaattagtagctgctgatgcaaagttgaactttgatgataatgctgcctttcgtcaaaaggagatatttgctctccgtgatccatctcaagaggatccctcgggaggttgctgctgccaaagctgatttaaattacattgggttagatggagaaattggttgcatggtgaatggtgcagggttggcgatggctacaatggatataattaaatttcatggaggaactcctgccaattttctggatgtaggtggaaatgcttctgaaggccaggtggtcgaggcatttaagattttgacttctgatgataaagtgaaagccattttggtgaatatatttggaggaataatgaaatgtgatgtgattgcaagtgggatcgtcaatgctgccaaacaggtggccctaaaagttcctgtggtggtccgtcttgaaggtaccaatgttgaccaaggaaagcggattttgaaggaaagtggaatgacactaattacagcagaagatttggatgatgctgcagagaaagcagttaaggcagccagcaaatgagaaatttaagatacgagtcctttgttcttattgtttctcatctttcacagcattgatgagtttttcctttatttttcttttcatcaagcccatagaatcttgttaatgataaagcagcagggggttactgtcctgcaaaattgatatatttgccacatttgctccggacagttggcatataattcaaagttgatataacatccttctttgatttggaaaacataacgaaaaagatcccctaaagcctttgcatgggaaacttccaagagacttttgcgcgcatgcggtgctgttaactcaggacccatgat

SEQ ID NO: 2109 - DNA, 1021 bp, Gossypium hirsutum
  Clone ID: GOSHI-09MAY01-C37693_1
gcgttcgcggcgcgtgggcggcgcgtgggggggcgcgtggcccacgcgtccggttaccttcggctctaccccgcctctgcatagctctgttatattttgattggagatcccgatcgaaaatctttgtgatcttcaaagatgggagaaagaaaagtactgaacaaatattacccgccggactgcgggcgcggcgaagcttccgagggcccggcggccgaagaatcaacagatgaaggttcgtatgatgcttccgatgagcatacgttgtaatacctgcggaaactatatttataaaggcaccaagttcaattcacgcaaagaagatgttatcggcgagacatatttgggaatccaaatatttaggttttatttcaaatgcaccaagtgctctgcggagatgacgataaagactgatccacaaaattcagattatgttgttgaatcgggtgcaacaagaaattttgaaccttggcgtgctgaagatgaggaagcggagaaagagaaacagaaaagggaatctgaagaaatgggggatgcgatgaaatctttggagaacagaacgttggattcaaaaagagagatggatatccttgctgcgcttgatgaaatgaagtctatgaagtccagacatgccacggtgagcgtagattcaatgctggaggccttgcaacgcactgccgcagaaaaggaaaagaaaatagaagaagaagacgaagccctcattaaatcgattttccagaagccaaaggaatttgttcgaaggatttcagatgatgttttcgaacgatgatgaggatctgacccgtttattgagtggcaatggtgaaacctcaaatgatggcttaaagaggagaaaggtgtcggaagaatcttcaagtaaccctacagatgctttgacaaaagctagtttgcctgattattccagcagtaaagaaggttcaagtggctcggtgagttgtcaagttaaagctccattcaagtcgtcgtgataatctcggttgtgaagaagaaacctgagaag

SEQ ID NO: 2110 - DNA, 460 bp, Gossypium hirsutum
  Clone ID: GOSHI-09MAY01-C37603_1
ggcagagcaaatggcaatatatgacgccaacaacggaggaaaaatgccattaacatgggaacaaacaagaagcatgcctcttacacatagggttgtaatggagagcttgaggatggcaagtattatatctttcacattcagggaagcagtagttgatgttgactacaaaggatacttaatacccaagggttggaaagtgatgccattattcaggaacattcatcataacccagaattttttcccaatcctcaagaattcgatccatctagatttgaggtagctccaaaagccaacaccttcatgccatttggaaacggcgttcatgcttgccccggcaatgaactggcgaagctggaggctctcattttgatccaccacctagtaacaaattttaggtgcgaggttgtgagttcaaaaagtggtattcaatatgggccattcccagtgcctcaacaagga

SEQ ID NO: 2111 - DNA, 651 bp, Gossypium hirsutum
  Clone ID: GOSHI-09MAY01-C37633_1
ctagatgcatatgattgccattttggtcacaacattttgatgttttgatagcaaaatcagatgctgatgatgatgatgatggaacttatgcaattattatggtccaccaattcaatgcacaacaccatcctcagctcatggtgatgtttaaccttttataatgctattgcgtttctttgatcaagtaatctatttgtattcctatcattgttttcatatttgacttgtacaggatcttacatcatgctgccaagctccccagcttattcatctacagaagcaggtcatcaattctataaagcccagtatctgctgataaacgtagcttattgcgtcagtcattggcaattgtcatcttgataccgttgagcatgtatttcttctcctccttaaaatttgatgtaagaaaaattggcgataagggagaaagtgtggaaggtgaggatttatttgcttgaagtgataccagaaaaatgcaccaatgccgagattttgataaattgctttggttatgtatttgcctcgggtgttctaaatgagctagagtctagaaatgccagttctcaaattcctctcatatatatgttggtgacttcagtttatgttaaaaaacatttaattgataagatcgatacgtcatttgtttgtatt

SEQ ID NO: 2112 - DNA, 635 bp, Gossypium hirsutum
  Clone ID: GOSHI-09MAY01-C37623_1
cttttggaaattagtgaggaacttactaaagccgccgggtcaggaacagatcgattgtcagaaacctaagcctattttgcttgataccggtgaaatgaaactaccatatgactgggcgccttcgatacttccggtccaaattgtgcggatggggcaacttgtcattctcagcgtacctgcagaattcacaaccatggccggcaggcggctccgagacgctgttaagacggtgcttacttccggacacaataagcaattcgacagcaatgtccatattgtcattgcagggttgacaaatacttattcacaatatgttaccacttttgaggagtaccaagtgcagagatacgagggagcctcaactctgtatggaccacacacgcttaacgcatacatacaggagttcaagaaacttgcagcagctcttatcggtggtggatctgttgaaccaggtccgcaaccacctgatcttcttgataagcagattagcttattacagcggttgtccttgatgcaaccccacttggtgtgaatttcggtgatgttaaagacgatatcgctaattccactttcaaacggggcaatacagtctcagtcaccttctggtctgcttgtcctaggaacgacctcatgac

SEQ ID NO: 2113 - DNA, 383 bp, Gossypium hirsutum
  Clone ID: uC-gsronu33B113a12b1
atgcaggagtgactgctggtgaagaactggggcgctatctgcagagtataaagggtttatccacacacatcttcttggtcacctgatgattgatgaacatacaaagaaggcatataggctcttcttttgttcaaattgatggcttgtattcagtattactattattatattttaaattaaaagttatttttatgatcattatgatgtaaatatcaaatcaaaaacccattattaagtcaagtcagtcaaactaataaaccatgtgctaattgtttcatcactggaactctcattcccttataaatgaaatgcgaatcaaatttctcatggaaagaacttaagttttggcccttgaggatgttgtcttcaaagttgatattttt

SEQ ID NO: 2114 - DNA, 265 bp, Gossypium hirsutum
  unsure (1)..(265): unsure at all n locations
  Clone ID: LIB3145-038-Q1-K1-H6
cccacgcgtccgcggacgcgtccgcccacgcgtccgggaacagccaaagaaggcagagaggctcttcttttgtacaaattgatggcttctcttcagtattactattattattttttaaattaaaatttatttttatgatcattatgatgtaaatatcaaatcaaaaacccatcattaagtcaagtcagtcaaactaataaaccaggtgctaattgtttcagcactggaactctcattcccttataaatgaaatgcgaatcanntt

SEQ ID NO: 2115 - DNA, 612 bp, Gossypium hirsutum
  Clone ID: GOSHI-09MAY01-C37153_1
cccacgcgtccgcccacgcgtccgtgtaaaatttaacgtttgttaactttggtggcgtggcatacacatggatgatcatgtgagtggcatgtcaacatttaattaatttttaataatttaaaagtattataatttttacacctttttaataatttttatgattttaaaataatttttataatttttaaattaaaaaaattaattaaatgctgatgtgttatccatgtggcaattcatgcaaagttaaaaaatgttaattttttcattcattttgaggtgatttaacaaaaaacacaagtttaaaaattaaaagagatgaaaaattaaaaagaaagttaaaataaattttttataatattggaggaccaactaagtcattatgccaatatcagtaatttcggttgctaaaataaaataagtttatattctcgtaatgaatgtaaaacatttgtatttttatgtaaggcataatcatttacattacaattaaaaggaagacagattaggttacacaataaatagtaccatgtaaatgtttgtttgttttgtttttgtattttatgtttacagatgtagcagatttagaaaaagcttaatttatgaattaatttt

SEQ ID NO: 2116 - DNA, 551 bp, Gossypium hirsutum
  Clone ID: LIB3828-028-Q6-N6-A3
aaaaacaaaacaaacaaacatttacatggtactatttattgtgtaacctaatctgtcataatgtaaatgattatgccttacataaaaatacaaatgttttattttcattacgagagtataaacatattttattttagcaaccgaaatcattgatattggcataatgacttagttggtcttctaatattataaaaaatttattttaactttccttttaatttttaaatttgtgttttttattaaatcacctcaaaatgaatgaaaaattgacatttcttaacattgcatgaattgccatgtgaatgacacatcaacatttaattaattttttaattttaaaaaattttaaaaattattttaaaaatcataaaaattattaaaaacctgtaaaattataatacttttaaattattaaaatttaattaaatgttgacatgccactcacatggctattaatgtgtatgccacgccagcaaagttaacaaatattaaattttccattccattttagggtaatgtggcaaaaaaatacaagctcttaaggttaaaaa

SEQ ID NO: 2117 - DNA, 655 bp, Gossypium hirsutum
  Clone ID: GOSHI-09MAY01-C37133_1
tgaatttcctgcacggcctggcctacttgagtgtagttacttccttaaaacggggggctgtaaatgtaaatcggggggcaaatatcatcatccaaaaaatagagttgcaaagatggctccatgtgttctcagtgacaagggattgccactcagacctgatcaaaccatctgctcacactatagccgctatggtatttgcaagtttggaccagcctgcaaatttgaccattcaaaacaggaagctccatcaacaatggcaatggccggactggatcagcctccaccattcagccattttgctgctacagaacaaaccggaatcgccagtggtactgatactgcagttcagcagcctgtgtaaaaagaattttcagccaaagctccctagctttttagatctgacattagcaaggattttaaattttattttttgaactgcaagactccatttatcttgtttctaccccgtgttcctttgccacaagctttttggggatggcaatatataatatatcgtagttaggatgctgttgtgttgctagtttttgaagctgaaaatgaaatcaggatatgtaaattttctcggtttcatgtcatactacaaaactaatacaattcctttgaaatggtgtgtgaactacgtcactttttttcg

SEQ ID NO: 2118 - DNA, 478 bp, Gossypium hirsutum
  Clone ID: GOSHI-09MAY01-C37033_1
tttccacgcgtccgaatccttttcaaagaatggaaaaccacacggtgacgaatctttccaaagggagaaggcaatctttgcggtgatcttggtgtgcacctttgtcatgggctttgcctggtcatgggggcctcttggttggttaattcctagtgagattttccctctggagaccagatcggctggttttgcctttgcagtcagcaccaacatgctcttcactttcatcattggtcaagctttcctctcaatgctatgccagatgcaagctggaatctttttcttctttgctgcctgggttatcataatgggagccttcacatggttcttgttgcctgagaccaaaggtgtccctgttgatgctatggatgacacagtctggaagcagcactggttctggcgtactttcatgatcgaggatgacaggtccgatgccacggttgtttgaaccaactacaatgaagttcctagttgtgtt

SEQ ID NO: 2119 - DNA, 549 bp, Gossypium hirsutum
  Clone ID: GOSHI-09MAY01-C37373_1
tttccacgcgtccgcccacgcgtccggccatcttttctgataacgtactggcaacatctgtggtcgtcaattctacagtgcttcatgcaaatgagcctgagaaacacgttttccatatagtgaccgataaactgaattttgctgcaatgagaatgtggtttatcttgaatgctcctgaaaaggctacagttcaggttgagaacattgatgattttaagtggttgaattcctcttactgttccgttctacgtcagctcgaatctgccagagttaaagaatattatttcaagaatcatccatcctctctctctgttgggtctgacaatctcaagtacaggaatccaaaatacttgtcgatgctgaatcaccttcgattctatcttcctgaagtggacccaaaactccacaagatcctatttttggatgatgatattgtagttcagaaggatttgacacctctttgggatgttgatctgaatggaatggtgaatggtgcagtggagacctgtaaagggagctttcatagattcgacaagtttctcaatttca

SEQ ID NO: 2120 - DNA, 549 bp, Gossypium hirsutum
  Clone ID: GOSHI-09MAY01-C37363_2
ttgaaaggggaggatatcacatctttgccttacaaggagctgatggcgttagaggatgccctcgaaaatggccttacctgtgtccgtgccaagcagatggatgttcttgatatggcaaacaaaaatacgaaattcttggaggaggacaataagcaactcaatttcattgtgaatcaacagcaactgacttatgaaaatgtgagagagcatatggatcaccacggataccatcgagctgctcgtgctgacttcaactcgcagatgcctttcgcattccgagtgcagccaatgcaaccaaacttacaagagaggatgtgatgaacattgtgagggttatccaatagctaaagctgcctatatgagctataaggtcaaaaatggagggggtgcttagtttctgaatgataataacttttaagttctacgagtattccagtgtttatgacaatcttagtaatatagatatcaactatgaatttgatattatgaacaattattgtatctactttgagcaacttatatgtgtctctatgaaccatagtgtgtttt

SEQ ID NO: 2121 - DNA, 951 bp, Gossypium hirsutum
  Clone ID: GOSHI-09MAY01-C37363_1
aaacccacgcgtccgagaagtagaaagagaaaaatcaaagatggggagaggcaagattgagatcaagaggattgagaactcaagtaacaggcaggtcacttactcaaagagaaggaatggaatcatgaagaaagctaaagagattactgttctttgtgatgctaaagtttctcttatcatctttgctagttctgggaagatgcatgaatattgcagcccttctactaagttgattgatattttggaccaatatcagaaaacttctgggaaaaagttatgggatgctaaacatgagaatctcagcaatgaaatagatagaatcaagaaagagaatgatagcatgcagattgagctcaggcatttgaaaggggaggatatcacatctttgccttacaaggagctgatggccatagaggatgcccttgaaaatgggcttacctatgttcgtggcaaacagatggatgtccttgataagacatggaaaaataccaaattcctggaggaggactacaagcagctcagtttcattctgaatcaacaacaagtcgcttatgaaagtgcaagagagcagatggatcatggataccagcgagcccgggactacaactcacagatgtcttccaccttccaagtgcagccaatgcagccaaacttacaagagagaatgtaataacactgtggattggggcttgctgaagcctgaaattctctcaagcttgctttctggtgataatatgataacattttatctgagtatttaattccagggatgtgatatgatcttaaactcatgcatatttacctcttgtaataatttctaagttgtattgcagtcccaactatgaacttgttttatattgctgtatccattctcagtgtctttatgaaactatagactggtatttctgcgtgctagcaaatcaattctttactttgttttcccaaaaaaaa

SEQ ID NO: 2122 - DNA, 882 bp, Gossypium hirsutum
  Clone ID: GOSHI-09MAY01-C37313_1
ttccccaatttcctaacttcgtttcccctaaatttccctaagttattcttcctcaattatttttcccaattcccaaacttccaatccctttgtgatccaaactcccaatttcccaaatccctttatttcttatcgggttcctccatgctacaccttccattttctcccaaattcaaacttttcctttcaaaatttaagctcccaatccgccgcaaagctcgattcttcaacaaaaaggtgctggaacaatgccgttcctctattctgattcctgtaggagcattcgacccattgctttatgcaacgattactttcagatttttgggctgtaagtgttcttcctttttttttccgctagtatagaatttttagatattttggttattcattgtgatcctagttgatgctttttagatattttgggtaaaaaatgtagagaagttagaagaattatagttgccatgctgaaagtaaagatgcagcaggttggtgaaatgtttttaatttcacatagatttggcttctttatacgtgttcttgatcttttgcagtaaatttggtgggacacagcactatgcagtgttcaactttgatgagactaatgttagatgagccatcaattttgttttatctttccgtagtgaagttatgttcctagccttcttttatttttgagtggctgtattttttatgcttcacttgtgcatctattggtgtgtgtgtctgtgttatagttgaaccataaaaaagttgttcctttaattttcttaatagtttatataatttgaactctattcatattatgggttttctgacaaaaatgctttcaattatgcatctttttggttgacaaaaatgtgtttgggttgcattctgtaatct

SEQ ID NO: 2123 - DNA, 1323 bp, Gossypium hirsutum
  Clone ID: GOSHI-09MAY01-C37333_1
aacatgtgaatataggttcaggtccatctgttctaaaattaggtggtttcgttcttcgagcaactcgccgagggtttcttttttaagagctttgattatctcgccgaacatttccaggtcattgccattgatcagcttgggcaagcattggggtggaccgagcaggcctaacttacatgcaaaagcactgaagaaactgaggcatggtttgttgattcttttgaggaacggcgtagagtgaaaaatctcagtaaccttattatacttggacattcttttggaggatatattgcttctaaatatgctctcaagcaccctgagcacgttcagcacttaattttagtgggacctgctggattttcatcagaaccagatagcagtattgagtggctaacccgcttaagagagacatggaaaggggcaattttgaatcgtttgtgggagtctaattttactcctcagaagattaggtttaggtccctggggtccaaagattggacaccaggatacggctactaggtttaattctaaagattcagctgattttgtactggcagaggagcagaataaacttctgacagattatgcataccatatttccgctgccaaagcaagtggagagctgtgcttaaaacatatattctcttttggagcattacctcgggtgcctcttctaaaaaggcttggttacactgcttgatatttattgggtccattgcattggctaatacatgcgtatttatattgatttctgtatagacctttgaaaatactatttctgcaatatcctcacattgacttaaaaacatactctagaatgcaaaatatgtatctctcttgttgctcttggtacattcctgtagatccacaataaagaagcaggtatcgttaacaaccatgaatttatctatgcatcaattatatgagaataaaataaaataaaataaaaagagagtaatgcccttgtaatgttctcaaagcttcattctggtgtaaaatgccagtgaataggcataccttcattgctagcagaggattatgatataagcggttcattcataagtgcatggcatctaatcaaaactaggagaatacacttttcaaaatttgatgctgactaatttaagagccatataatatgaacgactagcttgtatctagcaacaagaggtgagttcaggtttttagaagacactactaagtttcatatatacgggactgaagattgggtgaactatcaaggagcccaagacactactaaggtttgttcacttctgccatacataagaagtcaacagacgttgtgcatttttccatgtaaag

SEQ ID NO: 2124 - DNA, 428 bp, Gossypium hirsutum
  Clone ID: GOSHI-09MAY01-C30993_1
ttcaaagcaaaaatcccagcatcatccatagctgtaagaaaatttgaaaaaaaaaaaaaccagacatggaagccactgctgtttatagcagcaaaggaagtccatttcttttttcctctaggattacaactaaaaaatcatttaaatcatcacaaaatgctgcaactttctcaccttttctcattcaatccatggctactcagaaaccattgccttcagttgccaaaactgttggttctagaaagggctcgaactcgaccgtttttccgctcggcgagccagggccaaggaacagcacagtggtgacacaaccagtgaagctactgacaaatgtagagaaactgaaactgctaaccaaagcagagaaagcagggctactatccgcggcagagaagttcgggttatcgttatcgtccatagagaaactc

SEQ ID NO: 2125 - DNA, 343 bp, Gossypium hirsutum
  Clone ID: GOSHI-09MAY01-C30973_1
cccacgcgtccgctgcggcatatgggaaatgggcatctgctatagctaccagattaaatgctggaggcctctcttgcaaggttcttgacaaagaagcatttcagaagcagatgttggagaagctcatatggatttgtgcattcatgcttgttggagctcgtcatcctggggcaactgtaggcgttgtagagaaggaataccgctctgagagctcgcatctgctgctgcagcggagaaaggtataacatttgaagaagctatggaggataggctatgtgcttattctcgagctgtggcccacttcccaacagcagttaaagagttcaagtggaaggaatggatg

SEQ ID NO: 2126 - DNA, 400 bp, Gossypium hirsutum
  Clone ID: GOSHI-09MAY01-C30893_1
caagtattgccatgcttaaagtctgtcaagcaattcatgtcagcttctcctgatattattttggggccagaatcatatggtctaaggcgagtcggaaatcttttacataagttcaagacctggaggattgacagttgtggtcagttaagaaagatatgggaggacaattcaagagcattacattcagtaattctagactggcttcaagaaagtttccacaaacattttgaaaagctttggtcagagatgctttctgaaggcttcctagagccccaagaacgttttcccaagagattgaagagaggataaaggggaagggggggggccttatttgaaagtagggaatgaaaaataccccaatttaattaatttaattatgaatcttgcgaatctaaaatga

SEQ ID NO: 2127 - DNA, 425 bp, Gossypium hirsutum
  Clone ID: GOSHI-09MAY01-C30843_1
atatttatacaatctttgcttaagcaaagatagacactgttcgaagctagtatggggaaattgaaggcggtggtggttgttacaatgatttccaccgttcttctatctattctatggagggcaacgttacatttagaggataatgaaagttttgttcgatgtcttttagatcattctcacccttctcatcccatttcatcagcaatctatacgcctaaatcctcctccttttcatctgttttggaatcttacattagaaacctacgattcaacgagttcctccacaccaaagcctttccttattctcactgcactccatgaatcccacatccaagctgccgttacttgcggtaaaagccattgggttcaagtggaaaatccgaaggggggccatgattacgagggcctatcttatggatctactc

SEQ ID NO: 2128 - DNA, 667 bp, Gossypium hirsutum
  Clone ID: GOSHI-09MAY01-C30803_1
atccgttaaaagatcccttccatttccctctcctccaatcactcttgcactaaaaacgatggtggtgcgcagatcgccgggctccgctaatctcaccgcctcaaaaccctctctaggactgggaggtaccaccacacgcctctctctctcccgcccgatcccaaacctccacgtcaccaaaaaacccaactcctccattgtcgcttccgtttccgcttcctcttctccctccaccggtcaaaccaattggtctctcgattcctggaagtcgaagcctgcccaacaactccctgaatatccggatgccgatgagctcgattcggtactcaaaacgatcgggtccttcccgccaattgtgtttgctggggaggcaagaagactggaggaaaagctagccagcgccgccgtcgggaaagcgtttctgttacagggtggtgactgtgcagagagtttcaaagaattcaatgggaccaacattagagacactttcagagtccttttgcagatgggaattgtcctcacttttggtgcccaaatgcctgtcatcactggtgggaggatggcagggcaatttgcaaagccaaggtcagatccatttgagataaaagatggcgtaaagttaccgagttatcgaggagattacataaatggcgatgcttttgacgag

SEQ ID NO: 2129 - DNA, 594 bp, Gossypium hirsutum
  Clone ID: GOSHI-09MAY01-C30563_1
cccacgcgtccgcccacgcgtccgctcccgagtcgattcaaacacaaatgatgtggtttgacaagtatttggagagtgaaggttgtaaagatccagaatcggatcagtgcaaagaagcgtttgatgatgctctgttttgggttggtgaaattggcgtcaatgattatgcatatactattggatcaactgtgtcaggcgacaccattcgaaagcttgccataaatacttttactgagtttttacagggattgctgaagaaaggtgcaaaatacgtggtcgttgaagcactgccgacgacaggttgtttaccgttggcgatgacattggctccttcagacgacagagatgacatagggtgcgtgaaaagcgtgaacaaccaaagcaacgcccataacctcgtcctccaatccaaggtgtcggatctcagacaacagtttccccaagccatcattgtttacgctgattactggaatgcttatcgcacggtgatgcaaagcccagaaaaatacggattcaaagagagcctcaaagcatgttgcggaacatgggagccgtacaacttcgaggttttcaatacgtgcgggaatccttcgg

SEQ ID NO: 2130 - DNA, 590 bp, Gossypium hirsutum
  Clone ID: GOSHI-09MAY01-C30443_1
cccacgcgtacggcacgcgtacgcttaccactcagattcctctcttacccaactcttcatgctctgcatcggctttcccttgtgccctcacttcccgtaacacaaggccccataaattcagaattcatgcaaacttgggggaaggagaaggagagctcaagcctaaaggaaagaagaaatttataactagagaagaagaaccagagcagtattggcaaacagcaggagaaagggaaggagagaatcccatgaagacccctcttccttacattataatatttggaatgtcaacaccttttgtaatcttagccattgcttttgccaatggctggattaacgttcctgttcgatgagttttgagaattgagagactgggtttttcaatgttggtttactccaaatgcacctttaattcagccttctcggctttctaccgtatgcatttgtcgttaacacacccttgttttgagtatttatgttgtgaatttctcaagcaaaaccagaccatttctgagtactgggtcttctatatcagttaaaagagacatggctttttggtcaaacccaaaacttcttagtaataaaattat

SEQ ID NO: 2131 - DNA, 497 bp, Gossypium hirsutum
  Clone ID: GOSHI-09MAY01-C30463_1
cccacgcgtccgtattaatccagatggagcaatgagggatataagagatttggataatataagcgtctgagattggtttttgtctaaaggtggtacacgcatgagcatccagcgaatgtgggatccggttgcttatgccttgggttttattgactgtgataacatcagtgctcgttgtatgcttacgattttctctctgtttgccactaagacagaggcttcccttctgcgtatgctgaagggttctcccgatgtctacttgagtggtccaatcagaaattatataacagaaagaggaggcaggttccatctaaggtggggatgcagagagatactttacgataaatccgctgatggagagacatatggtaccggacttgccatgtccaaagctacctacaaggaacttcgtaactgctgttgcttatgttgctgcatgggatgttcctggaataaaaagggtactttcattcgggtggagggaattagaatttttt

SEQ ID NO: 2132 - DNA, 518 bp, Gossypium hirsutum
  Clone ID: GOSHI-09MAY01-C30723_1
cccacgcgtccgcccacgcgtccgtcttcttctattgtatgctcagcagtggtgtccgcctctacccccaattaagcttaatatcacccagaaatgtttaataacagaaagtagcagaatgaaaattcaagtacgaaaatggctatgctgggagcaagtccaattaggttctcaagctttccaccgtcttcttcatatctcacttccaccttcaaacccacctcctcttccacactatcattagttgtggtggggaaatcaattatctatcgtcgatgtgtcgcctgctccgctgttcaggaatcttctactcctacagccactgctgaaaccaagggaaccactccaccatcagccggcgttgctggtggtgaggaggaagtgaaggctgccccaaaagcagctgcagcaaagcctaaacctgctgcaaaggctcctgccaaatctttgccggagttgatgtcggaggatgtcatcccttcattgaaaacaatacttgaagctcaagatgatatatc

SEQ ID NO: 2133 - DNA, 373 bp, Gossypium hirsutum
  Clone ID: GOSHI-09MAY01-C30693_1
gtttatttcttaattttcaaattaccgcaatcagggtttgatatttcccttttttgcatggttcacatttttgaagaaaatacttagagagggtaatttagaatttcaatctgaggtaggggtttttaaagcttccaatggcgtttttaggcgacgcgctacggcaagcgtttatgccgaagcacgagtacgagagcctacgggaggaagataaagcttggacgaagctacaaaggccgatcttaatcggttccatagtgatcatttgtgttgcgatcttcgttggcatgattataagcttgaagattgtgtttccgggagatgatttgaagcgaccgttttgcgatgaccggagactgcagcctttgccgtt

SEQ ID NO: 2134 - DNA, 896 bp, Gossypium hirsutum
  Clone ID: GOSHI-09MAY01-C30683_1
cccacgcgtccgcccacgcgtccgcccacgcgtccgcccacgcgttcgtcatttttctttggaaacaaaaaacaaaaaatagaaaaaataaagagcaagagatatggcaagcacattctcttataattcttttggattccttctcattcttgtcgcctttagttccttgataaatataagttcagctggtaggcaaattgcccctaaaactagcattgagtttatcagaacatcttgtagttcaacgacttaccctaaactttgttacgaatctctcttaacacaggctagcatgatccaaacaagcccccaactcatcgcccatgcagccctaaacgtgaccctttcaaccgccaagtcaacctcggccatgatggtgaagcttgccaaaagccaaggattgaagcctacagaggtgggcgccatgcaagattgcgtggaggaattggaggacacgatagatgagctgagaaagtcaatcagcgagatgggtcagattaaaggctccaattttggactaatgattaacgatatacagacatgggttagcgctgctttgacggatgagaacacctgccccgacgggtttggagggaaaaacatgaacggcagtatagagactgcggtgagatccaagattgtcacaatcgctcatttgacaagtaatgccttggctttggtcaacagctatgcttcatttcatggttagctatttaatcaactgtacagggaaatttagtcattatttacggtagcaattgtatttatggatttttagaaactacttctgctttcctggtaaatgttaaatatatatgtggtccaaagaagggaatggagatgtgtgtgtgtgtgtgtgtgatcttgggggcttaatgaaaatgaacggagtgatc

SEQ ID NO: 2135 - DNA, 401 bp, Gossypium hirsutum
  Clone ID: GOSHI-09MAY01-C30643_1
aaaaaaactctcttcttcacttttagaaaaaaagaagaagacgcgttcgcctgcgctttagttgatattcagatagaaatcatgccggcgggtggattctcttcgggtacaccggcgggggtggaattcgaagcaaagatcactcctataggcatcatttcctgtgtaatggccgccaccggacgccttatgttccgttacgacgtcggcgtttctggtggcgttacgtccatgcccgacttcttgaaaaaattctttccggttgtttaccggaaaaccagaaaccctggaatcgatggaaattactgcaaatacgacaatcaaggccttcaattgctcacttcatcgctttatttggctggtttaactgccactttcttcgcatcctacaccactaggag

SEQ ID NO: 2136 - DNA, 612 bp, Gossypium hirsutum
  Clone ID: GOSHI-09MAY01-C30173_1
cgaggaacggaagctaatattggatcgaagggcgtagctaagattagtaacagtggtgggggtggcattggaagctcaggtcaaacaatatctaattccgatatgtcaaagcaagggaaacaagcgtccatgcttcacggtatacctgattttgctgaagtgtatagcttcattgggagtgtctttgatccagacactgatgggcacgtacaaaaactcaaagagatggatcccatatatcctgtgccggttttgttactgatgagaaacctcactgggaacttgtgtagtccagattttgagccaattaggaaggtcctatcttcatatgatgttggcacaaacacggtgggagttaccaaaggaattattccccaaaaccaaatgaatgatatattgtgttaaggtgtttattatgtaggattttcgggcaactacgttcctctcatattatacttctccaatgctgcccccagaacagaatctgttttctggtgattgctatcttaaatctaaagcgagtgatgggaattaggggcagcatccttcgaggtttaccaggtggagaagttgcagccagcaacctatagaaaatgctggaaacgatgagtg

SEQ ID NO: 2137 - DNA, 484 bp, Gossypium hirsutum
  Clone ID: GOSHI-09MAY01-C30293_1
cttgaaaggccattattttattgccacttatcatcccttccaaccagactatcaagggtggctctaaaaaattgtttccagttcacctcagtttgcaacaccagagctagtgtgcttcaaagctaccatcatcatcatgtttcttctgttgacaagatccatttccagacatttaaagggttgaaattgaataaacccaatttatcattcactgctggtagatgccaaaaatccaggcttatatgcaaagccagtgaggctgttgctcaagttgaagtggtgacagaagcagactgggaagagcttgtggttggcagtaagacaccagttgtagtggatttttgggcaccatggtgcggaccctgtcgggtgattgaaccagctatagctgaattagccaaagaatatgctgtgaagattgtttgttacaagctcaacactgatgacagcccaaatattgccacaaaattcggtatcaggagca

SEQ ID NO: 2138 - DNA, 354 bp, Gossypium hirsutum
  Clone ID: GOSHI-09MAY01-C31853_2
ttttctttttaaaaaatttacagagcccacctccccattttttcttcttttcctctgctgggtgttcaaagcctagcttgcgccgaaataaaaagaagcaaaataggttgtcaatctttctctgctagggcaaaagaggtagcccatccttgcagctgctccgttgtgcgcacaccaacgatggcggccggaaaaaaaaatcaacggctttgaaggaggtgatgggatggagcagaggagccaagcctccggacgaagcgcaagtggtgcgcccgagggaggagcggcggcagctcttaggctagggtttcttttttttttgcgctgaaagtaaacttatgggctttcaagcta

SEQ ID NO: 2139 - DNA, 430 bp, Gossypium hirsutum
  unsure (1)..(430): unsure at all n locations
  Clone ID: uC-gsflnu33B003b05b1
tctcttttcttttttaaaaaatttacagagcccaactccccattttttcttcttttcctctgctaggttttcaaagcctagcttgcgctgaataaaaagaagcaaaataggttttcaatctttctctgctagggcaaaagagttagcccatccttgcagctgctccgttgtgcgcgcaccaacgatggcggcccgaaaaaaaatcaacggttctgctctctgtatgctcttgtccttgctactgttctatcactgtttcagcctctgttatggctgctactttcgtttcttttttgctctctttgcaagctttgaaggaggtgatgggatggagcagaggagtcaagcctcggggcgaagagcgggtggtgcgcccgaggaggagccgcgacagcttttanggtagggtttctttttttttgctgaaggt

SEQ ID NO: 2140 - DNA, 302 bp, Gossypium hirsutum
  unsure (1)..(302): unsure at all n locations
  Clone ID: LIB3148-047-Q1-K1-H7
ctttttaaaaaatttacagagcccaccttctcattttttcttcttttcctctgctaggttgtcaaagcctagcttgcgccgaaataaaaagaaacaaaataggttttcaatctttctctgctagggcaaaagagttagcccatccttgcagctgctccgttgtgcgcacaccaacgatggcggccggaaaaaaaatcaacggtaagggtattccctccctttttctttttgattttcgaatgtaattntnnanaaaaaaaaaaataaatataatataaataaaaaaaaattaataattatat

SEQ ID NO: 2141 - DNA, 914 bp, Gossypium hirsutum
  Clone ID: GOSHI-09MAY01-C31593_1
atagtagagggaggtatccaccgggaatcggtgttggccgagggggcggagtgaacgcgaaccctagctttcagtcgaggccttcgcaacagcactacgtgcagaggaatttgttgcagaatcaccagcactttcaacaacaacaacaacaacaccagcaacaacaacagcatcagcaacagctgtggctcagacgagaccagttgcccggcggcaatgactccagtgtggtcgatgaggtcgagaagaccgtacaatctgaagccgtcgactctagttcgcaagattggaaggccaggctgaacgtaccgccacctgatacccgctacaaaacagaggatgtgacagctaccaaaggaaatgaatttgaggactattttctgaaacgtgaacttcttatgggaatatatgagaagggttttgaaagaccatctcctattcaggaagagagtattcccattgctttgaccggaagggatattcttgccagagccaaaaatggcactgggaagacaccagcagcatttgtgcattcccgccttggaaaaaattgaccaagataacaatgttattcaagttgtcatacttgttccaacacgagaactggctcttcagacatcacaagtgtgcaaggagctcgggaagcatttacaatttcaagtcatggtcacaactggaggtaccagtctcaaggatgatatcatgccactgtatcaaccaggtcatttgctggttggaactactggcaaaattcttgaccttgctaaaaagggtgtttgcattttgaaagattgttcaatgctgattatggacgaagcagataaacttctgtctgcagagtttcaaccttctatagagcaggtgatacattttcttgcagcaaatcgtcaaattttgatgttttcagccacatt

SEQ ID NO: 2142 - DNA, 477 bp, Gossypium hirsutum
  unsure (1)..(477): unsure at all n locations
  Clone ID: LIB3189-039-P1-K1-D11
gctatgaatagtagagggaggtatccaccaccggggatcggcgttggccgggggggcggagtgagtgctaaccctagttttcagtccaggccgtcacagcaacactacgtgcagaggaatttggttcataatcagcagcactttcaacaacacaatcagcagcattttcaacaacaacagcagtggctcaggcgtaaccagttacccggcggcaatgactccagtgtcatcgatgaggtcgaaaagaccgtacaatcggaagccgttgactcgagttcacaagattggaaggccaggctaaagataccaccagcagatacccgctacaaaacagaggatgtgacagctactaaaggaaatgaatttgaggactattttctgaaacgtgaacttcttatgggaatatatgagaagnggtttgaaagaccatctcctatcaggaagagagtattcccattgctttgaccggagtgatat

SEQ ID NO: 2143 - DNA, 763 bp, Gossypium hirsutum
  Clone ID: GOSHI-09MAY01-C31583_1
ctaaactacatcgggcaaatgtgaattttctttctgaacctatcaaggatggaacaactggaacagtgatagttctcacaactccggatgctcagcgcacaatgcttgcttatcagggtacatcatcgactattaattatgattcttgcctggctggcatagtatccaagactaatatatttgttgttgagggttatttatttgaacttcctgatacgatcaaaactattatacgagcatgtgaagaagcgcgcaggagtggtgccctgatagctgtcaccgcatcagatgtctcctgcattgagagacactatgatgattactgggaaattgtagggaattatgcggatatcttgtttgcaaacagtgacgaagcgagagctctatgccatttttcttcaaaggaaagcccaatttcggcaacaaggtatcttagccactttgttcccttagtgtcggttacggatggacctaaaggatcttacataggtgtaaaaggagaagctgtatatattcctccttctccatgtgtaccagtggacacatgtggtgctggtgatgcatatgcatctggtgttttgtacggcatactacgaggtgtgtcggatttgaaaggtatgggtacattagcagctaggattgcagcgacagttgtggggcaacagggcacacgacttatggttcaagatgctgttgatctggcggagtcattcgcattcaccctaaggggtctagttctagtgtgagttccgatgtaagctcg

SEQ ID NO: 2144 - DNA, 781 bp, Gossypium hirsutum
  Clone ID: GOSHI-09MAY01-C31473_1
ctttgcttttttattttttttcctgatatttaaatccatgtaatagccaaaggaaagtcggtttgtcgtgaagcagtatcagggtataatggtccatactcaaaattagtcacagctcacagcggataaggtcacaagcatgaaaagcaaaatcaaaggagccaatgagagtgggtgaatctctataaaaaaaaactatacatcttctcataatagaaacagctccatttctcctcagtttccctacgttcttcattccccttaccaaaccagctcgcctatctatggctactccactaaggagcaacagcaggctgtccactgccatggagaggaccggccagtgggttttctcccaagagattcctactgatgttattgtcgaagttggtgaagccaatttcaatctccacaagttcatgctggtggcaaagagcaattacataaggaagttgataatggaaacaaatgaagcggatttgacaagaatcaacctgtctgaaatccccggaggccctgagatcttcgagaaagcagccaagttctgctacggcgttaatttcgagattacagtgcataacgtggcggctctccgatgtgctgccgagtatcttcaaatgacggataaatactgcgacaacaacctggcagggcgcaccgaagatttcctctcacaggttgccctgtctagcctttctggcgccgccgtcgttctcaaatcatgcgaggatctgctttccatggctgaagagctcaagattgttcaaagatgcattgatgt

SEQ ID NO: 2145 - DNA, 763 bp, Gossypium hirsutum
  Clone ID: GOSHI-09MAY01-C31143_1
gacaaaatggagagccaaatggcgctgccattatcacagctcagctgagggggagaactattactgaaaagctcctaactgtcgttcgccgtcgcgcacaacctcctcaaccgccgcagcttccgtcggccaatgacttcgtctctaggcaccaccgcctcttctcgaatctcagcatcttcctcccccggagttcgactttctctccatcccccctcctctttttctctcctttctttctcttcctctgttaggccctgcgctttctctcctctatcttctcatttctctccccaccagaggagatcggcagttaatgtgtcgagtagcagaggattcggcacaggtgcaagtccgaaatgtgcagcttcgaatcctgatcagttgaagagggccggagaacatctcaagcaactcctcaactctcagttctgccatcctattctgggtcgcctaggatggcatgatgctggtacctacaacaggaacattgaggaatggccacacaggggtggagcgaatggaagtcttaggtttgaagtagagctaaaacatgccgccaatgctggcctagtgaatgcattgagtcttattcagcctatcaaggacaagtactctgatgtaacttttgctgactcgttccagttggctagtgctactgctattgaggaggctggaggacccaaaattcccatgaaatatgtgaaggggtgatgtctccggtcctaatgagtgtcctgaggagggcaggctacctgatgct

SEQ ID NO: 2146 - DNA, 448 bp, Gossypium hirsutum
  Clone ID: GOSHI-09MAY01-C31123_1
cccacgcgtccgcacgaatataactcatttttcggaattgcttttctttgcgctttttagcaggttttttcatggcttcccttactgtacacctgcttccgccattgcttttacaagatagaaagacccttttcgggacttttccaaaactcccagtttcttataccggagggaggcgaaactgtgctgtttttgtgaaggctaccggtgatagctcagagtcttctacctcacttagtattgtcaagtctgtgcgaaatgtttgggataaatctgatgaagatagggtaggtctcattggtctgggatttgcagctattgtggccctgtggacttcaactaatttgatttcggttattgacaaattgccaattatcccaaatgtgctggaaattattggcatacttgtttccttggggtttatttaccggtatctattgttcaaacc

SEQ ID NO: 2147 - DNA, 578 bp, Gossypium hirsutum
  Clone ID: GOSHI-09MAY01-C31393_6
tttcattctcttccctctgatttttttctcttttcccaaagcaaaacaaaagccatgtctcagactgttgtgctcaaggttggcatgtcatgccaaggatgtgttggagccgtgaagagagttctggggaaaatggaaggtgtggaatcatatgaagtagatttggagcaacagaaagtgactgtgaagggcaacgtccagcctgatgctgtgctgcagaccgtgtcaaagaccggaaagaagactgccttttgggaagcagaagctttggctgaatccgaggcgaagccagccgaatccgaggtgcagccagccgaaaccgaggcgaatccagccgaaaccaaggtgaagccagccgaaactgaggcgaaaccaacagaacccgaggcaaagcccacggaagctgttgctgcagcttaatctgttccccagtttgattcatggaatggtaaacttaatgcagttcacatggattgtagagtatgtatactttcctttaacatggaagcttaaataaggagtggcgggcatgtcactgtgctttttatcttaaacaaacctgaatggtttgttattga

SEQ ID NO: 2148 - DNA, 509 bp, Gossypium hirsutum
  Clone ID: GOSHI-09MAY01-C31393_5
cccacgcgtccgccctcgcgtccgatttttcttctgcttttctctcccgctctttgagtgttccaaacttaaaaagctatggctcagactgttgttctcaaggttggtatgtcatgtgagggctgcgttggagccgcgaagagagttttggggaaaatgcaaggtgtggaatcatatgaagtagattcgaaggagcagaaagtgactgtgaagggcaacgtccaacccgatgcggttctgcaaactgtgtcaaagaccggaaagaagactgccttctgggaaggagaagctccggcagaagccgagacaaagccgggcaacggcttaaaatgtcttaagcccttattgattgattgattgaacattttgatcgggtctgcttatttctatgaactgtagaaatcttggatgattgggaattaccttctggggtggggaacctaaaaccggagaagatttccttatgatatttccctaccttttaaacaaaaaaaaaaaaaaagggcggc

SEQ ID NO: 2149 - DNA, 856 bp, Gossypium hirsutum
  Clone ID: GOSHI-09MAY01-C31393_3
cacagaggagttctcaggggaaaatggagaaatctttcttgtggtatactccattgcttggggaatatagtttgggaatctaatgttacagtattctatgcgataaaaagcttacagcatcctttgaatatactatctgatgaggcataatatgctaatgctttgtaacaaatttcatttacatacaacttacgattattcatgattaatctctgctttttatattgtgttgaatctcttctgatgtataatttcagctcgactaattttttattccgattgcagtttcaagagtagctatccttcatgggaacccgcgcctccgggaaagcatttcttgtcaaatattcgaactttccgggatcaaatgttgcaagggcagggagctagacatgtatattcttctgatagactgtggcgaggtagcccgctgagagcctacagtgatagaaatgactttttatcaaaggaaatgcagcagaatattccaggcggctacaatatggattctttatggctaattgatgctaatcaaaagaatcacccatatcttctagattggtactatacctctcgagcgcaacagatgcctagttatagaagagacactgcagcaaggccatttgaaccagctgaggaacagcataagaattactggggtccgatcaacacaacgcatgatgaagcaagagataaagaataccggccacggcttaaaatgtcttaagcccttattgattgattgattgaacatttcaaactatcctattcctatgaactgtagaattcttggatgattgtgatttacttcctgtgttggtaactaaaaacggaagatgatttcttatgatatttc

SEQ ID NO: 2150 - DNA, 720 bp, Gossypium hirsutum
  Clone ID: GOSHI-09MAY01-C31393_2
gaaaattaagcgcgtggtttggacctgacgtagaaggccactaccaataattcttctataaatttcgattccttccaccacctctgcttcatactaacgccaatcaatatcctcttcttcctcttccctcagaatttttttctcttttcccatagcaaaacaaaagccatgtctcagactgttgtgctcaaggttggcatgtcatgccaaggatgtgttggagccgtgaagagagttctggggaaaatggaaggtgtggaatcatatgaagtagatttggagcaacagaaagtgactgtgaagggcaacgtccagcctgatgctgtgctgcagacagtgtcaaagaccggaaagaagactgccttttgggaagcagaagctctggccgaaaccgaggtgaagccagccgaaaccgaggtgaagcctgcggaaactgaggcgaaaccagcagaacccgaggcaaagcccacggaagctgttgctgcagcttaatctgttccccagtttgattcattgaatggtaaacttaatgcagtttacatggattgtagagtatgtatacttccctttaacatggaagctaaaataaggtgtggggtgcatgtcactatgctttctaggctaaaacatactggattggcttgtttgttgtatcatcatgaaatgaatatttccacttgattttcattttatcatggagatcacttgtttttggcaact

SEQ ID NO: 2151 - DNA, 706 bp, Gossypium hirsutum
  Clone ID: GOSHI-09MAY01-C31393_1
gcctttcacaatcgcaccgtatagctgtcttaagatttgccaacagccattggcacacgtgtatatatatgcgcctcatctccgatagatcgcactcagtgacacacaaggcatttcttcttggtgactaataggacaaatattacattgtgtgccaagaatacctatgcttgatggagaaccacgacattaaggaaaagcatgcgcttgggcatatattgctaactttgcgcaatcattgttgcaaagaccctgaagctagccctcgcgttcccttctgatagactggcgcgaggtaccccgctgagagcttacagttgatagaaatgactggtgtatcaaaggatatgcagcagattatcccaggcggctacaatatggattctttatggctaattgaggctaatcaaaacaatcacccatatctcctagattggcactattcctctcgagcgcaacagatgcctagttatagaagcgacactgcagccaggtccatttgaaccagctgaggagcagcataagaattactggggtccgatcaacacaacgcatgatgaagcaagagataaagaataccggccacaccattttgatgatgggtccctgtcgcatcttgaagcttcaacatcagctcctttcttccatgagagtgtacttcagcatcatgatacaaatgtatcggtgcaccatacacggagctgtg

SEQ ID NO: 2152 - DNA, 612 bp, Gossypium hirsutum
  unsure (1)..(612): unsure at all n locations
  Clone ID: LIB3543-059-Q6-K6-D11
ccccgcgtccgcaattttttaggggggggaggtggcaaaaattaaattattattttccacacttattccttgagatgttgcgttgaagatggtccaggcacccctcacaccgcgcaaatcattccttctataaattcaaccttcgccattaacgctcaatcttctcctttttgggggggggggattttaatttccaaacccaaagcaatgtctcagactgttgttctcaaggttggcatgtcatgcgagggctgtgtcggagccgtgaagagagttttaggaaaaatggaaggtgtggaatcatatgaagtagatttaaaagagcagaaagtgactgtgaagggacaagtcgagcccgatgcggtacttcagacggtgtcgaagacaggaaaaaggactaccttctgggatgcttaatgttcactacaattatgagatatggaaaaatggagaaggcattgacaagctcagaatcctcttcggttgtcaaaattttcgctgcatttctgtctgcaagtagaagttntgccacgagaaatcctgcaatagacccagctttgcagcaatttcccgtctattcatcttcatgcatgcgacagtgagctgtacgac

SEQ ID NO: 2153 - DNA, 468 bp, Gossypium hirsutum
  Clone ID: uC-gsronu33B089g09b1
cccacgcgtccgcaattatcttcttctcctttgctgtcccgctctaagaatttccgggcttaaaaagctatgtctcagactgttgttctcaaggttggtatgtcatgtgagggctgcgttggagccgtgaagagagttttggggaaaatgcaaggtgtggaatcatatgaagtagatttgaaggagcagaaagtgactgtgaagggcaacgtccaacccgatgcggttctacaaactgtgtcaaagaccggaaagaagactaccttctgggaaggagaagctccggcagaagccgagacaaagccggccacggcttaaaatgtcttaagcccttattgattgattgattgaacatttcaaactatcctattcctatgaactgtagaattcttggatgattgtgatttacttcctgtgttggtaactaaaaacggaagatgatttcttatgaaatttccctacttttta

SEQ ID NO: 2154 - DNA, 217 bp, Gossypium hirsutum
  unsure (1)..(217): unsure at all n locations
  Clone ID: LIB3493-027-P1-M1-G2
cttcttcctcttccctcanaattttgttctcttttcccatagcaaaacaaaagccatgttcagactgttgtgctcaaggttggcatgtcatgccaaggatgtgttggagccgggaagagagttctgtttttaatggaaggtgtgtaataatattatgtatattttttactatcttatgttgacttgttattttattttttttttatatattcttttt

SEQ ID NO: 2155 - DNA, 112 bp, Gossypium hirsutum
  Clone ID: uC-gsronu33B012a05b1
ctcacgcgttcgtgtgcttataacatttcaaactatcctatgaactgtagaattcttggatgattgtgatttacttcctgtgttggtactaaaaatggaagatgattttctt

SEQ ID NO: 2156 - DNA, 732 bp, Gossypium hirsutum
  Clone ID: GOSHI-09MAY01-C31383_1
cccacgcgtccggctaacttgataagtgatcaagaagcaaattatgcgatggaaaggtatgggacaaaatttatggacgattatcaagcaatactgagccaaaagcttggcctccaaaaatacaataaacagcttgtcaataaacttcttagtaatttggctgttgataaagtggattacacgaacttctttcgggcactttccaatatcaaagcagatcctagcattccaggtgatgagttgttggtgccattgaaagctgttctgctagacatccgcccgcgccgccgggaggcgtggactagttgggtacaaacctacattcaagagctggttgcgagtggcgtctcagatgaggagaggaaagcttcaatgaactcagttaaccctaaatatgttctcaggaactacttatgtacagagcgctatcgatgcgggggggaggggcgacttggaagaacccgaagctccttaaaggaatggagcgaccatatgatgaacaaccgggaatggaaaaatatgctcatttgcctgcagcatgggcttatcggcctggtgtgtgcatgctatcctgttcgtcatgagtttatcacttgaggtacgttatacagaagtcacaaataccaaaaaagaaaaacatgattgcaccttcgtatataatagtggaaaagatttttatttaccttttcctcctctatatcatacagtttagaagcagcttgtataccctaa

SEQ ID NO: 2157 - DNA, 429 bp, Gossypium hirsutum
  Clone ID: GOSHI-09MAY01-C31273_2
cccacgcgtccgcccacgcggccgctttgcttaagaagttcaatgctccagactctccttattttatgtttctattaagcactcgtgctggaggtcttgggctgaacttgcagacagcagacactgtaattatttttgatagtgactggaacccccaaatggatcagcaggcggaggatagagcccatcgtataggacagaagaaggaagtcagggtttttgtgctggttagtgttggatcaattgaagaggttattttagagcgtgcaaagcagaagatgggtattgatgctaaggtcatccaggctggattgtttaatacaacttccacagctcaggacagaaaagaaatgctggaagaaatcatgcggagaggaacaagctcacttggaacagatgttccaagtgagagggaaatcaatcgacttg

SEQ ID NO: 2158 - DNA, 607 bp, Gossypium hirsutum
  Clone ID: GOSHI-09MAY01-C31273_1
ccaaaaactgttatcttttagttcatattttaattgtactcctacttgagtaaagtcaataccatgataatacgatcatcttcacttatgcagctcaggacagaaaagaaatgctggaagaaatcatgcggagaggaacaagctcacttggaacagatgttccaagtgagagggaaatcaatcgacttgcagctcggtcagatgatgagttccggatgtttgagcaaatggatgaggaaagaagagtaaaggagaattatcggtctcgtctcatggaagaccatgaggtacctgagtgggtatttgtacttaatgatgataggaagggcaaaatttcagaaagctatgttgaattagggaagcgaaaaagaaaaggtgggaactattatccagatacattaagtgacttacagttcatgagggctgtggaaaatgcagaagacatggcaaagaagttaccaagcaaaaggaagagaaaagaccatcttccagctgatgaggactccgagttgcctattaataacataggagtagaatttaggaacgagaatatggcagcaataagtgaaggaactagtgaagataccacctatggttcatcagcttc

SEQ ID NO: 2159 - DNA, 578 bp, Gossypium hirsutum
  Clone ID: GOSHI-09MAY01-C31223_1
tcatgggaaggccgagagtgtgctgaaggcttgtttaggaaacgcctttggggtggtacttttggtgaagtctataaaagacctctatgctgggtggagcacatgtcattggataatgaaaccggattagaaccttgtggtataagagtaaggcctgtctctggcctagtggctgcagattacttcgctcctggatattttgtgtgggcagttcggagtgctaacttggctcggattggatatgaggataaaaccatgtacatggctgcttacgattggagactctcatttcaaaacaccgaggtacgtgatcaaacactgagccgtattaagagtaatattgaactgttggttgctacaaatggagggagaaaagttgtagtcattccacattcgatgggagttctgtatttcctacactttatgaagtgggttgaagcacctgctccgatgggtggtggtggtgggccagattggtgttctaagcatattaaagcccgtgttaacattggtgggccatttctcggcgttccgaaagctattgctgggcttttctcggctgaagcaaaggatattgc

SEQ ID NO: 2160 - DNA, 802 bp, Gossypium hirsutum
  Clone ID: GOSHI-09MAY01-C32913_1
gaggagctcattttttatttttttccccagttcctgattttgagagttgatcctgccgtgagacacaaggatgacaagtacagcttgttttatcattgtgagccgaaatgacatcccaatatatgaagctgaagtgggatctgccgctaaaagagaagatgctgctcagctgcatcaatccgtattacatgcagctctggatatggttcaagaccttgcatggaccaccagtgcaatgttcttgaaagcaattgacaggttcaatgatttggtggtatcggtatatgtaacagctggtcatacacgattcatgctacttcatgactctcgtaatgaagatggaataaagagctttttccaggaggttcatgagctatatataaagatccttctaaatccactctacctgcctggttcccgcattacatcgtcgcatttcgacaccaaagttcgtgcccttgcaagaaaatatctatagactctccatagttgaagatttcatatgtctgtttcatgttctctcatgtatgctgaagagttaacccttttttatgatatcggcttgtgtgttctttacattattagcggctctgtcggaatttcatgggtccagttgcctgtaggaacgacagagacaaagaacatctgagattatgttttctttattggatgtttttaaatagaatttgggaaggaagagttttattgtttagatctgatttataaataagggatgtctaatgtggttatcatatcccaaggtaaaatccggctaaaagaccgatgctgaacaagtacccat

SEQ ID NO: 2161 - DNA, 661 bp, Gossypium hirsutum
  Clone ID: GOSHI-09MAY01-C32903_1
cccacgcgtccgatttttttttatattctatacaaaaacaaaactccatgcggcgaaatggcatttatcaattcttttctgtatctgtttgttataaatataaattcaaatttgagtataatttttcttcttccgttcatacgcatttcatatttcatacattccacatatattatatggtatatggagttagataaaatttcatgtgattcagtaaacagaatagaaattcaattccatcattattagatcgattcgtaggattcgatgaagaatgaaaaaagaatgggatttttttgagaaatgggaaattcaaaatgctcggggatgaaaatggcgaaatgtctacaatacctgggctgaatcagatacaatttgaaggattttgtgggttcatggatcggggcttaacagatgaactgtataagtttccaaaaattgaagatacagagcaagaaattgaatttcaattatttgtggaaacatatcaattggtggaaccgttgataaaagaaagggatgctgtatatgaatcactcacatattcttctgaattatatgtatccgcaggattaatttggaaaaccagtaaggatatgcaagaacaaacaatttttattggaaacattcctttaatgaactccctcggaacttttatagt

SEQ ID NO: 2162 - DNA, 1094 bp, Gossypium hirsutum
  Clone ID: GOSHI-09MAY01-C32593_1
cgataattcatagcaggcagtcataaaacacttcccatgcagctatagcatctcaagctgcttcgcttcgttgctgtcttcaatccaaggtagtgcgtgccatgattctgaatgagctttacctttccgttgaggtctgttccggtgagttcaaggcttcataagcctgtgccgtgtagctctagttttgcatgctctcatcatttggctaccacagctctatttcgaagcagcagtgaatctggagatgtgcctttcttgcgcctttctgctgcatcatctccattgttgagtggggatctaggtggtctatcacaagctttaccgtcattacctaagcgtcgtggatctaatttggtgcctcgagcttcaaaggatgtcccgtaccagttttcgttttccaccgatgactaagaaacccaaatggtggtggaggactttagcgtgccttccttatttaatgcctcttcacgagacgtggatgtatgcagaaacagcatatcatttacacccatttttagaagactttgagtttttgacctatccgtttctcggagccattggaagtttaccgagctggttcttaatggcatatttctttgttgcatatctagggatagtgagaagaaaggaatggccccattttttccgatttcatgttgtgatgggcatggtattggaaattgccttgcaggtaatagggaccgtgagccggtggatgccactcgcaatatattggggtaagttcgggatgcaattttggacagccgtggcatttgcttacctcttcaccattttggagtgcataagatgtgcacttgccggtatgtacgctgacattccttttgtatgtgatgctgcttatatccaaattccatatgattaataatcaaaaacatacggtagaaactgttctaaatttgcattatgcaacgtttatctcgaatggaaaacttttcatgcagatatgaatgttttaagttgaacatcattctcttttttccgatgacaatcgtgctaaagctgttccggttttagttatgattagtgttatcctgattaccctttcttataacagtgatcctcttctgatt

SEQ ID NO: 2163 - DNA, 786 bp, Gossypium hirsutum
  Clone ID: GOSHI-09MAY01-C32563_1
cccacgcgtccgcccacgcgtccgtcgatcttcatctctgagaggaaaagcagaatcaaatccaaaaatacacaaaaacataaaaggagtatttttctcaaattcataaccatgactgatcacttgcaggagcaggagatggaaattgaggccctggaagcaatacttatggatgaattcaaagaaattcattctggtgaaagtgggctaaacacttcgaataggtgcttccaaataacattatctcctcaggatgatgatacagatcaatcaaccaccctaccagttctgctggctttgattttctcgcatactgaaaaatatccagatgagcctccacttctgaatgtaaaaagtatacgaggaatacaagttagtgacctgaaagttttgaaagaaaaacttgaacaagaggcatctgaaaatcttggaatggctatgatttacactttggttacatcagccaaggaatggctatctgaaagatatggtcaagatgctgatgctgacaatgttgaagaagaagaatcaacaaaagatgaggtgattattccacatggagaacctgttactgttgatacatttttagcgtggagagaaaggtttgaggcagagttggcactagagcgagccaagctaatgcccgaatctgctcttacggcacctaaagaaaagaagctctcaggcaggcagtggtttggaagtggaagagctactgcgaaaggtgcagctcgtgttaatgaagaatcagatgaggaagacgaggaagatattgattttgatgat

SEQ ID NO: 2164 - DNA, 539 bp, Gossypium hirsutum
  Clone ID: GOSHI-09MAY01-C32713_1
ttttcgcgtccgattcccagtagcagaacagaaaaaagaggtcttccgtctcatattcttcgatcctctggaaagttgtagaccagagcaagaatacattatggctggacatagtgattcaagttcgtctgaaaagaaatcaagtgaagccatgaatgatgtaccgacctttagcacggagaatatgcaaaataacatgaaagttatatattacagccgaacgtttatgtctatcatcggaggagttattgctggaattttagggttcacaggctttatggggtttatcttttattttcttgtcatggcaattacttcaattggactcatagcaaaggcaaagttctcagtccatttatattttgatagctggaaccggattatactcgatggtttcatgggcggtcttatgtcattcgtgctattttggacatttgcctacgacattgtgcatatattctgaagaagaatctgcaacacctcaccgcctcgccgggccgagtcgccgccccggccccctgctggagactggattcttt

SEQ ID NO: 2165 - DNA, 496 bp, Gossypium hirsutum
  Clone ID: uC-gsflnu33B005d07b1
taaaagaggtcttccgtctcatattcttcgatcctctggaaagttgtagaccagagcaagaatacattatggctggacatagtgattcaagttcgtctgaaaagaaatcaagtgaagccatgaatgatgtaccgacctttagcacggagaatatgcaaaataacatgaaagttatatattacagccgaacgtttatgtctatcatcggaggagttattgctggaattttagggttcacaggctttatggggtttatcttttattttcttgtcatggcaattactttcaattggactcatagcaaaggcaaagtgttcagtccatttatattttgatcgctggaaccgtattattactccaaggtttaatgggcggtcttattgtactcgtgcttttttggacattttcctaccttcattgttcttcttttctgagcaaaatcttttacactcaacaccttactggtttgtggtacctgtttcttcccctatctttt

SEQ ID NO: 2166 - DNA, 508 bp, Gossypium hirsutum
  unsure (1)..(508): unsure at all n locations
  Clone ID: LIB3583-041-P1-K1-F7
gtgaattcccagtagcagaacagaaaaaagaggtcttccgtctcatattcttcgatcctctgggtaattcaccttgcaacataggcggatccaaggggcgaatggaaagggcattagccctctttggcttctcaaaactccttgatccttcaatttttggtctaaatatgacacaagttcctgttctctaaaagttgtagaccagagcaagaatacattatggctggacatagtgattcaagttcgtctgaaaagaaatcaagtgaagccatgaatgatgtaccgacctttagcacggagaatatgcaaaataacatgaaagttatatattacagccgaacgtttatgtctatcatcggaggagttattgctggaattttagggttcacaggctntatggggtttatcttttattttcttgtcatggcaattacttcaattggactcatagcaaaggcaaagttctcagtccatttatattttgatagctggaaccggaatatactcg

SEQ ID NO: 2167 - DNA, 293 bp, Gossypium hirsutum
  Clone ID: LIB3135-056-Q1-K1-E10
gtgaattgcctgacgcatgaacacgacaaataggaagtgtttcgtctcagtattctgtgatgcgtggtggaaagttggcgaccatagcaagcactacattatggactggacatagcgatataaggtcgactggaaggaaatcacgggaagtcatgaatgacgcaccgacctttagcacggagaatatgcgaaataacacgaaagttatatattacagccgaacgtgtatgtctatcattggaggagttattgctggaactttagggatcacaggctttatcggggatatcttt

SEQ ID NO: 2168 - DNA, 480 bp, Gossypium hirsutum
  Clone ID: GOSHI-09MAY01-C32693_1
ccgtccgaattcccggtcgccacgcgtcatctcttcttcacactctctccctgctgcattctagccccgacccacctcccgaaacgtacgatttcgtcgtacggccgagcattgaaggccaggtcatgaacttctacgtgttgaaacggcccggcgtcgattttttcctggaagaaataagcaagaaacacgaagtggtggttttcacggcggggctcaagcaatatgcttcccaggtcttggataagctcgacccgaagggcttaatatcccaccggctttatcgggattcttgcaaggaactgaacgggaagttcgttaaagacttgtctgaaatggggagggatttagggagaattgtcatcgtcgacgataacccaaacgcttactctctgcaaccagagaacgccgtccctatacggccatttgtggaggatagtcacgacagggagctggagaaattggttcaattctttcagt

SEQ ID NO: 2169 - DNA, 470 bp, Gossypium hirsutum
  Clone ID: GOSHI-09MAY01-C32613_1
cccacgcgttcgggaaaaagaaacccccccccctctcctcttgaaaacaggcaatggcgtggattcaatattcatctccttgggtcagaacaacctcatttcctactttatcagtgcccatcagagcttcttcacgtctgtctctgccaaccactttcagaaaatgggtcgcacattttagagtcaagtccttgaactgggtcttctctggtgctcttgctcttacattatctgcagcaggggttgggttcgcggaggcaaaagtcggtgttaacaagccggaattgcttcctagagagttcactccagtgattgatgtagcaggcttttctctctgatggccaggagaaaagactcattcaggagatcagtgatatcgaaaaggataccggctttaagttgagagtattagcacaaaaataccctgacacaccaggttggcaatcaaagacttttggcagtagatgatc

SEQ ID NO: 2170 - DNA, 581 bp, Gossypium hirsutum
  Clone ID: GOSHI-09MAY01-C32193_1
cagaaacagcatgggccggcgctgcttataacctcattctctacatgctggctagccatgttttaggagcttgctggtatcttctcgcaatagagcgacaagaagcatgctggaggactgcctgtgatgtcgaggatccatggtgtcagtataaattttttgattgccacagggttaaagaccctggcagggatacctggttcaagtccagcaatattactaacctatgcagtccaagttccagcttctatgtgttcggtatatatggtgatgccttgacatttgatgtttctacttcaccattcttcaacaagtacttttattgcctcgggtggggtttaaggaacttgagttcactgggacaaaatcttgtcactagcacttatgtgggtgaaataatttttgtcatcattattgcaacccttggtctggttctcttttcgctgctcattggtaatatgcaaacataccttcaatctactactgtcatgttggaagaatgtagaattaggagaactgatacttatcaatggatgcgtcacaggcaactttcttctgagctaaatctatctgtatgaaaa

SEQ ID NO: 2171 - DNA, 968 bp, Gossypium hirsutum
  Clone ID: GOSHI-09MAY01-C32093_1
cccacgcgtccgcccacgcgtccgaaacaaaaacaaaaccatctgctcatcgcagattcagatcgaaaattggggccaaaaaatacgaagaaaaatgacgatgtttcacttcttcaactgtgcgatcctcactttcggtcctcacgccgtctactactccgccactcccttatcggagtatgatactcttggtacttctgttaaagctgcccttgtttatcttggaactgctttggtaaagcttgtttgtctcgcaacgcttttgaaggtttctgagaatgacggcttcgatccgtaccaggaacttttgaaggcagtgattggttttatagatgttgctggcctttattttgccttaacacagttgactcataggaacatctctcaaaatcataaatttcaagctgttggacttggatgggcatttgctgattcggttctacatagattggcacccctttgggtgggagctagaggactagaattcacttgggatttcattctacaaggcttggaagcaaatgctaatttggtgttaagtatatctcttgctgcattgggatctttaatgtggcttcgcaaaaacaagcccaagactttgattcccataatatacgcatgtgccggaattgttgctaccatgccatccattacaagctatctaaggcgaggattgggatggcacttcccgaaggtggtaggcttcgaactgttcacgtctttgagtatggctttcattagttggcaattgttttctgcatgccaaaggccctcttcgtgaggagcaaagtttataccctccacttgatgtttgaaagagattttattgcccatcaatttttcaatcatctttgatgtactgttggaactatcttaacatcaatctgtaagatttttgccaatggcagaaaaactcagattttgtatctctagaaaaattagagaaaaagaaaaaggattttggatgt

SEQ ID NO: 2172 - DNA, 372 bp, Gossypium hirsutum
  Clone ID: LIB3135-011-Q1-K1-H11
cccacgcgtccgggctttctcttcatgcaagaaatttttgatgttggagttgaccatcaaaattatttttggacttcgatgcttcatatggttgtgtttgtttctcaacgatggagcatgagttgatgaattgatcctacagttgctgccaatgtgaaccgaaaatttccaaaggtggtcctttaaatccaagggtggagttgaagattggctctacttttatgtactgtctatggtgttgtatactattctttcttcttctacctttgctctaaggtcttctttttcttgttctattgttcttggttctgtacgtttggagacaatagtatgggtaatgatataaaactgaaatgagattcattttatttt

SEQ ID NO: 2173 - DNA, 302 bp, Gossypium hirsutum
  Clone ID: LIB3146-059-Q1-K1-E7
cggacgcgtgggcggacgcgtgggttcatatggttgtgtttgtttctcaacgatggagcatgagttgatgccaataactcgtgaaccgaaaatttccaaaggtggtccttcaaatccaagggtggagttgaagattggctctacttttatatactgtctatggtgttgtatgctattctttcttcttctacctttgctctaaggtcttctttttcttgttctattgttcttgttggttctgtacgtttggagacaatagtatggttaatgatataaaactgaaatgagattcatttcatttt

SEQ ID NO: 2174 - DNA, 714 bp, Gossypium hirsutum
  Clone ID: GOSHI-09MAY01-C33923_2
ctaattctttttttatctgcgatttcttacatgtgattcttcaattgaaaagcttcagtgttttggtgtttcggtttcttgcaaacttataaggaaaagcttcattgtttcgatttcttgcaaacttacataacccacacaaagaagacggagaaggtggcacagaaattcggattctgtcatcgggggaatcggtatttaagggtttttgatcgtttcatttttcttcatcatcgtgaagtgcaccattggcatccactcttgtatgggaacgggatttcagttcctccgaggagttgattacagaattttgtccagaatgcaggatagttaacaaagggctgaatggggatctaaaaaatgcaatgaaggatggaaaaccaattataatcgagatacaacacacagagacttctggcatccttatggtgttatttctagtagttggtctggcatcaggatcagtcatagcttggttctgggtcatcggatcatcagccaagatctctccaacacgtggccgctatgaatttctgctaatgatgtgtttacctttgtaaagtttatctaaaagccgttgtttgtagcagtgtttttcttcaaattgtatgatgaatactgtgcctgaagtgtgcatatctgctttcaatgtatgcctgcatcttaaaaacatgaaaaagaaaaaatggaaacatttggctattatctgctttt

SEQ ID NO: 2175 - DNA, 625 bp, Gossypium hirsutum
  Clone ID: GOSHI-09MAY01-C33923_1
gcagtctatctccttgaaaatgcaaagcttgcgatttccgcttgtgttgtgaggttactgttctttcctctcttcttaggttgcttgcacggtcctcagctcttccgaacagagtttccagtctcgttactgacttgccttctagggctgacccgggccgacgcgcccggtcggttaatgatcatggctcccaaatctgtccagtatacaacacgcagagacttcgggcatcgtggtggtgttgtttctagtacttggtctggcatcaggatcagtcatagcttggttctgggtcatctgatcatcagccaagatctctccaacaggtggccgctatgaatttgtgctaatgatgtttttacctttgtaaagtttatctaaaagtcgttgtttgtagcagtgtttttcttcaaattgtatgatgaatactgtgcctgaagtgtgcatatctgctctcaatgtatgcctgtatcttaaaaacatgatgaaaaaaaatggaaacatttggctgataactgcctttcatagccttctcggtcttccttcccatcagctaaccttctaaatacgccattttatacaacaaaataaccggaacctgctgggaaaaaaaaaaattgaagaa

SEQ ID NO: 2176 - DNA, 329 bp, Gossypium hirsutum
  unsure (1)..(329): unsure at all n locations
  Clone ID: uC-gsronu33B016g02b1
attttttgctaacttacataacccacacaaagaagacggagaaggtggccagaaattcggattctgtcatcgggggaatcggcatttaagggtttttgatcgtttcatttttcttcatcatcgtgaagtgcaccattggcatccactcttgtatgggaacgggatttcagttcctccgaggagttgattacagaattttgtcgagaatgcaggatagttaacaaagggctgaggggggacctttgggaaataagcgtatagaagcattgcgtcttgtcaaagcgggggtgattcacttaaatctagatccacgatggtacgccnnanna

SEQ ID NO: 2177 - DNA, 498 bp, Gossypium hirsutum
  Clone ID: GOSHI-09MAY01-C33833_1
cccacgcgtccgaaaaaaaaaaacccttactatggcccctttcttgtcgcttggtcgtcttcgggttgccgtacgaagtaggaaaggtttcaaacccacatccagggctagacatggaaagaagcgtggaaccaaggagttgcggggaagagtggagaggttgaagacagagatggagaaaagaagcgaggaacagaaggatatcagggaaagacagagacaagtgaaagacaaagttacagcaattgaagccgaatgcgaggaattaaagagagaaactagattcattgttcagcaaactgccagaacccagatcaaactggggcttatgttccgcatattgaaagcaagggaaactggtcacttggatgaaagccgcccttctcactcagatgctccgagaaattgtaagatttgagaatgaggaggagaaagaagggtgagggctgtatctcgacgataaactacctatgctctgctgcgaaataaacttgtttg

SEQ ID NO: 2178 - DNA, 434 bp, Gossypium hirsutum
  unsure (1)..(434): unsure at all n locations
  Clone ID: LIB3148-037-Q1-K1-D9
gataaatcataattgatagcaacaggaggaggaagaaagaaaaaaaaaaaaaacccttactatggcccctttcttgtcgcttggtcgtcttcgggttgccgtacgaagtaggaaaggtttcaatttgcttgggccatttgggctaatttcgaaattgggccattgggtctataaattaaatttagcttgggtaataatttgggctaaaaacttgtatttgggtctggtgaaaattgtaatgaattatttcggattttgggctttaatttaatttgggcttttattttttttnaaaaaaaaaaaaananaaaaaaaaaaaaaaaaaaaaaaaaaaaaaatanaattaaaananaaaaataaaagaagaaaaataaaaaaaaaaataaacaaaaatttataaaaaaaaaaggggcggcccttttaaaggaaccaac

SEQ ID NO: 2179 - DNA, 411 bp, Gossypium hirsutum
  unsure (1)..(411): unsure at all n locations
  Clone ID: LIB3135-009-Q1-K1-E4
gacatatttcaactgccgatctatccccatattcggcaaatgaacatcgcatgaaagccggattgggccttgttagaccacgagttcactcanaacctttaagatcctcgcttaagctctgattacaacgaagcaagcaaggacatgaaggagccagcattaaggtactaacggagccagctagaggtggtgacgcacgtctgatgatgcatgaagacacatgtggggcttgtactgaggcagcagcggtttgttggaagctgctggaaccagatacgacgcaatggaaggcaccttagggttcaaaagtttcaatttgcttgggccatttgggctaatttcgaaattgagccattgggtctataaattaaatttagctggggtaataattggacctaaaaacttgaattt

SEQ ID NO: 2180 - DNA, 369 bp, Gossypium hirsutum
  unsure (1)..(369): unsure at all n locations
  Clone ID: LIB3493-015-P1-M1-A4
gttgaatcactttatatgcttacggtttttatatatcgtgatcagggaaagatgcgtggaaccaaggagttgcggggaagagtggagaggttgaagacagagatggagaaaagaagcgaggaacggaaggatatcagggaaagacagagacaagtgaaagacaaagttgcagcaattgaagccgaatgcgaggaattaaagagagaaactagattcattgttcagcaaactgtcagaacccagatcaaactggggcttatgttccgcatattgaaagcaagggaaactggtcacttggatgaangccgccttctcactcagatgctccggcaagagaatgcatactttgtaggctaatcgatttattgt

SEQ ID NO: 2181 - DNA, 829 bp, Gossypium hirsutum
  Clone ID: GOSHI-09MAY01-C33563_1
cccagcgtccgccccgcgtccgggatttttgatgagtttgtttgaaaggggaatgcaagaggatacagggatcttttttaggtaatattaatacattttgaactcgctctgttgatcttcaaatttctctcatcttagtgcatatgcatttggaacccaatgatactatattacatgaacttaggtgttgctttggtgtcttcaaatttctctcctaatttccactgattctccattctgacttgttgatagtatctaaggaagtaagtgctttgataacagggaaaacattagaatatctgttattggagatctaactaagctccctaaggcccttcaggaactgatggtcaacttagaggaagccaccaagaacaatacacgttttcaactaatcgtagcggtcagttacagcggacactatgatgttgttcaagcttgccaaaggcttgctctgaaggcaaagtgtggtcttatcgaacccagtgacatcaatgtctctctaatggaacaggagctagaaacaaattgcacagaattcccccatcccgacctgcttataaggacaagtggagagttcagaattagcaatttcatgttatggcagctggcatatactgaattgtactttgcacagtcactatggccggatttcggaaaagccgaatttttgaacgcattgcttgcctttcaacaaaagcagaaacgttacggtgtatgaagttatttgtgtacgactgttgacacttaattattgtggaatgggaaagaattgatggtgacacgcgaaggggcttaacaagaagctggatttggccattggagtatt

SEQ ID NO: 2182 - DNA, 435 bp, Gossypium hirsutum
  Clone ID: LIB3135-005-Q1-K1-E10
cccacgcgtactcggacgcgtggggccggatttcggagaaaccgactttttgaaggcattcgttgcctttcagcaaaggcagagacgttacggtgtatgaagttatttgtgtacgactgttgacacttagttattgatggtgacatacgaagggggttaacaagaagctgtatttggcattggagtattagaatcaacttgcacagagcatatattttgcagtgcaatcaggtaagaaactaaatgtaatgtccttgaaactggaagttgatcgtaaacaaggttcaacactcgaaagaccccccattgtgatttgtaactgtcattaaattctccttaccatgacttccctctatattctctagggtgatagattaataaccacgtaaattacgtgtagtgaagtaagatttgcttcactctgtactcctaatg

SEQ ID NO: 2183 - DNA, 466 bp, Gossypium hirsutum
  Clone ID: GOSHI-09MAY01-C33513_1
cccacgcgtccgcaaaaaggagttgttatggagaacaagagccactatccggttccacatagcaagcaggggctccaccatctgctgccattgtgaacaaagtattggggtcgatgaacaaaccggtttacttgctcgacataacgacgttgtcacagttgagaaaagatgctcatccttcgacttatagtggtgaccattcgggtaatgattgtagccattggtgtcttcctggtttgcctgatacatggaaccagcttctatatgcagctcttggtatgtgaaaaggtccacattgggcaacatagaatttacctctttttcttcttcatatgaattatacaatattcaaaggtgatgaaagttatcatatactacttgtaggtgataattggcggggggggggggaagatcaaatgtaaagtgattggatttaatcaaaataatcaatgctcttattaatctc

SEQ ID NO: 2184 - DNA, 908 bp, Gossypium hirsutum
  Clone ID: GOSHI-09MAY01-C33423_1
cccacgcgtccgggagaaagcattgaggccggattcctgggtcgcccaaatgctctccgcttcgtcctggtgatttggagcttttcagatctggggctgagaagttctcaactgctttcagttcagaccggacccataacttgattgtcaggctgcggcataatgtcattcggactgggctacgcaacataagtatctcatattctcgcatcgcactggccgatgttgccaagaagcttagattggactctgttgctgatgctgagagcatagtagccaaggcaatcagagatggagctatcgatgcgacattggatcattcaaatggatgtatgctgtccaaggagacgggtgacatctactctacaactgagcctcaaacggcattcaactctaggattgctttctgcctcaatatgcataacgaggctgtgcgtgcacttcggttcccaccaaactcccacaaggagaaagaaagtgctgagaagaggagagaaagacaacaacaggagcaagagcttgcaaagcacattgcagaggaagatgacgacgaattttagagattgacattcgaaaagttactttatccaccatatgatggtttgatcaagttgtgcattttcctttttaaaagtgccctagtagaactagaaacgcttttggttttattttcgcaatagctactatttccattgataacattgctttacagtcctacgccatggagttgcactttatttgtatttttattttcctcccttgatttcaagttttattccttggactttgcaatcccccttgtttgctttctttctttttcttaataatacaacttttttttaatcttctttttactttttctatttcaattatcttctaaaaaaaagggggggcccccttttaaagga

SEQ ID NO: 2185 - DNA, 511 bp, Gossypium hirsutum
  Clone ID: uC-gsflnu33B056g04b1
tcttggttttcgggttcaatgcaacaaatgggcaatcattgttcgattactgctgggagaaatccccgagaggactgtttttatgcagaaaggcatggagaaagcattgaggccatactttgaactgacaaatgctgtccgcattggtgatttggagcttttcagatctgttgctgagaagttctcaactactttcagttcagaccggacccataacttgattgtcaggctgcggcataatgtcattcggactgggctacgcaacataagtatctcatattctcgcatcgcactggccgatgttgcgaagaagcttagattggactctgttgctgatgctgagagcatagtagccaaggcaatcagagatggagctatcgatgcgacattggatcattcaaatggatgtatgctgtccaaggagacgggtgacatctactctacaactgagccttaaacggcattcaactctaggattgctttctgcctaatatgcataacgatgctgtgc

SEQ ID NO: 2186 - DNA, 811 bp, Gossypium hirsutum
  Clone ID: GOSHI-09MAY01-C33683_1
cttatgtctcctctagaggtggatggttcatggatgtgtttcatgtcacggatcaacaaggaaaaaagacaccgatggaaaaaccattgattacatagagagggttctaggacctaagggccacactacagatgggatgaaagactgccctggcaaacgtgtcggggtgcactcttttggtgatcacactgccatcgaactcattggaagggacaggcctggtctcttatcagagatctcggctgtccttgccaaccttcacttcaatgttactgttgcggaagtatggacacataatagacgaatagcatgtgtgctctatgtcaatgataataccacgagtgggtctgtggatgatcccaacagactgtctattatggaggagcagcttaagcacatcatgcgtggttgtgaggacgatgacaatgtggctcgtaccagcttctccatgggattcactcatattgatcgccggcttcatcaaatgctgtttgctgatagggattacgaaggtggtggagtgacaactgaggttgactatcctccatccttcaaaccaaagatcacagttgagcgctgtgaggagaaaggatactcggttgttactgtccggtgcaaagatcgagctaagctcatgtttgacattgtctgcacgctcacggacatgcaatatgtagtttttcatgctaacatctcatccaatggtccttatgcttcacaggaatattttattcgccacatggatggctgcacacttgatactgaaggagagaaagaaagggttgttaaatgtctcgaaacttccattcat

SEQ ID NO: 2187 - DNA, 578 bp, Gossypium hirsutum
  Clone ID: GOSHI-09MAY01-C33653_2
cttattgtttcttcctcttttatatgtctgtcgctccggtttctttccgggctgggtagaagccagttggaatattatcttcaattacctccatcttggggaaccgacttcttaaccgcacctccactcgcaccccttctgttgtaatgtacacttcttcacctaccaggagtcctcacgcggtcggcatacgacaagaacctggatgatcaggtccatgcgactgtggttcctgatgatgggattcagcctcaatcgggcatgtactgggctcctgacccgcgggcaggggtatttggtcccgctacggagcaacttaacgcatctgcggtgtggggagcagggcacccattccagtggtgcatacttggtcctggaggaaaaggtgtggttttttttcacatgtattgaggacttgtcttttcttcttcattcctttattatttgattttatccttttactatatcgtttttttgcatttaaatctctttcgacttgttattttcattttcttatactacttatattttctcttatatcttttctttcaattttaattttctttctttcattttct

SEQ ID NO: 2188 - DNA, 749 bp, Gossypium hirsutum
  Clone ID: GOSHI-09MAY01-C33653_1
ccctctcgtccgatttatatatatacacacactccgttgtagaaaggaaatatattcccatcttcaaccgttgccttattgtttcttcctcttttagattttctttctctccgttttctttccttacttgtatggcagccaatttgaagagtggtggagggatcgccagcttggggaagcgacttcttaaccgcacctccactcgcaccccttctcttttcatctccacttcttcacctaccaggagtcctcacgcgtcggcatacgacaagaacctggatgatcaggtccatgcggctgtggttcctgatgatgtgattcagcctcaatcggacaagtactgggctcctgacccgcggacaggggtatttggccctgctacggagcaacttaacgcatctgcgggtggggagcagggcatccattcgagtggtgcaaactcggtcctggaggaaaaggcgtggttccgccccactagtattgaggacttggagaagccacaccatcactaagtcgctgataatgagcctgctactatatagtctataggtaaaacaaagacaataggtgtggtttgcttggatcaaataaactggaaaaacgttttaatggttcatgttctatttctacctggttgttacatgggaatttgcaaatctagttactgcgaactctgtaacacaggaacttattatatttgtgatgcttgcgcgctatcttactataaaaatgttggggttattttgtgt

SEQ ID NO: 2189 - DNA, 341 bp, Gossypium hirsutum
  Clone ID: GOSHI-09MAY01-C33093_1
cccacgcgtccgcccacgcgtacgcaatcttctcacaaagcagagtagcagcagcaaaacaacccagggggccctccaagcgcccactatctccataaaaccatctaattctccacttgctcctacacccaatgctggcctgcggccaccctccgatcgttttgctttgaaatcatccttcttttctccatcgctccatctcttgctttcctcttccccaccagcgccgtccaactaatactgcctcacctgcaccaaagttttccatgcgtgtggcctccaagcaagcttatatttgccgtgattgcgggtatatatataatgagaggactccctttgag

SEQ ID NO: 2190 - DNA, 559 bp, Gossypium hirsutum
  Clone ID: GOSHI-09MAY01-C33053_1
aggaaacaaaccaaacatttatatatatttcaactcaactatactaaggcaaatagtatataacattatatagcctcgttaaactaaatggtaacgttttggctgtgggctacagtcttgtgcagccgtatcagtctttttcccttacacatttgcccttcgtctctttaccacttaaaagggtcaatactggttaaaaaagtcgaaacccaaaaggaaagaagagtagaaatggaaatggatcatggcggggaacttgtatttttttttcgtttctactgctaaagttttttttcactcttggggttaataagtttttcttttgcaaattggttcttccttcctccaaatcgtcaaaaagaaaaataataaaacacatatttatcaaactctgaaattcttgccggtgaatgtttgaccaaactgccaatgggcgggaacgatgttccaagaggtggaagtgcgcctgtcactgcctgtgaccctgaaagagagtgactgaccaacaagaacggcgtttgattgccagttctgaccccagtttcggctcatgctcatc

SEQ ID NO: 2191 - DNA, 849 bp, Gossypium hirsutum
  Clone ID: GOSHI-09MAY01-C33393_1
cttcttccttctccatttgccctagccgccgccttcactccactttgcagtcagccatcgcagacgtccctcgggccagctgatgccgccggtgttcagctctcttcctcctcaatctatttgccggcttagaaacctaaaacaaatccggatgtaggggaattcgataaggaaacgtcacgaaaaaaaaaaaaagagattgcgtgatgttatcttcctttttcattttttgatttttttcgcccaaaattctctcccactctcaccgctgccgccgacatcgtagcgattctttgtggcgaccttctcagtacttaactctatctactctatcgcttccgtgatttggatttgactctcgtttccgatttttagtaaagctctctctgctttttgttagcttcgtctcattgaaaatcatctcttacaagttcccgttcttctagttcctttgctccaagggaaattactggacgccatccattccgtccaccaccgctatcctctgcaatgtcagaccgtgacaggcaacgcgggagggatcgcgagagagaccgagaccgagagcgtgaccgcgaaacgaatcgcaggcgatacagagatgttcgcgaccgagagcgagacagagacagggaacggacgcgcagcaagagatcccgcactccggagcgtacccgatcccgtcacacgcgctcttctacgcgttcccctgaccgtgaacggtaccgttcacgctcccactcttaggaacgctccgtccaccgtcattaccggcaccggcaccgaacaccgtcagatgaacccccgaggaaatgttaccgccatgaaagcgaggaaagggagaatgat

SEQ ID NO: 2192 - DNA, 741 bp, Gossypium hirsutum
  Clone ID: GOSHI-09MAY01-C33363_1
caacgaagggcatacggctagatgcggaaggtgatgcatctttggaagacttagcgaatgctggagctcagggtactggggtcgatccatctccagatcctgaaaaagccaagtccagtaataaaaagagaaaaagtgcttctgaaaggcaaacatctgctaagcaaaggatttctcagaagacaagtgaacctagctttgtggataatgagttagatgatgcccttcaagatgatatgcaatcacagagacccaaaaggcctaagagaccaaagaagagtgtaaatgaaaacctacaaccagcaattactactgcagctgctgcatcagcttctggccaggtacctggaaatgagtttggtcctggtggttttgggactgaaatggggcataacatggcgcagagtaatatgtcaacgtgataacttgacgaaaggaaagcaaggtacaccttaattgctgtcactgcaacacttgttggatggttgtggtcatttcgactaaaactgacctgcatattgattagtatagtagtatgcatgtatatataacattaatttttggtgggagggagaattgttctaggtgcagcggttgattacattagaaaatatgggaaaatatatgcgggataatcatatattgtagatgttataaccagcctgggtgcagtaaacgttgttggtttaccaataacagacccatatatttattgaccactctagattgggcccgttccgc

SEQ ID NO: 2193 - DNA, 1335 bp, Gossypium hirsutum
  Clone ID: GOSHI-09MAY01-C33323_1
ctttttccctctttcgtgatcttcgatctccgttccttttcccttttgggtttaccatataatcttcgcaattgaatcaaagtgagaaaacagttatcgagcggcgtcgtaatggaagcacacggcgccggactccggcgagttttggtgttggcattttgcgttgccgggatttggtctgcctatatttaccaaggctttcttcaggaaactctgtccaccaagcgatttggttccgacgggaagaggtttgagcatcttgcatttcttaacttggcgcaaaatgtggtctgcttagtttggtcttacataatgataaagctttggtccagtagaagcaatggtggtgctcccttgtggacttattggagtgctggaatcacaaatacaattggtccggccatgggtatagaagcattgaagtacatcagctacccggctcaggtgttggccaagtcctcaaaaatgattcctgtcatgctgatgggcactctagtttatggtattcgatacactttccctgagtatatctgtactttccttgtggctggaggagtatctgcttttgcacttatgaagactagctctaaaacaattagcaagttggcacaccccaatgcaccccttggatatgggctctgttttctgaaccttgcatttgatggctttacaaacgctacgcaggattcaataactgcaaggtatccaaagacaagtgcttgggaaatcatgttgggaatgaatctatggggcaccatatacaacatgatttacatgtttggctggccgcatggtagtggtttcgaggcagtccagttttgcaagcagcatccagaagctgcttgggatattctcctctattgcctctgcggtgctgttggccaaaatttcatcttccttaccataagtcgatttggctccttggcaaacacaaccatcaccaccacacgcaaatttgtcagtatcgtggtgtcttctctgctgagtggcaatccactgtccccaaagcaatggggttgtgtactaatggtcttctctgggttgtcataccaaatctacctcaagtggaggaagctgcagaggctgccgaaaaagaaaaagacctaaaggaggccctcttttgacagttttgaacttcacgaactctcatcttttccctattgtatttttttaaccgtccctacggcatactatcattgcaaccctaaggttcaatggtatcccaattttaagacaatacttagaaattggtagatgtaattgaaaagatcttcatctgtatttgtcaacttatcatatcaaggtttatgaaagaaggctttagttacaaaaaca

SEQ ID NO: 2194 - DNA, 581 bp, Gossypium hirsutum
  Clone ID: GOSHI-09MAY01-C33263_1
cggccgcgtgggttatttttagagttcatgaggacatggatgccgcaaaattaaatctgggttttaacttcttcttcatttttcagttaaaatttgtagtttttgcagctgtgggtggtggtggtggatgtagcagaagtgacttcccaccgggctttgttttcggtgcatcaacttcagcctatcagtatgaaggtgcggctgataaagatggtaggacgcctggcatatgggatacttttgtccatgctgaagggaattttaacgaaggcaatggagacgtagcttgtgatgggtatcacaggtccaaggaagatgttggactcatggtagatacaggcttggaagcctacagattttccatttcatggtcaaggctcatccctaatggaagaggacctgtcaatgtaaagggcttgcaatattacaacaatcttattaatgaactaatcaaaaatggaatcgaaccacatgctacgttacatcattacgatctgccacagacactcgaagatgagtatggaggatggcttaatcggggaattgtgaaagattttacagcatatgcagacatatgcttc

SEQ ID NO: 2195 - DNA, 579 bp, Gossypium hirsutum
  Clone ID: GOSHI-09MAY01-C33203_2
tatgcctgtgatgtggcccgaggttcaactgaacagcaacagacaacagtatccgcagcggttggattttgatgcatttccgcacccgcggtcgcggccggaagaagtctgcaataattacttaactccggagaactcgcttttaagctatgattcctctgcaaactcagtgtcgttgcactcgaatcaattgaaaatggagctatgaagtccgaaagaagctcgaaatggttagatttatcaaaaaaaaaaaaaaagttctaatgatagctagtattgtatatatattatatatatcagaaattagcagggaagtagaagagaggcctcaccatatatatatatcatttggtttccatgtgttctatttagccgacttcagatggaaaccttcgatttgtaaggactggagcatgaaatctcagtatgctgttattatatatatatgttatatactaactcggagtcattcaatcaaaatactcggtttgaggttgattgattcatattgtaaaatcatagaacaaactatgatgattcaaactattatatgaagtcttggcttcttttgtttctatt

SEQ ID NO: 2196 - DNA, 1024 bp, Gossypium hirsutum
  Clone ID: GOSHI-09MAY01-C33203_1
gttcgccggcgaaggtaaaaacaagagcgactcgcctgaagcgacgtcgaacaattcaagtgcaaatctccagaaggcagtgaagagtgaaccggctgagaccgagtcgtctcagccgttaatttccgatccaacggtggagaaccggggtatcaagagaaaagaccgagaaaaggtgaaagggcagacgaagaaaagcaaaacaacggcgaaagagagctccgacgacgccgagaagctgccttacgttcacgttagagctcgccggggatcaagcaacggatagccatagcttagctgagagagcaaggagagagaagattaatgcacgtatgaagctcctacaggagttggtaccaggatgcaataagatttcgggcacagcgttagttttggatgaaatcatcaaccatgtgcagtccctacaacgtcaagtggagttcttatcaatgagactcgctgcagtgaacccaagagttgatttcaactttgatagtgtattcacggcagaaagtggattttttatggacagtaacttttctggcatggttatgcctatgatgtggcccgagattcaactttcagcaacctgtttgggggagagaagaagtctgcaataattacttaactccggagaacttgcttttaagctatgattcctctgcaaactcagtgtcgttgcactcaaatcaattgaaaatggacctatgaagtccgaaagaagctccaaatggttagatgtatcccagaaaaaaaaaaagttcttatgatagctagtattgtgtgttttttagccgcctctccggatggacccccggagctgcccagaggcctcaccatatatatatatcttttggtttccatgtgttctatttagccgacttcagatggaaaccttcgatttctaaggactggagacatgaaatctcagtatgctgttattatatatatatgttatatactaactcggagtcattcaatcaaaatactcggtttgagggtgattgattcatattgtaaaatc

SEQ ID NO: 2197 - DNA, 385 bp, Gossypium hirsutum
  Clone ID: LIB3148-006-Q1-K1-H4
tcgacccacgcgttcgtatagagggaacaaagaaaactaggaatatgggtaggaacacacactcagtttacaagggattgatatgctatgaattgcttagacctttgttcatgattaaagcaatctatggtcttttctgctctgctttataacttcttatacattgtgatagatcatattctcttcgacgatgcactcgaatcaattgaaaatggagctatgaagtccgaaagaagctcgaaatggttagattggtggccgataaaaaaaaacctctcatgctaactcgtgtttgctatatattatctatattagaaattaccaaagaagtataaaataggcctcaccatatatctatatgatttggaaaacatgtgttttattt

SEQ ID NO: 2198 - DNA, 1173 bp, Gossypium hirsutum
  Clone ID: GOSHI-09MAY01-C28953_1
tggaaaaattgtacttttgtcaaagggtgcagatgaagcaattcttccttttgcttatgttgggcaacaaacaagaacatttattgaagctgtagaacagtatgctcaattggggcttcgtactttatgcttagcttgccgtgaattgagagaggatgagtatcaagagtggtctttgttgttcaaagaggctagtagcacattagttgatagggagtggaggattgctgaggcttgccaaagattagaacatgattttgaggttcttggtgttaccgcaatagaggatcgtctacaggatggtgtacctgaaacaattgagacactcaggaaagctggaattaatttttggatgctgaccggagacaagcagaatactgccatacagattgctctttcttgcaattttatttccccagagccaaaaggtcagcttcttctaattgacggaaaaactgaagatgaggtttgtagaaggttagagagagttttgcttacaatgagggtaacatcttccgaacctaaggatgtggcatttgttgctgatggatgggctcttgaatttgcacttaagcattataggaaagcctttacagaattagctattttgtcaaggacagctatatgttgtcgtgttacaccgtcccaaaaagcacagcttgttgaactcttgaaatcatgtgattatagaacattggctattggggatggtggaaatgatgtgagaatgatacaacaagctgatattggtgttggcattagtggaagagagggctgcaggctgcaagagcagctgattatagtattggaaagttcaggtttctcaaaagattaatacttgttcatggccgctattcctacaatcgtccagcatttctttcccagtattccttctacaaatcactagttatatggttcatccaaatttttttctcctttaattttcaggtgggctctgggaactaagtcttttcaattctggtagcttgatggcctataatgtgttctacactagtattcctgttctagtcagtgtccttgacaaagatcttagtgaaggaacagttatgcagcatccacaaattttattttactgccaagcgggaaggtttactgtttctccgccttttttggcctttttcctcctatataacagggttaggaaatgggact

SEQ ID NO: 2199 - DNA, 816 bp, Gossypium hirsutum
  Clone ID: GOSHI-09MAY01-C28693_1
agcacatgaagcttatgttatataaagattcacatgtgttaaggtgtcttacttggaacaacactaatagccgaaatggatggaccgtaataaccttgtattggtgtgcagcaagtccccttaccagcccaaaacaggtgaatttcaagatggttctcagttacattagcagtgaaattcttaattattgctctctcaacaccacctgctgccttcgatatatcaaaatccctcaatcgccgagttccctgataaagcattatagcaataaaagatttctaaagtgcgaaacatgagaattacatcattatgatcatgaaagcattgcaaagagggggtatgaaatgaatgatatacagcttagaatgatatgaatttctacattaaaaaaatattacctgaatataaacatcaaaaactcgccttgctagaactcttccaagactgtgtggttcggcctgggaaacctgtttccgcaaagaacaatcttacagtatagggtccattctgaaggcctaggccatagtatctgagtgatccaggggatagccttgaagtctgatacagctccggagtgttggtacttttcacttgtgctaaagtgttctgcacaaactgtggatcctgtctatctgcaaacaagcctgcattgctgactgcccatttctgtgtgctggttacattaaatgttgctgcgccgagtgtgcgattctcagcctcaaatatattcagtagatgtcatctgtggtccaccacacttgacgcggagtttgcatctaccatggcgacccgaaattgttagcaattattagctta

SEQ ID NO: 2200 - DNA, 437 bp, Gossypium hirsutum
  Clone ID: GOSHI-09MAY01-C28183_1
cttgttgtatcttcatttgcaggacatcaaacaaggtggtgcaaggttttggcagtctgggtctttttctaatttgtggtcgatgggggaatcagaggaaaagaagagcacgaagagggataaaattaggtggagatgggtgattggagcttccattacaattgttcttgctattgctttggcttcaaggactaaaccagagatctctccgaattttggagacacaaacaagtcttgtcaatgttctcagggaaaacacaggcattaggggactgtagaggattgttgttgtgattatgaaactgtggaccatcttaatggtgaagtattacatccaatacttcaggaacttgtcaaaaccccatttttcggtactacaaggttaaatgtggtgtgattgcccattttggcctgaagatcatatgtgccgtttgcgg

SEQ ID NO: 2201 - DNA, 516 bp, Gossypium hirsutum
  Clone ID: GOSHI-09MAY01-C28073_1
cagagggcagtcgataatgcaaaaggggtggatgaacatctgaagggtgttggccttcgtatgttaggtctttgtttgggaaagcaagataaagtttcttcctcgggcgttgaaaggtcccgtcttcagaatgaagcacttaaagatttagattcagcactttcctttgagcaggataatcctgatataatctttgagttgggagctcattatgcagagcagtggaatttgaatgctgctttgcgttttgcgaagaagtacattgatataaccggtggttctgtaatgaagggttggagattgcttgctctaattttgtcggctcaacagcgtttcacagaggctgaggtggtcactgatgctgcattggatgagactggcaaatgggagcaaggaccactgctcaggctgaaagcaaaattgaaggtctcccagtcacgacccatggaagctattgaaacttactgttacctccttgctttggttcaggcccaaagaaaatcatctggtcctatg

SEQ ID NO: 2202 - DNA, 586 bp, Gossypium hirsutum
  Clone ID: AI729055.1
ctttttcttttaatttcattttcaatattaagccaaactgaaaccctgtaaaaatacttatacctcaatgaactgccaatccaattctgatgataccaccctagagatggaacttccgggctttcgattccatccaacagaggaagaactccttggtttttacctcaaaaacatgatttacggtaacaagttgcgtgatgatgtaattggatttctcaacatttatcaccatgatccctctgatttgcctggattgtcgaagattggggagagggaatggtatttctttgtgcctagagataggaagcatggcaatggagggagaccaaaccggacgactgaaaatgggtactggaaagccactggttctgaccggaaaattgtgagcttatcagatccaaagcggataactggcctgaaaaagactcttgttttctataaagggagagctccacgaggaaacaagactgattgggtcatgaacgagtatcgcctcccagatggttgctccttgcctaaggacatagttttgtgcaagatatacaggaaagctacctccttgaaagtactggagcaaagagcagcc

SEQ ID NO: 2203 - DNA, 366 bp, Gossypium hirsutum
  unsure (1)..(366): unsure at all n locations
  Clone ID: LIB3048-048-Q1-L1-A3
cttttgcatgcaaaatcacattctttttcttttaatttcattttcaatattaagccaaactgaaaccctgtaaaaatacttatacctcaatgaactgccaatccaattctgatgataccaccctagagatggaacttccgggctttcgattccatccaacagaggaagaactccttggtttttacctcanaaacatgatttacggtaacaagttgcgtgatgatgtaattggatttctcaacatttatcaccatgatccctctgatttgcctggtacataagtgttcatttgtttgtttaaccacataggaaaatatgattgtttaatatatatgtctgattcggatggttttttttataggattg

SEQ ID NO: 2204 - DNA, 967 bp, Gossypium hirsutum
  Clone ID: GOSHI-09MAY01-C24993_1
cagaggacctttcccacccttcaaccactgaaaaaagatggcctccaccttctcattgcagatggttcattgccctcgcttcagtttccagggtcaagctgtttcaaatgctcatagcccacatatgatcggttcatggtcggcttactcccaacctaactcatctgctatcgtcttagcatcgaaactaaactatgcatcaggtttgcctgtgacccaactttctaaatccccttccgttaagtaccgaagaatggtctgcaattccatgggaaatgatgtaaagttgcaagcgaaagtgacgactaagtgcttctttgacgttgaaatcggtggtaaggctgttggcagaattgttatgggcctttttggggatgttgttcctaaaactgttgagaattttcgtgccctctgcacaggagagaatggatatggtttcaaaggatgctcctttcaccgtattattaaagatttcatgatccagggtggtgattttactaatggaaatggaactggtggaatgagtatttatggatccaagtttgaagatgagagctttgctttgaagcacgttggacccggcgtattaagcatggccaatgcaggtcctaataccaatgggagccaattctttatttgcacagtaaagactccatggctggacaacagacatgttgttttcggacatgtgatcgatggaatggatgttgtgcgtgaactagagtcccaagagacaagcaggacagatggccctcgagtaccatgcagaattgtcaattgtggggagctgcctataggaggctaatatccgatccgtttaaccactaccacaaatctcccattttatcatttactttctctgcttcaagatgattttacctggtaatacctataacagtcggtgttaattatagaagagagaattttggatgatactttataagctcttggcaagggtgtgctatta

SEQ ID NO: 2205 - DNA, 439 bp, Gossypium hirsutum
  Clone ID: GOSHI-09MAY01-C24913_1
ccctcgcgtccgatggggttttcaattaacaactccctcgcccccccccacactcgtacccacattaccttccttatagccagctattccctcttgggaacagcctccggttggatcgtgcctcactctctccctacgtttactcccttccttatgtggtctcttcttcatccttctccacgccatcaccatagccggtgccgtcaccggttgttccgtccccgtttctgggtcaaacagattctacgcagctcacatggtggttatggtgttaacatcgatatttcaaggatccgtttcggttttgatcttgacccgaagtagtgatttcttggggtacttgaaatcttatgttagggaagatgatgggatcgtgatattgaagccttgttggtgggctttgtgtgacggccttttgtttggaatggatggtattagg

SEQ ID NO: 2206 - DNA, 889 bp, Gossypium hirsutum
  Clone ID: GOSHI-09MAY01-C24883_1
atccttcaaagcttttcatcaccgaattgggcaaatctcgtacacaaagcatagccgaagcagctgggtttaacattcaagctttcctcacgtttccattagatcagtgttcggaggtagtctgaaagggctttttaaggataaggctgcgtttggattcgatttttttttattccttccaaaaagaacgtcccggaaacactcatcaattacagatctagtcatctccaaaaaccattcaatccccgatcaaactatcaacagtcatggccactcctggggttcttcaaagagaaaccgaccttctcttatcatctcccttgattgagcttcgtaaaggttacaaaccgacgttctagaagatggttaaatgatagattgttgatggaacttgttcctcgcttgaatgcagaagaagtaagaggcctttttgctccaccaccatggggctaatattattggcgccttaaataattcatctatgaagaagagatttccggcccgcccggcgcgggcggcttgcttgagtgcatggcgaacagttgattgccgaacaagagaagcacttcgccgtagcgttctttcagatcttattgcgagctatgaggactgcatacggaccttcatccaggaacgtggacatggggatgtccttgctttacaggtccaagatcctttccatagattgttgctgcatggtgtctgtgagttctacaacgtggtctcggtaacagttacacagtcaaagggtgcggagtcactaaaggtgacgaggataaagaagaagaagacaggggtggttgagctccctaatatcaccttgtccaatttcctgaaaatgtcaaaggagggcatttggtagttctaggggcagaaattcgcccccccc

SEQ ID NO: 2207 - DNA, 521 bp, Gossypium hirsutum
  unsure (1)..(521): unsure at all n locations
  Clone ID: LIB3825-033-Q6-N6-D7
aaacagtaaacatataaatatagtttttgatccatcatatcatacaacagcttggaatcatcatgttctttaactaaaccctaaaccagcaatcaacctgttctgttgactgggaagaaatataaattaaatccaggcaccttagcttcacaaagctacaatacagatgatgactaaacgcaaataaattactccatcgagcgcagcattgtgcacaaacttatcttatttatgaacatgaattggggggggggggncgaatttctgcccctagaactaccaaatgccctcctttgacattttcaggaaattggacaaggtgatattagggagctcaaccacccctgtcttcttcttctttatcctcgtcacctttagtgactccgcaccctttgactgtgtaactgttaccgagaccacgttgtagaactgtttaacgaatgttagggaagaaattattacactttcaccgtgtaagatattcatcaatattcaatattaaatccaacactggttgcagc

SEQ ID NO: 2208 - DNA, 359 bp, Gossypium hirsutum
  Clone ID: LIB3146-006-Q1-K1-E2
ggaacttgttcctcgcttgaatgcagaagaagtaagaggcctttttgctccaccaccatggggtgatgatgtgccgccatcagcattttgcatgacgaatgtgggagaatgggacaaatttaggactatagatatggataaagaggctaatattattggcgccttaaataattcatctatgaagaagaaatttcatgctgacgctgataaggcagctttcttgagtgcatggcgaagagttgattgccgaacaagagaagcacttcgccgtagctttctttcagatcttattgcgagctatgaggactgcatacggaccttcatccaggaacgtggacatggggatgtccttgctttac

SEQ ID NO: 2209 - DNA, 341 bp, Gossypium hirsutum
  unsure (1)..(341): unsure at all n locations
  Clone ID: LIB3146-016-Q1-K1-E4
tttggatttttttggggccggaattcccccccccccccgggggggcattcaatgtcggtaaataaaataggttggggcacatggctgccctcgatggagtaattaattggcgttaagtcatcatctgtatggaagctttgtgaagctaagttgcctggatttaattaataatttcttcccagtcaacataacgggttgattgctagtttaggatttagttaaagaacatgatgattccaagctgttgtatgatatgatggatcanaactatatttatatgtttactggttattccaggcctatgtggccatgtcaattataacatccaactcttgaagtcc

SEQ ID NO: 2210 - DNA, 535 bp, Gossypium hirsutum
  Clone ID: GOSHI-09MAY01-C24873_1
ggaaaagatagctcagttggtcttcaaatccttaagggccaaacgtgggtgcctgttaagcctattccaaatgcactcgtcatcaacatcggtgacactctagaagtacttacaaatggaaaatacaagagtgtggagcatagagcagtaactcacaaagagagagaccgcctttcaatcgtcactttctatgctccaagctatgaaatagaacttggtccaatggcagaactggtggatgagaagaatccatgcagatacagaagttacaatcatggagagtacagtaaacattacgtaaccaacaagttgcaaggcaaaagaaccctggatttcgcaaagatccaatccaagacctcgaattaacaaggattccactttggtcttcccccccccccactagatcactattcttgtactatttaactgtaagaaatgagcttctatcatggtggactgcgctgtttcttctgtaacaaagttttcccaaatgcatatcagcttatggaagcttggtgggacctttgtttagtgg

SEQ ID NO: 2211 - DNA, 335 bp, Gossypium hirsutum
  Clone ID: LIB3146-011-Q1-K1-A11
gaagatgttctttgtaggctgtacaagctagttacgatgaattaccatccatcatgtacaaggcctgaccttgctttaggtcttattccacattcagatggaagggccattactgtgtagcagcaaggtaatgatagctcattcggtcttcaaatccttaaaggccaaacgtgcgtgcctgttaagcctattgcaagtgcactcgtcatcaacatcggtgacactctagaagttcttgacagagctgctgactaaatggactatctttacacattacctcacattgagagagacacgctttcaatcgtcactttctatgctccaagctattaaat

SEQ ID NO: 2212 - DNA, 529 bp, Gossypium hirsutum
  Clone ID: GOSHI-09MAY01-C24503_1
tcggttaaggtgccaatcaggttttgtgttaggtttactgacagatatcactaaagacttctgtatttgagaatgagtcggccaatggaagaagatacaccaaagaatgaggaagaggaatttaacactggaccgctgtccgttttgatgatgagtgttaaaaataacactcaggttcttatcaactgtcgcaacaacaaaaagcttctcggccgagtgagagcattcgatcgccactgcaacatggttctggaaaatgtcagggaaatgtggactgaggtaccgaagaccgggaaaggcaagaagaaggcactaccagttaacaaggacagattcatcagtaagatgttccttaggggagattctggtataattggtctaagaaatcccaggtaaatttggggctcttatgttatgaaacttttgtacggtttatgtatccaactagggaaatgctttttaaaccaccaacggcactgcattggatttgctcaaagaactgtatctatattgagtagtagtttgggtt

SEQ ID NO: 2213 - DNA, 805 bp, Gossypium hirsutum
  Clone ID: GOSHI-09MAY01-C24533_1
cagtactacatagatatcatagagacgaagccttccaatgcaataagtatcattgagactgactgtgaggtggattttgctcctcccctcgattacaaagagccagaaaggcctgctgttcccacttcaagcaaggcacattctcaagttgaagaagctctggcagagactgaaccaaagttcagtgccttcactggtacaggaagacggttggatgggaaacctctgaagcaacagcctcctccggtttcttggtctgggaccaaagacaaggaacctgctgcttccaataggaataataggcagccttctccaggggctagttcacaaagtagcgcacgccaggctcagggcaagctggtatttggatcaaatgtcagccgttttaaggaaacaaaacaggaacccggaaatcaggctaaacaggagcagcctgaaaagaaggaagatcccaagttccagccattcaccgggagaaagtactcgctagagggttgattaaatcaatcctcaatttcttatgtgtttgtttttccgtggctcctggaaagtgacagaattattatatattcatcttggatgttctgttaacaaaatactcacctgagggttctcatgtcaaaatgaaattcgactctgttgtgaaagctggagagttttcccttcaaagaaacgacctgctctttaaaatgtgttagatctttggctaatactctagggaagtaggatgatattggaatttgattccacaacgattacgttgaatttatctctttattatggaacagccatgtaatttccctgc

SEQ ID NO: 2214 - DNA, 649 bp, Gossypium hirsutum
  Clone ID: GOSHI-09MAY01-C24403_1
cttgaaatctctcaaaacacaaaaaaagtatgcatgattaaatgatgtaacatttgaaagaaaaaaaaaaaaccttttgccagttgtagctgcacccacaatattgatacaagatgatatagctgtataatacaagcgtatacctttacgaatcaaagcctctccatctcttcaggtaattcatggatgtctttgtgcaccaggcggtgctgttggcctcggcaattgagcattaacaaagttaggggcctccacgtatgggctctgtggtgccaatggagaaggagatagttcttcccgggatgaggactttgttgatacatttggagaaccactgttataacttggctcaactccatctaatttatgtcttgcattattgcctagcacaggatcactctcatttccatttgttgacttgacactctggaagattttaccaagagttttcaacccttttgctcgtgctcgaagctcttcctttttgcatttttgatcatggagaaccatttgacaaacacgagaaagagtagcttctatgtcagctacattaagcttccataatgaatcaatcatcagtttcttgtgagattgcatgtactcctcaagctcttcctcactgtaatttccttctgcactaagctgcttt

SEQ ID NO: 2215 - DNA, 1159 bp, Gossypium hirsutum
  Clone ID: GOSHI-09MAY01-C24783_1
gaagtagcttataagaagcagcgtctgggtaaaagctccaaagcaagagatagtgtatttgcagctctgtgttcgaccctaagccaggcagtgctgccaagtaagaaaactacaaacgctatgcctttatctagtcaatcagtctgaagggaccaaagccttgggtgaggggaaatcatacagagatggaatctagcagtcctagaagttctggtaaaagtggttccgaagaggatagccatagagagaaggaacctcctagaaattgttcagattgcttgcatagcccctcagacaatagacaattaagtggcgatgactgtcccttggtaccaccaaaatcctcacctgaaatgactgtaaatggatcttaagttattttggagaatcatcatgcgcagtgtcacttgttatcttgtttgttgtattcaactcaagcatgtgcttggtgactgaagggtctcggtacgggctaccaaagaactggattcagagaaaaaatcaagaagctgatgagaagaaatttcggattgtttgtcggagggaggggacggatgatcaccatatgggttggaagtgaagggctgggaaaattgtactgaattatatatgcaaaagccaagtctaccaggcctttctgatgctttgagctgagctttggactttctgcttttagcctcaccaccaaactgttgcttctttagaacattacctgttttttgtcaaaattttcacctttcctttttctttaagaaaaaaaatcaaatattgttctaaatattagctttgtgaaccagccgacagaatgggcagtaaaattggggatgcgttagtgtcccctttgttcagattttgtggtgggtgtggctgttatatagggagaaacaagagggagggtttagggggatgaaatataatatgtgattgtgggtagaaggggccaaattctctgtgattgtagggtgaagagtgagtgaagccctcatctatagacagaccctctttgtatattagaatttagtagtaggtaggtaaaatttacttttgaagggggattttcttctttaatgccggggaaagaaaataaaaagcctaaatttattcccaaaaaaaaaaaatataaaattttttttttttaatttttttttttttttttttt

SEQ ID NO: 2216 - DNA, 475 bp, Gossypium hirsutum
  unsure (1)..(475): unsure at all n locations
  Clone ID: LIB3146-004-P1-K1-D2
gaaaaaaaaaagggataaggatgaagaagattattataattgctgttcttattttctgcgtgttaagttcacaaatggaaaacgtaacaccacaggtagattgctacgacgcatgtagtactggatgcgttcaaagtaacacgaggcttatgcagcgatgtgatcgcaagtgccagattagatgcagtccagattccaaggtagaggggaatttgggttagctaattgaaagatcaaaatctacttactacatagtttcttgctatataccactcaaatgtattgtgttgaataaaagcatttatatagcttcttatccatcgtcttaccttaaagcattgaagagatactagtaagttcaataattatgtatctttatctagattttgtgttcaataatattatataaaaaataaaatttattcttttttaataaattantatataatatcttttttttttctttttttttttt

SEQ ID NO: 2217 - DNA, 253 bp, Gossypium hirsutum
  unsure (1)..(253): unsure at all n locations
  Clone ID: LIB3148-056-Q1-K1-B1
ctcaaatgtattgtgttgaataaaagcatttatatagcttcttatccatcgtcttaccttaaagcattgaagagatactagtaagttcaataattatgtatctttatctagattttgtgttcaataatattatataaaaaaaaaaaaaaaaaaaaaaaaaaaaaaaaaaaaaaaaaaaaaaaaaaaaaaaaaaaaaaaaaaaaaaaaaaaaaaaaaaaaaaaaaaaaaaaaaaaaaaaaaaaaaaagganggg

SEQ ID NO: 2218 - DNA, 1091 bp, Gossypium hirsutum
  Clone ID: GOSHI-09MAY01-C24723_1
taaaatggaagaaactcatcctgggttagtgactattatatgcgcatgacattcttctataaatagcctactcaacaagccaacttgatttatcttcaaaaataaaacatttcttctattaattcgttatgggtttggaatcagagatgaagcttcccgtcatcaatttttctgaggaaaatctaaagccaggaacaagcggttgggcatcggcatgcaaggatgtccggcgagctctggaagaacacggttgcttcgaagcaaaattcgataaattacctggccagcttcacgacgctgttttcgccacagctgaagagctgttccagctcccaaccgaggtaaaaatgcggaacaccagcgacatgcctttcttcggttatttcggacaatacaaaactgttccactctacgagtccttggcaatcgaccacccaacatctcttgatggaactcaaaggttcaccaatctcatgtggcctgctggaaacgatcgctttcgcgaaagtgctcaaaggtactcagaggttgtggcagaacttcatcgaaccgtgatgagaatgttgtttgaaagctatggtgttggaaattgctacgattattacatcaaaatcacccgctaccttctacgatacttgagatacagtgagcctaagatgggggagagtaatgctggtttattgcctcatacagacaaaactttcttgtctatacttcatcaaggtgatatcagcggtttgcaggtgcaattgaaagatggtcaatgggttgcgccgccaccatcgccaacttctttcgttgtcatggctggggatgctttgatggcatggagtaatgaccgaataccatcttgtaatcatcaagtaatcatgaaggagaagggaataagatactcattgggcatgtttacattcatggatgggatcatacatatacttgaagaggtaggggacgagactcaccccatcaaatacaagtccttccaccactttgaactccttcagtttatgaattccaatttgaaaaccaaccctaacatgtgctttatcaaagccttttgtggtgtttgagacctacacaacaaggatgct

SEQ ID NO: 2219 - DNA, 456 bp, Gossypium hirsutum
  Clone ID: LIB3146-003-P1-K1-A2
aacacccctcttttcccccatttatacgaaccttgaagagaccaaaccctagccaccatgtagccaccgcaaacgatgagcgacaagggttggtcttctcgttctttaccccgtttagatccatattcaaggattcgatgctttcaactatgaagaatcaaaaagaaagtctcccccttttgttggatttgattttaacagagaagaactccgatgataccaacggttcaaggctcaggtaagtgaccttctttcgtccttttcctcttattttttttgtaaataatccctataataccgaaacaagaaaaaacttgctaaaaagagttgcgaaatattaaatcggaaaaagaatcacctttttggctatgaatctttttgattaatatgcttgaaaaaaaaaagagagagagagcttttacatagtcgattctggcttttatagcccttttaaca

SEQ ID NO: 2220 - DNA, 403 bp, Gossypium hirsutum
  Clone ID: LIB3083-058-Q1-L1-G7
atttatacgaaccttgaagagaccaaaccctagccacgatgtagccgccgcaaacgatgagcgacaagggttggtcttctcgttctttaccccgtttagatccatattcaaggattcgatgctttcaactatgaagaatcaaaaagaaagtctcccccttttgttggatttgattttaacagagaagaactccgatgataccaacggttcaaggctcaggtacatcgagggtcaacggggctgtagattgtcattttggtgcaacggagccgaatctcgggcgtctgcgtgccgagggcgcacatggaggcgcggtgccttaggctattagggtttttgtgttattttatgttttgggccatatttttgggttaggttttagtcttgggcctaaattacaaga

SEQ ID NO: 2221 - DNA, 500 bp, Gossypium hirsutum
  Clone ID: GOSHI-09MAY01-C24663_2
cccacgcgttcggttttatgtcctatatgttttcatcctgactggaagaatgatcagagggcgggttatattgatttaaaacatggataaactcattggtagctttgagacaatccacgttcaagatgctgcttggcatgagcttgcacctcgtcttggtaatttgttcacaattggaaaaggaactaagccatgtgtattccttcccaagggcaatggtcttaagtcgtccatcattgtcgatgctaagaagaggcttgcggcccaaaatgctgcttgaacattaacacaagatatctagatatgccttgctgctgtagcctattctggagtgactacatttcttgctttcggttatgaagaaaattttgagaactattttcttcttgcaatcttaaattgttcggttgggtaatgttagtgaactttcaaggctatattttaaatgaatgcttggtataaaaagtcaccacatttaattctaaattataactcaccat

SEQ ID NO: 2222 - DNA, 399 bp, Gossypium hirsutum
  Clone ID: LIB3146-003-P1-K1-C4
cccacgcgtccgcacaagggtagctttgagtacaatccacgttcaggatgctgctgggcatgggtttgcaactcgtcttggtaatgtgttcacaattggaaaaggaacgaagccatgggtatcccttcccaagggcaagggtattaagttgtccatcattgaggaagctaggaagaggcttgcagcccaaaatgctgcttgaacattaacacaagatatctagatatgtcttgctgctgtagtttattctggagttactagatttcttgctttcggttatgaagaaaattttgaatatgttaatgaacttacaaggctatattttaaatgaatgcttggacttggaagctttcgtgaatatgttaatgctttgattcattatacaatatctctggggaa

SEQ ID NO: 2223 - DNA, 1159 bp, Gossypium hirsutum
  Clone ID: GOSHI-09MAY01-C24613_1
cttgtatctcccgatattagaaacagagcaaagctctttcattaaaaagaaaaagtgaaaaaaagggaggagaatcccagtggccagtagggaatgcagagagatgagaggggcatggttgacgacgcctgagctttgtggccacggtaagcggtcaatcggcggccggaattgtcaccggaaacacgtcgaagacgggtgatcggttcacgtacagtgtaacaaaaaaagggggaaggaactttgctatctcaatcttttgctagttttaatcttctgtttctttttaaagttatttatagctcgagcttatgaaaaaaatggcggaaaaaggtaaaaccgatcatccggctttgcttcatggaaaatacgagcttggtcgaatgttgggtcacgggacttttgccaaagtttaccatgcacggcatgttacgacggggaagagcgttgccatgaaagttgtgggcaaagaaaaagtgatcagagtcgggatgatggaacagatccagcgagagatttccgtcatgaatatggtgaagcatcccaacatagtcgagttgcacgaagtaatggcgagcaaatccaagatttacttcgccatggaactcgtccgaggcggtgaactcttctctaagatcgtccaaggtcgactcaaggaagatttggccagggtttatttccaacaactggtttccgccgtcgatttctgccatagccgtggtgtttaccaccgtgatttgaagccggagaatttgttattagacgaagatgggaacttgaaagtcactgatttcggactcagtgctttctcggaacatttgaaacaagatgggttgttgtacacaacgtgtggaacgccggcgtatgtggcgccggaagttattgctaaaaaaggatacgatggatctaaagctgatatttggtcttgtggggtgattctatatgttcttcttgctgggtttttaccatttcaagatgataatttggtggcaatgtacagaaagatttacagaggagatttcaagtgtccgccatggttttcctctgaagctcgtaggtttatcacttagctattagatcccaaccctcagttctcgaatcaccatatcaaagatcagggattcttcttggttcaaaaaatcctttccccaatcttgtt

SEQ ID NO: 2224 - DNA, 692 bp, Gossypium hirsutum
  Clone ID: GOSHI-09MAY01-C24623_1
accactcctacgcgcacacatacagtgaactcatcgaagttacgacttcaccggagttatatcgtggtttgcggataaatgtgatcttattcttgttgtattcgaccctcacaaattagatatacgtgatgaatttaaacgagtaatttcgtgtttacgtggaaacgatgacaagatacgtgtcgacctaaacaaagcacaccaagttgacacccaacaactaatgagagtttatggagctctgatgtggtctcttggaaaagtcctgaatacccctgaagttgctcgtgtttacattggctcttttaacgataaccaaattaacggagctgatgttgatccattggggcaagacctttttgagaaagaacaagatgatcttctcaaggacttattagacattccaagaaaggcttgtgatcgtcggatcaatgaatttgtgaagcgtgctagagctgcaaaaattaatgcttatatagttagccatctcaagaaagagatgcctagtatgatgggcaaagctaaagctcaacaacggcttattgataatcttcaagatgaatttgccaaggtccaacgtgaataccatttgccgccgggtgatttcccgagtgttgagcactataaggaggtgttgaataattacaatatagataaatttgaaaaactgaaacccaaattggtacaagccg

SEQ ID NO: 2225 - DNA, 871 bp, Gossypium hirsutum
  Clone ID: GOSHI-09MAY01-C24183_1
cgacaagaatcggttcttttaagcgcggttgatgagaatcaattcaacacaatggttcaaacatacatgatagataaagccaaaggaagaatgagaatccgaatgaaagtaagcttagcattagtagtcgtcgttgggtgcatcgccatcggcacggtagccgtccattttttggaaaatttggattgggttaatagcttttatctcgctgttacatcagtgacaaccgttggttatggtgatttttcttttgaaacgttaatggggaggtgttttgctgtcctgtggttgcttgtaagcacgttagctgttgcgagggctttcctttacttaactgagttgaggattgagaaaagaaatagaaaaattgcgaaatgggttcttcagaagaagatgacactaggagatttggttgctgcagacctcgacaatgatggatccgttagtaaatctgaatttataatctacaaacttaaggatatggggaaaattgcagagaaagacgttctgcagatctgtgaccagtttgatgcactagacaatagcaattgtgggaaaattacagttgctgatctcatggatagtagctaactatttggtgtaagattcggttaaggctatgcatccgatcccgacctttttcaaatatttggaagatcattcgtacctaatgtttagaagaagaacaagaaaaatgaagattcgaccaagaggaagaaaaatgaagagtcgaagcagtatatacagactacaatgatgtgccattaaggaggatccatatctttcaatggagatagcctaattgcacaaaagcagaaccaccagattctgtgatcattttcagcttgtaaaaaaggcaagcatatagttt

SEQ ID NO: 2226 - DNA, 928 bp, Gossypium hirsutum
  Clone ID: GOSHI-09MAY01-C24153_1
gcaggacagaatatgccctgactagctcaatgaggctatatacggcttgctctttgcggcgtcaaggaggggggattttcccgagcttctagagattcgagccgtttttacattatactacggcaaagaattcgatgctcgtgcaatcgagctgcgcaacaattgtggagtgaacgctaagattatacagaagctggcaaccagacaaccagacttgcagagcagatggaatgtgctcgaccagatggctgccgagtgcggcattgcttgacaactcgaggaaaccactgattccagcgagggaaatctggatgtaagcaagaagcaggagatatcagttaaggcaagtcatgatgcaggagatgatgatgagttctctgattcaataaaaacaaggagaaaatacagggatgtagccgatgcagctcaagcagcctttgagtcagctgcctatgcagcagcagctgcaagagcagctgtggaactctctcggtctgattcctatgatcctgatgatcagaacggtcccaatactcgacagaacacagtgtttgacaaacaagaagcaaattctaaagatatggaaaatcatggtagtcaagcagtggagttgaatcataccaagaaggcaccagaaatcaagatgtctagtccttcaagtgaaggatcagcagagggaatcatagaccttaggacaatgtcattcgacgaagtggacccactcaagctattggagaaggaagtggttatttatgagagtgatgatgataaatatgattcccgtggttcaagttttgatttgaatgcaaggaagcttaaaggcaaggtcctagatacagataatgatggtgagcactcagaaaagaaacttgactgatgtttccttcaagctttcctgttggcttgaaggtggagactcgacctgaaa

SEQ ID NO: 2227 - DNA, 431 bp, Gossypium hirsutum
  Clone ID: GOSHI-09MAY01-C24093_1
gctagcttctctcttctatggcggtggcttacagccttcttcccttgttttttttttccctttatataaattatattaaacaatctcactgaaccatcgtcggagaatcagtccggacggtgattgtggctccggttgccggcggcgaggcgaggtgtagtgtttttattgttgtcgcaatcgcgttgaaggaaaaccgagagtttttttgaattgatcagcagaaacaggaaatgaatgggaaccactatggatttagaagtacggcggcggcggcggcgagggtatatataaggagacatcaccggcatggctccggagagaatcagtgtagttcagctcttgttaagcacttcaaagctcctttctctctgtttgcaagaaaagctgcaatcacttttcctggggcttccgcacgcgatctttcttct

SEQ ID NO: 2228 - DNA, 531 bp, Gossypium hirsutum
  Clone ID: GOSHI-09MAY01-C24313_1
tgcacgtaaatataattttctatacttgaaagaaaaatcaaaatagattttttttagtttaagcactgtgattcatttgtatgtacgccagcgtcaaggctgctgaatgacacgcaaaagaaaagaacctaactgccaatgccaaatgtcatacagaagagaagtccagtcgactcaccaacactctagctttctactggcctattactcaccgacctgataataatagtatacaattaacttcaccctcaacctcgagccaactaccccacaacaatattatctcaattttcaatctcaagagatggtttactcaattgtcgacaggtagtaggcacataccttataatcaacaactgattgagaaggttaatgggaattcagaaagttgaaaccagagtgggtatagtaaagcactattttctccagtcaaccaaatgcacgtgaacactgaaccaggacaaactacatcagagatttcataccttcaattttctattgctgatttaacacaggaaaagatggacgtgg

SEQ ID NO: 2229 - DNA, 404 bp, Gossypium hirsutum
  Clone ID: LIB3145-042-Q1-K1-H8
attcaatagttggaattttccttttgcttctcatcccaattacagaatataagttttaaggtttagaaaagagaaacacccattttcaagtttcattacctttcaaacctgacaattgttgggttggtatcatgtttgtgtagtttctcatgtcaagttattttatgattatataacttttggcattttaataatttatgtttatatagatttggcatatttttgtaaaaaaaaaaagaaaattgaaaatatattagttgaaaagtaattggctcgaggttgaaggagaaagaaaattggctaccgttattatcaggtcggtgagaaataagtcagtagaaagctatagtgttggtgagtcgactggacttctcttctggatgacatttggcattgggaagaaa

SEQ ID NO: 2230 - DNA, 442 bp, Gossypium hirsutum
  Clone ID: GOSHI-09MAY01-C24303_1
gcgtcgctctattgagttggaattgaaaaaaggttccctgaaatggctaatcgttctctagtttccctttacaagttccttttcaggcacccttttcaatcatctgcaaaacccacgtctccttttctctttaaatccctttctccgtttcaaactcaactcgcggccaactctgtcccatctccgagacctgcctcttttcgattcccagtcttccaaacctcacaagttcagcacccaatttaccacatcctgaggaagtacagttctgagtcaccagcatccaagttggatgtgaacaaggaggtggactcgatcaacctcaagtttgcagaggcaagagaagagatagagatggcaatggagtctaaagagaccgtttatttcaacgaagaatcacagtgtgctcgtgctgttgttaaagaggttttggacatgtttg

SEQ ID NO: 2231 - DNA, 433 bp, Gossypium hirsutum
  Clone ID: GOSHI-09MAY01-C25993_1
tgcatttacgggttgcagtcatagtttgacagcagaagaagatgatgagctacgtaggatgcgttatgaagtcagccattggaaggagaaagagattaatgggacagagagaaggttgctcggtggttgtccactaaccccgagggagacttccctcttgcttagagcattgggtttccctccaagtactcggatttacttggtagctggtgaagcttatggaaatggaagtatggagcctcttaaggaggattttcctaacatcttctctcattcctcccttgcaacagatgaggaattgaatcctttcaagaaccatcagaacatgttggccggtctagactatgttgttgcccttcagagtgatgtatttggttatacttatgatggaaacatggcaaaggcggtgcaaggacataggcgatttgagaac

SEQ ID NO: 2232 - DNA, 1039 bp, Gossypium hirsutum
  Clone ID: GOSHI-09MAY01-C25983_2
aaaagaatgttgcaccattatattaggctaaatcatacctgcatgtattccgcatctcgaaaagtcgggtttgactacacttctcgaatcaaagatgaataacagaaagcatggaaagattacacaagcaagagataaattaagtcatatgtaggcatacattttatagtgttaccccttcttaagcataatctaaaagcaaagaacaaaacaagttcgctgccgggaaacacgagaaactaaacaaaagaaagcaagttctaaaagctagctgtttttaactctaaaatttacagccaccaccatctgtttggaggtgcaaccaaaaggttctgctggatttgctgcaaggcaagaagcaacttttgagtactacacgctagcttccagatttcttcttcctaaaagcgaacttcacaagccttttgaagacgagatgttgcatagatcagaataacacatttactggagtcgattttattcttgggacacaatacagaaacaaagcaaacgccgtcccgaaaggttactgttcaacgacattaaccagttcatactcgatcagtgacagattgttgtcttccttcacattgaaattagcaggctcagcaacctcaacacgaccccacttgtccacagcaagcctcatcgatcctttaaacatgtcaattttcgcattgcgaagagttatggtagtaccctctttcattaagtccacttgttcatttctagcagtaaagataatcattccagtttcatctcctaccaagcattcagcaattcgcatttgacgcacctgaggaccatcagcccgacccttctgcaataccatctttgtattgacaaccttgacagtaagagtgtgaccaatagtgccagggcggagttggtccaccttggtaaaaacaggtttcctcaatgactttgattccgccatttcaatatcgagtgggagagcgaaggaaattgaagattagagagagattgaagagatcagtttaagaaacggcaggcactcactcagcagttagcagagtcc

SEQ ID NO: 2233 - DNA, 1017 bp, Gossypium hirsutum
  Clone ID: GOSHI-09MAY01-C25983_1
gtctcgagtttttttttttttttttttttttttttggggtttttggttttttttttttttttaaaaaaaagaggccatgtcatatcacttcattataacttgaaaagatccgaccagcaagaaatatatgattatgaagtacttcaggcctacataatattaaacttctcatgtctaatctaaacgcaataaacagttgctacccagaatagaagaaataagtaaacaggtgaaagcaagtaccaaaagctagctgtttttagctctaaaatgtctgtttggagatccaaccaaatggttctgctggatttacagcaaccatgagaaacaactctgagcactacactagtttccagatttcttcttcctaaaattgcacttccattacccttttgaagattgagatgtagcataagattagggcaacaagtgcactggactttattcttggctcagaagtaaagcaaacactgcccacaaaatatcactcttcaacaacattcaccagctcatactctatcagtgacagattgttatcttccttcacattgaaactggcaggttcatcaacttcaacacgaccccacttgtccactgcaagcctcattgatcctttaaacatgtctattttcgcgttgcggagtgttacagtggcaccctctttcattaagtccacttgttcatttctagcggtaaagataatcattcctgtctcgtctcctaccaggcattccgcaattcgcatttgacgaacttgaggaccatcagcacgacccttctgcaataccatctttgtgctgacaaccttgacagtaagagtgtgaccactagtgccagggcgaagttggtccaccttggtgaaaacaggtttcctcaatgacttcgattctgccatttcaataacttctggggagatctggagagcgaagtggaatcgaggatttgagagagagagagttaaaaaaataaaagaagatttgtttgagaagaaacactccacttcaagtcggctgaatc

SEQ ID NO: 2234 - DNA, 744 bp, Gossypium hirsutum
  Clone ID: GOSHI-09MAY01-C25903_1
atatctcctcttcttataaatgcccacttctttttttctttttttgtcttgcttcgtttaaagggtgtgaggagtatcaaaggaagaacattgggagagaggggagacaagaggaaaggaagtgttggccgttttggctgtcttccttgttgagtgttattgtttctttcttctttgcttacatggtgcgagtcatacagagaagaaataagattaaaaagacagggaaatagataatatttatagacagatagattgcataaaaaacaatagacaatgtcggcttacagagacaaagatccccgtattcatggcatccaatccaagattcgtgttgtccccaatttcccaaaaccaggtattatgtttcaagacataactactcttttactggatcctaaagcattcaaggatacagtggatttgttcgttgagagatacaaagggaagaacatttcagttgttacaggtatagaagctcggggttttatcttcggtactcccattgcattggaaattggagcaaagtttgttcccttaagaaaaccgaacaagttgcctggtaaagttatttcagaagagtatgaactggaatatggaagggattgtctggagatgcatcttggagctgttgaacccggtgagcgggctttggttgttgatgacttgatagcaactggaggcactctttgtgctgctatgaagttactggaacgcgctggagcagaggtagttgaatgtgca

SEQ ID NO: 2235 - DNA, 421 bp, Gossypium hirsutum
  Clone ID: GOSHI-09MAY01-C25933_1
acagtgtctgatcataacggtgttctcttctcgacagagaggcatacacgtaccaaggagtcatggtatttgctttgcctggggaacctggtctgaccgagttggccggggacttcaaaattcattttcatgatcgccaaggagatttttactgttggctaaacacaacaatgatggaaaacagaaaaattctgaataccagtgatcttgattggtttgacaagaggaaattaccttcccctggtttccaggttgaggttgtgctagcagattataatgaccctgttccgtcgaacccaccaaccaaaactaccacaactaagccagatgaaagttcaggcaccagtgcagccccatcaagcaacaataacaacaaagatgatgtgttctcagacggtgaggaagaagagtctgccacatc

SEQ ID NO: 2236 - DNA, 407 bp, Gossypium hirsutum
  Clone ID: GOSHI-09MAY01-C25893_1
cgagaagagccaaattataaaaaatggctgctcctataacaatgctgattctttgtacatcttttttatcccttagtttactttctactgctttcacttctcgagattacgctgatgctcttgaaaagtctattcttttctttgagggacaacggtcgggtccgttgccgtctaatcaacgcctcaaatggaggggtaactctggtttgtccgacggtgcttcttatcacgtggaccttgtgggtggctattatgatgctggagataatgtcaagtttggccttccaatggccttcaccacaacaatgttggcatggagtgttattgaatttggcggttcaatgcatagtcagattgggaatgcaaagactgcccttcgatgggccacggattatcttctaaaagct

SEQ ID NO: 2237 - DNA, 429 bp, Gossypium hirsutum
  Clone ID: GOSHI-09MAY01-C25813_2
gcgagcaagaggcaaacaataggcttaccaggtatggtggagatggttgcaactatatgttcaacattggttctcaaataaatgatatgagccggttgattgaaggacaagcacgatattttattgatgcatccaaatacggaaatgtttcccggttcatcaatcatagctgctcgccaaatcttgtgaatcatcaagttcttgtggaccgcatggattgtcaccgagctcacattggtctctatgccagtcaagatatatctgtaggtgaagagctgacttttgactatcgatatgaactcctgcctggtcaaggatatccatgtcaatgtggagcttctacatgtcggggccgcctttactaaaccctcagtgagcactacgggatctctatggcatctaaggttttgctttttgagttcacaaatg

SEQ ID NO: 2238 - DNA, 755 bp, Gossypium hirsutum
  Clone ID: GOSHI-09MAY01-C25813_1
atgctttcctgagacatgtgatcatgtatatctctttgataatgattatgaagatgcgagagacgtatttgggaaacctatgcggggtagatttccctatgatgacaaagggcgaattatcttggaggagggctaccttgtctatgaatgcaaccgtaagtgtagctgcaatataccatgcccgaatagggttttgcaaaaaggtgtacgtgtaaaactggaagtcttcaaaaccgaaaataagggctggggggtcagggctggtgaaccaattctgagtggcacattcgtgtgtgaatatgttggggagatctttggcgagcaagaggcaaacaataggcttaccaggtatggtagagatggttgcaactatatgttcaacattggttctcaaataaatgatatgagccggttgattgaaggacaagcacgatattttattgatgcatccaaatacggaaatgtttcccggttcatcaatcatagctgctcgccaaatcttgtgaatcatcaagttcttgtggaccgcatggattgtcaccgagctcacattggtctctatgccagtcaagatatatctgtaggtgaagagctgacttttgactatcgatatgaactcctgcctggacaaggatattcatgcagattgatgtttcctaatatgctcgaatgcaatgcagtataatgcaccagatacaatttatttttgacaggtttgtctaggtcttaattgtattaattcctttgtcatgacc

SEQ ID NO: 2239 - DNA, 249 bp, Gossypium hirsutum
  Clone ID: GOSHI-09MAY01-C25583_1
cgttttacgtggttttgtgcttcttcttaaaattaaactaatggctgcaattcataaacttgaggctgaagaggatgcggatcccagggcaggtgttctcagcatcagcggcggtggagacgccgcaccgtcgaagaaccccaaagaagagcctgacatagacacaactttaggcgcgatgcccgcggcggtgcacgtgccgtcaggtgtccccgtaccgccagtcacgggaggcacccgccgggccga

SEQ ID NO: 2240 - DNA, 889 bp, Gossypium hirsutum
  Clone ID: GOSHI-09MAY01-C25573_1
atttgttttttttttttaggctttgttgccccactatccttctaagttgcgaagtctaagaaggtgtatttctttgaattcgtatttcatatttaccatgcttcaggcatttgaacctcctttagatatgagccaggatgtggatggttgcaaggatccacacctagaaaactttgaacatgggcattgccattctgaggagagaaatgcttctctgtcagtctgcatcaaccagcggaagatgggttgttccaaccatgctcaagcttgtcctcaggaaaaaagcaacataatgagcaatccaacaacaggggaggtgaaaagcgaacagcaacatgagcctatctttggaagcggtgctggagaagtggaaaataaaaatgagatagctgaatgttgcagcaacgatgtcgctgattctaatgggaatgcattttcatctccacatgactggttggatccatcattgcagttaaatgttccattggttgatgttgataaggtgcgttgcataataagaaatattgtaagagactgggcagcagagggagaaaaagaacgaaatcagtgctataagccaattcttgaagaacttgatgctcaatttcctaatcgctccaaagagagccctcctgcatgtttagttcctggtgctggacttgggcggctagccctagagatttcatgccttggtttcataagccaaggaaatgaattttcgtactacatgatgatatgttcaagttttattcttaatcatactgaaacaactggacaatggacaatatatccttggatccacagcaattgcaattcactttcagacaatgatcaacttcgtcctgttttaataccagatattcatccagcgagtgcagggattactgaa

SEQ ID NO: 2241 - DNA, 443 bp, Gossypium hirsutum
  Clone ID: GOSHI-09MAY01-C25513_1
atgataaccaggtccctcaaaacgaccaccaccgtcgccgctggcgccgtctccgcctccaacaacccttctttgacctctcaagatttcccctcttctaagaaagcatctcccaagaagccgccaccgccaaccgtctccaaactgacccaaaaccgtggcgcttccacccacaaaccacctgttttcgactgcgattgtttcgactgctacacgagctactggtttcgttgggattcttcccctaaccttgagcttatccatcaaatcattgaagctttcgaagatcatttaaccaaacgggaatcccagatgctgtccaagaaaaacgcccgccccatacgaagggactgtaacagcagaaccgctacaccggtatccgttagcccggttcagcccgacaacgacgtttccggcttgtagaatcctaccatggaagcaac

SEQ ID NO: 2242 - DNA, 1142 bp, Gossypium hirsutum
  Clone ID: GOSHI-09MAY01-C25443_1
gccgaactgtttttggggctgcctttattcccaggtgcttcagaatttgatcttctgaggcgaatgattagaatacttggatcgcaaccccctgattatgttctaaaggaggcaaaaaacacaagtaagttctttaagtgcattgggagtacccacgatatagagaatggtgaagtccccattggtagcagaagtgcttaccaagcattaacagaagaagaatatgaagctagggagctaaaaaaaccgttgatgggcaaagagtatttcagtcataagaaccttgaagcaatcgtcacaaactatccttaccggaaaaacttgcctgaagaggatatcattaaagagggtcaaatacgattagctttgattgatttcttgaggggactggttgagtttgatccagccaaacggtggtcgcctcttcaggcttcaaaacacccttttgttactggggaacctttcacatgcccatacagacctccccctgagacccctcgcttgcctgttgctcaaaacttaaaggtggatcatcaccctggtggagggcattggtttgcagctggtctttctcctaatattccaaacaggaacagagtttcctttcataacagcccacacttcccaatggtgccatatggtcatgctaatagctatggcagtgtaggaagtcatggtagctataatgataatgctgggcttggaagcagctacgggagttacggagataatggtaatatgtttgcatattattcacctgttggtccatctacaatgaacatgcacccacagagtggtgcatcgatgcttggaagtagccccgatgctagacagagatttctgccatactctcatgggaatggacttggtgtgagtccatcagctggaaactttgcaccacttccccttggtactagtccctcgcagtttactcctccaaactcctatggtcaagtttcaggtggctctcctggacactatggtcctacttctcccgcaagaaacagttgtcaaggatcacctttaagtaagatggctgcagctgggcagtttaatagaagaaaaggttggggatatttctggaagttcccaatcttaagagagttcatcttctttacatttgcatggacaagtgaccgatg

SEQ ID NO: 2243 - DNA, 413 bp, Gossypium hirsutum
  Clone ID: GOSHI-09MAY01-C25743_1
gtttgagggacacccattcattgtggaagctggtgttagtgtgggtggaaaagatgttaaacagggtttgaatattttccgatttgcaaatcgaattccgcttctttttgagcaaggtggtgatgttgtcacgaggactgcgctaaagagaatcagttggaataattacaagatcaaccaaacacaagataaaatcggtgtctttgtgagtattgtaagcacgaaaattccatttaaagggactggaaaggagtacatcggggatgatatcagcgaaatagctagtgctgtcaaatctgcaattcagcaatgctgcatccaactgaagtcgaaaatagtaaagaaaatgcaggcgcgagaacagcaagagagaaaacgaaatttgagcaagtatatccccgatgccacaaatg

SEQ ID NO: 2244 - DNA, 806 bp, Gossypium hirsutum
  Clone ID: GOSHI-09MAY01-C25683_1
ctgattgcagtctttggatcatcgtcttccaattcattggactctgtaagttccactcccgtacctgagatctttacaaactatagaaggctaaaggagcaagcagcagttgattattttgagttgagaactatcttgtcaggatctagtcggcaaagggagcttggcctttgtggcaaagaaagagaaaattatgtaccttgttacaatgtaactgcaaatttgatatcaaggtttaaagatggacaggagtttgatcgacgttgtgaagtgccaaggcaaggaagctggtgtttagttcgccctccaaaagattataagattccactccgttggcctgctggtagggatgtgatatggagtggaaatatcaagataacaaaagaccaattcctttcatctggaggcgtgacaaaaagaatcatgttgctagaagagaatcaaattgctttccaccctgaagatggcttaatctttgatggtgtcaaagattattctcgtcagattgcagagatgttgggactgggaagcgactctgaattgtttcaagccggagtacgcactgtacttgatattggttgtggatttggaagttttggagctcatttagtttcactgaagttaatgactctttgtattgccgcatatgaggcaacgggaagccaagttcagctagctcttgagagaggtcttcccgcaatgattggaaacttcatataaagcaacttgcatattcaaaataatccattgacatggttcattgtgctcagtgcggtattgtttgggacaagaaagaggggattttc

SEQ ID NO: 2245 - DNA, 408 bp, Gossypium hirsutum
  Clone ID: GOSHI-09MAY01-C25673_1
aaaagatcgtcttccatatcatcacagataagaagacatatgctggtatgcacgcctggttcgcactaaaccctgtatcccctgcaatagttgaagtgaaaggggttcaccagtttgattggttaacaagagagaatgttcccgtgcttgaagctgtagagaaccatcatggcattcgaaattattatcatggcaatcatcttgccggggcaaatctctccaatactactcctcgaacattcgcttcgaaattgcaggctagaagtccaaagtacatatctttactcaaccatcttcggatatatttaccaaagcttttttcaaaactttacaaagtggtctttctagacgacgacatttgaattcagcgtgatttatctcctctttgggagattgacttatggggaa

SEQ ID NO: 2246 - DNA, 444 bp, Gossypium hirsutum
  Clone ID: GOSHI-09MAY01-C25663_1
gggagacgttaaagagtactggattaacgacggagtttgggggtctatgaacattttgaaggacgagcatgacggagtgatttgcactcccctcaccattaaaaatcccacatgccaagggctgaaaacctgggattctaccggtttggacccacctgtgatcccaatgattttcgtttgaacgggtttcaaatggccagaactagacctgaatgattgagtggtatttcaaaacatgggggcttatccttcatcacgtgggaacgatttcaatggcttcaaaacctcagctattccaacttatatcctggttcttatgccacccgtaagacaagaaaaatatgcgggttgggctaatttgcttgccaacttatatcttcttgcaatcatgacacgatcaaagataatttagcttatgaaataatgtcctatcttactataatc

SEQ ID NO: 2247 - DNA, 361 bp, Gossypium hirsutum
  Clone ID: LIB3048-054-Q1-L1-G12
gaacatcttgaaggacgagcatgtctaaatgacttgcggtcacgtgaccatagaaaatcccacatgcgaagggctgaaaacatggaattctacaggtttggaccaacatgtgatccaaataatataggattgaagggtttcaaacagccagaactagacgtgaatgattggatggcatttcagaacatgggtgcttatactgcatctcctgtgaacgatttcactggctctataccctcaactgttccaacttatatactgactcttattgcagacgcaagacgagaacgttaatatggtcggacttatatacttgactgcttatatattctcgcattcatgacacgatcaaagacctggt

SEQ ID NO: 2248 - DNA, 855 bp, Gossypium hirsutum
  Clone ID: GOSHI-09MAY01-C25153_1
tggtgttggaatcggatcaattctgcttcttggcctagcagggttcttgttctggttcgtcaaacgtcaacgccaagcttacaaggtcaggccaatagctactgcttcaccaccaccaatgccaccattcaatctgaaacctttctcggattcaacaacttacacttcaaactcctggtctgtttcaatatcttcccaaggggttcgtcatgcaatcgaatccttaactcgttacaagttcgaggacttgaaagctgctacagggaactttagtgaatccaacaggattaaagggtcagtttttcgaggttctttccaaggtgatgctgctgctatgaaagtaatgaacggggatgtttcttcagagatcaatttattgaagaagatcaatcgcgccggcattataaggctttcaggtttttgtgtacatgaaggaaacacataccttgtctatgagtacgcagataaaggctcagtcagtgatttgcttcactccaacaagttccaaacttcatttactctttcttggaagcaaagagttcagattgcatacgatgtacctgatgcactcaactatttgcataactacctaaatcctccttatattcataagaatttgaagagcagcaacattctcttggatggtaactttagagccaaagtcaccaacttcgggttggcaagaactattggggacaacgatgaagggggtttgcagttgaccagacatgtgggtgggactaaaggttttatggctcctgactacattgaaaatggtgtgatcacgcctaagctcgatgttttcgcattgagggctattatattggagcttttatcatgggaacgattgctgca

SEQ ID NO: 2249 - DNA, 580 bp, Gossypium hirsutum
  Clone ID: GOSHI-09MAY01-C25163_1
gccgcagaattttttttttttttttttttttttttttttttttttttttttttttttttttttttttttttttgaaaatgttgaaaatataaaagtttcagttcttaccaaagaaatgaaaaaccaggctgtcccggaaaacggacggaaaaggaaaagatcaatgcaagcaaaagaaaacatagattcaatcaagaaaggaaatggcattacgacaaagtcaagcaccgatgatgcaactaaatcggttgggtaccgacaaaacggtagcagacgcaaaaacaagcctcgacgggctgctgaggctgttgtcgagtgcaagtaatgcttgtgagatcatgtatggattgagatgtttcttgttgttacatggtatttgttttttggggttccaaggattccattttgataagtttgcagtacatgcttgtaatattccatggtgtcatcacaaattttaaaaagaaaactagtgattttttttttctctgagaaaatcttgttattcaaatgagaaatttgtctctctgcaacatctggtagggaccctggttttatatctatcttggtaattttctta

SEQ ID NO: 2250 - DNA, 672 bp, Gossypium hirsutum
  Clone ID: GOSHI-09MAY01-C25123_1
tggcattttgccacttttccaagctgcatagcaaatacccaattgttagggttttggcgcagcaaccttcatcccctagggccatttaatcatcagttcaccattaaaattggtgagtgacgtagaagccttctttgtttccatcaaaatcgacgcttaaaagccatttccactcgcatctctaaccccgacttcgatagagaagacaaggatctcatcgatgcatccgcgaaggtaaatttctcatttctctttctttttttttagaaaaatgttctaaaagaaaacaaggtacatgcaaaggaaaaaaaatattgaagacgaaaaagattcaaatcaccttctgattttttttgctggttctttgtattgaatttgtgtagtgtgcgtaaaaaaatatggtatggctattacatggctttcatagccggaaacagagaaaaatgaaaaagaaaatacaagtttcttgtcgtttttttttctttctctttgctgtgctggtgttttcgtatttgcttgcaggtacggagttcgctggcatgcgttggcccttggcgtggggcatacagaggcgcggacgtggtcgtacggtgctgaaggcgcatggaggctgggactgctgcggcgcaagcagaaactgctagggttctgccctgattttttgttttgggc

SEQ ID NO: 2251 - DNA, 749 bp, Gossypium hirsutum
  Clone ID: GOSHI-09MAY01-C25383_1
cccacgcgtccggcttgaggcaacggaatacatatcaagggacctcctcgggtaagctgctgaatccctcgggtaaaattggtgagcaaggctctcagttgagctcttttgatcctatgcatcatgtccaagaatctgtatcccatgtagctgaaattgttgaaagttcaagaaggaaagctcgatcaatggttgatgcagccttaaaggctatgtcatctttgagaaaaggggggaaaaacattgagaggattgaggatgcaatagattttgtaaataaccagctttcattgaatgagtttagtgcacctgctccgaggtctgcggccccagtagactctgtccgtagtcatgataatctgactgcttgttcatcatatccatttgcaactagtcatatacctgagatgaagctgcaaaatttgtcagaccaagatgaacttaaaatcccttcagaccttatttcgcaatgtgtagccaccttgctcatgatacagaaatgtacagaaagacagttcccaccaggagatgttgcagaggtgctagattcagcagttacaagtttgaagccatgttgttcacaaaatctaccgatttacacagagatacagaaatgtatgggaattattaggaatcagatattggcattagttcccacatcatgaaatcaggtatgttgtaattcctccattgttgttgtaaaaacaatccaacactcttcttatccaattttatttactccttttttt

SEQ ID NO: 2252 - DNA, 698 bp, Gossypium hirsutum
  Clone ID: GOSHI-09MAY01-C25313_1
gtgaggagtcgtccgcatgataagcagtacgatacaattctttgtttgagtgtgacaaagtggattcacctgaactggggtgatgatggcttgattaccgcgtttgggaagatttggagacttttacgtccgggtggcgtttttgtattggaacctcaaccttggtcatcatatgaaaggaaccgcagagtctctgagacaacaagaagtaattatcgagatatcaagtaccgacctgatttttttcgggaaatgcttctagacaagatcggattcagaagggttgaagttgtaacttcagatctgtcgggaactagaaccggtttcaatagaccgatctttgcatactacaaatgaccaattttgatagttcgattttgttgaaggggtaccgagactaacttggacgtgatttttgcctgttaccacacatggatttacatatctatgggggcaatggcgcaagtgcgcccacggcaattgtagaactttttgtgaaatatgctgtgactaacataacttttgaacttggctttgagtgaaatcttcgttacgtgtctttaaatttttgttggtgttaatgtttacatgttctaattttgatcccacttaattataaatggctaaacaaataaataaaaaaaaatattttttttttaatttattataaaaattattttatataaattaattttttt

SEQ ID NO: 2253 - DNA, 529 bp, Gossypium hirsutum
  Clone ID: GOSHI-09MAY01-C25283_1
cctttttggaacacgttcctcgccttataaaaaaagggagctctacgatataatttttagtatctttttgtttttttttttcctttttcctttcggctcttgaagaagatgaagatcgtggtttatggttcaataatgatgacaagaaaaagctcgcagttttaattgaataaacagcagttcctggaagtttaattttactaccaaacaaaaagccagcagaaagctggcaggatttgttgctttcacctaaagggtcatcgtatccttttctctcactgaatgcagctcttgatcacacaaacaacaatccagatagtatacgatcatgtcttatttaccagcaagaaaagggagacacacacaacggtacgaggataatctgaggcttgttgccgggggtattccatacagagtggagaaggatgttgaggacagcaggatcagtgttcttatgatatccacacccgatcgtgatgatcttgttttccctaaggtggatgggaagatgatgagactgttaatgaag

SEQ ID NO: 2254 - DNA, 362 bp, Gossypium hirsutum
  Clone ID: LIB3149-007-Q1-K1-A4
acgcgtccggagaaaagcaaaacaccaattcaattagctaagttaagtaacaaaggcgtacgctcccaatataggggggtagatacatgaaaaacagggatttacgcaacagcagctgcgaaaggtgcaggtggaggcaaagaagagaaagggcttttcgaatggaatcttgggaacttgcagaaggaagagcagtggtatgaaactgaccctatccacaagaaagtggaagaaaagaatggcggtggcagtgggagaggaactaccaggggacgcaagaactctgtgtcaatccctcagaagaagaaggacaatggctggctttgggcgttggaggggctttgaagaaatgaaagaaacta

SEQ ID NO: 2255 - DNA, 340 bp, Gossypium hirsutum
  Clone ID: LIB3165-060-Q1-K1-H5
gtgggaaaaacaccagttcaatttctaagctaagtaacaatggcttctctccctagattttcctttgttccttcaaaaacaaggatttacgcaacagcagctgcaaaaggtgcaggtggaggcaaagaagagaaagggcttttcgattggattcttgggaacttgcagaaggaagagcagttttatgaaactgaccctatcctcaagaaagttgaagaaaagaatggcggtggcagtggcagtggcactaccagtggtcgcaagaactctgtttcaatcccttagaagaagaaggacaatgctggcttttggcttggagggcttttcaagaaatgaaaga

SEQ ID NO: 2256 - DNA, 441 bp, Gossypium hirsutum
  Clone ID: GOSHI-09MAY01-C26913_2
gcttgtttatgagtacgttgacaatgggaatttagaacaatggcttcacggacatgttgggccttgcagttctcttacatgggagatccgtatgaatatagtgcttggaactgcaaaagggtaaacgtttggttaactgataatgttagcacaccttgaattgtccttggttttttcctccatgtttgctgacaatgatgttgtctgccaaaattgaaacttgatttaggttgacatatctgcacgagggactcgagcctaaagttgttcatcgcgatatcaagtcgagcaatattttgcttgacaagcagtggaatccaaaagtatctgactttggcctagcgaagcttttgggttcggaaaggagctatgtgacaactcgcgtgatgggaacatttggatttgtggctcctgaatatgctagcactggcatgttaaatg

SEQ ID NO: 2257 - DNA, 552 bp, Gossypium hirsutum
  Clone ID: GOSHI-09MAY01-C26913_1
ccccgcgtccgtaggatgcttgtttatgagtacgttgccaatgggaatttagaacaagggcttcacggagatgttgggccttgcagttctcttacatgggagatccgtatgaatatagggcttggaacttgcaaaggggtaacgtttggttaactgataatgttagcacttgacatatctgcacgagggactcgagcctaaagttgttcatcgcgatatcaagtcgagcaatattttgcttgacaagcagtggaatccaaaagtatctgactttggcctagcgaagcttttgggttcggaaaggagctatgtgacaactcgcgtgatgggaacatttggatttgtggctcctgaatatgctagcactggcatgttaaatgagagaagtgatgtgtacagctttggcattcttctcatggaattaatttctggaagaaatccagtagattatagccggcctcaaggagaggtaaatctggtcgagtggcttaaagcaatggttaccaatggaatgcagagggtgttttggatccaaggttaccggaaaaacct

SEQ ID NO: 2258 - DNA, 421 bp, Gossypium hirsutum
  Clone ID: GOSHI-09MAY01-C26933_1
gtcggatcttctgcctcggtccagattgaaccggctggatagtcctgaggaagagacaggcaagataattttagaagacggcactgaagtaacagtctctgaattaactgatagggttttggcttctgctttgaccgaagatgactcgcccgagttgaagttaaacgagtgctgctgtgatgatagaaacttggtcgatgttgctacttcaactgaattgaagtcaaacgcatgctgggtttcgaatgttgtcgatggaggagggaattatggaattaaagggattaggccaccgggtttaaagccgccgccggtgatgaagctaccggtagtcgatagcgcttgctcaacttgggatctgtttagggatttcgcccccgaagatgatagaaggtgtatagttcaggttcacttacattca

SEQ ID NO: 2259 - DNA, 406 bp, Gossypium hirsutum
  Clone ID: GOSHI-09MAY01-C26863_1
tagcacacatccatagcgtgacggaaaagagaaaacttgggtttccttacaaattagtccctctccatctaatttcatagtttccacccaaaatcttttatttccaagtgaaatcaagtgtctagcaatatcaaaagtttagttttcaagatagaattcatgaattcatggatggaggtgggagaaagttaagaaagtgtaagaagtcaaggtgacaaggtaagagatcaagagttctcttgtgaattttgtgatttattgaagtagaaataaaagagtaattttttgtacttctagagttctacttattttcaaaagactaaattgaattatgtgatgaaataagtgcgatgtgtgtgaatttaattaaaaattaaagggattagtgtaaaggacttcatgagag

SEQ ID NO: 2260 - DNA, 450 bp, Gossypium hirsutum
  Clone ID: GOSHI-09MAY01-C26543_1
ctcgtgaagaaaaaggagaccataaaccactggtatagatggaaactacgaagaaaacaatggacattatcacgattgatagcttctaattaaagtttggaaagtggttatgaataattccagccaaaagaatggaaattacaagcatattaccagaagagtgcctgtgtctgatcatatcgttgacttcgccggaagatgcatgtcgatcggccatgatttctcacgcttccagatcggttgcaaaccgtgatgaagtgtgggaaaggtttctgccgtctgattgtagatcaatcatttcaggatcatcatcatcatcattgctttcgctgggaaagaaggatgtatatttccatctctgttttcatcccattctcattcaaaatggtaccatggtaaaccccaaagctcactccttaatctccatctccatcggttttattcgattta

SEQ ID NO: 2261 - DNA, 854 bp, Gossypium hirsutum
  Clone ID: GOSHI-09MAY01-C26403_1
gtttttctctatttttcatgtcgcgtaagtcggccggtcctgttcaaactcagatggctgtggcagtgtttaagagtcctcttggaggggaatatcctaggaacaatgcggtggaagagaaacaacctacccgaagaagacgggtttttgttcagactgagaccggctgtgtcttgggcatggagttagatcgcagtgacaatgctcatacagttaagagaaggttgcaggttgcccttaatttccctacagagcaaagctcgctgacttttggcgatgtggagttgaagaatgatcttagtgccgttcggaatgattctccacttctcctgacacggaactatctccatagaagctcctctactccttgtctttcgcctactggaagggaccttcagcagagagataggagtggtcctattgagatactggggcattctgatagctttaacgtattaaaagttgtggtgaaggacattgttaaggcaattaagatgggtgttgatccacttcctgttcatagtggtctggggggtgcctactactttaggaatcccagaggtgagaatgttgctatcgtgaagccgacagatgaagaaccttttgcaccaaacaatccaaaaggctttgttggtaaagcccttggtcaaccaggtttgaaacgttcggttcgtgtgggggagactggtttcagagaagttgttgcctaccttctggaccatgattattttgccaatgtgccaccgaccgcgctggtgaagattactcactcagtcttcaacattaatggtggtgtgaacagaaataggcctcacacgaatctggttagcaagattgcatcgtgccatacagtt

SEQ ID NO: 2262 - DNA, 942 bp, Gossypium hirsutum
  Clone ID: GOSHI-09MAY01-C26723_1
cgaggggggtttccgatgtcaatgttcagactgatagatctcagttagcgcgaggcgcggtccgtttctttccgacccggatgactcggttcgggttgaggatggtggtgaacgtgccccggtttctgacccgccggttctgaattctctgctgcgattggaacggacggactcggactcggatcggttcgggcacgatccgatgcagccctttaacgatgattcagctgatgtcagcatgcctagtaacgctccgccgttgagaagagtcaggccacaaacagaccgcaatgattcgaatcgtttaccttcctcgaacactgccgtaaacaacattgacagcagcgaggacgatgactctcctctggcgcgtcatgtaacgcgccaactgggagcggtattggcagaggagagggcgttgtctgcaagagaagcagcggaagcagccgctgcggcggtggaacaagctgcagtgacagtgaacaatgctccaccagcgtccgaggaaccggtgaggatgtcattaatggaattattagaagaaacaagccaacaaatggggctgatgggatccagttacatcataagcgacgccggtgaagagtatgagaaagaggaagtgacggatgaagacgaagacgaaaaagaggtggtgcaaagcagcggtgggatggagcacgcttgttgcgtttgcatggttaggcataagggtgctgcgtttattccatgcgggcatacattttgtcgtctctgttcaagagaactctgggttcagcgagggaattgcccactttgcaatggctccatcttgggaattcttgatatcttttaatctatatttaaatccgcgttatcgtttgttcttcataacaattttatctattctttttcttcattatcagcagggataacaatagttcatgtcttctagtttccaacttt

SEQ ID NO: 2263 - DNA, 396 bp, Gossypium hirsutum
  Clone ID: GOSHI-09MAY01-C26683_1
atcagtcttcttggtccacaactttggaatctgaaggaaagtcggatcatctacttactatggaagaaaatacagaaaaattggatcaatcttcttggtccatgacttcagaatttgaagggaagtctgatcatctagttgcaaaggaggtatcctctagtaaagttggggttcaacgacattcggaaatagcaactattgatttatttcttgatagatccatcagttgcattcctggtttaagtaaaaggcactctcgccagctagaagaatgtggcttttacactttgcggaaactgttacatcattttcctcggacctatgccgatttacagaatgcccaaactgagattgatgatggccagtacttgatttttgctgggacaattatgtcgt

SEQ ID NO: 2264 - DNA, 497 bp, Gossypium hirsutum
  Clone ID: GOSHI-09MAY01-C26673_1
cttcactagcagacatgtattatcaccatccagtcaaaggatacagaacatgaggtgaatagcgaagatggtgatggattcaaagggcgaatgaatatcttaaaaatcatgattgcattagcacacaataaattactcatggacgtggagatctgaacaaatccttgtgatagcgtggcaaacaaaacacattgtgtatcatggtccaagtgtcgtaaagaacagatctcattgttcggagttgaaaaatcttttcttttccgccgttgccaaatcgagacatagatggcgatatatctcagcacccccaaaactgagatattttcagaagacggcgagattgatacgggtagatattggctatcatccttcaagattggctgcaaccctggaaatacctgaaggtaccaatggaaccctggaattttttttaattttctaagcatttggaccttatattattgcattctactagataagttccagcaatgagtttt

SEQ ID NO: 2265 - DNA, 778 bp, Gossypium hirsutum
  Clone ID: GOSHI-09MAY01-C26663_1
ttttgtttgaaaaacatgtggtgtccatccatcaaatgccaattgaatcaaaactcaagtggacggaagaaaacaccctctcccggtccaccccatcattcatttcttatgtttttgttgccttgcctgtttattcaatccctacattttcccccacccttttctttaacgagtaattctaatatttaaaagaaaaaaaacatctttttcccctctatcaccaatcctagtccttaccatcatcatcattatcaccaaccaacctcaacaacaacaacagctgcctctgcctatcattttcatttgattataaaaacaatttgtttccatttgtttttgttttctgtagttgggttcttttgttttctggggcatattattaatttataatattattatgtgaaaaaagaagatgaatatttttgctattgcgagaggatgagagtgagagagaattatgcgaaccatttgcgacgcttgtgaaagtgctgctgctatcgtcttctgtgctgccgatgaggctgctctttgcggtgcttgtgatgaaaaggtccatttgtgcaataagcttgccagccggcatgttcgggtgggtctggcaaaccccagtgacgttccttgctgcgacatatgtgaaaatgcacctggtaatatgcaggtgtctttttgtcttgtgctgtttgatttatcaggtttcttaacaggtttgcggaacttatgttcattccttgaaccgtgcatgtagctttcttttactgtgaaatagaggaacatccct

SEQ ID NO: 2266 - DNA, 608 bp, Gossypium hirsutum
  Clone ID: GOSHI-09MAY01-C26133_1
gaggggtcatgttctaaaattgtaccatatttactgaatagtgctgctgctcaaacacagtccttcgcatatccgcatgaaaacattgatcaaccaagcccagttgttgcatccaaagagcacctcgcagatgctaaactttgcagctattctaacttttgggtccatgagaagaaagctgatagccttttcgagtccagaagagtggagaattcactgtccaggcagaatgttgcacctctattacttcatgatcagtcaagaaacaatagtcagaataagcagagtcagaaagtggaacatgattctaggcttagattgcttccaagcttgggcagtcctgaggctgagaaatcaggaaaagcatacgatgaatatctcttgctgcctagaatacctcgttctgtacatgatgtcaagaccatgagaatatgtaccactattgattctgtggaagaattacccacaggtccctccaagatttctcaaacaactcaccaatttttcattacaaagaagactggggttaacttaactgaaggaggacaagagttcagagatgcaacagtctcccccaaattgaaaggaaatatgttcaatgagttcct

SEQ ID NO: 2267 - DNA, 380 bp, Gossypium hirsutum
  Clone ID: GOSHI-09MAY01-C26093_1
taacagcggtcatctcgtgcttaaagaccctaaaggcaaagagctatggaggtctcaacgccttactgatggttctcaagtgtcccatgcagccatgctcgacaccgggaacttcgtgatcgcaagcaaaaactcgaccaacatatgggagagcttcaaatatccaactgacaccatcttaccgtcacaagaacttgatatggctgaccatcttttatcaactctggttgaaacaagttacagtaaggggaagtatcagcttcgtttcaataatgaatctttcatactgaatcaaatagatatgttcacaggaaaaccttacgaagcttactttaatttcgggaacggttctcggttggtcttcaacgagtcaaggcata

SEQ ID NO: 2268 - DNA, 804 bp, Gossypium hirsutum
  Clone ID: GOSHI-09MAY01-C26043_1
agaatttttatggttaggttcttcatggacgtgcaagagaaaaaagaaacactatgagtctttccgcaggaatggtgtaataatttcggttcacgacttcgtttatgtcttagctgaggagaataaacgacttgttgcctatttggaagatttgtatgaggtctctaggggcaacaagatggttgtggtacgatggtttcacaaaattgatgaggttgatattgaccttcatcacaattataattgcagagaaattttcttttctcattgtcttcaagatctcagtattgaatgcatagatggattggctactgtccttagtcctttgcatttcaagaaatttttgaatgaggcaacacacactcggctggagccatttgtatgctgcaagcaatttgaaaatgatgttaagccttttgatgtgactcaagttaagggttactggaaacaagatatacttagatatatgtatgggctttctccttctaatgattgtgtgactcgtcagcaacgtgctgacgacctgaaaactgtttgggatgttgatgacgatgtttggattaggcctagaaagagatattgtcgatcaaaggatgattatatgcacatgcatttcagtggcagtagagagtcattggatacatcatttgcagatgtgcaagactttcacaaagcaaaaatggaaatgcatcattcaatttcagtgttgggattttgcgttcctgtccactggtgaggctaacgatttcttctcaccattaaccggaggtttcgaagttgagtgctaactcaagatatggtttg

SEQ ID NO: 2269 - DNA, 1013 bp, Gossypium hirsutum
  Clone ID: GOSHI-09MAY01-C26063_2
ggaaaatttagacaccgatcttccctttccctttcccttccccttgcccttccccttcgcttgacacctgatcttctgcttgccatcagccaacaccgattcttaacaccagacaccggctttcatcaaccttttttctatgttttgatttcggagcaataattgagggaatccgaaaattgagaaaactgatggaattgggaaagaaaatggaagcacagaagaaaagcaaagtttcaaagatggatcaatttgtgggtatacttcgcttcaccacctcttgagcgcaaatctcaagcctcaactctaccagtgtagcataatgctaatattatgcacaatcggagcccaccaattgtttacattttttgatcaaaccatcgaaaaaaggaaagaaaaaatcttccatctacaacgctgaagcaaactctcaagtctcaaccttgaaatttgctggttcttaaaccctcaagatataacccggttgcgctgctaaaggtccaagacctcggtatcctcgggtatgggaatcaaggaatagaattgggactgtctcaaaatcagcaaagcttgttacttgtgttaagcaactgtcaaatgtcaaggaggaagtttacggggctctcgactcctttattgcatgggaactaaagttccctctaattacagttaagaaagcattgaagatcctacaaaacgaacaagaatggaagagaataattcaggtgataaagtggatgttaagcaaaggtcaaggaagaagcttaaaacttttctcttctgctgtggtaaacttcattggccaggagattatgggggccctatgtttctacttcctggtttggttattacattatatgctactggagccttgaatactgtcctatcaaaggatcatcaatatgagatatgcagatatttgtacaatcatcaagcaagcaatgtgcactgtgtcaacgttttgtcgatatttgatcctgataggtgcttggagcatatgaatggtcagggaa

SEQ ID NO: 2270 - DNA, 1722 bp, Gossypium hirsutum
  Clone ID: GOSHI-09MAY01-C26063_1
gtttcgattgtagtaaaacattttccgaaaaaagttttcagtctttttcagtgtttgtttggctgaaaatattttcctcacgtaaaatcaattacaaacacgagaaaaagaagccttaattttggaaaatgtcttaccgtttctaattcggtaagatattttcaggaaaattagacaccgatcttccctttcccttccctttccccttcccctatccttgacacctgatcttatgcttgccatcagctaacaccgattctcaacaccagacactagcgttcatcaaccttttttctatgttttgatttcggagcaataattgagggaatccgaaaatggagaaaactgatggaattgggaaagaaaatggaagcacagaagaaaagcaaagtttcaaagatggatcaatttgtgggtataattcgcttcaccacctcttgagcgcaaatcttaagcctcaaatctaccaggaagtcagccggttgcttctggggctgaattgcgggaaaacacttgaaactattgttctacctgaatcagctaaagccctctcttcaaaacatgattttgatcttcaggctttcaaattttctgctgaccaagagttgttaagagaaccccgggtagtaagggtcggtcttattcagaactccattgctctcccaaccactgctcccttttcagaccagaaaaatgctatctttgagaaattgggaccaataattgatgctgctggtgcttcaggagtcaacatactatgcttgcaggaagcatggatgatgccatttgccttctgtacacgagaaaagaggtggtgtgaatttgcagaacctgttaatggggaatctacacagtttcttcaggaatttgcacgcaagtataacatggtcattataagctcaattcttgagagggatataaatcatggagagactctctggaatactgctgttataattggaaatcatggcaacataataggcaagcaccgtaagaaccatattcctagagttggggacttcaatgagagcacgtattatatggaaggaaataccgggcatcctgtatttgagactgcttatgggaagattgctgttaatatatgttatggaaggcaccatcctttgaattggctagcttttggtttgaatggtgctgagatcgttttcaacccatcagccacggtcggtgaacttagtgaaccgatgtggcccattgaggcacgtaacgctgcaatagcaaacagttattttgttgggtcaatcaatcgtgtagggactgagattttccccaacccattcacctcaggggatggaaagccacaacatccagattttggccatttctatggatctagtcatttttcggcacctgatgcttcctgcacaccatcactctcccgttataaggatggactgatgatctcagatatggatcttaacctctgtaggcaactgaaagacaaatgggggttccgaatgactgcaagatatgagttatatgcagatacgcttgccagttatctgaaaccagactttgaaccccaagtcatctctgatcccttgttacataagaagtcttcttaagtacctgtcttcttaagttccaggtactaattgcagctcaatgtatgaagctgataaatggagatgaaaatagaaactgtattgatttatcatattgaatcatccacaagaacaagttcgttgtgtttgtgtttgc

SEQ ID NO: 2271 - DNA, 564 bp, Gossypium hirsutum
  Clone ID: LIB3825-020-Q1-N6-C6
caactgacatctattgatttaatacaaccaggtaaagaggcagacaaccatctgatatctatgaagcaaatgaactagcaatatgctagaaatatcaacaattgcaatcaacaaaggcaataggctccattgaagtccccaatttaaatagaaaagagcagtattccagagagtctattatgttgccatgatttccaattataacagcagtattccagagagtccctccatgatttatatccctctcaagaattgagcttataatgaccatgttatacttgagtgcaaattcctgaagaaattgtgtagactccccgttaacaggttctgcaaattcacaccacctcttttctcatgtacagaaggcaaatggcatcatctatgcttcctgcagcatagtatgttgactcctgaagcaccagcagcatcaattattggtcctaatttcaactgattattgtgcatcaattatcccgaaaactgattattgttttaggcagatagaaagattaaaagcacgaggaaaagaaagacaccgctatgtaccatattcactaaccatct

SEQ ID NO: 2272 - DNA, 614 bp, Gossypium hirsutum
  unsure (1)..(614): unsure at all n locations
  Clone ID: uC-gsflnu33B071d04b1
tcgggaaaattttagacaccgatcttccctttcccttccccttccccttccccttcgcttgacacctgatcttctgcttgccatcagccaacaccgattcttaacaccagacaccggctttcatcaaccttttttctatgttttgatttcggagcaataattgagggaatccgaaaattgagaaaactgatggaattgggaaagaaaatggaagcacagaagaaaagcaaagtttcaaagatggatcaatttgtgggtatacttcgcttcaccacctcttgagcgcaaatctcaagcctcaactctaccagcataatgctaatattatgcacaatcggagcccaccaattgtttacattttttgatcaaaccattgaaaaaaggaaagaaaaaatcttccatctacaacgctgaagcaaactctcaagtctcaaccttgaaanttgctggttcttaaaccctcaagatataaccggtattcctctntcagttctgtctcgtttaagcaatngcgtttggttgctgagaaaatgctggaatatataagtttaaccttntcttttaagattttcttgaagcaaataaaattgttagtggatggcaactaatgctac

SEQ ID NO: 2273 - DNA, 555 bp, Gossypium hirsutum
  unsure (1)..(555): unsure at all n locations
  Clone ID: LIB3585-017-P1-K1-A11
cccacgcgtccgtggcaaccacaattaatcaaaatttctttctttttttccttttggttttgcattatatcaggatgctttgttgtggatatgctctgccactcgttactaaaagattggaatcagtgaaaattaaccagagacctaggaataccgtggtatgcgctgctaaaggtccaagacctcggtatcctcgggtatggaagtcaaggaatagaattgggactgtgtcaaaatcagcaaaacttgttacttgtgttaagcaactgtcaaatgtcaaggaggaagtttacggggctctcgactcctttattgcatgggaactagagttccctctaattacagtgaagaaagcattgaagatcctacagatcgaacaagaatggaagagaataattcangtgataaagtggatgttaagcaaaggtcaaggaagaacaatgggaacgtatttcaccttactgaatgccttagcggaggatgggagacttgaagaggctgaagagctgtgggtcaaactattttctgataattttgaaagcaccccacgtattt

SEQ ID NO: 2274 - DNA, 490 bp, Gossypium hirsutum
  Clone ID: LIB3135-048-Q1-K1-A8
ctttgaattggctagcttttggtttgaatggtgctgagatcgttttcaacccatcagccacggtcggtgaacttagtgaaccaatgtggcccattgaggcacgtaacgcttcaatagcaaacagttactttgttgggtcaatcaatcgtgtagggactgagattttccccaacccattcacctcaggggatggaaagccacaacatccagattttggccatttctatggatctagtcatttttcagcacctgatgcttcctgcacaccatcactctcccgttttaaggatggactgatgatctcagatatggatcttaacctctgtaggcaaccacaacagtggcgacatcttatccgaacaagtccagattttcgcttcccactacactccagtggacagccaactcattcccaccggcaaattcgccaccgtcaaaggaaccccttacgatttcctcaaacctcacacggtgggaagccgaatcaaca

SEQ ID NO: 2275 - DNA, 439 bp, Gossypium hirsutum
  Clone ID: GOSHI-09MAY01-C26333_2
ccggcatctcctccttcactgttttccttcaatcgcttctctcatttcccatttctacctacatctccgccaccaccacctccgcctctgaatgtcttgttacaatgcatcaaggaaggtgttaaattggaccactgctatcgtccatacagatttattgagagtagtatctagaagacttgttttggcaaccaagacgcagtcaataacgaccatggcagctcaagaggaagaatgtaagggtaatgtgaaggcacagttagcaaaactatttgaagtttcacttaaagtaacagttccgaatgaggcagatgttgacccattgatagctgcctgcactggcaaatttggtgattaccaatgtaataatgccatgggcctttggtctaaaatcaaagggaagggtactcagtttcctggccctccagctgttggagag

SEQ ID NO: 2276 - DNA, 511 bp, Gossypium hirsutum
  unsure (1)..(511): unsure at all n locations
  Clone ID: uC-gsflnu33B142b04b1
tccacgcgtccgcccacgcgtccgcccacgcgtccggaaaaagatatgttgacacccttaacccttttagtaccgccggcatctcctccttcactgttttccttcaatcgcttctctcatttcccattctctacctccatctccgccaccaccacctccgcctctgacagatttattgagagtagtatctagaagacttgttttggcaaccaagacgcagtcaataacgaccatggcaagtctagaggaagaatgtaaggggaatctgaaggcacagttagcaaaactatttgaagtttcacttaaagtaacagttccgaatgaggcagatgttgacccattgatagctgcctgcactggcaaatttggtgattcccaatgtaataatgccatgggcctttggtctaaaatcaaagggaagggtactcaatttcgtgggcccccagctgtcggagaggcaatcaagaataatcttnccacctcttgaatgatagattcatgctctgtagct

SEQ ID NO: 2277 - DNA, 380 bp, Gossypium hirsutum
  Clone ID: GOSHI-09MAY01-C26213_1
ctctctggactgcaggagtgaaagcttattgttcagttctggtggaacttcttatatgcaagatgcaaattctggccacaaagtaatatacactttgcaggaattggagaccgcacttatggcacctgatgagaatgaagacttaaccacccctagtgtttcccacggagaaagtagtagaccacagactgcaggccagcgatctagggcatggagtcgggggcgccaaggatctttggcacttctgcctcagacatcctttgtctctaagcataggcaatcgactgaagtttctcatgttgaaaaacgccagaaatcaatagaggatttctcttggctgggtattccacccggcaatctgaagcagttgctgattgctt

SEQ ID NO: 2278 - DNA, 772 bp, Gossypium hirsutum
  Clone ID: GOSHI-09MAY01-C26203_1
atctacttgaaccatttgtctttcatttctgtttgccgtcccaattgcttttcattctcccgccgggaaaccttatattatataaatatttgactcttgttcttaatcttttctgtatatttttgtttgtctttcttatgggattgatttttatcattatttcaatttccatcgtctgggtagcttctctttggaagattttcttctcccattcaaaacccacatttttaaatgaaggtacacctttgcacacaaaaaatgtcttgctggttgttgcgcaccctgatgatgagtccatgttcttttcacctacaataaactacttgacttcaaaagggcacaatctttacctattatgcttgtctattggtaacgcagatggcatgggaagcagtagaaaagatgagctttatcgtgcttgtgtagttcacaagattcaacttcaacaagtgaacgttttggaccacccacaattgcaggatggttttggtcaattctggatccatggtttactggcaccgatcatacaagacgaggtttacactcatgtgattgatgtgattattacatttgatagctatggtgtctcgggtcattgcaaccatgggtgatgtgcattatggggtacccaagttcctgcgtgattctttcaccggggatatattgaagcctgggaacttgtgagtttaaatataatgcccaagtttagtcgactgtttgacatttggatgtcaaatttaaacgtcatgcaacatccaagtggtgttatgcc

SEQ ID NO: 2279 - DNA, 431 bp, Gossypium hirsutum
  Clone ID: GOSHI-09MAY01-C27923_1
gtgaaacctagacccatcatcataatctcaaaaaccctgaatttccccccttttccatccccaattttcaaccccaatccaaaaaccatgtcttggtcttgcaccaaatgcactttcctcaactccccatcccaaaccgccgcttgcaaagtctgtctctcacctccgtcaccgtcaccgtcttcgccgtctaaatgggcttgtaaagcttgcacttttttgaacctttacaacaaatccaactgtgaaatctggggtacaaggtcttggctttccaggttcgatgatttgaaagttacgaactttaacgatgaagccgattcctctgttgggtctgttttcttgcctttgaagccttgtaataaaaagaagatcagggaaccaaatctgggtaatgaagatgtatcgaattggtggttttcgtggcatta

SEQ ID NO: 2280 - DNA, 576 bp, Gossypium hirsutum
  Clone ID: GOSHI-09MAY01-C27803_2
gcggcattggtcgacttttgttgtatgattatgataaagtggagttggctaacatgaataggctattctttcgcccagatcaggttggtatgacaaagactgatgctgctgttcagaccctttcagatatcaatcctgatgttgtgcttgagagctatacgctgaatatcacttccgtacaaggatttgaaacctttatgtcaagcttaaagaataaaacatttcgcccaagtaaggaaggtagcggagtggatcttggttttaagttgtgtagacaattacgaagcaaggatggtggtcaaccaggcttgcactgagttgaatcaggcatggatggagtctggtgtatctgaggatgcagtttcaggtcatatacagttgctgattccgggagaaactgcttgttttgcatgtgcacctcctttggttgtagcatctggagtggatgaacgaacactcaaccgtgaaggggtttgggccgcatctttgccaactaccatgggagttgttgctgggcttctagttcaaatacactaaagttccttgtgggatttggacacgtttctcctacttggg

SEQ ID NO: 2281 - DNA, 1101 bp, Gossypium hirsutum
  Clone ID: GOSHI-09MAY01-C27803_1
aaaacatacaggcttgcactgagttgaatcaggcatggatggagtctggtaagaacttatggttcattagctactagtaatcaagttaatttaattcattgttggttaagaaatgccttctattatttttagtttttcaattggatcacaaagtttccttttgaaagatgcttgtaatcctgtgaaattgatagacttcctcattaaatggttaaactacaagattttgaaggatgcatatggagttttgactctaattaattgaatattcgtataatgaaaaaaaagattatgagtatacttggacttatcattgacacatgtatgataactacagtgtaattcctcttcatgtgtcaatttgaacttttagtggtttgcataccatgtgtttatccatattgcatttctgcggagaatattctgagaagattccaagtaaagatataaaaggtattattggattggccatccggttcttcttgattactgaagagaggaaatttttggacaggtgtatctgaggatgcagtttcaggtcatatacagttgctgattccgggagaaactgcttgttttgcatgtgcacctcctttggttgtagcatctggagtggatgaacgaacactcaagcgtgaaggggtttgtgccgcatctttgccaactaccatgggagttgttgctgggcttctagttcaaaatacactaaagttcttgttgggatttggacacgtttctccctacttggggtacagttctcttaaagacttcttcccaacaatgacaatgaagccaaatccccaatgttcaaatgctgcctgtctggagcggcagacagagtacattcgtgcaaagccagccagggatgctgcagcgaaagccaagatggaggctgaagctgctgccgctgccgcagcaggagatatgccactccatgttgataatgagtggaacataagcgttgtcgatgattatgagccggccaagagttcatgtggcacaagttcagatgcgcgtccagaaggtctcactcgtgagctcccaagtgcggatgaatttcaaaagccccaggcatctggagccacagattccgctattgat

SEQ ID NO: 2282 - DNA, 770 bp, Gossypium hirsutum
  Clone ID: GOSHI-09MAY01-C27543_1
cccacgcgtccgaaaaaaaatggcttcgtttcatatgattacaacccttctttttctgctaacaataatgctgggtgcatcaaatgctcaactcagtgccaccttttatgccaaaacctgccctaatgtgtccaccattgttagtaatgtgctgcaacaagctcaaggaaatgatatttggatattccctaagatcgttcgccttcattttcatgattgttttgttcatggttgtgatgcttcgttactgttgaacggtacggacggtgagaaaacggcgaccccaaacctttcgacggagggatatgaagttatcgatgatatcaaaacggcgttggagaaagcttgccctcgtgtcgtctcatgtgccgatgttttggcacttgctgctcaaatttctgtttctttgggtggaggtccgacatggcaagttccgttagggagaagggatagtctgactgcgcaccgggaagggaccggtagtttcccgaccggccacgagagccttggctatattgtcaaccttgtccagggcgtgggatttgatctatgatctagtcgttttgtcgtggtcacacattcgaaagggctcaattcgcgttcatggaccgatctcacttcattacaaaacgggaaaacgatctacctaacgcgactatgcaaccctaaaccacagtctaaagcgggaaccttaaattacgatataacaagttgtacttcacaagctttaacctcaaccaaggatgtacaccagatgttctatggctaag

SEQ ID NO: 2283 - DNA, 850 bp, Gossypium hirsutum
  Clone ID: GOSHI-09MAY01-C27463_1
cacctgcatcaatgttgatgaaggttgatcacatcttaaacctatttcgctatgattgccatatatatgtaaaattgcgccgaaagcacatatcttaggaagtgaagccctggaaactctgaaaagtttcatagctttttcatctctctaatagcgtacgcttttgtgcccattcgcaatgcatagaattgtattgcaaagagaaatcagaagcagagcttcccacaaggctctttcttggttcagttcttctaatctttttaggtctgttcattctttaccttttgcaactgtggaagccgaagggatatcgggttctcaacctgctgaagtacaaaacttggtgcaaggtaaatggactggatctgcagcgtggaacacacttgtggatcctctgaatggagaaccgttcattaaagttgcagaagttgatggaaatggaattcagccatttgttgagagcttgtccaagtgcccaaaacatggtttacacaatccattcaaatcacccgagagatacttgttatatggagatatatctgctaaggctgcacacatgcttgccttgccaaaggtgtccgatttcttcactaggttaatacaaagagtttctcctaaaagttatcaacaggccttcggtgaagtttatgtcacacaaaagtttcttgagaatttctctggtgatcaggttcgttttctagcaaggtcttttgcagtacctgggaatcatataggacagcaaagccatgggtaccgttggccttatggtccggttgctattattactcccttcaatttcccgctcgagattccggtacttcaactgatgggagcactctatatgggcaac

SEQ ID NO: 2284 - DNA, 414 bp, Gossypium hirsutum
  Clone ID: GOSHI-09MAY01-C27763_1
catatattttcattgcaatattcttagcagaatcaaacctgacatggagttttcaaaggtttctaccctagctcttacttgtctcgtggggttagtcttggtccttccctcccatgcccaagactcacaacaagactacctcaacgctcacaacacagctcgagcggctgtcggcgttggtcccatgacttgggacgacaccgtagctgcctatgcagagaaccatgctaagcagcgcatggctgattgcaaccttgtgcactccagtggacattatggtgagaaccttgctgggggcagtgctgacctctcgggaaccgatgctgtaaatatgtgggttaatgagaaggccgactacgattacagctctaacagtgcgcagcaggtaaggtttgcgggcattatactcaaatg

SEQ ID NO: 2285 - DNA, 444 bp, Gossypium hirsutum
  Clone ID: GOSHI-09MAY01-C27723_1
cctattgcaagtgatcttactttctcaaggtactggaattgcttgaggaagcaaacatttgttttggaatcatatataagcacggttaattggctaatgaatagagcactgtttttaacccacttctatctgtcatggggatttgttgcaccgtacttcatggctatggttcatgttgcagcagcactacaaatctatataaaagattattcatatggcgaaacaacctgtacttctggtggattgttattggcaatttggctagctatatgtaccttcacggagctactttctatgtggaacttaacaaggattgaagttcaactatgcaacattttatctccagaggcacctaagctctcacttgattattacaactggagcatgatttttgttgcaatgctggttgataattttctatacccgatctctgcattctggtcg

SEQ ID NO: 2286 - DNA, 391 bp, Gossypium hirsutum
  Clone ID: GOSHI-09MAY01-C27663_1
gccggatggctacaaggaagttggggattccggtgagataagagttccttccgttgctccgaaagcgtcaagagcgaatagcgagaggaggggttcgaatcgagggatttattccaattcaacaaaggagaaagggcctgggagcatggaattcacgatggaggaaattttgaaggccacgaggaacttctcccctgctttcaagattggacagggtggatttgtgacggtttataagggaagacttgatgatggaacctttgttgctattaagcgtgctaaacagagtgtatacgataagcatttaggtgtggaattccagagtgaaataagaacactggcacaagtggaacacttgcatttggttaaattttgtgggtatttaaaacat

SEQ ID NO: 2287 - DNA, 436 bp, Gossypium hirsutum
  Clone ID: GOSHI-09MAY01-C27633_1
acctccgccgcttttgctactttccaattttcccaggttctaggcatggtggtgtggcttaaagtggctgttataaacgaagaaggaactcaagctatttttatcagactatgaatgtcatctgaaagatatctccataaatgtagatggatcattgatgctttccgagggaaaatcatgtctgaagttgaagatgcgattatcaagaagatcaaagaaggaataataaagcttgactcattgttgcagtcgcttccaaaacaactgcaagttaatagtattggtgcattgaatgtgactttcatggatgaccctttgtttactaattcttccgtagagcttgaaattaatggtttattcaacagagcagatgaaatttcagtttcaaactattacagtaaaagagcacggaatttcctttcttgcaatggtttct

SEQ ID NO: 2288 - DNA, 495 bp, Gossypium hirsutum
  Clone ID: uC-gsflmaxxa003f11b1
ttttacgcgtccgctaatttaaacacctccgccgcttttgctactttccaattttcccaggttctaggcatggtggtgtggcttaaagtggctgttataaacgaagaaggaactcaagctatttttatcagactatgaatgtcatctgaaagatatctccataaatgtagatggtggagcttcttggctttatcaaggatatgctatcgttgcctattcagacaactatgccaatccaactcttcatttttattgaagcatccacgtccaacatatgttcacacataagaatggggatatgatccttcaaggaccctccaaatacatagaatcaatcattattctgtcattaaaccatagggttttttataacttgttaatagtattctacaaaactaaattatgcttcagttaaaaatcacatacatgaatcttttagggttaaacatatgttcttaggttctgcttgagaatactatctttcctggtatggga

SEQ ID NO: 2289 - DNA, 548 bp, Gossypium hirsutum
  Clone ID: GOSHI-09MAY01-C27193_1
atccggcaaaaggaggattattcagagcgggttcaatggagaacggggatggaatagccgttgggtggttagggcaccctatctttagagataaagacgggcgtgaactttttgtacgtcgtatgcctactttttttgaaacatttccggttgttttggtagacggagacggaattgttagagcggatgtcccttttagaagggcagaatcaaagtatagtgtcgaacaagtaggtgtaactgttgagttctatggcggcgaactcaatggagtgagttatagtgatcctgctactgtgaaaaaatatgctagacgtgctcaattgggtgaaatttttgaattagatcgtgctactttgaaatccgatggtgtttttcgtagcagtccgaggggttggtttacttttgggcatgcttcgtttgccttgcttttcttcttcggacacatttggcatggtgctagaaccctgttcagagatgtttttgccggtattgatccagatttggatgctcaagtggaatttggagcattccaaaaacttggagat

SEQ ID NO: 2290 - DNA, 580 bp, Gossypium hirsutum
  Clone ID: GOSHI-09MAY01-C27123_1
ccccccccctttttttttttttattttttttttttttttcggcaagagtaacccaatatcaaataatcgaccaaacctcattagttccatctttaaaaccaaattcaaccatccaattttcccgtacttaaatttaaacaataagctttcacgaatcagtgtccatatatttacacagatttaggttgaatttgctcgaagtcaaaaacctcgaacataaggcgtctcacatctggcttaccatacacagtgtatgataggccatggagggcctgctgaacagcagttgtggcagggttccggagtcttcgattgttctcatacgcatcttgaacttgctccgagtagatcataaaacgatgcagatacttttcccgcaaatacctcccgcagaacttgttcataagaacacggcgatgcttctcttgtagccatcttccaggggcgtctagatgcttcatcagcaacctctccgccataaccagatcctggatcttctggccgacatactccaaccgctcaaagcaaaaccgaggatgttcaaacttgtattttgatggatgcataaaacaaagctgta

SEQ ID NO: 2291 - DNA, 473 bp, Gossypium hirsutum
  Clone ID: GOSHI-09MAY01-C27333_1
gtgaaaaagagaggtgttttttctttttgaaatttgagattacaaaaacacgaagtgagctgagcttctgattattgtcggaagcaagtggagttcagctctctttgaagactcgaatatcgcaataaactgtgaagatttggggatcaaagctcaaagggtaaaaagtacctccgttagatctttaccgtcaaacgagagaattaaaaaaaaaatgtcggttcaagagtacctcgacaagcatatgctctctcgcaaaatcgaagacgccgtcaatgccgctgttcgagctaaaactccggatcccgtcctcttcatctctaatcatatgaaaaaaagcggttccttcagtgataacgaaggtaaaagctcggcagattctcgatagtagaaggattcctactgttgaagttgagttgtacactaacaaaggggtgttccgtgcttctgttccttgcggcgactctactgga

SEQ ID NO: 2292 - DNA, 581 bp, Gossypium hirsutum
  Clone ID: GOSHI-09MAY01-C27253_1
ccccgcgtcctgcaaggttttggcaggaaactaatagccggttaaggcggttgcaggacccaggttcacctttgtcttcgagcccgggctctagaattggttcaccagctaagtttagtcaaccaaaaagggtttcttgtgatggtgcagtggcttctcctattaggggttgtataagacctgcttctcctagtaagctttggacatcttcggcttcatctccaactccatcgaggggactaagtcctggtcgggttagaaatgcagttggtggtaaagagatgattgggaatgctgttaataccccttcaattctcagcttttccgttgatattcggagaggaaagaagggagaggatctaattttcgatgctcatgcattgaggcttttttataacggttacttgcaatggagatttgcaaatgcaagggcagatgcagctttcattgtgcaaaaactgagtgctgagaaaaatctgtggaatgcatgggtaacaacttcggaactgcggcattctgtgaccctgaagagaataaagttgctactgctgaggcaaaagttgaaattaacttccatcttg

SEQ ID NO: 2293 - DNA, 697 bp, Gossypium hirsutum
  Clone ID: GOSHI-09MAY01-C27263_1
tttagaagaaaaaaaatggagagaaaatctcaagccaaaccaattctcttcttctttgttttagtttcggcactaatcgaaacttcctacgccggtgacatcgccatctattggggccaaaatggtaacgagggtaccctgagtgatacatgtgccaccggcagatataaatacgttaacataggtttccttaacaccttcggcaatggtgccactcctggactcaacttggccggtcactgtaatccagcatccaacggttgcacctctcttagcggtgaaataaaaagttgtcaaaaccaaggaatcaaggtcatgctctcccttggaggtggcgcgggaagctactcactcgcttctcaagaagacgccaaaagcgtagctgattatctatggaacaacttcttgggcggtacctcgtcttctcgtccgttgggtgatgctgtgttggacggaattgattttgatattgaggctgggtcaggtcaatattgggatgaccttgctcgttctttatcagcttatagtagccaaggaagaaaggtgtatttaacagcagctcctcagtgtccatttcctgatgctcacttgggaactgccattaatacaggtctctttgactacgtatggattcagttttataacaatcccctggctcaatgccaatacgcttcgggcaacaccaaagacattttga

SEQ ID NO: 2294 - DNA, 460 bp, Gossypium hirsutum
  unsure (1)..(460): unsure at all n locations
  Clone ID: LIB3272-051-P1-K1-B6
tttagaagaaaaaaaatggagagaaaatctcaagccaaaccaattctcttcttctttgttttagtttcggcactaatcgaaacttcctacgccggtgacatcgccatctattggggccaaaaatggtaacggagggtacccctgagtggataacatgtgcccaccgggcaggatataaaataccgtaaacatagggttttccttaaccacctttcggcaaatgggtgcccaactcctgggacttcaaaacttggcccgggtcaacttgtaaatcccaggcatcccaacgggttgggcacctctctnnntagcggtgaaaataaaaaagggttgtnncaaaaccaaagggaatcaaggggtcatgcctctccnncttggaggggtggcgcccgggaagggctactcacttttcgcttctcaaggaagaacccgccaaaaagcggtagctggaattatctat

SEQ ID NO: 2295 - DNA, 437 bp, Gossypium hirsutum
  Clone ID: GOSHI-09MAY01-C27203_1
ccggtagggagggaagaaaggaagagataggaaattggtggggtttccaaaaggtcggagaagggtgaagaggttgttagagatggaagtaacagccagagggtggaggaggagaaggcggaggaagaagaagcagctgctgctgccgccgcctttgcagctaaagcaagagcgaaaaggaagtcttcacggccaaatccacggctgagtaacccacccaggcacgtccacggcgaacaagtcgccgccggctggccatcttggctgtcgaacgtcgccggtgaagccatcagcggctggactcctcgccgtgctgattcttttgagaagattgataagattggtcaaggaacatacagtaatgtgtacaaagctagggatactttgactggaaggttgttgcattaaagaaagttcgtttcgataatttggagccg

SEQ ID NO: 2296 - DNA, 401 bp, Gossypium hirsutum
  Clone ID: LIB3083-055-Q1-L1-B8
tttggatctaggagttgaccctccatcatctcgtgatccaggcattgcctgctgttgttccagcttctcacagtctcacaagctctctaggactagaatcaagtacctacggtgtcggtaaaggtagtaaccgtaacggtggtctgatcatgtctgacatcatttctcaaattcaagcttccaaagactcaagcaaattatcatatagaagtagtgtggcaacagagtctctgccaactttttcatcatactcggccaagagggcatttgaaagacaagatcgtggttcctttgaagagaatagtgacatcagggaagccaagcggtttacaaatccacatattgaaaggcaatatttggaaatgccatacagagatgtaagctctatggattcacataac

SEQ ID NO: 2297 - DNA, 406 bp, Gossypium hirsutum
  unsure (1)..(406): unsure at all n locations
  Clone ID: LIB3083-055-Q1-L1-B4
cgctttacaatctagaactagccgatacctacacctattcgaatccagcacgaatctaacaacttacacctactcatctccaaatccagcattcgcgnctatctgctccagctttctgaccaatctcacaagctctctaagactataatcaagtacctgccgtgtctgaaaaagtagtaaccggaactgtgaactgatcatgtctgacatcatttctcaaattcaagcttccaaagactcaagcaaattatcatatataagccgtgcgactacatattctctgccaacttcttcatcatactcatgcaagatgacattttataaacaacatccaagatcctttaaagagaatcgttacatcatgaatgccacacgttttacaaatccacatattgaaaggcaatat

SEQ ID NO: 2298 - DNA, 705 bp, Gossypium hirsutum
  Clone ID: GOSHI-09MAY01-C20893_2
gttggtgcttatagtctcttgagatcatgcacgattgaaccagagtgcattattggacaacattcgattcttatggaaggttccttggtggagactcactctatccttgaagctggttctgtagttcctccaggtaggagaatcccaactggtgagctttgggcaggaaatccagctaggtttgttcgggctttgacccatgaagaaaccctagaaatccctaaacttgcagtggctattaatgatctaagcaaagaacatttctccgagttccttccgtactcaacagtatatttagaagttgagaagttaaagaagtccctaggaataaccatttgattgcctttcatttttcattattccataatatcggtctccccgagttttccttgcaaagaaataagcaaccaaagaacacctagaagaagaatcttttctgttgtttatccatgcacttcatcatgttggctgttgaaagaaaaaccttttaatcatgagtgtcctatgaaatggaatatggattgtaggtgaattaatttcattttgtatgatgttgagtttattggggcttggcctttgtgttgactgtgatggcatgtataaaattgcaagtgcctttcacattattaatatttataaattgaattgaatgattgatgaggacgtatgttgaatcaaaaaaaaaaaaaaaaaataatattttat

SEQ ID NO: 2299 - DNA, 446 bp, Gossypium hirsutum
  Clone ID: uC-gsflnu33B005a02b1
gtctatccatgcacttcatcatgttggctgttgaaagaaaaacaacagaagagattcttcttctaggtgttctttggttgcttatttcttcgcaaggaaagaacacctagaagaagaatctcttctgttgtttatccatgcacttcatcatgttggctgttgaaagaaaaaccttttaatcatgagtgacctatgaaatggaatatagattgtaggtgaattaatttcattttgtatgatgtcgagtttattgtggtttgtcctttgtgttgagtgtgatggcatgtttcacattattaatattcataaatggaattgaatgattgatgaggacgtatgttgaatctatgtaaataagccctatctactgatttttatcctttgattattataattcttgcaagttgatgggatattattgggagaaaaagcatattccttccttg

SEQ ID NO: 2300 - DNA, 723 bp, Gossypium hirsutum
  Clone ID: GOSHI-09MAY01-C20863_1
gcaaaactaataatttaggaagggtcgttaaaagggtgggcatatggagagatatatatggtatcgatgaaaaaaagttgcaagcatgattagagacgataaaattgacattttggtagagcttactggtcatacagccaacaacaaattgggaacaatggcatgtcgaccggcgcctgttcaggttacttggattggctatcccaatactactggtttgcctacaattgattaccgaataactgattcacttgcagatcctcctggtacaaggcagaagcatgtcgaggagttagttcgacttccggaatgcttcctttgctatactccttccccagaggctggacttgtttcaccaactcctgctcttgccaatggcttcattacattcggcagctttaataacctggcaaagataacacccaaggtactgcaagtttgggcgaggatattatgtgctgttccaaactcccgtctcgtggtaaaatgcaagccattttgttgtgacagtgttcggcagaaatttctttcaacattggagcagctcggtttagaatcgctccgtgtcgatctcctccctctaattcttcttaaccacgaccatatgcaagcttattctcttatggatattaggttggacacatttccgtatgctggaacaacgacaacatgtgaatctctatacatgggagtgccatgcgttaccatggctggttcagtaca

SEQ ID NO: 2301 - DNA, 901 bp, Gossypium hirsutum
  Clone ID: GOSHI-09MAY01-C20833_1
cctttttcatcctacaacccagtttgtctcgtttgggtcccaccgatgcccgttcccctatacgcagatcttgctccaaggacaacatcgtctcctccgacgtctctgttgtttccgataaccacgactcctcggcttccttttcatccggtacgaacagggccgtttatggaaaggtggggcgggtacctgttgggattggacggcggagaatgagggtcgtggtcacgggaggggctgggttcgttggcagtcatcttgttgataagctaattgctagaggcgcggccgcgtgggcgcccgcgtggggctgcccgggggggaaggacaatttggttcatcttttcgggaatcccatgttcgaactcattcgacacgacgtggttgagccaattctcttagaagtggatcagatctatcatttagcttgccctgcgtctcccgttcattataaatacaatccgggcgggagctatcaagacaaatgtgatgggtacgcttaatatgttggggcttgcaaagagagttggggctaggtttttgctgacaagcacgagtgaggtttatggcgatccgcttcagcatccacagaaagagacctattggggaaatgtcaatccaattggcgagaggagttgctatgatgaagggaaaaggacagctgaaaccttagctatggattatcatcgaggtgccggtgtcgaggtgcggattgctcgtattttcaatacctatgggcctcgcatgtgcttggatgacgggcgtgttgttagcaattttgttgctcaggccattcggaagctaccaatgactgtttatggtgatggcaaacaaactcgcagcttccaatatgtttccgatttggtggatggactttgtgctttaatggatggtgagcaca

SEQ ID NO: 2302 - DNA, 795 bp, Gossypium hirsutum
  Clone ID: GOSHI-09MAY01-C20753_1
cccagcgtccgacaaatgcaagccgtgggtgggaactccttcattggggcctgcacaatactctgcagtatgcccttgggtgtctggtcttgacatgaaagcaaggatgctaaaattttccagaactgctcatatgataacaataataagggatcagggatccggaaaagtacatgctggaggacgagtaacctacaagttcgaagaggtagaccgacaaaacttacgagccggtttgcgacagtcattgaggatattagtagcagccggggcagtcgaggtgggtactcatcgtagtgacgggcagagaataagatgtaaagggataagcaatgaggagttagatgagtttttggactcggtttctatgttaacaagcccgttgtgtaccggggaaaactgggtggtgcacaccactgctcaccagatgggaagctgtaggatggggataaatgaaaaggaaggtgcagttgatgaaaatggagagagttgggaagctgaaggattgtttgtttgtgatgcaagtattttgccaagtgctgttggtgtaaatccaatgatcactgtccagtccactgcttattgtctgtcaaagaagattgcagagtctttaagacaacaaaaatagccttcttgaattatagtaatccctcatcaaacacctacacattgttgtgcttttctaaatttgtttgtgtgtattggattgtaagaataataactgaaaagatggtctatccatttttaagatttttgtactcttatgctccttattcgaataaacatggaagtgtt

SEQ ID NO: 2303 - DNA, 1331 bp, Gossypium hirsutum
  Clone ID: GOSHI-09MAY01-C20773_1
ggccatgccggtggagatggagatggaggagagaggaaaagtcggggctttgataggaaaagccacgaattcgaccgctgccgaggttgatccacgtcttctcaaagcaatcaaatcagtggtgcgggtctccgattcggagctacgactcgccgcccataccctcatggacctcatgaaacgcgatcattcccaggagaccgcagcaaggatagaacgagagaggagggaaagagagagaaggactagggagattttacagaacaagtttgaaacgatgaaaacgaattttagttctgttaaggaagaaatacaggctacagttgatgagattggagaatgtttagatattgttcgcactaaagaggaaggcgtgccacacgtcttattggatgacgaagattttgtagagtttcgatcttctgagttgaggcagatccgtctccctgcgtccgccccgcgtccgaaggttcatgagaacagcgataacaaagtggttttcgatgcattaagagagctgtttaagcttttagtaaccaagcatctggtttcagtacaagaatggatatctcttcttgtaagggttgaagtggctgacaacaggtcacgagattccatgttgaaggacttgattgatatccgaaacagtctcatgtctgtgaagaaggattgtgaagaatctggttgtactttacccaaaactgtgaataaaaacgaagaagaggaggaagacttctgggaggaaggtaatttgggattgactgagaatggtagtactactgaacctgagaagcgaagggaggttcacagttccaacattgaaaagagaagtaaatctgtggaggataggaattctaagaagtctaataaacagagtggaaatcttgctaaagtgtcagcttcttgcaaggtgaaagccaaagataaagaatgcagtagttctaagggcaaagagtgttcgggtagtgaaaagtctgctaggagtgagcttttggctgaagctccagttctcaggtggggttctttcatggataattggggctcagtctctaacaaggatacattattaaatcagaaaggcttggagtttgacaatcactggggaagagtagattatgatgccgtgattccagccgagaaaattgcagaattgaatcttcaggcgattgtttacgaggaaaacttaggagagatccaaccatgtcatgcgcctttaaaaaaaggtggactttgtcagagaagagacttgaagatttgcccatttcatgggcccattatacctcgtgatgatgcaggaaaccaaatcaatcagagttcttcaacagatgata

SEQ ID NO: 2304 - DNA, 556 bp, Gossypium hirsutum
  Clone ID: GOSHI-09MAY01-C20663_1
attttggcaagaatggtgggttgcaaactcattggattttaacaaggactatgatgccagtgttttcgagacaaccataagagttgtaggtggacttcttagtgcatatgatctttcaagggacaacgttttcctcgaaaaagctagagatattgcagatagattgctacctgcttgggatactactactgggatcccttataatgttagcaacttggctcatggaaatgcacataaccctggttgggctgggggtcaaagtattcttgcagactcagggactgagcaactagagtttattgctctttctcaaagaacaggagatcccaagtatcaggagaaggtggagaaggttatagttgcccttaataaaacttttccggccgatggtttgcttcccatctatattaatcctgaaactgcaactggttcatactccactataacctttggtgctatgggtgacagcttctatgaatatctgctcaaagcctggatacagggaacaaaacatcatcattaaagctttatagagatatgtgggaaacatcaatga

SEQ ID NO: 2305 - DNA, 1378 bp, Gossypium hirsutum
  Clone ID: GOSHI-09MAY01-C20193_2
aataggaacaactactctcagcaattaaaggttttcatgtccatgcatccattcaaatacaattggtttttaattgtacaaattaaatccctaatagtcaaataacgtcccatacagcatcctaccataagtaaaacagctacatctaaaattccattttaacaagtgcattggattcttcagatccatgatgaagccagtccttggcacagattagcgcttccacggtctccggtcgtaaggagcttcggtactcatccagttgctttattatgatgtcaaagaccgagtccggagcagcagctgatactggaattgacaaaatgtcacgagccatcttcgaaagagttggatacttcatcttattgagcttccaccagcctaatacatcaaactcttggactcgaggcaacaaggactcttctaagtattgatccagctcagatttcatttgctggctgctagtctccataatgtacacatcgaaatctgtaagtccctggtctgaaagaagatttccttgttgggattcatcggtctttccattgtttcccgcattgccttcttctgtgtaagttggtgtcaaaggcagtggaagtgctacatactccagaaagagctcatgaattccatcatcaacaattttgatatatgtgggagcgtcttcaccaaatatttttgtgaaactgaactcaacaagcttcattttgaagcgaggatccatgactacagcaattgccaaaatcaagcttctaccctgcctggtcgcgccgattttttcgtgcattgactttgcaaggttgctgatgaagggatcctcactagtgatcgaacgacccagttccgcatgtattgtccacgcttcatgaaagaatgtaattgcggtagggaaagttgtagttgtaaggattctggctgcatcgaagagaggtttcaagaaactgcataaagtctcagccaacttccagtcttccattgatggggctagcttataatctggatcgtaagtatccaagcaatcaaacacttccttcaattcagaagcagctgcaagcatttggtatgttgtgtttcactgagtttgattgtcaagaaacaggctcttttcactaagcaaatgaaggtgggggttgtctttaatgaacttgtcatcatgggattgtgacgtcttcgcaaaaaaaaaaaaaaccggcttttctttatatctcttgacctgctccaagcacatctttaacattactgctcatagctcgccctccacaatttcattatcatgtacgtcactcgatccggaccggcatttcccaggccaatttacgaggccagttttttccctcaccttcaatcatccgctaagtgaagctgggggaaaataacg

SEQ ID NO: 2306 - DNA, 688 bp, Gossypium hirsutum
  Clone ID: GOSHI-09MAY01-C20193_1
aagccaacttccagtcttccattgatggggctagcttataatctggatcgtaagtatccaaccaatcaaacacttccttcgagttcagaagcagctgcaagcatttggtatgtcgtgttcccctgagtttgattgtcaagaatcaggctcttttcacttggcacttgaagctggtttttaacttgaacaaacttttcatcatgggattctgaagtcttcacatactttacactatcacggattttcttgacaatctcatgccctgcaccaagcacatcctttgccatgctgctcagggtacgagctatgcaatttccaagtaacaactgaccgttaagaataaggggattcttagtacagagtagaggtctaagattttccagcccagcttcacttgttggatgattgaaggtgagggaaaataacttgccttccaaactccagtctgacaggcaggcagcaacggcatgacttagagcagaatcggaatccggatatggttccattacgacattgagaacccgtctgtgcaacttccagtcactatcaacgaagtgtccagttataaacacataaccgagggtttgatttgaactccacatgtctagtgtaagacaaactcgccccggaataccctcaataagcttcatgaggctttgcttttccctcaggtaagttgcaacgcaat

SEQ ID NO: 2307 - DNA, 304 bp, Gossypium hirsutum
  Clone ID: LIB3083-030-Q1-L1-E3
ctgttaataggaacaactagtctagcaattaaaggttttcatgtccatgcatccatacaaatacaattggatttggatggggcaaattaaatccctaatagtcaaataacgtcccatacagcatcctaccataagtaaaacagctacatctaaaattccattttaacaagtgcattggattcttcacatactttacactatcacggattttcttgacaatctcatgccctgcaccaagcacatcctttgccatgctgctcaggttacgagctatgcaatttccaagtaacaactgaccgttaag

SEQ ID NO: 2308 - DNA, 449 bp, Gossypium hirsutum
  Clone ID: GOSHI-09MAY01-C20183_2
gcagcttgaacaatcaaatccatagtttaaaatttagtaataaaaacatcatcgtattgtgtcacaatttgcttcagaccccccaacaatacccagtttctgaatttcgagttttctcaactataaactaatacatgactaaacgttttcccataaacttacaactagatagccggcaatgactggaaaacgaggtccgtttacgttgattttagatcacatattgtggtgccggcgctttaagaattcaaaccaaatggcattctgggggttttgatattatatgatgtctgcagcgatcatctgggattatgaaagtatgaactgaaattcgcagcatttgctgtttaggtgccgctcatcatgactccccccagggttggagctcactaatgtaatcacattaatgaccttggcttggaattgaactgtccacttttcatatcatc

SEQ ID NO: 2309 - DNA, 733 bp, Gossypium hirsutum
  Clone ID: GOSHI-09MAY01-C20183_1
aataaaactcatgaatttgtccatgtttagcccaaaaatccagtttctgatttgagtttctccattttactaatccatgctaacgtttcccataacttccattagatagcggcaatgactggaaacagtccgttacgttgatttagatcacaatgtggtgccggcgctttaggattcaaaccaaatgcattctggggttttgatataatatgatgtctgcagcgatcatctgggattatgaaagtatgaactgaaaattgcagcattgctgttaggtgccgctcatcatgactcccccaggttggagctcagtaatgtaatcacattaatgaccttggcttggaatggaactgtccactttcaattcatcagccagctccgcaaccaccccctccctagcggcaactgctttgtttcaatatctgtaacttcctgcctctccgtctttgctcttaccaatatctgcactcacttcagaagtgtttgacacacaatgcttttgaagccatctatcagtttcccacaggacatgcatgatgctttctcgaccagaatagccatggctctcaaagggtagaataacaaggcgacagagagctccatgacccttcagggcattgaagaaacgatccgactgcatggttaatgttcccgggttgttgtcttcttgcaaatggataagcaagataggcttctttattatgtatgccgtacgagtggtcggacgcgtggg

SEQ ID NO: 2310 - DNA, 634 bp, Gossypium hirsutum
  Clone ID: GOSHI-09MAY01-C20003_1
atttatctggaaagccctctgtggatcttgctgaattgcagatctccactttgaaagaaatggatattgatattggtcacaagcaggtggcctgaagtaaaaaggcttcaaccctcaaccaagggtgtaactggcttatatttagttcaagattatcttcaaaagtgcaatggtccaaaatcaccgatcggagtttccacaacttgtacaaaacttagagcaagcaaacagcaggccgaaatcccactctcgtagtctgtcagatacagaaaagccttgcaggaatggtaatgtcaagctatttggtcagatactcaattccagttcccaggacgatgggaagatccgtttccgtgaacagagcatgaaatcttcgaatttgaacttcagaggtcataacaatgttgatggaaatgcatctttctcaaaggttgatcaaaatatcatttttgcaccggaaaatgttcccaggagaagctatggtttctgggatggcactaggatacaaactgggttgacatgtttgcctgactgtgaaattatagtggcgaagtatgctgctgcgtttgtaaattaccctgttccttatttcaaatgcaggtgcaggcatcgtggctatggttctggatactga

SEQ ID NO: 2311 - DNA, 1116 bp, Gossypium hirsutum
  Clone ID: GOSHI-09MAY01-C20383_1
cccagcgtccgcttaacctggtgtctcgcggggttcaacccgtttcactcctaatccactcactgcagatggggcgcgtgattatcaattttctagaagtctcttatcaaataaataacaacccattgtaacacactaggccctcgcctccgccccacgcctcctccagtctcaagcaaccaaaccaaacaaccccttatccttttccatctctctcaaagaaatggctacatctcagctaacagcgtcgtcagtgacagcatcagctaggaacttggcttcattacaagggcttaggctgtccactgtcaaattctcttcctttggaacattaaagcctggggctttgaccagcaggtccttcaaacgtttggttgttaaagcggctaccgttgttgcccctaagtacacttcagttaagcccttgggtgacagggtgttggtgaagattaaagaaacagaggagaagactgagggtggcattttgcttccaacaactgctcaatcaaagcctcaaggaggtgaggtggttgctgttggtgaagggaagacaattgggaataccaaattggaaagttctgtgaagactggtgctcaggtcatatattccaagtatgctgggacggaggtcgagttcaatggtgcaaatcatcttctcctaaaagaggatgacattgttggacttcttgaaaccgatgacataaaagatctcaaacctctgaacgacagagttttcattaaggtttcgggagctgaggaggaaactgcaggaggtttgttgctgaccgaggcagccaaagaaaaaccttccattggaacggtgatagctgttggacccggtactttagatgaggaaggtaacctaaagccactatcggtctcgcctggaaacaccgtcctgtattcaaagtatgctgggaatgacttcaagggcaatgatggtagtaactatattgctctgagagcatctgatgtaatggctgcgctctattagttgtgtaataaggtttggttttaggttttgaggttaaaactggattgaatggatgagttgctggtaagcacaaggattttgtaattttttttccttaaatataaatggatgcagcatttggt

SEQ ID NO: 2312 - DNA, 469 bp, Gossypium hirsutum
  Clone ID: GOSHI-09MAY01-C20353_1
tcttttaaaggaagcagtgcagagattataccatttttaaagacatgggttaatttgcctatggctgttgggttcatgttgttatacacaaagttggccaatgtgttgtcaaagaaggctcttttcgacactgttattcttccttttatagccttttttggtgcatttgggtttccattgtatcctctcagcaatcacatccaccctgaagcacttgctgataagcttcttgcggtgcctggacccagatttcttggtcctcttgctattatgaggatattggagtttctgcttggtccatgtcacggctgaactttggggcagcggggtcatttctggtttattttgggggggttgcccatcagattacttcttgtggaggaagcaacaagattctaccccctggtcgggcctgcgaccaaaaaatccctcaattctctcggtaaaaatgttaacatccttctccaac

SEQ ID NO: 2313 - DNA, 1212 bp, Gossypium hirsutum
  Clone ID: GOSHI-09MAY01-C20283_3
cgatgctgatacagaaacaaaattttcagtagttaagttgcataaagcaccacaaagggctgcatcctagagaatttcactaaagacttggtaattagagcttcatacaagtaacacaaagcttgtaactcgatggtcatcagggatggtgggttatagttaataattattaactgaaaataatgatgtatcgtcaagagggcacattagccatttggacactcagtcctcaagcaagcaatacttgtacgagtcgtggcaatggccatgaaaagcctcaaatcaatagaaaaaagaacttaacaggtaacagtcactcactgtgataatgtgctcaggggacatcgtgggaagaccgatctctgaaagcttcttacttccccagctttcaaaccagtgaagtccagtgcattctgctaacatgtgaatgacagctgactgtgttatgatgttatcgatctttccgtcgcccagatcaagtactggaacgctcttcattttgtacttagaaagaagtaacaacatggtcaaaaaggtgtttgatttctgcaaagcaaggaatggtgcccagcggaacgtccccgagatatcgcgaaccttagtgttcttgtaaaacttggaggacgttagagcctcaaaaaagtctcccgaagtaatcgaagcatcttcggggcctaaagttccgagtcccacagcagaggtcattccattaatagataccgcgaaataagttccactgggagatgaagggcttctaggtgaaggtggttctgactgttgcaaaatccatatagcaattccagcgaactctacaatgccaatgtatctgtcaatccaggttgcatcctcaggggcattaacatcaacaactggtgcgctaagaatcttgttttgagccagtatttgaacagcctctgctaaactagcatccgattttatctcaatcccttgaggagcaagagggaaagcagagacaggaatgctctcaaagcaagcgttgagcttttcattaggactaagctttggttcttgaacaccccatagatcctccactttcatcccaagctttgcctctggactcctcggactctcttgctgatccatgctactctctcgcctcaattgcaaactcgccatcttcaacgatactgaaacgacccctggggcgaccccgctgtccctctctctttgcgacccttgcggacgcgagga

SEQ ID NO: 2314 - DNA, 562 bp, Gossypium hirsutum
  Clone ID: GOSHI-09MAY01-C20283_2
ctctttgactgtttcatccctctgcaagttatcatgccactcaacattggcgacctcttctcgtgtttctccaagtagtttcgaaccgctattaggaagttcttggctgtgattgatctgtagtcacggtatatatctggtgcggttaaaaggaactgtacatctcgaaggcttatgttaccgatagcttttttccctccgcattcaatgacgggtatgcctccgattctctttttcctcattagcttaaaggcctgaagcactggttcatcttcgtatacctgaagtatggaaacctatttgttaacatctagaatgaataggtttacttgaagaaaaaccggagaaaaacggtagcaatgcaaagatataaggaccggaagaacatgaagccctcaagaacccgaagccttgatcatgccatcatgctcagtttttacttaatactaaagaacataccgagtactgaaccaatacttatgctataggtagattcaggtagatgttttacgagctattggctcaatggctctaatatgtaaacaaaaatcggacgaaagga

SEQ ID NO: 2315 - DNA, 1710 bp, Gossypium hirsutum
  Clone ID: GOSHI-09MAY01-C20283_1
attccaaagaggtaagctcttcttattagattgcaacacagatcatccaaatcgagttcttgaatacacccaaaatttacagaaattggaatctctcaagccacaagtaacttttaagtacaaaaggctcaccgatgttacaatctgcgtatccaattagtatcccaacacacaggcaaattaaaaaccaggaaatcgcaaagaaaaatggagtttcatcgttcatgtaggaagcgtaaggacttgtttgattactcttttaaaccctgctattttctggtaaaggcaacacaccatcgaagaaatcaccaaagtagccacgcggttcgtgtactaaccttgaaatgatgtctctaagtgtgatcactccttccaagttcccgtcctcgtccgtgacgtacactcgttggatcttctcagagtcgagcttttgaatcaactctttgactgtttcatccctcttgcaagttatcatgccactcaacattggcgacctcttctcgtgtttctccaagtagtttcgaaccgctattaggaagttcttggctgtgattgatctgtagtcacggtatatatctggtgcggttaaaaggaactgtacatctcgaaggcttatgttaccgatagcttttttccctccgcattcaatgacgggtatgcctccgattctctttttcctcattagcttaaaggcctgaagcactggttcatcttcgtatactgtgataatgtgctcaggggacatcgtgggaagaccgatctctgaaagcttcttacttccccagctttcaaaccagtgaagtccagtgcattctgctaacatgtgaatgacagctgactgtgttatgatgttatcgatctttccgtcgcccagatcaagtactggaacgctcttcattttgtacttagaaagaagtagcaacatggtcaaaaaggtgtttgatttctgcaaagcaaggaatggtgcccagcggaatgaccccgagatatcacgaaccttggtgttcttataaaactcggaggaagttaaagcctcaaaaaagtctccagaagtaattgaagcatcttcagggcctaaagccccgagtcctgcagcagagaccattccattagcagttatagcaaactcggctccattcggagatgaaggacttctaggtgaagatggttccgactgttgcaaaatccatacagcaatccctgcaaactctacaatgccaatatatctgtccatccatgttgcatcctcaggcgcatcaacatcaacaacaggcgcgctaagaatcttgttttgagctagtatttgaacagcctcggccagactcgcatccgattttatctcaatcccttgaggagaaatagggaaagcagaaacagggatgctctcaaaacaagcgttgagcttttcattaggactaagttctggttcctgaacatcccacaaatcctccacttgcatcccaagctttgcttcaggactccttggactgtcttgtatgctagtttgtctctcgagttgcacactcgccatagccatagccatatcttcaacaaaagctcgaaaaaggaaaacttcactcactcagactctctctttcagcgatttctatacgtaattcgaagttcaacaaagctgacaacttggatcattaactagttctgacatcaaaaaacatgggacaaagtgggctgctttcaacaaaataaaca

SEQ ID NO: 2316 - DNA, 386 bp, Gossypium hirsutum
  Clone ID: uC-gsflmaxxa004h01b1
ccttcgcgtccgcccacgcgtccggaacttttaggtacatatagaaacaagggtcgcatagagagaaagacagtgaagtttctttttgtgttttttcagtatcgttgaagatggcgagtttgcaattgaggcgagagagtagcatggatcagcaagagagtccgaggagtccagaggcaaagcttgggatgaaagtggaggatctatggggtgttcaagaaccaaagcttagtcctaatgaaaagctcaacgcttgctttgagagcattcctgtctctgctttccctcttgctcctcaagggattgagataaaatcggatgctagtttagcagaggctgttcaaatactggctcaaaacaagattcttagcgcaccagttggtgat

SEQ ID NO: 2317 - DNA, 668 bp, Gossypium hirsutum
  Clone ID: GOSHI-09MAY01-C20273_1
cggaccttggtccctcggagaaaaaaaaaattgaaccgtttaaattcacaaaagcaaaattcccatttcttctgattattgttattttctttaaaaacaatttcttggtgggttttgggttttgcttctatggctgcagttgttgacaattcaggtgaagcagtggaagctgctaaaaacaacgatttggaagtggaaacaaccaaatcagaatcaaaggaattcaatgtgcaaaacctggttgatatgttcacaaagttgaaccctttggccaaagaatttttcccatcatattttcatcataatcagaccaaaaaatcagataattttaatcaggttcctgttaagcaatcagctggcaatgagaatttttccaacaaaaggggtagaaataacgtcaaccagggtagaaggaggcttaatggtaaagcttttcgagctcaaagagatgatagtatcaggcgtacagtctatgtttccgatattgatcagactatcaccgaagagcaacttgccggcttatttagtaattgcggacaagttgttgattgccgagtttgtggtgatccgcattcagttcttccctttgcttttgtagaatttgcagatgaacaaggtgcaagatctgctttgagccttgatgggacaatgctcgggttttatccttc

SEQ ID NO: 2318 - DNA, 498 bp, Gossypium hirsutum
  Clone ID: GOSHI-09MAY01-C20203_1
cgcatcaaattcaaaatttaccagtatccgggaaaagaaatcccagctgaatgaattacatatttttgaggaccaaggccagaattatatcaaaattttacctcaaccccatcagatttctgcatagcagcctgcgtgaacaaactcccacaactcattaggcacactgatattctccattttactgttttgcccttccttcgtttccaccgtgtaaaacccaagcgcaccacatccatactccgacccggtaaccaaatccctccccccacatgctctgacccgaacgcccgggtcgatctctgcccaattcagcaatttcccatcttcccctatccccacacacgatctcgggcatcgacccggttcccaaaccccttccacccgtctccattgttccgacttgaacccgtacacctcagcgctcccatcaaattgaccttggctctccgttctgtatccactcaccacccagaactcctcttccggacgcgtggg

SEQ ID NO: 2319 - DNA, 583 bp, Gossypium hirsutum
  Clone ID: LIB3543-028-Q1-K6-E5
gcgttcgcccagcgtccgcccagcgtccggctgcatacactctgtcttacgtcttgttccaaatgctgagtcgaatgacagatctttggtgatccagatgctgcaaatattgtgttcacatgtggagcatatgttttggctgtggggataaatgtaactcatcaagttgttttgacaagtacttattttggctatttctctatctttttcaatatgttgttagcgaggattattctattatctataggtctatatgaacaccttataattttaatttctggaactgctttcctcttttttttttttctttcttttgaatttccacctttttttttaatcaaacttgtcatattttagattctgacggagaaacattggctagttcaaatgaaaaatttgctcagtacttgttgaagatgctagaggtgtacttcaattatcatcatgatgcatacagcacaaaaggttcgtctgccggaaatggttaagggatttctgctgaaccgtgaacttctaatttattcactaccattctgcagttgtgtaccttcatgatccaacagccatgcttgcagccattaat

SEQ ID NO: 2320 - DNA, 269 bp, Gossypium hirsutum
  Clone ID: LIB3083-076-Q1-L1-A7
cgtgcgaggaaaatttgctcaggccttgttgaagatactagaggtgtacttcaattatcatcatgatgcatacagcacaaaaggtgtgtaccttcatgatccaacagccatgcttgcagccattaatccttcacttatcacctacgtggagggtgctgtcagagttcaaacaaatggcatcacacggggactaacactattatacaacaagcagaagaggtttgctgaaattacgaagtggtccgatcaaccatcggtgaaggtggcgg

SEQ ID NO: 2321 - DNA, 472 bp, Gossypium hirsutum
  Clone ID: GOSHI-09MAY01-C21963_1
gtccgacactcctttcctcattcttcggaactcgttcttcctttccgaccagcgacaacgatcatcgtgatatcccaattctaccctcaccgaaccccccaaattctccgctagctcatagaaaacttgtccgggattttttttcctttttttgttcttttttctttggggatggctgaatccgacaatgaatcgggggggcataacaacagcggaggaaacgctcacagcgaaacgtcggcgcgtgagcaagacaggttcttgccgatcgcaaacgtaagcaggatcatgaaaaaggcgttgccggcaaacgctaagatctccaaagacgctaaagaaacggtccaggaatgcgtctccgagttcatcagtttcatcacgggagaagcttccgacaagtgtcagcgccgaaaggcggaagaccatttacggtgatgatctgctttgggccatgacgacgcttggtttcgag

SEQ ID NO: 2322 - DNA, 337 bp, Gossypium hirsutum
  Clone ID: GOSHI-09MAY01-C21853_1
atttgataaagtctaaaaaggttttcattcttcactgctctggcgccgatcagttcttccccaccatcgattcatcatcataatcggcagatgacatcaaatccgactctatttggagtcgtatcctcctaaccctcatctaacttcgatttcaacgaagcagacaaggattcgaaggccattaataggtgcatggtggacgtgggctctgacgtggaggcgcgagtggcgcggcgcacggagccgaaggcagcgcgatgtgtggcgcttgggattggcttgcggcgctaggggtcgcttgaaaccgttttaaaatttgtgggcccaatttggccta

SEQ ID NO: 2323 - DNA, 727 bp, Gossypium hirsutum
  Clone ID: GOSHI-09MAY01-C21873_1
cgtttttacgctattgttaagccaattcatgaagctatcaagcctgaaagctgggcatggtcttggaccgatgtcaagctaacatctcctcagctttccagagaaagcatgtataaattgtctcggaaacatttaacacttcagtgtgtatcttcaagtgaatcaaggaacccttttgtagaaaatgctattcaatatactatagcagctgcacatgcaacatttgacaagaataagaaagaggcattagataaactactcttacaaggtcttgatattacgatcttaggttgcaatgacttttactcatacaggaatcagatagaagcacttggtcttccgttgacacctgaagcattggctactctaccaccgtttacatcaattacattcaattctgaggaatcaaatggagcaaattgcaaacctgaagttgcaaaaactggattgggttcatctgcagcaatgacaactgctgtagttgctgctttacttcattatcttggtgttgttaacctttccacctcttctgcagatcaacaccaagaaaataagaattccacagatctcgatattgtgcatatgatagctcaaagtgcccactgtattgcccaaggtaaagttggcagtggctttgatgtcagttctgctgtctatgggagtcagcgttatgttcgtttttcaccaaaagtgctttctgctgctcaggctgcatgaaagggatgcc

SEQ ID NO: 2324 - DNA, 409 bp, Gossypium hirsutum
  Clone ID: GOSHI-09MAY01-C21573_1
cggcagcctgccagccagccagccagcgagggagcgggcgagcgagcgagcgctagagggtctgcaaattttagggttttggattgggaaggtcaggtcagtgagcgccaaaaagaggagaaaattttcttatacgttctgttaataactaccacaattgatcttctgttttgagaattgaaatttctttttacaaaaaaaaagtggtgaatttgatttcggttttggtgatgattatgtgtgagaaagagcgtgtgcttgttgtatgcaggaagagaaagagccagagacagagtgtgagagatttttttaagagaggatttgggagatcttttgttttgagtgaattatggatttcaacgcttttcatttctcaactcattttatcctgtttactcaatggaacgga

SEQ ID NO: 2325 - DNA, 695 bp, Gossypium hirsutum
  Clone ID: GOSHI-09MAY01-C21493_1
gcaggtggctgttgttgcagatgaaaacaacaaaatgtggaaagtcaagggaagatgaggacaatatgggtcagaatttggaagctgattcaagaaatatcgatgaattatatcaaacttcaccagcaaacaacactgcaatatcatcagatcaggataacaaaaagtggttgagaacaaagcaaactatgatgataacaacgctgccgctgctgccaacaagatgaagaggaaaagggtgaagaaacttgagttgttcaaagggttttgtgaagatattgtgaacaagttgatgatccaacaggaagagatgcataataagctgattgaagatatggtgaagagagatgaagaaaaagttgcaagagaagaagcttggaagaagcaagagctggataggattaaccaggagcttgaacttagagccaaggaacaagctattgctggtgatagacaggccaccataatcaaattcttgagcaaattttcacaaactggatcctctaagaagcaatgttttggaagggttaatgaagatgttgtcaaggtaccaagtgaatgttcaaatcctcctattgcttcttcatctcctttagtggcagtagcagaaaaccctaatcccattgtcactgaccaaaacaaagttgatcaagtgtctaccacttctccatcttccatgatcctcgcccatcaaa

SEQ ID NO: 2326 - DNA, 410 bp, Gossypium hirsutum
  Clone ID: GOSHI-09MAY01-C21473_1
catcactaacattttcttctccaaaaatgtctacgaattggctaccattactcttctcttttgtttttccttgtattaaaactccaaagcttcttcacctatctcctgctgcttttcattaacaacatgtctgctaaaacaaaatctgggttatttgaaactcctaccaaggtttcacctgcaacgcctaaagtggcgagcaaagtaagcaggggactggctaaaccagaacccgattcaccctctcccttgccaagtactcgccattcagttgagcgttcaccacgaacatccctcaactcgaagcctacaattgatcgtagatcaccaaaggttgccaccacccctgattaaccacatacacggtgtggctaaaggatcagagatgcagactcaattgaacttggtgc

SEQ ID NO: 2327 - DNA, 874 bp, Gossypium hirsutum
  Clone ID: GOSHI-09MAY01-C21773_1
atgtattacagcgtaagacaaaagtaaagaggcgaacggtgagcagatctcaaaaccatttcattcatgtcttaacatcccaaataatatggatcgattgctgaaagctgcaagagcttccggttctctcaacttatccaatcgatctctcagagatgttccagaagagatctacagaagcttggatgctgttggggagggtgaaaaatggtgggaggctgtggagctacaaaagctaattttggctcataacaatatcgagtcattgaaggaagaagtgaggaacttacctttattgactgtgttgaatgttagtcacaataagcttacagatcttccggctgcaatcggacagctttctatgctgaagttgttggatgtgtcttttaactctatagtgacaataccagaggagattggcttggcaacttctttggtcaagtttgattgttcaagcaatcgtattaaggaacttccatcctcacttggaaaatgctcagatttatcagatctaaaggtatcgaataatttgataacaagcttgcctgaagatcttacaaactgtttgaaattgacaaaactagatgtggaggggaacaagttaacagctttatctgagaatttgtttgcatcatgtacaatgcttacggaactcaatcaaagaacttgctgagtggtataccagagaacattggatgccttacacgtctcatccgtcttgatattcaccagaacaccgagtgaaatacagagttatgctagaaatcatccttttgtactgcatgataagtcattctggtactgtatgatgcaagaatttcaacaatcccaccatcagtatcgagttgctcttctcaaattttcaggaataatg

SEQ ID NO: 2328 - DNA, 436 bp, Gossypium hirsutum
  Clone ID: LIB3584-041-P1-K1-D6
gcgctgcacacacgaattattttctctcattcttttctttgaaccctggcccttttctttcctagacttgtctttgcttgaagcccaaaaatccccatcccttttcgttctcagtcttattgtctcaggaaaaaggggtagaaacactattttgacctaacacgggttatcttatccagttaatccaagtaaagacttccaggtttgatggttcaagcaatcgtattaaggaacttccatcctcacttggaaactgctcagatttatcagatttaaaggtatcggatcatttgataacaagcttgcctggagatcttacaaactgtttgaaattgacaaaactagatgaggaggggaacaaggtaacagcttaatctgagaatttggttgcatcatgtacaatgcttacgggatttaatcaaagaacttgctgagt

SEQ ID NO: 2329 - DNA, 818 bp, Gossypium hirsutum
  Clone ID: GOSHI-09MAY01-C21733_1
cacttggccaaaaaatcgaagacaaagaaacacagggcagagagagagactaagggtgaaaatggcctggtgtagtttaaggtctattcacgttccaaccgtcgatgtcggattactacgcactcgctccccgttagccgctgtcggtggagtcgttgccggctcttcatttttgcgatcttcctccagaaatggctctccttttgcttgcttaagcctatccacttctcctgggattaaggaggctgtggcaactgacaaagctccagcagcattgggaccatattctcaggccatcaaggccaataatcttctctttgtctccggtgttctcggtcttattccagagactggaaagttcatctcagacagtgtagaggatcaaaccgagcaggtactgaaaaatatgggagaaatactgaaagctagtggtgctgactattcctctgtggttaagacgacaattatgctagctgacttgaaagacttcaagaaagtaaatgagatctatgctaaatactttccttcaccagcaccggctcgttcaacatatcaggtagctgcattgccattggatgccaagattgaaattgaatgcattgcggcactcaaggcatgatgacaggggagtttgaagttacaaggtaggaaactaagctcttaaagaggttatgtctcatttgcaggtattaatcccatttggcatcttgaaacaagcaattattgcgtagcaggtacagttggtaaacttagaatgtgatgtttgaactgaataatgtttcgatacatgaatctacggttgtcatgaattttatgtc

SEQ ID NO: 2330 - DNA, 722 bp, Gossypium hirsutum
  Clone ID: GOSHI-09MAY01-C21343_3
ggttgatgttgactacattagcgtgcccattgagggtgctaacatgccaactcactacgggtactgacgagagaatacaagagagagagagggagagagttggactataaaaaggaaccatacgacgggatggcttgagtgtctgtctttactataattgattgatgattggaggttagatggttagatgctgatctggataggagttagcaggaggtatggatggaaaaggatgctgtaaaacaaacggggattgtgattgaagaagaccaaagggcagtctgaataacgtaattgcgatagggtgtgagaagagatataccaattgacgtacaaaagatttagtaggatggtttcacaacatagttaagaaaggaacgttgactctcttggaatgtggtagctgttactacagccttggatcaaaggagaaggtccaacaatttggtttcttgccattaggtatggcatatctggggtccctggtggctacgtaatgtggtatcgccctctctatcgtgctatgaggactgatagtgcgttgaaatttggatggttttttttgttttacttgttgcatattggcttttgcatctttgcttcagttgctcccccaattattttcaagggcaaatcccttgcaggtattttgcctgcgattgatctcattggccacaatgctttggtggggatattctacttcattggttttggatttttct

SEQ ID NO: 2331 - DNA, 1402 bp, Gossypium hirsutum
  Clone ID: GOSHI-09MAY01-C21343_2
acccacgcggacgcacgcgtccgcagctttagccctgactacgtcggttgctgatatgagagagcggctagggacacggagcctggaaatagctcagcgggtgaacctcagaccgatgtcgaatgcctgtagctggacagttacatttgtgagattcgatgagtcgcttcgatgctaaccctttcgcggaggaagaggtcaatcctttgtcggatccagcagataggaaaggatcggggcaatcaaattatggtggaggtgccttttatactactaaccccggtagtgttcctactgcaacatcaaggctttcaccccttcctcctgagccatatgaccgtggtgcaactgtagatattcctcttgattctgccaaggatctgaaagcaagagagaaggaacttaaagcaaaagaggctgaactgaataagcgtgaacaggaattgagaagaaaagaggatgcaatagcacgagctggaattgtaatagaggacaaaaattggccaccgtattttcctattatccatcatgatattgcaaatgaaataccagtccacctacaaaagattcagtatgttgctttcacaacattgttaggtttggttctttgtctcacttggaatgtggtagctgttactacagcctggatcaaaggagaaggtgggttttcaaagtccaacattttggtttcttgccattatatatttcatatctgggggccctggtggctacgtaatgtggtatcgccctctctatcgtgctatgaggactgatagtgcgttgaaatttggatggttttttttgttttacttgttgcatattggcttttgcatctttgcttcagttgctcccccaattattttcaagggcaaatcccttgcaggtattttgcctgcgattgatctcattggccacaatgctttggtggggatattctacttcattggttttggatttttctgcattgaatcattgctcagtgtctgggttattcagcaagtttacatgtatttcagaggtagcggtaaagctgacgagatgaagcgtgaggcggcaagaagaaccgtggcggcagcactctgataatgataaggaggccgtagcagaagatggtatttgcttgtgttggacttagatcttgtcggataagacaccatgtactcaaattgcatcttcttcccatacccttcctggctggcttacttgcctattcattttattgatatgttgtttaaatatatacacatactgctgaacgaagaaggttgagaaatcagataaaagttggatacaatgaccttcaaaaaaaaaaaaaaaaaaaaaaaaaaaaaaaaaaaaaaaaataaaattaaaaaaaataaataataaaaaaaaaaaaattattaataaatatatataaggg

SEQ ID NO: 2332 - DNA, 1427 bp, Gossypium hirsutum
  Clone ID: GOSHI-09MAY01-C21343_1
tcgttacgcgtacgcccacgcgtccgcccacgcgttcgcccacgcgtccgttctttctcccctttatcttctccaaatccgtcttttagtttcctttaactatcattgtcaccaagccttttttattctcagtgtctcaaattcagatctatatcgcattgccttagtgttggcagtttcatttttgagattcgatgagtcgcttcgatgctaaccctttcgcagaggaagaggtcaatcctttttcggatccagcagttaggaaaggatcggggcaatcaaattatggtggaggtgccttttatactactaaccccggtagtgttcctcctgcaacatcaaggctttcaccccttcctcctgaaccatatgaccgtggtgcaactgtagatattcctcttgattctgccaaggatctaaaagcaagagaaaaggaacttaaagcaaaagaggctgaactgaataagcgtgaacaggaattgagaaggaaagaggatgcaatagcacgagctggaattgtaatagaggacaaaaattggccaccgtattttcctattatccatcatgatattgcaaatgaaataccagtccacctacaaaagattcagtatgttgctttcacaacattgttaggtttggttctttgtctcacttggaatgtggtagtctgttactaccgtcctggtatcaaaggaggaggtccaacaatttggtccaacaatttggtttcttgccattatatatttcatatctggggtccctggtggctacgtaatgtggtatcgccctctctatcgtgctatgaggactgatagcgcgttgaaatgtggatggtttttttttgttttacttgttgcatattggcttttgcatctttgcttcagttgctcccccaattattttcaagggcaaatcccttgcaggtattttgcctgcgattgatctcattggccacaatgctttggtggggatattctacttcattggttttggatttttctgcattgaatcattgctcagtgtctgggttattcagcaagtttacatgtatttcagaggtagcggtaaagctgacgagatgaagcgtgaggcggcaagaagaaccgtggctgcagcactctgataatgataaggaggccgtagcagaagatggtatttgcttgtattggacttagatcatgtcggataagataccatgtactcaaattgcatcttcttcccatacccttcctggctggcttacttgcctattcattttattgatatgttgtttaaatatatacacatactgctgaacgaagaatgttgagaaatcagataaaacttggatacaatgacaatcaaaatttgtggttagtaagatttagcagtcttaacttttaataatatttctgtgttgttctacttaatcgaaggatttttgcttt

SEQ ID NO: 2333 - DNA, 858 bp, Gossypium hirsutum
  Clone ID: GOSHI-09MAY01-C21373_1
gtatcatatcttctatcattgaccctttaatggggggtggaaatgtggagaaagctgatgttataaatactgttctcttcgtagcgggtattaacacgctattgcaaacattgtttggaagccgactgccagaggtgattgggggttcttatgctttcatcatcccgaccatttccattgctttatccaggagatatagcatcttcgttgatccccaccggaggtttaaagcatccatgagagatgtacaaggatctctcattgttgcatcattcttcactatggttattgggttctttggttgctggagaattatgtcgaggtttattcagccctcttgcagctattcctttggtgattctcaccggactcgggctctatgcacaaggttttccacaattggccagatgcatcgaagtcggactcccggcactgggagcagttgttttcttatctcagcatgttccacatttcctgaaatccaggagaggaatatttgaacgttttgcaatccttttttccggtgcgattgtatgggcttttgcagaaattttgacagcagctggtgcttatgataacagagctcctcaaactcagttcagctgccgtactgatcgttctgggctcatcagtgctgcaccttggataaggtttccgtatccatttcaatggggaagaccacgttttaacgctggagatgctgttgcagtcatagctgcgtcatttgttgccatcattgagtctacaggtacgtttattacagcatcaagatatgcgagtgccactcctatgccaccttctgtgcttagccgtggtgttggctggctgggagtaggccttttgctagatgggttattt

SEQ ID NO: 2334 - DNA, 738 bp, Gossypium hirsutum
  Clone ID: GOSHI-09MAY01-C21333_1
ataaaattaaacttcaatggtgctcttcgggcttctcctcctaccagtcctccttctcctcctcctctacttcatcggtcggccccggcccattaacatacctattaaaaaccgacacgttttcataacaggcggttcaatgggcatcgggctagccatagccaaacaaggctgcatcgggagggggcgcgtatttccctcttggctcggtccgttgaccagctccaaaaagcaaaggaatcaatctgtcaagcctatgaagtcgaggtctcgatctttagtgctgatgttcgtgactacgatgccgttgagcgtgcgataaacgaggctggcagtatcgatgttctagtagttaaccatggggtgtattacgttgaggagtttgagacccaaggactagatgtgatgaagacgatgatagatgtgaatctgatgggaagcttcaatgtcatcaaagcagctttgccgttgatgaaggatagaaaagacaagggaccagcctccattgctcttatgtcttcaatggccggccaggtgggtacatatggttttgcggcttattcagccactaaatttgggctaagaggattagcagaagcattgcaacaagaagttttggagaataacatccatctttctttaattttccctcccgtgactgaaactccgggatttgaaccagcaaggaaaacaatgccggaaatcaccaaaattatatcgagcacatctgcgggaatg

SEQ ID NO: 2335 - DNA, 661 bp, Gossypium hirsutum
  Clone ID: GOSHI-09MAY01-C21293_1
tgcacgtaccgcgccggaatgtaccggtccgggttcccgggggggcgacgcgttcgatttttcaaccatgtcggagatggcgaacacggatcccgaaggggtggacgccatgcggaggacgtggaacgtgtggccaccaccaaagtcgaagctaggaagggcgtgatcccggtggcggctaccatcgctccgatccgtcctcacccggacatcccgacgctcccttacgcgcctctacggggcaggatgtggtcagctgcgctcaacggctttgcgcgtgttgacttcgttgccaagatctggatctgccctttctgttaccagcggaaccacttggcgcctcactatgctatgatctccgaaacgaacctcccgtgcgaactctacccgcaatacaccaccgtgcaatacacgctccagccggacccgaacaacccttccagtgctcctcaatggccgccggggtttggatttgtgttggacgcttgcatgatcgaggaagaacttgagtttgtgaaatcggcgatgaagcaggcaattgggttattgccggaaaatgcgcttgttggggtcgtttcgtttgcgactcaagctcatgtccatgaattggggttttccgatatgtcgaacgtctatgttttcaggggtaataagaaattac

SEQ ID NO: 2336 - DNA, 443 bp, Gossypium hirsutum
  Clone ID: uC-gsflmaxxa047e06b1
tgcttctcccttctccctttctctctcggtgacccctttctcttctgttttacttggggtcgcctaaaatcaccaaaaaaatttaaaaaaattgaaaaaacctcaaaattcctattgtatttctaaattattaatcaaatttaatccctacaaatagtttttttttttataaaacttttgaatatatttttcaaccatgtcggagatggcgaacacggatcccgaagggattgacgccgtgcggatgacgtggaacgtttggccacgcaccaaagtcgaagctagcaagtgcgtgatcccgttggcggctaccatcgctccgatccgtcctcacccggacatcccgacgctcccttacgcgcctctacggtgcaggatgtgttcagctgcgctcaacgcctttgcgcgtgttgacttcggtgccaaaactggatctggccttt

SEQ ID NO: 2337 - DNA, 670 bp, Gossypium hirsutum
  Clone ID: GOSHI-09MAY01-C21273_1
atcctctgaagtaaaccgaatcgcggttttgcttttgtcttgtactacaacgaggcctgcgctgattattcaaggcagaaaatggcaagtgcaaattttaagctggatggcaacaaccctactgtcacatgggctgatccaaagagttcacctgatcattctgctgcttcgcaggtgaaggctctatatgtcaaaaacattcccgataacacttctacagagaagctaaaggaagtatttcagcgccatggggaagtaacaaaagtggttatgccacctggcaaagctggtaagcgggattttgggtttatacattatgccgaaagatcaagtgctttgaaagctgtcaaagatacagagaagtatgaaatagatggccaagtcttggaagttgtccttgccaaacctcaggctgataagaaaactgatgcagcatacccttacattgctgggcttaatccaaaccaccttcagcatcctgggtatggtggttttactggaactacatatggctctccaagtgctggatttggtgctgccactagttttcagcagccagcaatatattggaagaggcccaatgcctataaatatggctatggtgtccatggttttaccagatggtcgaattagtatatgtctctcaacagtcattattgcatatgcctac

SEQ ID NO: 2338 - DNA, 409 bp, Gossypium hirsutum
  Clone ID: GOSHI-09MAY01-C21263_1
agagagaactagtctcgagtttttttttttttttttttactttctcaattaaaagattaatatgggagcattacattaatatggatcctttttggaagtatacaaccatcatcctgaccatcatatgccatcataatatgatggtaagtaccagcacgcatatcatatcatatcatatcatatcatttcctaaccaacatgctacactgtttagaatacgaacctaaagctatttcgatatagcagacggaaagaaccaactttatacaatggctagctgggatgtgtgaatctcccatcggatgaccactgaaaaaggaattaaaagaaaaaacatgaggaattcaaacttgaagacggctatgagcatggagagtaccagaacagcaacagcatgcgcgagaaactg

SEQ ID NO: 2339 - DNA, 674 bp, Gossypium hirsutum
  Clone ID: GOSHI-09MAY01-C22993_2
ttcctttgttcatattctccctttctgcttcttatttattttctttcaccttttcctttcaaggtacttctctttctcacccttttattttgtatttcgctgttcctctagtttgattcttttttttttatgatttgaattttagattgtagatctgatctttaagaaaattaaaatttaacagatcgagagaaaaaaagaatggcagaggagcatagatgccaagcgccagaaggccatcgtctttgcgtcaataactgcggctttttcggaagttcggcgacgatgaacctttgctccaaatgttacagagatctctgtctcaaggaacaggaagcttcttcgatcaaatccgctctttcctcttccccttcgtcttcgtcaacggtcgtcgaatccatttctcaggttcctcttttggctctccctgaagtcaacagagaatcggcggtcccggagattgcaccggcggccgaacagcgatcgcagcaacaaccgaatcggtgcatggtttgcaggaagcgggtcgggttgaccggattcagatgcaagtgcggtgttacgttttgcgggtcccacaggtaccctgagaatcacgggtgtacgttcgatttcaagaaggtcggcagagagagatacacgcgctaatcccctcgtcaagcagagaagctcga

SEQ ID NO: 2340 - DNA, 817 bp, Gossypium hirsutum
  Clone ID: GOSHI-09MAY01-C22993_1
attctccctttctgctccttatttattttctttcaccttttcctttcaagatcgagagaaaaaagaatggcagaggagcatagatgccaagcgccagaaggccatcgtctttgcgtcaataactgcggctttttcggaagttcggcgacgatgaacctttgctccaaatgttacagagatctctgtctcaaggaacaggaagcttcttcgatcaaatccgctctttcctcttccccttcgtcttcatcaacggtcgtcgaatccatttctcaggttcctcttttggctctccatgaagtcaacagagaatcggcggttccggagattgcaccggcggccgaacagcgatcgcagcaacaaccgaatcggtgcatggtttgcaggaagcgggtcgggttgaccggattcagatgcaagtgcggtgttacgttttgcgggtcccacaggtaccctgagaatcacgggtgtacgttcgatttcaagaaggtcggcagagaggagatcgcccgcgctaatcccctcgtcaaagcagggaagctcgagaagatttgagtagaagatgatgatgatgggaagcccagcccttggggtattctccaatttcctccaactttgataagatcgagacccgtgcttcggttttgggccgcccccccaagagtaaacccattgggctggataaaaatttttcttctttaaatataaatattttataataatattttaattatgggcccccttagtttttttttttcttcccccttttgctttggaaaaaaaaaaagtccctctttttttcttttaatcccctgtggtg

SEQ ID NO: 2341 - DNA, 809 bp, Gossypium hirsutum
  Clone ID: GOSHI-09MAY01-C22953_1
cccacgcgtccgatgtaagctctgcttttcttctcaactttttttttcttttaatccttcaaattggccaagttgctggaaaagaaagactgagaagaagaacaataataaaagaggaaaaagaagacttaaaaaggcatcatcagtgaaaattttcgagcaactagagacgctgaataaaacaaagaaaacccaaattgacacaggaaatcagattccattgaattgcagatctcttttagcttttgctagttcttgttttgtatatatgggagcagtggttgtctaggatgctgtgcgaggcccattttcaatcccttggtgaatgagtcatcaaaaggattaaaatttcaaggacagacagtgagtaaacccaatatatcagaaggtttctggaccactagcacttgtgatatggataacagtgccgtgcagtcacagggaagcatctcctcaatcagcacaagcaaccagacacttgatccaaatggcaatgctgcaagtgctaatggcccctccgaatttgtaaatcatggccttattctctggaaccagactaggcagcgctgggggggaaacaggaggtctcaaaatcggaagcaattggttcaagaacccaagctaaattggaatgcaacttatgaaaatttacttggaagcaacaagccattccctcagcctattcctctttctgaaatgatagattttctcgtggatgtttgggagcagaagggttgtatgactgaacaacaacagtacaactacatttgagagatggtgagatatcatatttatcggacttgtggtac

SEQ ID NO: 2342 - DNA, 425 bp, Gossypium hirsutum
  Clone ID: LIB3147-040-Q1-K1-D1
ggcatatcagaagatttctggaccactagcgttttgggatctggacaaccaccgcttggctgtggagaaatgcatctcatcgatcagcacaagcaaccagacacttgatctgcatggcagtgttgcaactgctgatgccccagctgaatttgtaaatcatggccttcttctctggaatcaaattaggcagagctgggtgggaaacaggaggtctcaaaatcggaagcaattggttcaagaacccaagctaaattggaatgcaacttatgaaaatttacttggaagcaacaagccattccctcagcctattcctctttctgaaatgatagattttctcgtggatgtttgggagcaagaagggttgtatgactgagcaacaacagtacaactacatttgagagatggtgagatatcaatatttatcg

SEQ ID NO: 2343 - DNA, 674 bp, Gossypium hirsutum
  Clone ID: GOSHI-09MAY01-C22853_1
cccacgcgtccgcgagtgttcaatgcactaggccaaatttcatttgcatttgcaggtcatgcaggtgcccttgaaattcaggccacaattccatcaaccccagaaaggccttcgaaaataccgatgtggaaaggtgcacttggagcctatttcataaatgctatatgctacttcccggtagccatgataggatactgggcattcggtcaagatgtcgatgataatgtacttatggcactcaagaaacctgcatggctcatagcctctgctaacttgatggtggttgttcatgtcattggaagctaccaggtttatgctatgcctgtgtttgacctgctggagaacatgatgatcaaaaggctcaacttcccaccagggattgctctcaggctcataagtcgatctacttacgtagcatttaccctgttcataggagtcactttccctttctttggagatcttctgggtttctttggtggatttggctttgctcccacttcatattttcttagcgtcgctcgcgctcacgcaaccaaaaaggttcagcctcaattggttcatcaattgggggtgcatatttgtaggagtgttcattatgatggcattaacaattggaggtttaaggaatatcatagcagatgcttcaacatacagtttttatacatgaatgaatg

SEQ ID NO: 2344 - DNA, 284 bp, Gossypium hirsutum
  Clone ID: LIB3584-002-P1-K1-D7
gtggatttggctttgctcccacttcatattttcataatgtggttggtgatcaagagccagaaggttcacctaattggttcatcaattgggggtgcatatttgtaggagtgtattatgatggcataacaattggaggtttaaggaatatcatacagatgcttaacatacagttttatacatgaatgaatgacatgatgttgtttcagatggatgtattatgtaatccactgatcaaatactgttaccttcagccactcatgtctaggattatatataattgagca

SEQ ID NO: 2345 - DNA, 720 bp, Gossypium hirsutum
  Clone ID: GOSHI-09MAY01-C22413_1
ttcctctcgtccgcccacgcgtccgttgctctccacgaactggttattgcaagtggtgaagatccgggagagcgcattgaggagatggcatcactgctcaagaagcttaaagattttgtcctcactgaaaatcctgaagctgacacctctgagggtgaaaagggcttgatgaaacacaggtcacctgttatcccagttgatttccggtgtccaatatctctcgagttgatgaaagaccctgtaattgtctccactggacagacatatgaaagatcctgtattcagaaatggttggatgctgggcacaagacgtgtccgaaaacacagcagacactattgcacactgcccttacgccaaactatgtcctaaaaagtctcatagctttgtggtgcgagagcaatggtgttgagctgcctaagaaacaggggacttgtagaagcagaaaagcaggtagcagtgcttcggactgtgatcgtactgctatcatcactttgttggaaaaactggcaaatggaaattcagaacaacaaagagcagctgctggtgaactccggctattggcaaaaagaaatgcggataatagggtgtgtattgctgaggcaggagccataccacttcttgtcgagttattgtcttccacagatcctcgaacccaggagcatgctgtgacagctcttctcaacctttccattaatgacagtaacaagggaaccatcgtt

SEQ ID NO: 2346 - DNA, 472 bp, Gossypium hirsutum
  Clone ID: GOSHI-09MAY01-C22673_1
tcaaaactggcttttatgatcttcaaactgcgagggatgagtataggttctcttgtggcagtgggggcatgaaccgtgaccttgtatggcgttttatggatgtgcagactaggcttatcactccagtctgccctcactatgcggagtttgtttggagagagcttctgaagaaggatggctttgtgataaaagctggctggccatcagctggttctccagatcttaaactcaagagtgccaataagtatctgcaggattccattgtgttgatgagaaagctgctgaataagcagattttgggctcaaagaaatctaataagaaaggggctccagcttcatcactatctgaggacaagttaaaaggcctaatctatgtgaatgagaaattcgaaggatggcaagcagagtgtttgcagattctccaaagcaagtttgacagtaatgcccgaacttttgcatcagatggggagat

SEQ ID NO: 2347 - DNA, 503 bp, Gossypium hirsutum
  Clone ID: GOSHI-09MAY01-C22603_1
ttccagtcaagtgctaatccctatggccagccaacacaaccaaatgctgatccttatggtcaatctgcacaaccaaatgctaatccgtatagtcaaccagcacaaacaaatgctaatccatacagccaacctgtacaggtacatgctaatccatatggccaacctgctcagccaagtgctaatccatacaaccaacctgctcagccgaatgctaatccatacagccagcctacacagcctaatgctaatccatatggccaacctgttcagccaagtgctaatccatatgcccaacccacacagtctgtgtctgcagcccctcaaattccaggatctgctgctcagagcagcaatgggagcttaatgataggttctaatggccctgtcagttcacaaatggctgctcaacctccaactcctgctgcaccagctactcagtttaacactggaaactttatttaagcagggttctgctgtgccagttgagtcacagagtgctcctc

SEQ ID NO: 2348 - DNA, 543 bp, Gossypium hirsutum
  Clone ID: GOSHI-09MAY01-C22153_1
ggattggaagagattcttctagacttagtgaagatttaaaggtcttattgtcgcaattatcttctcgagggatggagcaattgatgagtgatgtaagtcctaggatcgctgcaagtccgaggattgttgtaagtccaaggatatctataaacagtgatgatttaaaagcctcagattcttctgcatttaatggaattgagatacttcaaaggagggtctcattggagagaaatgagtctggtttatcattagatggaagcattgttagcgaaatcgaaggtgaaagcgtggttgatcggctgaaacgacaggttgagcatgacaggaaactattgagtgctttgtataaggaattggaagaagaaagaaacgcgtctgcagtctctacaaatcaagcgatggccatgattactcgactgcaagaagagaaggcaacgcttcaaatggaagccttgcagcatctgaaaatgatggaagaacaagcttagtacgatttggaagcactttaaaacacaaacgacctttttgctttataagagaaag

SEQ ID NO: 2349 - DNA, 736 bp, Gossypium hirsutum
  Clone ID: GOSHI-09MAY01-C22143_1
gagagaaactgctttctcctttcttcctgttggagagattagtaaaaaccaaaaatggggagagaagtatcagaaagctgcattgatagcctactaatcgaaatggtttccacatattgcaaccgtttttacgccaataagcctgagctcgctgctcgtcggatcgaagccattgggtatcaggttggccaccagctctctgaacggtacacgatggagaggccacgttttagtgatcatttagaggcaatcaagttcatctgcaaggacttttggtctgaactctttaagaagcagatagacaacttgaagacaaatcatagaggtacctttgtattgcaagataatcgttttcgttggcttacacgcatgtcaattgatcaatcacctgaaaatggagcatctgaagagccttctatcatggctgatgacaaggctgtgcaaagcatgcatctctattttccatgtggaatcatcaggggagctctttcaaacttgggaataccttgtgcagtttccgccgacatatccaaccttcctgcatgttcatttgtcatccgaataaaggcttgacaaggatgttgcggggtttcgaacatgctctcattgctagtttaaagcatgataacaagaagttggctggagaagtaatagaacccattcaagatgatcagaaattgtggtacatgtaagtacttttgaacaaaattacgtgacaaatagagttggaacattt

SEQ ID NO: 2350 - DNA, 689 bp, Gossypium hirsutum
  Clone ID: GOSHI-09MAY01-C22173_1
gtcgttttgtggatgccgtgaactcaatgtcgaaacgctacgtgcctccgctacctcctccctcgcaacaatcaagccctttgttcaagcagcggtcatggtctcctgacgctgagcgagacgaggcgtggctcaggcggaaggaagtttacggctcggggatccgccgtagtcagagcttcacggaagatgatttggatgagctcaaaggttgtttagatttaggtttcggcttcgaaccagattcgcctgagttagatccgaaactatcccttgctttacccgctttgccgttttactgtgccgttaatcgtcagtacaatggcaggatatcgaggtcttcgtccgcgtcatcgatggactcttttagtgacgccggtagcgctaactcgataattgatcaaggcgatgatccggagacggttaagattaagtcgcgtcaatgggctcaggtggtggcatgttcggtgcggcagttttcacgcggaccaaagtgatttattgtggaggttaacatttcttgagtactttttgtttagaggcgataacaatttttgatatagtaatgagtttttagttctaaactttaattttgtattctaagacatgatttacatttagggtttagaaatactagaaaattttaaagtgtgctggattggattggtgttgaattttaatatttttta

SEQ ID NO: 2351 - DNA, 414 bp, Gossypium hirsutum
  Clone ID: GOSHI-09MAY01-C22033_2
ttttctaggaactagtctcgagttttggttgttttttttaatataatctaatttctaatttattaataatagaaatgttatgcgattaaattaaaattttatgacccgattgaaagttcatgatggagaatataaatgatccatatcaatcacaattcataagaaaccaaagcgagccgtgtagttatgagctcaatccaaaggaaaccaaaagccagttgtgttggaaccgcatggcaggtgtgtgaatccatcacttcctccccgccaccaccatagccgtcagcacctccaaagttccgactaggtctgtcatttgcatagtctactcttacttgacggccatggagaatctgcaacaataattcagacagacaaaaccaggcagattaactcaaaaaaagaaagaaaaac

SEQ ID NO: 2352 - DNA, 787 bp, Gossypium hirsutum
  Clone ID: GOSHI-09MAY01-C22033_1
aatttattttttttttttttcttttttcttttttttttttttttttttttttttgcgataaaattaaaattttatgacctgattgaaagttcatgatggagaatataaatgatccatatcaatcacaattcaaaagaaaacaaagcaaacagtatagttataagctcaatccaaaggaaaccaaaagccagttgtgttggaaccgcatggcaggtatgtgaatccatcagatcttacaggcaaaagaaagaccttcatgtttcacagcttccaaactctgaactgaaggctgaagcttagccacttttgcaatagcttggttttctttggcagtgccgccttctaagaaagctccaaccaccttcccatctttgatccagtaagatccgaacttcgcctttggtgatttcgggttgctgtctccgaaaagtactgtatctcctacattgtcaccatagaattgccatgatagatcaaaggaacgtgaatagaagtacggtaggtagtcatattcgtcaactgatttcccttccccacttgccttgatagcctttaccgcctgttcagctgatttccgggcatggtcaacgtgttccacccttctcaattcattgtataacttcagaggaaaagtggttagatcacccacagcatatacattgggcaccccttggttcgaaaaaaggcatcagtctttattcctcccttttcctcttcaacctgtcctttaaatagtggtgttaaaggccttccaccggaagggttggtcgaaccggaatccgggccg

SEQ ID NO: 2353 - DNA, 328 bp, Gossypium hirsutum
  Clone ID: LIB3145-008-Q1-K1-G3
cacttcttttactaaacacttttcccttttcaccaaatgctaattacgggcgttacggcctcaaagatggggacgtgctatccactttcttctaatgcggaactacccaacaaaacccacctattgcataaatgagtaaacttcatccttctcttcagagtttggaagctgtgaaacatgaaagtctttcttttgcctgttagatctgatggattcacatacctgccatgcggtttcaacacaactggcttttggtttccttcggattgagcttataactatactgtttgctccgatttcttttgaattgcgattgatattgatcatt

SEQ ID NO: 2354 - DNA, 407 bp, Gossypium hirsutum
  Clone ID: GOSHI-09MAY01-C22023_1
gacaaaatctgtgaagtctgctggtagcagcagtgctaggcctggtgagcctacagcttcctcaacgactcctaggtttgctgggttagctcgttcttcttcatggtttgacatgaatggaggtcatctgcctttaacgttcagaactcctcctgttagcccccctcggcaaaattttttgacaggaatgcgtagagtttgctctttagaattcaggcctcatctgatgaattctccggactccggattggctgacccacttctagggtcttcttctggggtttctgagcgcagtttacttccacaatcaactatctataattttagttgtggccacttctcaaagccacttcttactgcatcagatgatagtgaagaactattggctataagagaagagcgggaga

SEQ ID NO: 2355 - DNA, 942 bp, Gossypium hirsutum
  Clone ID: GOSHI-09MAY01-C22353_1
aagatgttcagggagagtaccattaccaagcttgcagatgtacctctatcacatatttctgatgatgtttataagacttcagctgattggatcagccaacaatcccttgaggcacttggtttttttgtcttatggtctttggacatcattcttggggatttggtggcccaacaagcaaatgctaagggctccaaaaaaagcgtgcaacaaccatcctcgaagtctaaggttggtatatttgtggcattagcaatggtattgcggcgtaaacccgatgccctaattagtgtattgccaaagctgagagaaggatcgaaatatcaaggacaagataagctccctgttattatatggatgataattcaggcatcccgaggagatcttgctgtggggctgtacatgtgggcgcatcacctcttgcctatagttggtggcaagaactgtaatccacaatccagagatctaattttacaactagtggaatggatcttatctgccccaaaagcttggacaattttagtaaatgccgcagttagaaaaagggagcgtttggtgccgccggcttcatttgagattctaatgcgagttaccttccctgcttcttcgtctagagtaaaggcgactgaaaggtttgaggccatctatcccacagtaaaggaagtgggtcttgctggttctcacggaagcaaagcgatgaaacaagtgtctctgcagatatttcattttgctttcaaagcggccggtgacggcactcctgagttgtccaaagaagcagccggaatagtcatatggtctttgaaccagaatgctgaatgctacaggatttgggagaaggcttatcttgacaatctagaagcaagtgttgctgttcttagaagactttcggaggattggaaacaacactcggcaaaacttactactcttgatcctttgagggaaact

SEQ ID NO: 2356 - DNA, 896 bp, Gossypium hirsutum
  Clone ID: GOSHI-09MAY01-C22343_1
cccacgcgtccgcccacgcgtccgaaaaaacctcgagcgttttaaatctgaatttactcttgaagggaaaaaatcctatccgctattaaggatttcgacgtccgtctttccccaacgcgaagaagttctgcatatacacatacatacatacatatatatatatataaaatgtcacgtaagaaagaagagaaaactcaggctgctgctgaaagaataaaggcagcagcattgagtgctgcaaaaggcctaagtcgagctcaggctgaaagggcagctgcggctgctgcccgaaatgtcaatgcttatgggcaaaaagaagaggggcctagcagatggcaagagaaaagggaagcgaagaggcaaatgtatttgatgagtactgaaaaggcagttagattaggcgaaaggaaagacaagatgaccatgacgtctacgatgggtgcttctcagtgccaaaagtgtttccaagtggggcattggacgtatgaatgtaagaatgaacgggtttatatgtcgcgaccgtcgcgtactcagcagcttaagaacccaaaattgaggatgaagctttctgtctcttatgatttggataaccctgatgtgaaggatgatgagaaagatgataatagtaggtctaacaaaagcaagaggaagcaccggtcagattcgggttctagtagtgatagtgaggcttctgttttcgagactgatagcggtggtgcctcatctgttacgggatcaggttcttcttcagcagtgagtagtacggattacagttcgtcatcggagtccgaggaagagaggaagcgtagagaaagaagaataggaagaagaagcagaagaaggtgagacgcagaaggtacagctcatcttctgagtcttccgattctgaatcaaca

SEQ ID NO: 2357 - DNA, 1143 bp, Gossypium hirsutum
  Clone ID: GOSHI-09MAY01-C22373_1
gtcatcttaaaacttgttccaaagcttgaagagtgcagggcatttgaattgctcaaatcaacagctgatcgagccaattacctgatgaccaagcaggcaaagattgtggcatatgacatgtacccatgcagccctaaagagaaaagatttcttcaacttggtttcaaatatgacaacttgttgatggaagaaagtgctcaaattctcgagattgaaactttcatcccaatgttgcttcaaaggcaggaggatggttatgcacgacttaaacgctgcatattgattggtgatcatcaccagccgcctcctggtgcgaaaaatatggctttccaaaaggttagccatatggatcaaagtttgtttaccagatttgttcgactgggtattccttacattgagcttaatgcccagggtagagccaggccaagtatagcccaactttacaactggaggtaccgggatttgggggaccttccttcggtgaaagaggaagctatattctatagagcaaatgctggattttcctatgattaccaattagtggatgtacctgactaccatgggagaggtgagtctgctccctctccttggttctatcaaaatgaaggcgaagctgaatatgttgtcagtgtctatatatacatgcgattgcttggctaccctgcaaataaaatttccatcttgacaacttacaatggtcagaagcttctaattcgtgatgttatcaatagacgatgccttccatatgattttattggtccaccgtgtaaggttactacagttgataagtttcaagggcagcaaaatgatttcattttgctttctcttgttcgtactcgctttgtcgggcaccttcgtgatgttagaagattggtggttgccatgtcacgtgctcgccttggcttgtatgtcttttgtcgccgttctctctttgaacagtgttatgaactccaacctactttccagcggctgcttcaaagacctgatcatcttgctctaaatttgaatgagggcacatcatttactgaacgtcatgttgatgacattgggcatccatatcttgttagcagtgttgaggagatggctaacatattttttgggagaatagatcaattacacaggcacaagccatgtatcagtact

SEQ ID NO: 2358 - DNA, 389 bp, Gossypium hirsutum
  Clone ID: GOSHI-09MAY01-C22333_1
gggaacatctcaaatctcgggttgagaaaattactcaaatattcaaaagcccaaggcttctgtacattaaatggattttcagttcacacaacctctgaaagacaaaagaacctatggacatccatgattcatcttccagactatctctaaaatagtaaagcaagtacaaaatggggggggggggacaaaaaagatgctaagcaggggaagtaaaagcattttaagcggttctctgctcaatccattaattatcaactcccattttagataaaatgagggtctctctagttagatatgtacatatgtacttatctagtaacaaaagcctacttacagatcaagtcctgtcaagaacttttgctggccgcacgcgtggccgtacgcgtggg

SEQ ID NO: 2359 - DNA, 821 bp, Gossypium hirsutum
  Clone ID: GOSHI-09MAY01-C22293_1
cccacgcgtccgcccacgcgtccgggatgggttaggggggttttggaacagaggaatctcggcgtgcgctgtgtgtgatggggcagctccgatcttcagggagaagcccttggcagtgatcggtggaggtgactccgccatggaagaatccacttttctcaccaagtacggttccaaggtttacatcattcacaggagggatacgttcagggcatccaagattatgcagaacagggttatttcgaaccctaagatagaagtcatatggaactcggtggtcgtagaggcctacggcgatagggttttgggagggctcaaggtgaagaacttggtcaccgaagaagtttccgatttgaaagtcaatggtctattctttgccatcgggcacgagcctgccaccaagtttttgggaggtcagctggagctcgactcagatggctacgttgtcactaaaccaggtacaactcagaccagcgtgcacggcgtttttgctgccggagatgtccaggacaagaagtatagacaagctgttactgcggctggcaccgggtgcatggcagccttggaagccgaacattacttgcaagaacttggatctcaggagggtaagagcgattgatcattgttctaccaaggatttaaaagctgtttgcttcgaattgcgattgttttcggtattcgtctagacgtagatttatcctttgttctggatcaatattagaatttgccattgccatctatattcattatccgttttaatgggattggcccagcattgactttcgctgcttcactaaagccggcgcggccgattgtttttc

SEQ ID NO: 2360 - DNA, 438 bp, Gossypium hirsutum
  unsure (1)..(438): unsure at all n locations
  Clone ID: LIB3584-011-P1-K1-G11
tctgtgggggggggggggtgacggcgatagggttttgggagggctcaaggtgaagaacttggtcaccgaagaatttccgatttgaaagtcaatggtctattctttgccatcgggcacgagcctgccaccaattttttgtgaggtcagctggagctcttttgggggtgcgggggtgttattataccaggtacaactcanaccaccgtgcacggcgtttatgctgccggagatgtccatgacatgaagtatagacaagctgttactgcggccggcaccgggtgcatggcagccttggaagccgaacattacttgcaagaacttggatctcaggagggtaagagcgattgatcattgctctaccaatgatttaaaagctgtttgcttccgactgtgattgttttcggttttcgtctacacctagacctatcctttgttctg

SEQ ID NO: 2361 - DNA, 313 bp, Gossypium hirsutum
  unsure (1)..(313): unsure at all n locations
  Clone ID: LIB3189-015-P1-K1-B7
atagaagtcatatggaactcgtttgtcgtagaggtcaactgccatagggttttgggagggcttgaggtgattaacttggtcaccgaacaagtttccaattngaaagtcaatggtctattctttgccatcgggcacgagcctgccaccaagtttttgggaggtcagctggagctttactcatatggctacgttgtcactaatccaggttcaacttataccatcatgcacttttttttttcttccttagtattttcattatatgatttatttacaagctttttttttttacttatacctttttcattttaactct

SEQ ID NO: 2362 - DNA, 574 bp, Gossypium hirsutum
  Clone ID: GOSHI-09MAY01-C22283_1
cccacgcgtccgcccacgcgtccgtaaaagctactttgaatttgataaaagaagacaaagtggtttttaaaatggctttactcatagcagtactgaccttagttttgcttgtgtctgcgtcgacttcaccagccattgctcttagcttgaatcattatgagaaaacctgtcctgatgttgagtcgatagttgcaaaagctgtcgagcgtgccaccatgaaggataagacggtccctgcagcccttcttcgaatgcattttcatgattgttttataaggggttgtgatgcttctgtgctgttgtactcaaagggaaacaataaagctgaaaaagatgggcctgcaaatctttctttgcatggattttatgttatagaaaatgcaaagaaagaagtcgaagcagcgtgtccgggtgtagtctcgtgtgctgatattttggcttttgccgcaagggatgctgtcgtgctctctggaggtcctacatgggaagtgcctaagggaagaaaagatggtagaacatcaaaggctagcgaaactatacaattgccggctccgactttcaacatatctcaact

SEQ ID NO: 2363 - DNA, 777 bp, Gossypium hirsutum
  Clone ID: GOSHI-09MAY01-C22203_1
cctgttcctacatcctcattcgtgagttatcccatcattgatcaaagtgttgtagtacctgtttcccaaccacctatacaatcttcatctgaggcatatcccatcagtgaccaaggcatttcagtccctgcggttccacaaactccaccttcatctgtgtcttatcctatcattgatttttcagaagctgctcctgttggaccctctcaagtgccacaccctgcaatcagcgtgcaagcacctagtcaaggggagagtgaaaatattgttgagcagtctctacttaaggaacttgaagatatggggttcaagcaggttgatttgaacaaggacattttgaggaggaatgaatatgatctggagaagtctgttgatgatctttgtggggtggctgaatgggatccgatacttgaggagctgcaggaaatgggtttctgtgatgctgaaacgaacaagaagctgctgaagaagaacaacggaagcatcaagggagttgtcatggatctgttaacaggagaaggtgcttaaattattaattatggatgatggctcgtggtttctaggcattttattatatataaataaatgagtgtgcgcatctaaaccgtgtctttatgaagcagctgccttttaatttcttgtcttctgaagtatgcaggggctaaagaaaagagctgtaaacgtttctgtttatttgaactttgaagcctaaaggctataactacttgtgtatatatagttatttacattaaatatatatttgtcccatttgtcttg

SEQ ID NO: 2364 - DNA, 533 bp, Gossypium hirsutum
  Clone ID: GOSHI-09MAY01-C23993_1
tctaaccgatgactttgattcagattcaagtcaaaagagccacgagacaagaaagaataatagatggtttaagaaatttttctcgagtttagatgcattgagaattgaggaaatcaacgacccagcaaggcagtggcactgcccagcatgccagggtggtcctggtgccattgactggtatagaggccttcagcctctgatgacacatgccaaaacaaaaggagcaaaaagggtgaaactccatcgtgaacttgctgaactcttggatgaggaattgtgtagaaggggtacttcagttattccttctggtgaagcttttggcaaatggaagggtttaaaagatgaagaaaaagatcatgaaatagtctggccacctatggttatgataatgaacacaaggctggaacaagatgagaacgataagtggattggtatgggaaaccaagagcttcttgattatttcagctcatatgctgctgtgaaggctcgacactcgtatggtccacaggggcatcgtgggatgagttgtctga

SEQ ID NO: 2365 - DNA, 669 bp, Gossypium hirsutum
  Clone ID: GOSHI-09MAY01-C23913_1
agctcttctcagtggtggtgattgttgtaacaatcattgtgtggttacttctaatgggattcttaacaacccaaatactcgttttcatttcatctcagctcttacttgtggcattcatgtttggtaacactgcaaagaccgtatttgaagccatcatattcgtatttgtgatgcaccctttcgatgtcggtgatcgctgtgtaattgacggaatacagatgatcgttgaagagatgaacattctgactaccgtgtttctgagatacgacaacgagaaaatattctatcctaattcagttctagcaaccaaaccgatcagtaacttctataggagtccagagatgagtgattccgtagagttcacagttgatgtttccacatcaatagagcaaattggagagttgaaagctaaaataaaagagtatctggagagcaagcctcagcattggcgacctggacatagtgtacaagtgaaggacattgaaaatgtgaataagatgaaaatgggtctttatgtgactcacaccataaactttcagaactatggagataagagcagccggagatcagaactggtgttggaactgaagagaatttttgaagctctaaatattaaataccatcttctgccacaagaagttcaggtcacctatgttggctcacttgcat

SEQ ID NO: 2366 - DNA, 361 bp, Gossypium hirsutum
  Clone ID: GOSHI-09MAY01-C23933_1
caattacggagccatccgccaaatacgtatcggaacgagcaaagaaacccgcggcaccgctttcgtggtctacgaggatatctatgatgccaaaacggcggtggatcatctatcgggtttcaatgtagcgaatcggtacttgatcgtgttgtattaccagcaagctaagatgagcaagaagttcgatcagaagaaaaaggaagaggaaatcgcttagatgcaagagaaatacggtgtttctactaaagataagtgaaatctaaatatatctgtgggcctcgttgttgttattttcccctttttgaattgggaatttagggttttgtatgaactattggaattaacgacctaatatgataat

SEQ ID NO: 2367 - DNA, 646 bp, Gossypium hirsutum
  Clone ID: GOSHI-09MAY01-C23893_1
ccccgcgtccgcaactaccttgaggtttatgattcctcatttcctctcctaagtttcgactcaaaacattcacaaacaaagaactttaaatacttgtctagctcattctctcttttccatcatttcttttaacatggagacgatcactcaaaatggtcaccacaaggggtctttggagagcttttgcactgcttcaaagggtgccggtggagccgttgatcctttgaattggggtgttgcagctgagtcactcaaggggagtcatttggatgaagtgaaacgcatggtggctgaatacaggaacccattggtgaagcttggtggggagaccttgacaatttctcaagttgcagccattgctacacgtgacttgggtgtcaaggttgagctctccgaggacgctagggctggcgtcaaggccagtgctgattgggtccttgatggcatgaacaaaggcactgacagctatggtgttaccactggttttggtgctacttctcatcgaagaaccaagcaaggagcagcccttcaaaaagagctcattaggttcttgaatgctgggatctttggccatggaactgagtcatgccacacacttctcactcggcaaccagagcagctatgcttgttaggatcaacacccttc

SEQ ID NO: 2368 - DNA, 660 bp, Gossypium hirsutum
  Clone ID: GOSHI-09MAY01-C23573_1
gattttaaaagaaaaagaaaaaagcaattcaattagcagggaaaatggcaaccgaaacctcagtggattacgatagaaccaaagagttgaagcaattcgacgacacaaaagctggtgttaaaggactcgtcgacgccggaatacttaacatccccaagattttcgttcgaccagccgaggaccttgccgccgacgaactgaattccggccacaaaaccgtcgaagtcccgatcatagatgtaagcaacgtcggagacagtatccggcgacaggagatcgtaaacgaagttaagattgcatcaggggaatggggtttcttccaagtgataaaccatgggatcccattaagtgttttggatgaaatgattgaagggatacgtttgtttaatgaacaagatttggagttgaagatggagctgtatagccgtgaacggtgcaaagaaagggaaattcctcttttactttgatatttatacttgaaaagcccctgattggaaggacactttgcactcttttgctgatttgatccgacccttgaatgcacctgttggagaaaatacatggagtttttagctttgaaaatgggaaacttgtttagtatatcaagcctttgtttaacaaaactttactatggtggtgtaggggggcctaggccattag

SEQ ID NO: 2369 - DNA, 411 bp, Gossypium hirsutum
  Clone ID: LIB3145-030-Q1-K1-E10
gaattccagtcagaaaaccattgaagtcttgatcatagatgtaagcaacatcggagacagtatcctgcgacaggagatcgtaaacgaagttaagattgcatcaggggaatggggtttcttccaagtgataaaccatgggatcccattaagtgttttggatgaaatgattgaaggcatacgtttgtttaatgaacaagatttggagctgaagaaggagatatatagccgtgacagtgcaaagaaagtgaaattcctctctaactttgatctttatacttcaaaagctcttgattggaaggacactttgcaactctctttgcttgattttgatcctgacccctccgaaatgccaccggtctgcagaaaatcaacaatggagtatattaagcatttgaaaaaattaggagaaac

SEQ ID NO: 2370 - DNA, 857 bp, Gossypium hirsutum
  Clone ID: GOSHI-09MAY01-C23533_1
aagtcatttaagacagtaagactgcatggaggactgatgaagaatttgccagagaaatgctggctggagttaaccctgttataatccgtcgggcgtcaagaatttcctccagcaagcaacctagatcctaaagtatatggtaatcaaaacagtgccataaccaacgaacacattgagcacaacctagagggactaacagtagaagaggcactgagaaccaacaggttattcatattggatcatcatgattcacttatgccgtacctgcggaggataaacactacgacaaccaagacttatgcgtctcgaaccatcttgcttttacgcaatgatggcactttgaagccattggtgattgaattgagtttgccacattcggatggggatcaactaggtgctgttagcaaggtttacacacctacagaacatggagttgaaggttcaatatggcagttggctaaagcttatgttgctgtaaatgactctggtgttcatcaactcataagccattggctgaacactcatgcaacaatggagccattcgtgattgcaacgaaccgacaacttagtgtagttcatccaatttataagcttctctatcctcacttccgggacacgatgaacatcaatgcttttgctaggcagattctgattaatggaggtggtgtcctggaattaacagtttttcctggaaagtatgcaatggaaatgtcatctataatttacaagagttggaatttgtttgaccaggcacttcttagagatctcaagaaaagaggagttgcagttgattataagagttcaccaaatggtcttcgtttgttgataaaagattatccatatgcggttgatggact

SEQ ID NO: 2371 - DNA, 888 bp, Gossypium hirsutum
  Clone ID: GOSHI-09MAY01-C23483_1
accacgcgtccgttaagagttcaattttgagaaaataaaaacaaacagaaaataactcttctccggatgggaaagccaggattgttggatcttgagaaccattttgcgttttatggggcatatcacagtaacccaattaacattttgatacatactttatttgtgtggccgatatttttcacatctcttatacttttctactttaccccagctttctatgatctttctcaatctgggattttcccttctggaattaatcatgcgttggttctcaattatggatctgctttttctattttcctaggcttgttttatgtagttttggataagaaagctgggtctttggccgctttgctgtgcttagcttgctgggttggagctagtttcatcgctgcaaaacttggctatcctctggcctggaaggttgtgctggtatctcaattgctttgttggacaggacagtttcttggccatggaatttttgagaaacgagcacccgcactgttggacaatcttgttcaagctttactaatggctcctttctttgttttgctggaggttcttcaatcattattcggatacgaaccatatcccggttttcagatgcgcgtaaatgcaaagatcaaagccgaaatcaaggagtggcaggacaagaaacagaaaaaggtttcttaggttacattgttgtaagttgtatgtttggtaaggagtaaatttaggtttaaatataatgtactgttgtggtataagtgttgtaaggcaacattgcatggattttaattatccatgaaagcatcgctatgcattgaacaatgttttggtgtctggagtaggaccagagatgtagtatataattataatgcatttatgtaggtgattttaaatatg

SEQ ID NO: 2372 - DNA, 543 bp, Gossypium hirsutum
  Clone ID: LIB3585-039-P1-K1-H8
cggacgcgtgggcggacgcgtgggctgcccacggtttcaaggacgggtaccagtggcgatccagctaggcgggttgtatgtcgttttggaaaagaaacctcagtctctgcctttacctgttctatcttgctggcttgcagcatagttcatcgatgcaaaacttgtctatcctctatcctgcaaagatatgctgctatcttaattgaattcttgtacatgacaatttttttgccatcgaatttttgagaaacgagcactcgcactgttggacaatcttgttcaagctttactaatggctcctttctttgttttgctggaggttctttaatcattattcgtatactaaccatatcccggttttcagatgcgcgtaaatgcaaagatcaaagccgaaatcaaggagtggcaggacaagaaacagaaaaaggtttcttaggttacattgttgtaagttgtatgtttggtaaggagtaaatttaggtttaaatataatgtactgttgtggtataagtgttgtaaggcaacattgtatggattttaatt

SEQ ID NO: 2373 - DNA, 286 bp, Gossypium hirsutum
  Clone ID: LIB3147-045-Q1-K1-C4
cccacgcgtccgcccacgcgtccgcccacgcgtccgcccacgcgtccgtttggatacgaaccgtgtcctggttttcagatgcgcgtaaatgcaaagatcaaagccgaaatcaaggagtggcaggacaagaaactgaaaaaggtttcttaggttacattgttgtaagttgtatgtttggtaacgagtaaatttaggtttaagtataatgtactgttgtggtataagtgttgtaaggcaacattgcatggattttaattatccgtgaaagcattgctatgaattgaac

SEQ ID NO: 2374 - DNA, 517 bp, Gossypium hirsutum
  Clone ID: GOSHI-09MAY01-C23473_1
gaaaaaaggttagtggaagctgggaagaaagatggacttgctgcattggaagctttttcctctgttagcgctgctcgcttctttccttttctttctctacattcaagattcttccaagtcatctcaaagcggttgtagtctttttcctcacagtcactattggattgcaagcaagcgcattgtgacaccacaagggattatttctggtgctgttgagataaagggagggagtatcgtatcaatagttaagaacaaggattggagtggcaaatttaaacaagtagctgattatggcaatgcagttgtcatgcctggcttgatcgatgtgcatgcacatttagatgatccagggagggcagaatgggaaggatttccttcagggactaaagcagctgctgcaggtggcattacaacattgattgacatgcctctaaataactttccttccactgtttcaacagaaaccttgaaactcaagattgaggctgcagaaaagagtatttatgttgatgttggc

SEQ ID NO: 2375 - DNA, 396 bp, Gossypium hirsutum
  Clone ID: GOSHI-09MAY01-C23423_1
ttgttgccatcgcattggggttaccggcctggcgggggggagctaaccagaaggctcatctcaaaatccaagtggaagatctatggtgtagctcgacaacctgaaataatacccatcaaaagttctagctaccatttcataccctgtgacctgttagatccatttgaaaccaagcagaagctatcaatactgcatgatgtgactcatgttttttgggtcacttgcgcttcccagcatccattggatactgctgagtgttgtgaggaaaacaaggcaatgttgtccaatgtcttgagtgccatcctccccatagcaaaggggatgaagcattttgtccttcaaacagggatgagtcattatgtacccatagctgtgaatgggaaaacaacccatttg

SEQ ID NO: 2376 - DNA, 806 bp, Gossypium hirsutum
  Clone ID: GOSHI-09MAY01-C23753_1
cggacgcgtgggcggacgcgtgggctgcgctagaagatactgcttggagcctttggcccatgaacccatctcaggctgctgcatctgcttcatctgttcctccaaatgttggaggaaggtttcccacaaatactggtagtttacatattaagagtgcttcgcgcactgcaaatgagggtgtagcaaatatacttgccatggctgagactgtacgggaggttttgccacatgtcccggatgaggtgatttttcaggacttgcagagaacaaattctgttacagttactgtgaataatcttctccaaatgtgaggatgcatggaattttgttggacacattggggtcgagttcagtaggcaaaggtgtttaattaaaacagatgattgtttcctcttataacgttttatgtcttgctacaaatttattgaagaaggatgattctttctgtatatacataaaaaggcaagttttgccgagaatcagatggtattatggcaaaagagaagggtgaaaagatatatataataggtaatgttgttttggtgtgaaaaataaagctgctaagtgctaagttaaatattggtggtcactgcttgccatttctagccagagaaggagagacgggtgataggagtgtgtagatctattccctgctggtaatggtacatctgccaccactcaaactgaaatccttatccttccccttccccttccccttcccccttgtagtattattatgtaactattcacatttcttcccttcattcactgaaatttaattggatttcatttcaatttctcttttc

SEQ ID NO: 2377 - DNA, 711 bp, Gossypium hirsutum
  Clone ID: GOSHI-09MAY01-C23773_1
ttttgaagatctccttccaaactcaggggctgactctaaatttccacattaaaattaaatctcctcaaaactaccctcttctctctcaaattctcttttattgttggtcaaggtttaaagtgttcgtataatgccacagggcaatctggaaaccctcgtttccgcctgtgcttgcggctcttgcgacaacaaaattgtctgcgagactttaacaaccaccgaaggccactacgacgactgcctccacacggcggagaaacttctcgaagaagaaacccctccggattttccgccagaatcgtttttgttgtccaaagacgctgagctcgtctggttcgatagcaacgcttttctagaacggaaagattcgcagaaacggaactccgtttcgaactctacaaatcttaatcctaatctcaactcagttccgaattctcaacgcttttctttgagaaaatctaaggcttcgatcctcggattaccgaaaccacagaaatcttgctttgttgaaacaaagaaccggaagcctggaaacaccagattgtttcctaaacgatccggttcggttaaatcggatccgcccgtcattgaaccttcttcgcctaaagtttcttgcatgggaggagtcggatcgaggcgagaccggggtcgccgagttaggggaagaaccgccaagagtcggctggagtcgaggcggtgtgggggagggct

SEQ ID NO: 2378 - DNA, 454 bp, Gossypium hirsutum
  Clone ID: uC-gsflmaxxa045e12b1
tctttaaacaccagattgtttcctaaacgatccggttcggttaaatcggatccgcccgtcattgaaccttcttcgcctaaagtttcttgcatgggaagagtcagatcgaaacgagaccgtaatcgccgaattaaaaagaaccgccaaaaatcagctggaatcgaaacagttaaaaagaaaacaacgagggcagggagcggtttcttctcgagtttccgtgctattttccggtgcaatggtaaagcacgtgagtcacacgctctgccattaacactgtcgccgccgcgatacagtgacattaggtctcgtttgccgccggatgatggtgatgacgtattgaatgtagctcctgaaatagctgagagtggaccggttgcagagccggtcagtctaggtggaatgaagcggttctcgtcgggtaggagatcggagacgttaatctgaccgtgtggag

SEQ ID NO: 2379 - DNA, 384 bp, Gossypium hirsutum
  Clone ID: LIB3120-010-Q1-K1-C8
cccacgcgtgcgtaaaactcaggttctcactctacattctccacgattaaaaagaatatatatttcttatataaatctgctcaaaactaccctctactctctcaaattttctctaattcttcttcaaggattaaagagttcagataatgccacaggtcaatctggaaaccctcgatttcgcctgcgcttgcagctcttgcgacaacaaaattgtctgcgagactttaacaaccaccgaatgcgactacgacgactgcctccacaccgcggagaaacttctagaagaagaaacccctgcggattttccgccagaatcgtttttgttgaccaaagacgctgaactcgtcttgttccatagcaacgcttttctagaaacggcagatt

SEQ ID NO: 2380 - DNA, 372 bp, Gossypium hirsutum
  Clone ID: GOSHI-09MAY01-C23723_1
aaagggtaaagcgaatagctgagttagagctgagctgagctcacgagttggtttttttattcagtgctgaggcgctttaccaacctaacacttttttttttcgattaaatttccatgggtttctaataaacgatccctttctgcttaattatttttcttgatcgtaatcctccattcctcgcttgctgcaatatgcaagagtcttaaccaaaatgccgccggcaatatagaaatgtgtctgcaactttgcatgccctgagttggagaccataatgttttctgagagtgtgagtgaggaagcgcctcggcaggaatttgagacgcttactgtgtctcaaccacttgtgaggagcgttagccagaagtttgggc

SEQ ID NO: 2381 - DNA, 422 bp, Gossypium hirsutum
  Clone ID: GOSHI-09MAY01-C23683_1
tctcagcttttcaacgtcatggacgatctggtgttgcacaagctagcaatatcaggccccgctctctcctccatgatccaacgcctctcaacctcccctgcagacgtcgacggtctcctcttcggccacgtcactttcagtcgccccttccactctctccgacgagtccgcccaatcttcctccgattcccaactcgttgccaccatctccggcttcctctgcttcccttctcttctctccttctacgactcactcggccgggtcgactcctcccgactctctcctactcacctcaaccacaaacccctcatcggctggttctcctctcgccggaaaactcccctccgtccttcaatgcgtgagttctccgtcactcgttctctttccttcactcccaatctctctcttcctatccaaaacg

SEQ ID NO: 2382 - DNA, 383 bp, Gossypium hirsutum
  Clone ID: LIB3145-057-Q1-K1-E2
accccttactgtcatcccgttggatgaatgggtattcaacacggaagcacaccctttacggatcgttaaccgtaacgatgatattgctggttcggaaaggcaacataaaccaactgttggattacaaggcaggaagacaggtcggtttggaggtaattaggactcatttgcagttcatttatttatttacttttgtcggacaacaagaaatcgttgtcattcagtggttaggatatctggcttctatttattgttttcggctgaaggaactcgtacgatttgaggcctcaaacatatgacaggcttaggattcttgtagtttctggaaatagatagaagagtttctctggtttccgtcggagaaacgttggtctcgaactata

SEQ ID NO: 2383 - DNA, 276 bp, Gossypium hirsutum
  Clone ID: LIB3083-099-Q1-L1-B11
gtgagggctctgtactgacacagcatatgttgaatgccaagaacatgatgtgtgccactgttcctggacaccgatgatgatcgacgatattgctggctcggaaaggcaacataaaccaactgttggattacaaggcaggaagacaggtcggtttggaggtaattaggattcatttgcagttcatttatttatttacttttgtcagacaacaaaaatccgttgtcatttagtggttaggatatctggtttctatttattgttttcggccgaaggaac

SEQ ID NO: 2384 - DNA, 477 bp, Gossypium hirsutum
  Clone ID: LIB3582-010-P1-K1-F2
cccacgcgtccgcccacgcgtccgcttcatcttcttcccctctcccgcacccttcatcaccttcatcttctttatccttctctgcttcttctttctcttcatctaatccccatccattgtcaattgatactgaattatggctgttgtctgagcaaagaacccaggagatactttgtatcattcaaccttctttggtttctgaacaaaatcgacaaaatattattgcttactttcagaggctaatcaaaggttactatggaattgaggtgttcccatttggctcagttccgttgaaaaccttccttcctgatggagatattgatttgactgctcttagtcatcaaaatatggaggaaaatttggcaagatatatctgcggtatcttacaacataaccagcagaactctgaggttctagtacaggatgttcaatatattcgtgcacaggttaaaatagtgaaatgcactgtgaatgaca

SEQ ID NO: 2385 - DNA, 391 bp, Gossypium hirsutum
  Clone ID: LIB3083-097-Q1-L1-A3
caattgattttgaattatggctgttgtctgagcaaagaagccaggagatactttgtatcattcaaccggctttggtttctgaacaaaatcgacaaaatattattgcttactttcagaggctaatcaaaggttactatggaattgaggtaaacttaattttccttcatatttttagccgtggttgtgtaaaatggtctcatttctgtgtgttggtgctccttgtataactggacaaattctagaaattgttggttcttgctttgtcaaatgcctttttaggagagatgacttttatgtgaacgttacacctagggaagttcaattctcaaagttttccacattgaagcataataaactagcctctgaaatcggtgccttcataaaagattgg

SEQ ID NO: 2386 - DNA, 656 bp, Gossypium hirsutum
  unsure (1)..(656): unsure at all n locations
  Clone ID: LIB3543-061-Q6-K6-C11
catcaatcagnaaaaacctagcaggaaaaaaaaggggagaagagcgaagagtgcacccgggttgtataaatgcctcaaatccgtatcatgaatgcgttgaatattgcttccggaagattgctgaggccaaagctagaaaggataattcagtgacagaaactccgcaacctgagcatggccagcctgttacgcctgctgcttatcaagaacaagatgtgcaacctggcattccggaaccagaagaaagccctgatgctgatagtgacggccctgttgaggagaacattgaaggagacattacaaatcttacaggaaggcagaaaaaactatttgagttgagactaaagatgaatgaagcgagaaaagccaatcaaacagcaatggtggctgaaaagaaaagaatggaagctctgccagaatctagaggaatttctaagcaaaaatggctggaggaaaggaagaaaaagataggaaaattactagatgctaatggtttggatttgcaaaatgcgtatatgctagatacccaagaagcagctgaggcaaaatataagaaatgggaaaaggatcctgctccatttggttgggatgtcttcaatcagaagacattgtacaatgcatacaagaagcggacaaagaacattgatattgaccta

SEQ ID NO: 2387 - DNA, 371 bp, Gossypium hirsutum
  Clone ID: LIB3083-094-Q1-L1-F7
cggcacgagcaatcagataaaacatagcagaaaagaaatggaagaagagcgaagagtgcacccggattgtataaatgcatcaaatccgtatcatgaatgcgttgaatattgcttccggaagattgctgaggccaaagctagaaaggataaatcagtgacaggcttaactgttatacttgtaattcttaaattaatgtttttgtttaccctgccttttccttgagaactcattagacagtttaactttatcggcttaattgcaatttatgttgttatagaaactccgcaacctgagcatggccagcctgttacacctgctgcttatcaagaacaagatgtgcaacctggcattccaaaaccagaagaaagcc

SEQ ID NO: 2388 - DNA, 1030 bp, Gossypium hirsutum
  Clone ID: GOSHI-09MAY01-C98853_1
gccattgtaaggtgatttgggtggaacaccttgagtgccagaaaaacactgttcacacgttgtaccgtaccattgttcgcagtggactagcatttggtgcaaggcattggatggcaacattacaacatcagtgtgaaaggctcgttttcttcatggcaaccaatgttcctaccaaggattcaactggtgttgcaacattggctgggaggaaaagtattttgaaattggcccagagaatgacatggagcttttgtcattcaattggagcatcaagttatcatacctggaataaagtctctacaaaaacaggggaagacattagagtatcttccaggaaaaacttaaatgaccccggtgagccacatggggtcatcgtctgtgctgtttcttccgtttggttgcctgtctctccgactcttttatttgatttcttgagagacgaatctcgtcgcagtgagtgggatatcatgtcaaacggaggtcctgtacaatccattgcaaacttggccaaaggaaaggatcggggaaatgcagtaacaattcaagcaatgaagtcaaaagagaatagcatgtgggtgctccaagatagttgcactaatgcttttgaatccatggtggtctttgctcatgtggatgtaactggaatacaatcagtgatcacaggatgtgactctagcaacatggccatattaccttcaggcttctccattcttcctgacggactcgagtcaaggccattagtgatttcttctaggcacgagaaaagcaatgatcccgaaggaggatcattgcttactgtagctttccaaatcctaacaacctccccgcactgccaaactacccatggaatctgtggaatctgtcaacacaatagtatcttgcccattacgacacattaacacaagcttgcaatgtgaagatgggtgatcaaacccccttcttgattaggtacacattcactgtaaaactcatagtctttttttttctttccccccacaacttgcaggtttaagcaatgccctattttgtt

SEQ ID NO: 2389 - DNA, 787 bp, Gossypium hirsutum
  Clone ID: GOSHI-09MAY01-C98763_1
atttttgcctatggtcaaactggtactgggaaaacttacaccatggaagtgaatgcaaaagacgaagagggtcctaatggcgaattgccagcggaggcaggggtcattccaagagcagttcaacagatttttgatacactggagggtcagaatgcggaatacagtgtgaaagtcacttttttggagctgtataatgaagagattactgatttacttgcgcctgaagaaatttccaaagttgctttggaggacaaacagaagaagcagttgccattgatggaagatggcaaagggggagttcttgtgagagggctagacgaagaaattgtcacaagtgctagtgagatatttactttgcttgaaagagggtctgctaagcgcagaactgctgagactttgttgaataagcaatcaagtcggtcgcattctctattttctatcacaattcatattaaggaagctacgcccgaaggtgaagagcttataaagtgtgggaagctgaatttggttgatttagcaggctcagaaaatatatctcgttctggtgctagagatggtcgcgcaagagaagccggtgaaattaataaaagtttactgactttaggcacgagttataaatgcccttgtggcacatcttgggcatatctccgcacagggatagcaagcttactcgattacttcgtgatctcactcgggggacggacaaacacttgcattatagccacagtttctcccgctgcccatgtcttgaggaccccttgagcacactggattatgcacacagggc

SEQ ID NO: 2390 - DNA, 205 bp, Gossypium hirsutum
  Clone ID: GOSHI-09MAY01-C98733_1
ggtttttctaggatgggaccactctgaatgggaaaggtagcattagctctatcttttgtgttcacctcttaaaaagtatattaaatttagattccaatttctggatattaaggagtctgatttggcatgtgaaataagatgcctgatttggtatgtgaatttgaagttgttggtgaattgatttctcccaaatctatataaccat

SEQ ID NO: 2391 - DNA, 559 bp, Gossypium hirsutum
  Clone ID: GOSHI-09MAY01-C98693_2
agagctgtgggctcacttgatatttttagctttcagttaaataagtagataatataatataagaaaccgatcagtgcatatttgaagcatttatttgcagtgctgtaagactaaagtttgtggggtaaaattttgtgatcctcgcgttatttaaaaacccttgtgttcacaagagacatctcttattagcttttgcaggctggtgagagaagaaaaggaaagaagagaggtttattctttaacaagtaaggtacatggtacattcactgtgcagctgagttagaaaccttgttattgaaagatttgtgtagaatgtatatttgaggactgcctctctttgttaactagttaacttgttgagagtagctagctttagtggtctaatattctttacgggcagcaatgttgagttgtaattacattttgtatcgataatatctgtcctcgttgctgtcttatttggctttatcactagacggtaacagggatattgtttgtattcactttccgacccctttgaggtcatttttatttacaggaatggttggtctttttttgt

SEQ ID NO: 2392 - DNA, 774 bp, Gossypium hirsutum
  Clone ID: GOSHI-09MAY01-C98693_1
ttttggacgcgtggggcaagggaggaggtgggggagggtgggggtgctaattaccacaagagatcacatgtgatcctgaatgcaaggcgcacatagagaagactctttatagtggtcatgcttcatataaagttctatccatggcaggatttcttgttatatgggaaccggctactttgggcggggggagggatggttacagtatcaagtgtagtggacccaatggtcctgtggtcactgaaaagttttacccaaccactcagattaaaataacattcgaagagcctacagagtttacaatttttggatcaaattggtgtgcagcgtgtgttacgagcagataacaactctcaagatattagctgctcaagagatacaattgtgctcaccttgagattattcatcttacgggctggtgagagaagaaaaggaaagaagagaggtttattctttaacaagtaaggtacatggtacattcactgtgcagctgagttagaaaccttgttattgaaagatttgtgtagaatgtatatttgaggactgcctctctttgttaactagttaacttgttgagagtagctagctttagtggtctaatattctttacgggcagcaatgttgagttgtaattacattttgtatcgataatatctgtcctcgttgctgtcttatttggctttatcactagacggtaacagggatattgtttgtattcactttccgaccctttgaggtctttttatttacaggaatggtggtctttttttgtgatat

SEQ ID NO: 2393 - DNA, 756 bp, Gossypium hirsutum
  Clone ID: GOSHI-09MAY01-C98053_1
tgtgaagtgcggctcaggtactgtcctgaagtgacagtcagccgtaatatggtggaagcatagtggaataccaggactttatggtgcgcaattattctccacctccatccatcaacaatagcatcaagatggaagttggaattgaagactgcctgcacattgaatttgagtacaataaaagcaagtatcatctgaaagatgttattattggcaagatatattttcttcttgtgaggatcaagattaagaatatggatcttgagatccggcgtcgagagtcaactggatcaggagcaaatacccatgttgagactgagacgctagctaagtttgagttgatggatggtgctcctgtccgaggtgaatcaattccaatcaggctgtttctcagcccatatgaactgactccgactcatcgcaacatcaacaacaaattcagtgtgaagtattacttgaatctcgtgctggtcgacgaagaggatcgtcgatatttcaaacagcaggaaattgcgatatacaggctgcaggattcctgagtaagcatcacacacatgtaaacttggacattccatccagtaaaggagaacagatgattaaccgccttgcgacacctccataaagcgttgaagcttagggttaaaactatctgaacatagggttgtttcttttgaagggctatagtgtttcttttcttttttgtgtagactatgatttattgcagctttgactcggaaatggtcaatggtgtacatgatt

SEQ ID NO: 2394 - DNA, 795 bp, Gossypium hirsutum
  Clone ID: GOSHI-09MAY01-C98063_1
gtcccctttgcctcgttttggccggatctagagtctagcaccttttttttgacaaaaaaacaaataaaagaggactctcggtccttttagccaaaccttaaatggttatgtggtccttggcgccgatgacacacccacgacgacggaggacgtgaggctaccaaggtacgtttatttcttctctttttaatttgaaagattttagttatgaaatagaaaaaataaaaacgaaagagacaaaaacgaaaatagataaaaaaatccacctttcgaaacttttgttctgttctttttgattaatggtgtgcgtaaaaaaataaagggattgatttcggctttttatagccgagttacactgatttgttctttgtttttttttcattttgtttgcttcctttcgtttttttttttgcttgtcgtttttctctttgttcgtttctctgctgttggtgtttgcttgcgtgtggaccttcattttgcaggtggtgtcagaggctggtggttggtgccccgagcggtggtggcgcacgtggcagaggaggcatgcggcggctgaggctgaaggaggctagggttgctaaagtgttttgggtagttgggctattagggttagtttaggtaatgggctgatgggattttgatttgggcctgtgtttgggttatttggtggtctgtaaaaatatttggactttatttatttttgtttttttatttcataaatgggccaggctaaaattggctattacagctccaatggattatattgtagcaatagaaagtgaatttctcatgcct

SEQ ID NO: 2395 - DNA, 672 bp, Gossypium hirsutum
  Clone ID: GOSHI-09MAY01-C98003_1
caaaacttcaaaattatccgatgagaacgagatgctccggtcggaaaccgtaaagggacatgaacataggtaaatcgaacgataaagtggctgctgagctagagttgacaagggctgcaaagcaagaagctattatgaagcttggacttgcaatggaggaggcagataagaataacaggaaagcaaccagggtggctgaacagcttgaggctgcacaggcggccaattcggaaatggcggccgagttgagaagattgaaggtgcaatcggagcagtggcgcaaggctgcggaattagctgctgcattgctttcagcaggtaataatggaaagaagctcattgagagaactggttcattggacagcaactataatccaaagattagctcaccttatactgaagatatggatgatgatttgctgaataagaaaaatgggaacatgctgaagaagattgggatcttatggaagaagccactgaaatagaacacctatattatatatatgtattgccaaaattgcatggaatctatattgtctcttttaccctattttccctgtggatgtcatatcggtgtatgcttacattggaaaatgcaacttgtggtgatgttggatttggattccattgttgtttcagctaagctgcttgcttaatattaggccatccctt

SEQ ID NO: 2396 - DNA, 523 bp, Gossypium hirsutum
  Clone ID: LIB3829-010-Q6-N6-F9
atataatgaaaactactccattgacaagatataaattattaagccttgaaatttgaagggagcctcaaaatatataatgaaaactactccattgacaatatataaattagccttgaaattccagacattgatacacaaaatagaaagcgacttagatacctttgttaagcattgccctaaccctcattggaagaccatagagccgaataaatccggcagcatcggcttgattatatatgtctccactctcaaaggaggagatatcctctctgtacaagctataagcactggtccggccaggtacggaaactgagcctttgtatagcttcaaagtgcacggaaccagggggggtttcagttatcttctccataaatgcatccatggattcacgaagtggggcgaaccaccttcctgcataaactaactccgcatacttgagggcaagggaatctttaacttgaatgggttcccgggcaagggttagagattccagctcacgaacgggggttgaatacgatggga

SEQ ID NO: 2397 - DNA, 514 bp, Gossypium hirsutum
  unsure (1)..(514): unsure at all n locations
  Clone ID: LIB3829-004-Q6-N6-G12
gtgggggggggggggggaaaaaaataaatcttggggggacctcaaanatatataatgaaaactactccattgacaagatataaattattaagccttgaaatttgaaggaacctcaaaatatataatgtaaaactactccattgacaatatatgggggggggggggggggatccanacattgatacacaaaatagaaagcacttagatacctttgttaagcattgccctaaccctcattggaagaccatagagccgaataaatccggcagcatcggcttgattatatatgtctccactctcaaaggaggagatatcctctctgtacaagctataagcactggtccggccagttacggaaactgatcctttgtatagcttcaaagtcacgggaaccaggggtggtttcagttatcttctccataaatgcatccatggattcacgaagtggggtcaaacccaccttcccgcataaactaactgcccatacttggagggcgaagtgtaacttttaaac

SEQ ID NO: 2398 - DNA, 961 bp, Gossypium hirsutum
  Clone ID: GOSHI-09MAY01-C98233_1
cggcagccgacgagaatgtcgaactcaacgagcaaaccctagacggcgaacctcgaccgtccgatcggagccctaaaaatcagctccgagaagatcaacagcaagcccaagaatgggagaccctggctcgagcctgggtaggtgcttttccagaagcaaaagccgtgacggagagccaagtcaaagtctggatcgattccaacttcggctcgttaccagccgatctccaatcgatgccacgatctgagctcatcgaaagactcctctcaatccaaaattacctgagatttccctcccagacccaggatagagaaccaagtcagcatgatcttccaccggctcggtttcagcgcaccgatcagtggataccggtgtattcatggttagaatctttggataccgatgaagtggtcaaatcgaaagatattttggattggttgaacgataacccacaagtcaggaccaattgtgctctaggcattcgcggtatcatttgatgcactacataaaaaagtgccatttaaagatattaaagaggagggaaaagaaggttggatcgcagcccttgaataaagaaagtgttttgaaagttcggaaggatgtagtggcaaaaaaaccagcaccagtgccaaacaatcctttgaacaatatacctaaagatagcgacctctacatagctaaacggaacgaggctttgcgcaaatacgagatcttattggagttggagaagaagctttcacccgttttctcaatgaaaaaatgaatggatctgaaattgacatggatacaatactccatgcagcacccccccccccttttttttttttttttttcagcatagagaattgattttgcatgtgattaaaacatggtgatactcattcatgcacaaatattactgcttaggaatcttatgcaatgtttttgtccccaaaaaaaaaaaaaaaaaaacccccccccc

SEQ ID NO: 2399 - DNA, 699 bp, Gossypium hirsutum
  Clone ID: GOSHI-09MAY01-C99843_1
cataaatccttgcatcaatgtttattttttatttctttcactgcacctttttttttttttaatttttaatttttacaaaaagggaatattgtaattttggcttatcctatagatctggagcattttccagcatcattgcttggaatgagtcaaagtcagggcttgatgaacaactgtgagtcagcttttctgaaagtggatggaagtattcttgtgagacttatgcctcagattttgaagacattattgaaggttttagcatgccaaccaccggtttccccaccaatgcagtggcatacagggtggtttttgagaaaggtacttcaatgtcaaggaaataagctcactgatgacaatatccacctattcaatttattgtcgacagacttcatatgagcagtcccgtgaatgtcttcaaaaggaacttgatggatgctggtttgatcatatcccagataccataggaaatgagtggggaagctgtaaaaaagctcttgaactacaattccatgttaaggatcccttatttacgctggagcttgaaatctgccagcaagcaattgatggcaattttaactcttgctttgcttgggagaggatggttgatgcagtgaaggttttgattctccatcttcaactcaaggcacttattttcatgggatgtttactcgaaaacctcactaaagtcacaagtgacta

SEQ ID NO: 2400 - DNA, 682 bp, Gossypium hirsutum
  Clone ID: GOSHI-09MAY01-C99873_1
gaaataacagtttatgtgcagggggtgaccttgtcaaaaaaagctggaatttttggaatatacagataattagtgccgaaggagttgtagaaaagccctaatttgtgtcggtccctttatttagtcctatataatgtatgtggccttcacttgttgccttttaagagcttcctgcggccggcagaccccccactctttatcttccctattttctacttgtttttgtgttcccagcacttgaagaatcttctcctttgcattctccagggacccaagaaaaaagataattctggaattggagtcaagaggctgataatcggagttttagcaagaggtggttgcctgtcgaatctcgagatgtgttaatgtccattcctacaagattgtaaggttgtgtgttgggtgataagaacctgcatttgtaccaattcttgtttggtgtttccttttttttttttttctctggttaagttttatcaacaaaagtatggcttcacgagactttgttattgaaatggaaggatggaatatcgttagattgaaagtagggtaggaagttcctttgttgccaattagtggcattcagttagaaactttaaactgacgtatgggctgcatcgtcttaaatttatatttttgtaaagtttctaaactctaaatccaagtgtttgagagtttaact

SEQ ID NO: 2401 - DNA, 544 bp, Gossypium hirsutum
  Clone ID: LIB3825-026-Q6-N6-H8
gaatcaaatagcacttaataaaaacaaaaacttgggaaatgatccaaatcctgtgttacagaatgacgtaaaagaacaagtcaaatgaacgaaattgaagcaatctccctagattacatctttagagcagttcttgccatcactagagcaccctcataagtttgatttccaccgataaacccgctcatgtggacaaagacacagccggaaattcttgtctcctttgagagctcatcgtccctcaaacctcgccactgtgcagggaggggcttccggctctcaaaactatcaggagatgctgctactgcctgcactcgccattgtttgccccgttcatccccataaagaacatatttaataagaggctcaaccttcagctccgcctcaagctcaaataagtgaagcttccactgttggatgtgaaatgaaatcagacttagttgtaaataaaatgatgtatgatggtaagtcaataataagctgcagtcatttgcaacaatatattcatctcacatactaatggaagtagcaaaggttatttgat

SEQ ID NO: 2402 - DNA, 524 bp, Gossypium hirsutum
  unsure (1)..(524): unsure at all n locations
  Clone ID: LIB3829-012-Q6-N6-H8
acttggngaaatgatccaaatcctgtgttatagaatgatgtaaaagaaacaaagtcaaatgaaagaatagaagcaatctcccaaaattacatctttagagaagttcttgccatcactagagcaccctcatcagtttgatttccaccgataaacccactcatgtggacaaagacacagccggaaattcttgtctcctttgagagctcatcgtccctcaaacctcgccactgtgctgggaggggcttccggctctcaaaactatcaggagatactgatactgcctgcactcgccattgtttgccccgttcatcctcataaagaacatatttaataagaggctcaaccttcagctctgcctcaagctcaaataagtgaagcttccaagggcaaaaccttttcaaaaccataatttcaccactaggatctatgtcaaatctctccgcaatgcactccattacaattgaccttgctggtagccatgatcttgcatgaaattggacactctctaagaactcactaccagc

SEQ ID NO: 2403 - DNA, 335 bp, Gossypium hirsutum
  Clone ID: GOSHI-09MAY01-C99463_1
gcgttcgcggaaagctggtggttggtgccccgatcggcggtggtgcacgtggcagaggaaacgtgcggcggttgagggtgaaggaggctagggttgctgctgaaaactttaagttgttgggctattatttgggctagtttagtagtgggctttagattttgtaaaatggagttgcttatttgggacttttattttggaatttgggttttgtttatttgtttatttgcttgggccaaaattggctactacagtactgttttgtaaaccgattgtgactgttttccctcaaattttgtatttatgtaattttaccatcttctattttttttttggcc

SEQ ID NO: 2404 - DNA, 788 bp, Gossypium hirsutum
  Clone ID: GOSHI-09MAY01-C99683_1
ctcaattgcctgagctgttgaagatcagcttcccaggatagtaattctgatatagcaaagaccccacctccaaaaagtagtacaattaattcttctgctgcagcaacaccagctgggagccatgtaacccctgctccactgaatcttccaccacatagtttgtctggtgcttcatctccttcagttcttccagattcaaattctgcccaaggcctcttggaaagcactggcaccaccaatcctcctcctgtaaatttatctaatgctacaaaggaagaagatatcacaaacttccctggccgtaggtcatctccatcccttgctgatactgaagtacgaggcattggtagaggtctatccggtcagccttcatctactataccccttgtttctggaagtgtggcttctggtaacggagcccttggtgctgtccctcctgcctctgacatggcaaaaagaaatattttgggagttgatgagagacttgggaatagtagcatggggcaatctttgacatcacctattagtaacagaatgatcttgcctcacgcagccaaggcaaatgatggaagcgcacctgttgattctagtaatcctaatgagcctgctggactacctggcagagcattttctccttcaatggttcctggcatgcagcggaggcctggaagttcgttttaaaatcaaaatgagctggtgcagttttcgggaagaaccgagatagctcctgatttagggaaaagtttttgaaaccggttcagtaagtgcagcaacaaggccataatcac

SEQ ID NO: 2405 - DNA, 822 bp, Gossypium hirsutum
  Clone ID: GOSHI-09MAY01-C99273_1
gatctgcaaattgaaacttaatttgtcacaaatggtttatggaaagtacaatcaaagacaaattggacgttataaatcacatagatctaaattactacaaatagtggacattggttttcttctactgatctaaaatgatatacggatatatagggacacagggtaattatccattaatggaaaaaaagagagaaatacctgacaaaaataacaaaaggaaataagcttttttaagacattatggtttatataacataattaaacaaacatatgagaaaaaaaaaccattttttttcccatgcagctcttgttgatacttgaacatacatatatatggatatatggttttttgtgctcactgatttggtggtggaagagatgcaggattatgagggggacgtttccttttcttcttctcgtagcttatgcctctagctttagcctgtgaatcacggacttcacgtaggtaaagcctaacagcacgagcaccataggggttagcttcaggcttgcctccgtgttcctcttagtcggcaacggaggcgacccgatgagagcatcgaggccttccccaagcgtgtcggagaggacaagggcatggggctgtagggttagggtggccaaagaaagggcacagtgggtgatggacttgggttttcgcccctgcgtgtaggtcccggaggaattcaagtacgtgggcacccctccaatgggataggggtatcggggttggtcgtgggtcttccttttggcggagatgttcttctctagacccttacgctctgaccctgatgttcagtgaggccggaagcgtggaaggag

SEQ ID NO: 2406 - DNA, 888 bp, Gossypium hirsutum
  Clone ID: GOSHI-09MAY01-C94553_1
gcaatcttaagcagatatgctttgcaggacctaccagagcgagggatttttgaccccaactccacagcatttggcaggttgacccttcctgtagctgctcctggaatgaaagtagacaatgcaaattctctagatctagccgaacatctttatatgcactccaacaaccaactggatccattttcttcaggtaacccctctttttaccagcaagttttaggcaatgtatatgcttctcatcctggtgcaatggagagcttccatgctaggaaaaatgggcagctagaaaatagttggactgcaaaagagataccacaattaaatcttgaagcagaactgcaaagaagggagtctgaagttgattcaagtgcttgggcatcagctggaggggttaatgaaaactctaagaaggctttaatggaccttctttaccaaaaacttggtattcaatctatgcaatcatcagaaatcgatcgtcagaattctacttcatcttccagagggcgggaaaccttttggcctgtttctgagcaacaaacttccaattttccttttaatcattttccaaatcaggaagttcatgtgaacaacttgtttccggaaggccctcaaaattctaattcaagtgccttgttgcaagatcatttgtttggagttgctccaagcgcatctgccaaccacatggttaactgtgaaagattgcctcttaaagccaattttggctcatttgcagaagagcagtcattcttgttgggcattgaagatccttctcgtagtagctatgtagatgctagcttgatgggaaaatcagctgtggatatagaaatagcagaactggaaggaaaagacaaagaaaatggaatgaaaggcatgagtaataggaatggt

SEQ ID NO: 2407 - DNA, 638 bp, Gossypium hirsutum
  Clone ID: GOSHI-09MAY01-C94053_1
gcggtaaatttggatcaggaaaccagggattaaatgtgcctcaaacaattacatgtaacataatgtccctagaaacattgaaatccttgaccaccatgtcgtcgcataaaggtgatgttgagcagccaaaaccgattgagcaagatcttgaacttgggttggcaggcagagggagttccttggttctggctggccttcatgcttgtggagatctctcagtaacaatgctcaagtctaaatatgcttgacccttttagagtgtgaagaagttagagcagttattagcattggctgttgctacaacttactatctgaagaagggtttacaaatgctcaaattcaatatggttttccaatgagttgtggtgtaaaaagtgtttacttatctcttggaaaaagttctcgcgatcttgcttgtcagagtgctgaaaggtggaaaagtttaggaaaggatgccggtctccacaattttgagctgcatgctttccgtgctgcttttcaaatggttttgcataaatatttccctgaagttggaacaagtccttcaattgggcgccaagggaaggctttgcgccgtaagcagcaaaggaagataattgagtctgaactgcaagctgaagaagtacttattctgatct

SEQ ID NO: 2408 - DNA, 867 bp, Gossypium hirsutum
  Clone ID: GOSHI-09MAY01-C94353_1
aaactcaaggcattgcaatccgatagccgggtacatttcaagttgaacacaaatccatcttgtgagggagagagtcctcgaccgaaacaaaaacacaatttttgaagaaattcaccaacaatacaactttaaacaatactttacagacaatagaaatgggagcagctggtttgagatgctccattaatctaatcctacgatcatacttctattcccacatcattgctccaaaaaaattgagttgaatgccacaaggaaagaatcttaaatgactgaagaactagcaaagctacgaaaaaaaaaactaaaaatcccaaacacattaaaactttctgaattcaaacgaatagtacctttcgatgtcaacaaggtcagtctatgaacaacccaacaaataggacagggcaagggtgtaggatcagcaaaatttggtatcataatgttccattactttcaccgggcagatattgaagggccttcagatttcaccaagtgtgaatctctgctactgatatcaagcccctgcaatcggccaagaggatcctgttgcatcatatccgcaaaggcatgtgggccagaggcagctaccatagactgattagatgccaacatgttagattgcaagggatgaaatggtggcatttgcatattctgggtttcaacttgccgtggcggtagccatcttgagcctctctacttcccttcttcagtgcttcatttagagcatcacgtagctgagcctgctgttccatagcttgtagccgaagcttaagctcagtgttctcagtagtcaagcctgttggtatctctctggaaaagggttagttgcgcagaaagaggtagttgattccgtttgaaggtggtttg

SEQ ID NO: 2409 - DNA, 578 bp, Gossypium hirsutum
  Clone ID: GOSHI-09MAY01-C94303_1
gttctaatagggatataataatttattaattaccacaaataaatataaagctgatctgatgaaagtgataaatattactataacataaaattcaagcctttctaattatggaaacgtgatcaaacccactaggcttgaattgttgatccatgatcaaagcgaggcaagaggggcctcacttttaacttcttccttgcttggggcatcatttgatttatgctcaggctcttcagcctcctgttttggggtagcctccaccttatcttcagcattcttgtcgtcggctttagcgtcatcctccgctggtttcacgctcttaccagcgtctgtttctgcagaaacagccgtttgagccttcttttccggttcagaaccatctaccgcaggtttctcaatctgactctcacctccgttagtgctgctctgagcagtggtgtcagagcttataggagcgtcggcagggccgtcgaactccttaggtttgctcgcacagcctcccatggtaggtttggagtttggggattaaagggtgcgcgagtttctggaggtcgtcggaattgtagttggttgaggatgct

SEQ ID NO: 2410 - DNA, 727 bp, Gossypium hirsutum
  Clone ID: GOSHI-09MAY01-C94243_1
gcttattactcattttacctcccagttgcatgtgcattgcttatggcaggggagaatcttgacaatcatactgaagtgaagaatgtccttgttgaaatggggacctattttcaagtacaggatgattttctagattgttttggtgatcccgaggtaattggcaaggtcggaactgatatcgaagacttcaagtgctcttggttggtagtaaaagctctggaacgtgctaatgaggagcaaaagaagttgttatatgagaactatggaaaagatgatcgagtatgtcttgccaaagtgaaagagctatatcaaactctggatattcagggtgcgtttgaggagtacgagagcaagagttacgagaagataatgaaacaaatcgagggtcatccaagcaaagcagtacaagcggtgttgaaatcttttctggcaaagatatacaagaggcaaaaatagaaacttaaacaaagcagagagaataagcacaggagactatgtagttctaatatatttagtattgatattatactattagaggggaataaatagctaatgaggtagtcacatgatgaatctctagggagtagtagtgaaaaatagagggttagatggtagttaaacaatgaataatagatattacaaccatgaagcatttgtatcttgcaggtgatacttagtaaaacttgtgttgtgtgctatgaaattgatatcccatgtgtcatatgct

SEQ ID NO: 2411 - DNA, 631 bp, Gossypium hirsutum
  unsure (1)..(631): unsure at all n locations
  Clone ID: LIB3825-022-Q1-K6-B9
atggtatccaagtacagatgcaattctgcctgcttgagtgacttagaggacagtgatggatgtcttgtgatctcatgaatttctcattaactaggttagatgaagatagatatatctggtatagcatcagagagaatttacgcacattattccttattttcccattgatatgaaactggggtcatcactcacccagactgtttttctattaagagccacaaccttttatttttccgccataaaaatccacaacttaaatcctgtggaaagcccaaaagatcatttttcgtagaagaacattttggtttgacttatatacatgtttttttcctgtggttaattcatcgtatgttcttaatgcttttctaagttctgagtattttattatcattgagatctttaagtcgcatgctaagtttctttacttgagttgggctgtgggctgtatttcataccacttttccttttaaatatcctaatctcttctatattgaacattaaaaagatgtagtaatggtgtcttatagcatcctttaaaagtgaattatattgaactntagtctttgtatttgcttaattaggatcataaatataccaagcatttcaagcttgatcatgaatgttattgact

SEQ ID NO: 2412 - DNA, 586 bp, Gossypium hirsutum
  Clone ID: LIB3825-025-Q6-K6-H9
ggtatccaagtacagatgcaattctgcctggttgagtgacttagaggacattgatggatgtcttgtgatctcatgaatttctcattgactaggttaggtgaagatagatatatcaggtaatagcatcagagagaatttacactcattattccttgttttcacattgatatgaaactggggtcatcactcacccagactgtatttctattaagaggcacaaccttttatttttccgccacaaaaagctacaacttaaatcctatggaaagcccaaaagatcatttttcatagaagaacattttggtttgacttatatacatgttttttcctgtggttaattcagcgtatgttcataatgcttttctaagtcctgagtattttattatcattgagctctttaagtccatgcaaagtttcttttcttgagttgggctgtgggctgtatttcataccacttttacttttaaatatcctaatatcttctatattgaaaattaaaaagatgtagtaatgtgtctcatagcatcctttattgaaatttagtctttgtatttgcttaatataggatcataaattataccaagca

SEQ ID NO: 2413 - DNA, 889 bp, Gossypium hirsutum
  Clone ID: GOSHI-09MAY01-C95863_1
gaacagaaggcaacaccattccaacatttttattttatctaaaatgataaaatatttatctttccattcttatctacttgttatacttagaaattttggatcccaaaattccaaaagagcaaccagccatgactttcttttctaccttaaagatcaaacagtaacaaagatgaagaaacatgcaatctattacttaaaaatttaagcaaatttggttcctttaggtgttcctgtagatgggttgttgttataaaattttgttttttataacaaaatgaaacagagtcaaaagaaagaaagcgtaaagcactcgaaatcacctttcaataatttggttgcttttttactcagtatgtgtaagttcgacagattacattcgatggctttttatagccggaaaaataagaattaaaattacaaacaatctatttccattttttttttttttgctatttttccccttgtattctgttattgctgcttcttgtgtattctgttgcaggaatgatcgtacggaggaagtcgttcatggcgacgtagaggccgtgcgtgggaaaccgatcgtgggaggcggatcctctggcgctactctagcgtattccagaaacctctagggtttctggtgttttcaggctattgggctcttttcggccgtttatgaattaggttaggggctttgggtgtaatgtgattttgggttagggtcttggtctttgagccttggtgtatgtttgggctgttcgagcattgggccactataactgggtcgggttttaagtgagtggtttgggttttagtctgggtctcgggtttatttggacttttattgttgggttataagtgatttgtaaatggactttgctaatgaactcttattggtttttatttt

SEQ ID NO: 2414 - DNA, 858 bp, Gossypium hirsutum
  Clone ID: GOSHI-09MAY01-C95593_1
atttgaccaggataagagtagctatggtgatccaaatatcatggatcctccaagaaatagaggtgttcagtttccatttgctgtaacagatcgggttatcataaaggggaacaagagaaccccacaacgtttcgtaggacgtgaggccgttgtaaccatgcaatgcttgaatggatggtatgtggtgaagacattggataatgcagagagcgttaaattgcagtatcgctcacttgccaaagttgcagataacacagccccaaagccaattacaagcaagatgggaccaaactggttatagacctgtaatttataaaatgggggcaggtgagtgacacttcgttgctggtgtcggtatcagtgtgtgccacggttagttcaatatttaacctaactcgaaatattttattttattttttctaccattgttatagtgtttcatgaaacaagccccttgtaaattaccttgtcacgtattttaagcataaaaattacatgcatagagttgaacgagcatgcttaatcattttcgttctatataaatatatgtatatgtatggtcacatctttgtatttagctaatgccccccttgtacaaatatgaaatgtagtacaaaatgatacttataaagtgaatggttatttatgcaaaaaaaaaaaaaaaaaaaaaaaaaaaaaaaaaaaaaaaaaaaaataaaaaaaaaaaataaaaaaaaaaaataaaaaaaaaaaaaaagggggggttggttttaagggatccaagttttatgtacggttgattgcgaagaaatatttttttttttggtgtagttaaaattaaatttagtggccggtgttttaaaaatttttgtaatggaa

SEQ ID NO: 2415 - DNA, 466 bp, Gossypium hirsutum
  Clone ID: GOSHI-09MAY01-C95463_1
aaggttgcttattgcatcgaagatgcacattctacccgtctaaaaggtgttgttgtgcttaccaaagatggtggtagtgatgatgaaccatatttagtggcatctgcatcatccgatgggtttatacgtgtttgggatgttcggatggctgccaaggagaagccaaatccattggccgaggctaatacgaagtccaggctgacttgtcttgctggatcatctctcaaatcttctaaacgacctcggattgggaagagtactcctaaagaagaggatgtggcagaagaagtataagaaaatttgccagtgagcttgaactatgtagaaggggttttgagagctctctcatggttgctgaaaaaaatcctgtttttttattcacaactgataattcagttcatattgagtttgactgttgagttgtatcattttatttaaaatttattacttaaattgagattctcat

SEQ ID NO: 2416 - DNA, 448 bp, Gossypium hirsutum
  Clone ID: GOSHI-09MAY01-C95683_1
atcacaaagaatacaaagctatatggctgaacttataggtataatagagagatcaagtaccttgaccataaacaaaaatcatagtagtcgagaaattaatactagggcggagaccaagtttggcgcagccttcgataaaaaaaactttaaaccggcttcaagtttggtggcttgggactatttgggggaacttttggcatcaaaaactgtattacactcaaatgttccattgccttgcacagtcaaagcctacataggacagttgagagcgaacccagacctttcctatttgaacccggaaggacgatggagaatatgcccagattagagaggattttgtgcaggaagaattgaatagcagaaatgaaaactaaaagagaggctattcgactgcacagagagggacgttggaaatgataagaagaggcagttggtggctagctgtgcc

SEQ ID NO: 2417 - DNA, 917 bp, Gossypium hirsutum
  Clone ID: GOSHI-09MAY01-C95253_1
cttgaagctctcccttttcttttcacaaattttattttgctttcatcagaaatatctgcccatggagaacggagaaatcccagaaaacgccaatgaacattgtccgggtcctcaatcggagtcagctggtaaatccgatgcatgccaaggttgccctaatcaagaagtttgtgccaccgcccctaagggccctgacccggacttggttgcaattgcagagagaatggctactgttaagcataagatactggttttatcggggaagggaggggttggcaaaagcactttctctgcccaactctcatttgcactagcagctaaggatttccaggtgggtctactggacattgatatttgtggtccaagcattccgaaaatgcttggcctagaaggtcaagacattcaccaaagtaaccttggctggtctcctgtttatgttgagtccaaccttggggtaatgtcaattgggttcatgctccccaaccctgatgaagctgtcatttggagaggaccgcgtaaaaatgggctcatcaaacaattccttaaagatgtatactggggagagcttgattttctggttgttgatgcccctcctgggacctctgatgagcacatctcaatcgttcagttcctacaggctactgggatagatggagctatcatcgtcactacgccgcagcaagtctctttgattgatgtgcgtaaagaagttagtttctgcaaaaaagttggagtaccagttcttggagttgttgagaacatgagtggcttgtgtcagccattgaaagatttcaggtttttgaggatgacagagaatggtgaacatactgatctcacagagaaggttattgagtatatgaaggagaaagcacctgaatgctagatctcattgctgccagtgaaatctttgatagcag

SEQ ID NO: 2418 - DNA, 548 bp, Gossypium hirsutum
  Clone ID: GOSHI-09MAY01-C96533_1
taattacctgaaacccaggggatgtgtgacctcgtatatgtgataatgctcaatttatttctaagtttattccatatattttaggggaccagagcctcataccatgtattgagtattttttggacgctggtactttgggaagatgaatgtccaaatgacataggttgaaagttgagacttttttccagcatcataattttcactcaatttgtgatctgtaaatgccattttattttcctagttcagtatgtatataagcaagtattctaccttagtttcttgacattgaagtattcttttctaccttagtttcttgacactgaagtattctttgctgattattatctttcttctagcacagctattctcttcacaaatttcagtgaccatttgcttttgcagagcacatctcgtgaagtaaaacgcttagattctattaccagctcacctgtttatgctcaatttagagaagcatttgatggcttctcatccattcctgcatacagagcttatgatcgggttgccattgttattgggtagggccatgg

SEQ ID NO: 2419 - DNA, 1174 bp, Gossypium hirsutum
  Clone ID: GOSHI-09MAY01-C96753_1
cgaggatataatcgttctcgaatttcatcacatgccattgaagcatacttgattcagatactgagaactggtttctttcatgctgatccgcatcctggaaatcttgctattgatgtagatgaatcaatcatctattatgattttggcatgatgggggagattaaatctttcactcgtgagagattgctagaacttttctatgcagtgtatgagaaagatgcgaaaaaggttatgaagagcctcatagatcttggagctcttcaacccacaggagatttgtcctcggtgaggagatccgtgctattcttcttggacaatttattggaccagaggccagatcaggacactactttagctgcaataggagaggatttgtttgcaatagctcaggatcaaccattccggttcccatccacgtttacctttgttttgagagcattctccacactcgaaggtattggctacatacttgatcctaatttctcctttgcaaagattgctgcaccttatgcacaggagcttttagatattagacaaaggcagcgaacagggagccaactagtgcaagagataaggaaacaagctgatgatgccaggtcctacaccatgtctatgccctacagagttcagcgaatagaggaaatccttaaacaacttgagtcgggagatttgagactccgagtccgggtgctagagtctgagagagcagcacggaaggcaacaattctgcaaatggcaaccatgtacacagtactaggagggaccctgctaaacctaggtgtcaccttcagcagtcagggaagccaaattattgcaaacggatcattcgttggagcaggagttttcttgacactttttcttaggtcaatgcaaagggtgaagaagcttgataaattcgagaagatgatatgatcttaaaacccacaaggcaaaggatttatttcatgtatatgctcattgatcagtcagttaactgccttattcgcatcaaattaaatttatatgtaatttttttccctcatatttgaggatgttccatttgactttcatatcaagcacccgaagaagaaaaaaagacgagggaaatgcctccctgctgggaaatatatagatatgtaataaaagatgctttcaacagtagaaaaggaaaattccagttcagcaacatactaat

SEQ ID NO: 2420 - DNA, 606 bp, Gossypium hirsutum
  Clone ID: GOSHI-09MAY01-C96763_1
gagacatccttggatggtgcctagcctgcccatagctttctgactctgatacatagggtgcgcagactgagagtgttcatatatggaaaactgcactatgagtgctagaaggcttctcaggactctgcatctacacatggaggcgggcggcgatgcctatttataagacgcacaaacggggcacaggggaccaccatgttctgcaaggcatcatggtcggcggaaaaaaggtgcacgtatccgggatgtacaaagggtgctgaagggagtactcctttctgtcccggccatggagggggaaaaaggtgtgcatttcaaggtggtggtgtttgtacaaagagtgcccatggaggaaccaacttttgtgtatcgcatggtggaagtaagaagtgtgacatgcctgaatgcacaaagagtgcaaggggacgtactgactattgcgctcaccatggccgatgcaaaagatgcaagtttgaagggtgtggcaaaagtgcacaaggcatcacggatttctgcaaggcacatggtggacgaaagaggtgctcctggggccatcctgtgtcagaatatgggaaccaaccttctggtccttgtaactattttgca

SEQ ID NO: 2421 - DNA, 639 bp, Gossypium hirsutum
  Clone ID: GOSHI-09MAY01-C96693_1
agtccaaaaaaccaaatcttgcgaccaaggcatattggatttcaagtacaagctttaacaagctaatttcgagggcaaacggatcttaagaccaaattcctacaatatccacccattaatatgtttacaagcccatcctaaagattttaggaagtaataatagggtttgttttttcaagcttaactagaaaggaaggaaatactagaaaaatctggtcaattctcccaactgaagatacaattttgataaattgaaattaatgggcagtcgaaactgccatccacgatttatgaggttcttctgaagtataatccacttctttggaagcagacaaatatcttgcctcatggacatctaaaattgttggggcaaggaggaaaggatttacttgcacaaggactgaactggcaagtttgggatcacaaattaaaatccacaaatgctgtctgtcaacagcttcctggctaacattggggatggatccccgtagtctttcttgttatcctactctagaaaacaagctcatgaggtttcatgcccgactttagagaaaatcttgcagcaaggtacgccttcaagtctgcgactccctcaattgattttatcaaagatgcatcaacagctttctggtcctcttt

SEQ ID NO: 2422 - DNA, 601 bp, Gossypium hirsutum
  Clone ID: GOSHI-09MAY01-C96343_1
acacagaataaactggcaagtagtattaattctacagttttacaattttttgttaaaaaaaagggaccgtaacttgtcattctgcactactgatccagttaacaagctagcaaaaccttacaaccccatgtcagaatctcattcctatcatgaaactatatttacatttcctgtaattagatataaaataacggagaaaaatctttttgtacttatagcatgtatattctatatctttatactagctcacgtcaattcaaactggcaacactctagtatgagaactttataaaaacatctgacctgttaggttatttgatatttgctctgcacttccatttaaacatcgtatacaggtaagcgttcttcaatggagacccgacagatagggcattttctacacttctcgcagcaggtactgcaaagaatacgatgcctacaggggagcaaaaccacacttatctctctctcaaagcaaaccctacataacactttttcattttgaagcctctcaaactcctgctgactatatttggtgatttctgattgctcaccaagagctgcctgaagcctccaaacctcctcagctagatccttttta

SEQ ID NO: 2423 - DNA, 251 bp, Gossypium hirsutum
  Clone ID: GOSHI-09MAY01-C97953_1
cgggtcgacctcgcgtccgaatttcgtgaggcatataaaagagcggggagatcaaacatagtccaggaattgggtccccccattgctattggtgtccctaattaagtgacggggaaagtctgattgatcgtatatgtttcctggctaggaaaagctcgccatttttattacattctgtatcattattttagtgtaatagcggcgtaattccaataattatttagtcatttcaatgatcatttggcctattt

SEQ ID NO: 2424 - DNA, 549 bp, Gossypium hirsutum
  Clone ID: GOSHI-09MAY01-C97973_1
ccgggtcgaccttgcgtccgcatacttttcgctttcacctgataaagggggaggtcactcactgtgctttgggcatacatctcaaagacaaacaacaatggccggggtgcagacgaatgatcgttttctgcttcatcacgctggtggtgtgttctttcttagttaaagccagcaacgccggtcaaaacgatcatgggtgcaaccatggcggtgctcagcctggcgatagccaacgttgcgaagatacccccgaagatgaagacgacttcgatgacacttttaagctcgtcaacaacatcaagataaagatctagttgggcgccgcccggactccatttctttggttcttcactcaataaaaatgggtcgttgcgaagctctatctctgtcttccatgctttctgagatctttcagtttggcatcctttaatttaccagttgttgcaatttctttcttttttttgttgttctcgtgtttggatttggaagggtttagcatttgctgttgttgttgcatgcttttttataaaactgcatttctcgtttctc

SEQ ID NO: 2425 - DNA, 546 bp, Gossypium hirsutum
  Clone ID: GOSHI-09MAY01-C97903_1
taaaaagatgagtgtagcagttcttgatagaaaaacagttatttgattcgtggaagcaaaagaagcattcaagaaatgcgtggaaaagtacttcaaaaatgttggattccaacgggaacggagtgatttgtcggaggaaacttagagaagggctggatttgcttttcacggtggaacatgaatccacggtgtccaaagaagatattgacaattttcacagcatgatattcgataagttcgatgaggatcgcaatgggaagctggatctctatgagttcgcggcgctggtgaaggagatcatgatggccatggctcgtgggatgggcagtttgcccgtcatcgtggctctcgatcaagatagcttgctcatgatggcggttcaacatgaaattggctcctaattccatgtgggatttttgtgaacattttttttttggttaggaaaaacaagaggggagtgtttttaggaatttatttaggataaagtacactaactctcatccaactttgatcttaatgataaaacggtcactcaatttttaagtc

SEQ ID NO: 2426 - DNA, 628 bp, Gossypium hirsutum
  Clone ID: GOSHI-09MAY01-C97823_1
ctttacatctccatcgccatttttagcttcaatttctcaaccaaaccaagccttaaaggataatcaaaatcaaacccaacaaatcccagaatccatagacatggaggaaacaataatccctgttacagagcaaaagcaattcccacaaacacccgaacacattttcatcctttcaggccaaagcaacatggcaggccgaggcggcgttcaccgccaccactgggatggcgtcgtcccactggattctcaaccacacgcttccatcatccgccttagcgccaacctccactgggaacccgcccgggagccgctacaccacgacatcgacgtccgtaaggcctgtggagtggggcccgggatgtcgttcgccaatgcggtgaaggaccatctcggcggcggcggagagtgtttgggtctggtcccttgcgccgtgggcggcactgcaatcaaggaatgggaacgtgggcagcacctgtatgataacatgcttaagagaagtaaagagagcgtggagaagactaaaggggaaatcaaggctttgctttggtaccaaggggagagtgatacgccgtcgtatcatactgctgaagcttataaggaaaacatggagaggttgattcataatgtc

SEQ ID NO: 2427 - DNA, 662 bp, Gossypium hirsutum
  Clone ID: GOSHI-09MAY01-C97473_1
actaaacaccgtgggtcccatccatcgccctcccgttctttctaaaatgcaactgggtctcatcactgcccttttgttactctgtttacccttggtcgccaaaaggatcttcgccggcgaaaccctcatacacgatcccaaaatttggctttccggagccgtttttgtttatttcttcagtgtttcgggtgcaatgcataacataataaggaaaatgcccatgtttttggtggataggaacgttccaacacaaattggttttcttttaccaaggatcaggaatgcagcttggagcagaagggttcgcggctggttttctgtatactgttgtggggttattgctagctgtcgtgacccatgtccttgtctatgttaaggatgcaacagccaaacgtttggcgatgctttttacgcttttagtttccttctgggcagtgaagaaagtgattttgttggacaattggaagaccgggtatgggattcatgggttctggccttccagttggaattaaagagattatcattttttgttttcccggttactatgaggtgaattatggttttaacatggaggctttaggtgacaaatcgatactaatttagatacttaaattgtataactttgcctggaatttttggcttatagaacattattttgttac

SEQ ID NO: 2428 - DNA, 526 bp, Gossypium hirsutum
  Clone ID: GOSHI-09MAY01-C97663_1
gatttctaacctttgcagcggagccaggcctgtgtgaaggcgttgaggttatgctccgatctagatgtacaaaacctggaggtggagggggactctctaacggtgaatgagaaggcgcccgactacagatgacacagattcctcagaaataacgggatatatggaagatgtgaagagactaagtaaagtttttcgaagctgtaccttttatgcatgcgaaaacatcggccaacgaagcagcgaactagttagccagagaaggccttcaacaagaacaagaattatttttgaggaatgggattccacaggttgcggcgattctggttgagcgagaccgcagtttgttggacgccccggactgaagagctctggtcgatgaaggaaagggaagcagaggagttctgttcgtcgcgtttccctggagatgagtagtttctctgggtttggtgcttctgtcattctactgatatgtagaatgtttaattttctgcgattagaatcttatcttagtaactttggggcatct

SEQ ID NO: 2429 - DNA, 958 bp, Gossypium hirsutum
  Clone ID: GOSHI-09MAY01-C97143_1
agacaagaataaatatactcataagctacgttattcagattcagtggtaagtactcgatacaaataatgccttgacttgacataggtgtgttcatttttgggggggctgttactttcacacctatatttaacatagtgtcgtacatgaatattcaaaaagaattaagaacccgagtgacatagctggtgtctggatactttgttgaccaagatttaagcctttggagtattctcttctttttttgcattcttgaaataaaataaaagatcattatccccacctttgggatcccttgttttattgcctacgttgagctagaaatggttcgaatgtcaacaaaaatccaactgcctcaactatattcaagacgaaaaataccatctgagtacctggcagaaatgaagcgtctaggcgcttttccgaccaagaaaacaatgcaccacctcctgcaggaccaactgctttgaaaagagacattccagtcatggcaatgccattagcagctcctctttggtgctggtccacagctcgattttgcagaatgaataatccggttatgattgatacctaattgtgtcgaaaactttatagttagaaggcatataagtccaaaaatacaagttttgaagaaatttaaagcaccagtgaagcctaacagttaaatgatcatttctaaaaacttgttatgtatatattgttaaccattgactattacttgttaatcaaggctgatctgatttcttaaggctaacatatagatattgatatttcacttactgatagaacattcttgaggactgatgcacagtttattaccaaggtaagagtgaagccagataacatggctgtcaaaggataactttgcaagagaggtatggctaagacacttccaatccgagacaccattacaggtccaagaagcctctctacataggattagggactttgaaagacaag

SEQ ID NO: 2430 - DNA, 698 bp, Gossypium hirsutum
  Clone ID: GOSHI-09MAY01-C97383_1
ttcttctcctcttttctccactgagttcgtttttaaaaccagctcaactcggttctgcatatcgaacgcactctccccttctctttctatcctattccatggggcagaatccatcgcgtcatctctggaacctcaatcacctatcctttattctgtagaaaaaataataattcaggactttttttttatctgttgacttttttcccctccccttcctttttggccatgaatcaaatagctcgaagccatttgattatgtttctttttgctctttcctttcttgttccttcacttgaagccagcgaaggtgatgctgatccgatttacaagacttgtttagaagactgtgaaataagtgggtgtgtaggggaaatgtgttttcaacactggaaattctcttccgatgggaaaccaattgatggaccatggtatttgcaagaacccctttatcagaaatggaaacaatgggattgtcggtccgattgtcggtaccattgtatgactgctagagaggaacagagatggaaactcggtgggaaaccgatcaaatatcacggaaaatggcctttccaacgcgtctacgctatccaggaaccggcagctgtagcattctctgcaataagcctcgcgattcagtttcatgagatgtcgagttgacagagaagctggattattcatctgccgttgcactagttgga

SEQ ID NO: 2431 - DNA, 608 bp, Gossypium hirsutum
  Clone ID: GOSHI-09MAY01-C90503_1
cggcgcgtgggcgagctgccttctttgaagaactggtgagacttacaaaagagttgcagctgtatgtttgagacctttggagcagcttgcatcaaagttggtccaaggttttgaaggttctgcagatgataaaaccttctcaatatctgatcagttgcagtcaccaactaacccccgacagaattcaaaatgccacgagctagtgaatgacttccaggtatacacatggtctgctcgagcacttgcttccttaacttcacgctcgcgtagggaagaccgatttggagttgctcaactatctggtagcaatgctgctgccatctcaacactcatagcttgtttacttgctgttgaaacattgatggggaaaaaaataagcttacaaccatctcatcagttaatgggagcattcagcacgaaatcggctaccttcagtactggaagaagagatgttaggacaggaaaaaggagagatgacccactatattctaaagcatacgcaatggctgatgttttaaggacttcaatttacggcattgtgtctgctttccaccatgagatgctgactagggccaaagcaaggttttttcgagaggattggattacta

SEQ ID NO: 2432 - DNA, 563 bp, Gossypium hirsutum
  Clone ID: GOSHI-09MAY01-C90483_1
ccgggtcgcccagcgtccgccccgcgtccgctgagttgcacaaactccgaaaaccaaaccccaactaagaaactgccataaaagtaaaacaaaacatcgaaaagtcaaaccaagccacctcttcctgaaaatcttccagattttctctcacaaagtacccctttttttccctgtgtctcaaggacccagaaaaagcttcgcccctttattcttgttcacaaagatgtctttgcattgggcattgatatgccatgggttgataactcttacaatagttgtttccttcctttgtgggcagtggcctatcttccaaggaacccccatcagctctatccatcgtttcctcactttcggagcttatcaatacttcctgaggtttattggggctgtttttggagatagaggaacaaatttgatcctttccgttgagtattattgttgtgataggcctaatcctatcttacagcttatatacttggcaataattggaacgacttattacattatagtgaagacgtcttttagctatattcctgggtactatctgagtgaagttcataggt

SEQ ID NO: 2433 - DNA, 821 bp, Gossypium hirsutum
  Clone ID: GOSHI-09MAY01-C90423_1
ggaagacaagggttttgcaggttggaagaatgcgactgaaagccaggtgagggaggatgtggccacaaaagttatgttggaggcattccatatcgctataccgaggatgatattcggtattatttagaaagttgtggcaccataactgatgttgattgtatgaagttccctgacaccgggaagtttagaggaattgcaattattagtttcgagacagaagcagcagcaaaagaagccttggctcttgatagagctgaaatgggaggaatgcagctaacaattcagccttacaaatccactcgagccaataaagtgactggttttgccccgaagatggtggagggatacaacagaatatatgttggaaatttatcttgggatataactgaggatgatttgaagaggtttttctcagattgcaacatatcatctatacgctttggcacgaacaaggaaacaggggaattccgaggctatgctcatgtggatttctctgatagtgtctcagtagccatggcattgaaattggaccaagaaattgtgtgtggtagacctgccaagataagttgtgcagttcctaagaatggagtgaaaactcaatcaacgtctgatcctacaagtaatgaagtccgtaaaaaggatgaaggagctttaagtgtcgaagcacctgtgagtgttgaggcacctacggttaatgaagttgatgatggtggctcaagcgttaccagtggtaagttgaggagaaggacgtgctatgagtgtggacaaaagggccatatttcttctgcttgcccaaaaggatctgtgagtgtcgaagcacc

SEQ ID NO: 2434 - DNA, 779 bp, Gossypium hirsutum
  Clone ID: GOSHI-09MAY01-C90763_1
acctccgttttgcacccatcctgaagggaggagctaaggaagcctgcctatgtgacccttacatcaatagaatatctgcggcatctcctataagtagaattgaagttgaatagaatattctgaaaatgaaacagcgatctcttcagaagactctggaaacgactcgtgatgttagtaagcttgaatctgccgtagagtgtacaaatggcagtcagggcaaagaaacaaaccccacaggaacagaacttcattcaccccagctggaacatgttgccaaagctccatagctagcctaagcttgatagttttgatgtctcctaatctgattcatcatattccctcgatcgataagctctgaagttcttttttctaatcaagaactcatttttattgttcagagtattataggatcgaaaattttacccttttattcaggttctgtatgcagattgaatgatgattgcagccttgcaaggctcgatgatggccgttatatattttttatttgacagggtttgttgaagagcttacttatgagatagatcgcgttgcattaatggcggataaatggtcgcttggctgggctcgactgcattgcagttgaggcaaaaagcgggtcattattaagctttgctatggtagaagcatgttcctgtcatggatttgtggcaatgttgggggattgtttaccatatcctggtcgtaaagatatattggccatgtgtgttttatttaatcaaactacagcatttaatagtaaaaatcaaaattttatcctc

SEQ ID NO: 2435 - DNA, 869 bp, Gossypium hirsutum
  Clone ID: GOSHI-09MAY01-C90703_1
cggccgcgtcgacaacatggaagggatcgccttttcaccatcaaataatttccattgctatccccaaatccatcccatcaaaaccctaaccccaatcccatttcgattctgcaattacaaaacgaataacccaaaccaatcccttctttccttttccataaactcaagcaaaaccacccaaaccccaataacccaacccccaccattagtcgtagttggctcagcaaatgctgatatctatgtggagatcgacagattacccacggaaggagagactatttcagccaaaaatggtcaaactcttgcaggaggcaaaggagctaaccaggccacctgtggtgctaaactttcttacccaacatattttgtggggcaagtaggtgatgatgcgcatgggaaattgataactcaggcattggggaatggtggggttcgtttggagtatttgaagaacttgggtggtggtgttcctactggtcatgctgtggtgatgttacaatctaatgggcagaattcgatcatcattgttggtggtgctaatatgagttcttggcctgacaagttgtctgatcaggacttggatgttgttaaaaatgctggcattgttttgcttcagagggaaatccctgattctgttaacattcaagttgctaaggctgcaaagggtgctggtgttaccgtaattatggatgctggtggaatggatgcaccaatgccccaagaacttctaaagtttgttgatatctttagcccaaatgaatctgaactcagacgattgacaggaatgcctaccgataattttgagcagattagtcaagcggctgcaaaatgtcacaaaatgggtgttaagcaagttcttgtgaaacttg

SEQ ID NO: 2436 - DNA, 631 bp, Gossypium hirsutum
  Clone ID: GOSHI-09MAY01-C90663_1
gctttcgtatccaaaactttctttccattggggatcagggttttccgtctgaaaaagccgtccggtgtcgttttcaggccgggaacctcagcttcaacgtactacaagtatgggatttgccacaaggtcgcttaggatgcctagggtttcgtctaaaacaagcggctccttgttctcttccgtcggcgaactcgacaaggaaacacgagaagaaagacgagtggcggatgtatggagagaaatccatggcgtggatgactgggttgggatgttagatcctatggaccctcttctacggtcggagctgattcgatatggcgagatggcacaagcctgttacgatgctttcgatttcgacccattttccaaatactgtggaagttgcaggttcacgccccgtcagttctttgactccctagccatggcggaccatggttacgtggtctccaggtacatcttcgcaacatccaacattaaccttcccaatttttttcaagaaatctcggtggcccaaagtgtggagcaagagtgcgaattggataggctacgtcgctgtttccaacgacgaaatatccaaacgcttaggccgtcgcgacatcgtcgtcgcttggaggggaaccgtgacccgcct

SEQ ID NO: 2437 - DNA, 622 bp, Gossypium hirsutum
  Clone ID: GOSHI-09MAY01-C90373_1
cccagcgtccgccccgcggggggccgggggggagcgccaagagcaacatatgaagacgacgactcatcgagaatccaactccgaccactctcctaagttgtctcgtctcccaccaattccaatccccaaacggaggagatgctgtcgtctcctctccctccgcctcctgtttctgggggggggggggccaattccctttgtaattcaaactacaacaaatttcccataactttactaaaatgttttactctttttgctcatcaaatatttttttcttgataacgaagaaaggatctttcgattacttacaaagtggccagcccagtagagtgagaagcttccctcacgtcgaaggcgactatgctttgcacatttacattccggatactttttttgaatggccacagttctttatcaataatattgaattgaatgaattgcctttttttttatttactctgccaattatttcagtgtttgtacagtctatatcaaagaaagagatgggtcaatttttgaagagagtttcatccgtgggtcccaatctccatgttggggatattgatgttccattggatacactgtgtaaagaagagcataaaccttgaacagtgggcactag

SEQ ID NO: 2438 - DNA, 554 bp, Gossypium hirsutum
  Clone ID: GOSHI-09MAY01-C91983_1
gtgggaaaacaacaagaagtaaaagcatataagaaaccacaattcagaaaatcaacaacctatctttactttgaactggttttacattttttaccagtcaacaaaaaaaaatcatccacaaactatgctttagtatcaatgcccaaagtagaaatatgacacagctctcataagctaaaataacatgatcaatgagctactaccaagaaaatctttggttatccattacttcaaaattgggagtctataataagaaaacctggtgctttagcactacttaagatatgtagatgaaacccagagtagcacataggttatcaatgatgtcagcacttcaaaactccttgggcccttaagaataggaataggtggaatcactgataccatcaagaaggttcccagcaaccaggagaatataaaagctccagccccataaagtagagttcggattttgctcttcaacctatcgtgtgtgaaatagaaggtagctatcagtgatatagctacttgcagggttgggcctccttcattgggaatagaacagtgagaattcc

SEQ ID NO: 2439 - DNA, 585 bp, Gossypium hirsutum
  Clone ID: GOSHI-09MAY01-C91963_1
ttttttttttttttttttacattcaaaattaaaatatttataacttagaaaattcaagattatttgaatccatcaaaacccacctagcttgaactaatctaaatctaaaaagtccaagcctgaaagaatcgaatccgaaaggatttgagccgaacaaaatatgaattcgaaaaaactcaatatgatacccccggtttagcacccgtctatgattgagcaatgcaactgacttgcacattaaataaaaatgtgattttctatgtaatggcaccaaaaagaaggtacctcaagcttaacagagaatgttgatcggttctaacaaattatactgcaaaattctctcagcaaagccaaaccttccactttgaacactaccctattaataactcgtatctctagttactttgagagccaatagataataaggaacaacgtacaaccagcaattacggctgataaaataagtgtgtctcttgaacgcctccatctgatggaaccaagcaagccacggataacggggaacttgtcacttagaacttttactttgccttggacatctccaaacaaagctctttgagagcccac

SEQ ID NO: 2440 - DNA, 774 bp, Gossypium hirsutum
  Clone ID: GOSHI-09MAY01-C91903_1
acacaaatgaattctctaaagcattagtatataccccaattggttatttacattggaattcggaactcccaaaattataaggaaagcattgagaacttacatgaatgaatgccattatcaccctattatcaccctatgtccctaatatttatctttcgatttttttctcctctgtttctatttctactactgagtcaagaagtgattttgttacacttcgaattacatgcaaaaaatggaataaaacaaaattgaacaaaagaaccttgttaacatgtgtgtgtttgacttgatgagtcatgactgccaaaatagctcaaaatcatcactatacaatgagcgatcttgaatctccagattcgcaacatgccaatttataagttgtgattggaaaagtttacataaaaccaatccagaaggaaaaatccaccattcactttcgtccatgttaatattccacggctgaaggcttggggttcttatactcgatgatgaccgactgttatggttgatatacccacaaagaaatgcaacaacaacattaatcaaggatgttatgttccataaagcatagaaacgtgcaagacctgcagaacgccttggcccatgactgaataaagcgtttatgccaacaggaaatggaagaagaatgccgagaggtatgataaacacaaccagagagacatccaccaatgatactgaatacaactggaggaatgtaagcaacactaagctaaaatctcctaaaagtagcattgatatgactaggccaac

SEQ ID NO: 2441 - DNA, 511 bp, Gossypium hirsutum
  Clone ID: GOSHI-09MAY01-C91893_1
gcgaaaattaatggcttactcattcactggaatgctaaaagattctaattcatataacacgacagaataattcatcaaactatgcgctgccacgaaagattggaagtgcaattatcagagaaaatgccagttttacaaccatgaaagcaagctgtttcatgatatccatagccgtttgccactaacttgcggcggaagcagctttaaggttcgttaccgcgacaatatatgcattccaagcatcttcttgttggaaagtttttacctcttcatacttcacatctcgcccgctgccgaatccctctgtgcttctgttttcactagtgtctggcatcttccgaagccagaaatggacagattgaaatccagcctcttctaagcagtctctaatctctggcaatgaccacagcctccaactgtaagaaaatgcatggcgaagtttctttctgctgcttttgaagatggaaatggagactaatccttgtttgccgctcgagggtgtcggattcag

SEQ ID NO: 2442 - DNA, 487 bp, Gossypium hirsutum
  Clone ID: LIB3828-008-Q1-N6-B11
gcgaaaattaatggcttactcattcactggaatgctaaaagattctaattcatataacacgatagaataattcatcaaacaatgcgctgccacgaaagattggaagtgtaattatcagagaaaatgccagtttttcaaccatgaaagcaagctgtttcatgatatccattgccgtttgccactaacttgtggcggaagcagctttaaggttggtaagttgaaaaagatggaactggaggccctagttcgttaccgcgacaatatatgcattccaagcatcttcttgttggaaagtttttacctcttcatacttcacatctcgcccgctgccgaatccctctgtgcttctgttttcactagtgtctggcatcttccgaagccagaaatggacagattgaaatccagcatcttctaagcagtctctaatctccggcaatgaccacagcctccaactgtaagaaaatgcatggcgaagtttcttctgctg

SEQ ID NO: 2443 - DNA, 650 bp, Gossypium hirsutum
  Clone ID: GOSHI-09MAY01-C91833_1
agaaaaaatgaaagaatttattattgaatgacgtatagtagctgcatgatgattacatcaagaaaattaatttattggaaaagtcagcattagtcactacaaaggccgttttatgtgtatttgaagcagaactggttccaggtttatataagctttaaattaggtgtaagctggtggtggccttggcatgttttccacaacaccgcaaactagtgcaccctcaggcatgttgtattcgtccctgagtgatttgttaggggaaagaacactaacataaagctgttgcccaaggtaacgcctgtcccatatctctgacctgatgttccacattccacagttgtcgaatgacaataggatagctgcccaggacttggggaaaacctgtatggtgtgtctgctcacggcatcaagaagattgtagttcttcctcttctcagggctccattgcccagtctcgacagccacagcaaagaaggcatagccacacaagtgataagactggatggctgtttcgcgattctcgaagatgatttccataaagtttctgtgtgtcaggttgaggacaataggttccatggttattttagtgatctcagctggtgggtcatcaggaatggtatcgtacttgaaaaccttgtcagctacgccgt

SEQ ID NO: 2444 - DNA, 322 bp, Gossypium hirsutum
  Clone ID: GOSHI-09MAY01-C91593_1
gttttcccttatgtcaagattcaaaaaccaaagagccagtgaaagcatttggtgcatattcaggtgaggaattctctcttcgaccatgttaaactcccttaaagtctgattttggaactagctgttgtttttggaaggtcacaggcataggattcacaattctttttctacttttgtgtctttaacaagggcaaaattatatatatttgatgtaaatgataatttaatgttgatattgttggcggggctttcctttttttttttttgactgtaacactagtctttttgcttagcaatggagaatgagaagtcgtttggtccc

SEQ ID NO: 2445 - DNA, 727 bp, Gossypium hirsutum
  Clone ID: GOSHI-09MAY01-C91513_1
cccagcgtccgctttaaaaaaaagaaattactgaaataaaagaaataaaaagaacacctttgcgaaactttttcctttcgattctctgatatctcgtttgtattcgttgtgttcaatcaatcttttttttcttccccaaaaatccccctttacaaattgatttcgtttcggttttataactgattacaatagaaaaaaatcgctactatttctcagttgttgctgctatcttttgctgttttttgtcctcttttcttgctgtttgcaggtccttggaggtgcaggtgatgggacggggccagggagttgttgagcctcgagcgttggacgtgctgaccaggcacgtggggagcggcacatactgctgctagggtttcttggatgctgaaactattttaggtttgggccattttgggcttgttttagtttgggtttagctgattgggtattaaggttggttttacaaaatttgggctttatattttttgtctattattgtaatgggcccgggcaaaatttggttttcacaatccttatggcaactcctgttaggtatttattatgtagatcataaatgcaaaaagtctagttatgaggtagcaattggacgggtttgtagcaagttagcatactcaattgaccccgtcttccatggaatatgcatactaatgctgtctaattgcagattcttcatattctttaacgaaaattatagaccttttacctt

SEQ ID NO: 2446 - DNA, 529 bp, Gossypium hirsutum
  unsure (1)..(529): unsure at all n locations
  Clone ID: uC-gsflnu33B080e06b1
ccccgcaggcaccgccccccanttnccggttcgacccacccccccgcgtcgcttttgcggacgcgcgggtctatcttccccaaaaatccccctttacaaactgatttcgcttcggttttataactgattacaatagaaaaaaatcgctactatttctcagttgttgctgctatcttttgctgttttttgccctcttttcttgctgtttgcaggtccttggaggtgcaggcgatgggacggggccagggagttgttgagcctcgagcgtcggacgtgctgaccaggcacgtggggagcggcacatactgctgctagggtctcttggatgctgaaactattttaggtctgggccattttgggcttgttttagttagggtttagctgattgggtattaaggttggttttacacaatctgggcttcatattctttgcctattattgcaatgggcccgggcaaaatttgggtttcacaatcctcaaggcacctcctgtaggtatctatatgtagatcataaatgcaaaagccta

SEQ ID NO: 2447 - DNA, 480 bp, Gossypium hirsutum
  Clone ID: GOSHI-09MAY01-C91503_1
agactaaagagtgtctttgttgtagaatatacatgctttgcatgtgcatcgttatagggagtggctttgatatcgctgttactagggattgggggtaacaacgggctgcgcaagctcaaggatgcattccatgcggattattgcgatccaaaaatctcatcttgtggaaggcctttcttggtttatccagctcctcctcctttctaaactctatgctttttaatttcatacgataaatagaaataatgggtgggattgtttgtctctttgatgggggattaccaaactttaattctattgttgctttgtaatgtggtatgatgcttatattataataaagatatgctattaatctcaaaaaaaaaaaaaaaagaaaaaaaaaaaaaaaaaaataaaaaaaaaaatacggtgttaccaagaataaaaaaaaaaaaaaaaaaaaaaaaaaaaaaaaaaaaaaaaaaaaaaaaaaaaaaaaaa

SEQ ID NO: 2448 - DNA, 375 bp, Gossypium hirsutum
  Clone ID: GOSHI-09MAY01-C91483_1
gtcattcaagagcttcaacatcaaatagagtgtacgcaagccgagatcgaccagatttattataccatcgctatttgtagaacccaaaatgcgcatcgtttgcaaatgcaaaagatagatgatggtgatcgttgccaaatgatgaacaagttgccactgatcgggtttgaaactgaaaaattagctaatttgtctattaaatcagatgataatataggagaaaaataaatgtggggaatcaagttttgatacctttagtttgtttcttgtaattaatttaggattatttgaaataattttttcttttgttttggaagttaaaattaattaggtcacttaaccattgttaaatttacacattcgatactcaatttc

SEQ ID NO: 2449 - DNA, 695 bp, Gossypium hirsutum
  Clone ID: GOSHI-09MAY01-C91403_1
attaatagaaataataatgaattctgcttcttattgaaaacttcctatttgttaaaaatacaagccttaggaaggaaaaataaaatgaaatagaaggctagttatttccacccggcgaagaggtagatgagggtctacttggatttctaatattgcgaagatatgctacttgcgtgattaagttgacaatgaatgaattaattaggtactgttggagaaggaagcaaccatttggtagcttcaacatagtcaagaaccaagaatggttgagcttctgcatccggtagttgtttgacgaatggctcccgtgtcttgggattggcgccttgccccgtgcatttatattctccatagtaaacagttttggctcgttcaggttggagattatgagaccaaccagcaggattgacaacgttgcccatttcagtatatgcataaacaacccttgggctgctcttccaggccctgcccaaaaatgcattcttcgctgttccagaaatgctaccatgcacaaacgaataacccgtgtcctctgatgaactttctctcgcttgtgctgtaattactgtaagtcccggatctccttccacaaattttttgtgttcagatacaaagatttcccgcttccaaaaatgaaatcaacagtaccacgaatatggcaatccttaaagaaatggttgccccggacgcgtggg

SEQ ID NO: 2450 - DNA, 1132 bp, Gossypium hirsutum
  Clone ID: GOSHI-09MAY01-C91603_1
tcgttttaatcaaagctgcttctgtgaaagggatgagctacgtcgtcttcactgcctactgttatattttaggaacccttgttttcctcctcctagtctccctctttaaaagcaaatcagtgctccctcaattgaagtaccctcttttttccagaattttccttattggactttttgggttttcaggtcaattatgcatgtacaaaggcttacaacttagttccccaactctggcttcagccattagcaatctcacaccagcttttaccttcatacttgctgtcttcttcaggattgaaaaagtagcatttagaagttcaagcagtcgagctaaaatcatgggcaccttttcatcaatatgtggtgcattagtgattattttttacaagggccccaaagttttttcattatcatcatctgctatacaccaaaggcctctagggttaatgtcatctgaatcaaattggatcattggtggcctcctactagctgttgcctttgttcttgtttcgttggggtatattatccagtctcaaataatgaagatttaccctgaagaggttactgtaaatttcttttacaacttgttcgggaccattatctctctaccaatatgcttccttgctgaaccaaacttaagttcctggagactaagttctgatttagctgctgttgctgtcttatactcgggactttttgggttctcctttttatgcgttgtacacatatggggcatacacttgaaggggcctgtatttgttgcaagtttcaagccaacttcaattgccattgcagttgttatgagtgccatattccttggcgaagcaatatttcttggaagtgtgattggaagcctaattttatgtacgggactgtattgcgtattatggggaaaagcaaaagaagaagaagaaacgattgatgatgattgtggcctaagcacccccattaatggaagggtccctttattgcgaagccaacaaagttgaacaaccggcttaccttcttgaatgtttttccactctccttggcatcctaaaaacaatcattactcaatgcctatccattcgatccaattggatcgaatttaatcagtttcaattaagtttatttgataaatcaatattttact

SEQ ID NO: 2451 - DNA, 839 bp, Gossypium hirsutum
  Clone ID: GOSHI-09MAY01-C91033_1
gtcgacccagcgttcgcggcgcgtgggctttgcaaaactttaggagatcggtttatcatcaaacaagttacaaagacagaattagaatcatttgttaagtttggaccagcttatttcaaatatttgtctgagtcaatcaatacaagaagcccaacttgcctggccaagatattgggcatataccaggtttcatgagggcaccttaaaggagggagggagtccaaaatggacatgttggtgatggaaaatcttctcttcaggcgtaatgttacaaggctttatgaccttaaaggatcatctcggtctaggtataatcctgatacaagtggcagcaacaaagttcttctggatcagaatttgattgaagcgatgccgacttctccaatttttgttggaagcaaggcaaaacggttgttggagagggctgtctggaatgacacttcctttcttgcattaatcgacgtaatggactactcattacttgttggtgtggatgaggaaaaacacgagcttattcttggaataatcgatttcatgaggcaatacacatgggacaaacaccttgaaacatgggtgaagacctcaggcatcctcggagggcaaaacacctcaccgacagtgatatcaccccaacaatacaagaaacgattcagaaaagccatgacagcttattttctcatggtgccagatcagtggtctcctccaacgattgttccaagcggatcacagacagacctttgtgaagaaaataataacaggtcacaaagtggtcttcttcaacaatgatgtgcaatccttctgcctgtgtgtcaagactcgatatgtaaagtcaatacctt

SEQ ID NO: 2452 - DNA, 769 bp, Gossypium hirsutum
  Clone ID: GOSHI-09MAY01-C91353_1
aaatatatgagacatttaaaacttcattaaaaaagtttttgagatatacaaatacaatacactcgaaaaaaagagcatattcgaataactttcctgatataataatgcatcgaccaagttttttttatacaacattttttcccataaaattcctaagcatccactaagtctaatgcttatggttgcactgaaaaaaaaaataggtgccaaaatggtgtcctacccataaatctgccacattttacattttcatttttcatagtttcttataaaaaaatacatgtaaattctctccctatggcttattttagattaaataaaagacataacttgtgcttgcaattaagcaactcttattcaggctaaaatggaaaacagtgtgacctaatatcagcacaagcaaaagtagccttctttgtacattttgtagctaaacatcatcgtattacctatgagcagatgtatgcggcatagggtatgtcacgggtgcacctggaaccactgctcctggtaatgtagctctgactccgtaagccatatgtgccggagcaggaaggttcactggcgtgccaactgctgagatgaggggacctcctattggttgccccatagttggaactccatgcacactgatacagggtggtgcaacagaatgtccgggcggctgtttggttgattttgctgcagaacccccggatgcggtgtcgtttgattgaccggtgatcggaccttggggtgctgaaacatccccattgccaacactggtaat

SEQ ID NO: 2453 - DNA, 1000 bp, Gossypium hirsutum
  Clone ID: GOSHI-09MAY01-C91323_1
ctttatcgtatggcgtggggcatagacatgaggcggggaatctacaactcttctggatgacaatgattgacacactatggcaaagccttgttctgttctatatacctctattcacatataaggagagcacaattgatatatggagcatgggcagtttgtggactatagcagttgttattcttgttaatatacacttggcaatggacattcggcgctgggtattcattactcatgctgcagtgtggggatcaataattatcacatatgcctgtatggtagtactggattctatacctgtcttcccaaattactggacaatctaccatctggtgaagtcacccacctattggctcaccattttgcttataataattgtggctttacttcctcgttttcttttcaaagttatacatcagattttttggccttcagatatccaaatagccagagaagccgagatattaagaaaagtggctcctaatttgaggtcaaagccagatgaagactccagttaacatgtacattacaccctgttactcaagtctatccttcatatggttttcctgtggcatgcaattgtaagttatgatgatgagtttggaaaaatgctgaatttgccgcagcttgtgaaacatgaatgaaaagcacagcagaataatcaatcgagtttcttatggaaagggaaaaggttggtataagggaagtggcctggtgctttatatgtctgatgaagaaggaaacaaaatgtggaaatttgcctccccccaacaaacagtcttctccagaattcggggaaaaatataaaaagggtgaaatgaatgcttggtttttgtgagtaaatagaagaagtccatctagagtgcttgttaggagggtgttagctatcacagagcattcagagtgaaatgagtccattaaaggaaacaaaaaaaggtggataactgtatacgtatatataatatatattaaaatagctgtgtagaaatcaggttaccctttt

SEQ ID NO: 2454 - DNA, 646 bp, Gossypium hirsutum
  Clone ID: GOSHI-09MAY01-C91253_1
cttcaacgcagagagagagagggggggaaataaaaataaaagtacagagtaagggagaaaacgccttcaaaaaagaaaggaaaagaactgtaaaaagaagggaaaaaaatagtaggaaataattagctttcgatttagaaacattggatttcaaatctcagttcttcaatttctgaaaggaacgggaggttcttggccatggcaaattctaagggctcaacaaacataaggaactttatggtttctggaaagcatgctttactccctccgaaaagtccatttcccactgtttccccagcatatactgattatgtccccaacagtgttattgggtcaaaagcagttcaaaagcctagagaaggaaatacacatcaccaacgcacttcctccgaaagcctccgaatggaggaacagccttcttggcttgacgatctccttaatgaaccagagactcctgtgcgcagaggaggtcatcgacgttcttcaagtgactcttttgcatatattgatgcatctagtgctcctaacctagattatgcagctcaagatgagttcagatttcaaaatatgattaacacaccatcttgggcatctcaagatgctaggctttcctctctctacagtgatgtgaacttggttagacact

SEQ ID NO: 2455 - DNA, 623 bp, Gossypium hirsutum
  Clone ID: GOSHI-09MAY01-C92903_1
ggtcaaacacgagccatgaaatagttataatgctagaaaaggtaagtagcaacgagcatacatgaggtcataatctggaacaagaaaatgatgaactagtctttcagctcgatctggtggcataagagtaaagaataactagaataggtaagcccatctacaaacaaaatggtacctaccatccactagccttcccgaattagttaagaccaataagggtcggtgatcagatttcaatttaaaaggatgtcgcacgatggtgtttggcgcaaaattctaccattccttattgcaaattgaacgatcaagtctctgaaacaactaccctctattccatgtgaacattggccccactggttcaagctgtactagcatcctctaacgattcgtcactacaaccatcaacctcaactacctcgtccatcatttttgaactctctccaatgtcgcactacagacgatatagtatttctcctatcactatcggaaccgaaaaccttggttcgtcattcgctaccaaaggctaaggttcttagccagtgttctcacccgcttctcctccaaccattccattcggttgcggaccagattttctcccatattgtccagatgggaacacgaac

SEQ ID NO: 2456 - DNA, 576 bp, Gossypium hirsutum
  Clone ID: GOSHI-09MAY01-C92923_1
aaaaaaaacacactacctcaataaatcgagagaaaattcgttcatggaattcaaacctgagacttcgaataatgcctttctaatactacaaccataccatacaattatattttaggatttcagggtatatataaatatatatgttcgttctccatattcctacaacatgtaaatatctttagaatacacactctgaaacccaaaccctattcactacaaaatagtttctcttacccatttttttccttctaatctctctgccccagtgatgaaatggaacctccaaccctaaagcacccccaactgccttctaaattttattcactgtcagattcatttcctgaatctatgttcatcggctgaggatttttatatgcattcctttcaacatcgtatcgtcttttatctactttagcctttgcttcatatggttctttttcctcctctgacagctttttccacttttctccgagtattctcgatatctcagcaaacgaagctccaggattagttttctttatgttctccctctccacttgggaaaaaaacatgaaaccccacatagccctctttggg

SEQ ID NO: 2457 - DNA, 537 bp, Gossypium hirsutum
  Clone ID: GOSHI-09MAY01-C92533_1
ttgatgatgaatacataaacgatttcagaagcaagaatgatgatgatgaatctatcgtatacactgagaatgtggtaaacagtagcgaggaaactgttgcagcgattaggaaattagacaactaccatgatttgctcattgttgggagaggacatggcgtgatgtcgccattaacaaccggccttaccgattggagtgagtgcccggggctcggtgcgatcggagatattctagcggagtcggatttttcgtccaccgtatctgtgctagtaattcaacagtatattgggtcatcccaacatgaattgactggatcaccgcatagcacatctcaatccgacgacgagcttatccatcgccggacatggtcaccaaagaaaactgattatatttgacttttaaatctagaattccactccatccaaattccaattagccttttgtatgtctaagtagaatcagtgttggattatagcattactgatttttttttaaaggtgaactttttattcttaattgatttggaagtagaatttc

SEQ ID NO: 2458 - DNA, 769 bp, Gossypium hirsutum
  Clone ID: GOSHI-09MAY01-C92523_1
aaaaaacaaataataattaagtatatatccttggaatttcctaagatataaaggacaatacataatttcaaaaagtagtgtagtgtacggttgcaatcagggtaaaaatattcctcccatgagaggactaatgttcttctaggacacgagacaacctctctaaactaagttattcaaaatgagaataaaaataatatttgcggtaggcaaggcaaaatttggaatgtaataaataacattgcaatgaatttgatgacccatctgtagttgccatatgattatgccccaccagaaccatacttctttccgaaaacaatcatttggagcttatcatagcctgcaagcacacccgcaccagcaaccgcacgcaggatgttggcaccagctcccttaaacagtgacttaaagccctccttcttaaggatttgcgagaacgcatccatcgagctcttgtacttcacggcttcacccgatgtcatcatcattcttctgcggacagtgtcgatgggataggaggcaagacctgctccatttgtaataacccaaccaagagcaaagctagcaaagaagctatcctgcaactttccaacaaggataaccggctttagagaatcatacattccgaagtacaggcctcggtacacaatgataccaacacatgaaatgttgaaacctctgtagaggccagcaataccatctgatttgagagtcttggtgtatacatcaaccaagccatgaatgctctccctccgttttgcggctcgaacgc

SEQ ID NO: 2459 - DNA, 473 bp, Gossypium hirsutum
  Clone ID: GOSHI-09MAY01-C92403_1
agcgtgtgctgaggacattgccatctgggtaaagaagtacatctcatttcgaggtaatgagttatcttattaagtgggaggtttcaaatgtagaaaaagatttgcagcagtgcatctttttctgttattcgatcaacaaagagaatgagaactcttattaagtgggaggttaaaatgcagaaaaagatttgcagcagtgcatcattttcagttattcgatcgacaaaagataatgagatgatgcagggttgccgtaaacaggatcgggataatcatatcccatttattcacttattggtaatttatcattctaactcgtacctcgcttttgggtttcccccatatcctgttgtgcttgtgaagatgagattactcctcttgactgctgatgtaacaattttttttttctttccaactgtgaattaaaatgtatcatttctcgtgaatagagagttttgttatgtatttacagt

SEQ ID NO: 2460 - DNA, 517 bp, Gossypium hirsutum
  Clone ID: GOSHI-09MAY01-C92053_1
ataggatgaaaatgtttatataataaaaataagatgaacaatagttcttcaaatccctcaatctcattggcacttgtgttaaaaagtacaaaaaaagggcatgtttgacattggaaatcttccaaaaccaaaaggagaatttcagacaaaggactattcattttgatagtaaagtcctgaattctagatgcattattactgcaacaatcataaaaaagctgacaaagattccaacaagaagagccctatcaacaaaaccccagccgcccggggcccaatcctgctcattctctagccccaaggcaatgtcattctccaactttttttgcgcatggttccttcgcttccttataaaccagtgaataggatttttgctggctcgattttccattggactatcattcttggaaaccgtgcatttatccaatttaatctgtcccccgcagatgtctggtccacaagagcaaggttctggctcctttgaacatgcacaacactcgtactggttggagcaagg

SEQ ID NO: 2461 - DNA, 324 bp, Gossypium hirsutum
  Clone ID: GOSHI-09MAY01-C92043_1
agttgaataatactttattatagctttgctttttcttggtaaagactttcaaacgatgaaagagctttaactttcaaccaaggtacaaacaaggatacgataggaaaccaaaggcagatgtgcttagttcgattggaggatatgccccgtcaacaacagtccatcaaatgttttcaaggctaaaattatttaaaattcataaccaagatcgactccaactttattgatttaagacttgggaataaatgggttgttatatacataggaataacgacaaattatgaaatagcggcggactaccaacaatttttgatgctaggtcaa

SEQ ID NO: 2462 - DNA, 724 bp, Gossypium hirsutum
  Clone ID: GOSHI-09MAY01-C92073_1
aaaaggggggcccctttttttttttttttttttttttaaattttatttttttttatttttttttatttttttttttcttgggggttttttttttttttttttttttttttttttttttttttaaaaatatttttttaatcaccaaattattttaattaattaatttatatattaaccaaaaacaaaaaaaaaacaaaatgagatagttgtccctggaaggagctgatacctttgctgcatcagtaaattaatatataatatataaaaatattatagaaatgtataatataatttagaaattaagcctggattattgatttcaactcaacttttccatggtgcttcttggatttcttccctttcttcttccctttcccacggtgcttcttcccttttccatggtgcttctttttcttgtgtttatgtttcttcagctttatctcccctttgtgtgcggctttactagcggaaagatttggggagatagggatcaccccattattttcaggtttactagccgaaagatctggggagatagggatcaccccattattttcaggtttactagcggaaagatctggggagataggcatcaccccattattttcaggtttactagcggaaagatctggggagatagggatcaacccactgttttcgggtttactagcgggaacatctggggaggtagggatgaacccattgttttcgggtttactagcgg

SEQ ID NO: 2463 - DNA, 309 bp, Gossypium hirsutum
  Clone ID: GOSHI-09MAY01-C92003_1
aaaaaagcaacatcaaatattttaatgtatagttataaacctctcacatgacttaaactgtgccctagagttagttcttttaacctatatttcaaaaaaacacaaatttaataaccaactgccctttattttttcttcagttgatattacactcatttaggaactataatccatctaccaacatgatcatcgttatcatatggtattattggtctgatgttgatcggtttcgtcgggattttcagtttcatctgggggggttacagtttcagagtttaccttactttcatttgaaaatttgttgttttc

SEQ ID NO: 2464 - DNA, 481 bp, Gossypium hirsutum
  Clone ID: GOSHI-09MAY01-C92243_1
ggagcagcccaaatttgatcgggctaaaattggataaataaatagtccattacaggccagtttacaaaggcccaaataccaaaacccaacacccgggtacaacccaattagcctaaacctttggcccaaaatttacccaacctaaatggggcccaatgcctaaacagaatttggaaaccctaggtttccagatgcttcgcgccgtaatcaccccagcagtcacgccccttcaacttctggcgttccatctgccccaatcgacgccatgattcccggcttcgaatctggccgtagttgaagcccaaggaaagcagatcagggccagcagcgtcaccatcagggcctgatcatctggattcgctgatttccgggcgagacatcattaaatttcttcaggggtttgagacgtttcgaactctaaccgccgtacgtgggggcgttgatgatggcgcgtgggcccccaatgatcggagcgtggccg

SEQ ID NO: 2465 - DNA, 585 bp, Gossypium hirsutum
  Clone ID: GOSHI-09MAY01-C93993_1
tctctcttttcactctcccctcaagctccggcctaggtccggtcgaactccggtcatcgggccacctcccgtccgctgccgtacacggtggctggagttccaaaaaaaaggcctttttagctttttgactccccaaactccgatctggggtcagtttctttagaagattgcccaaaagtcgccagaaaaaaagagaaaacctttcgactttttagggttctaaaaaaacctttctatataaaaaggaggtcactgttcctcgacagtgacgacctcggttgcttgcggagtcggaggatcgaccaccaggtaacagaaacgtcaaacgcgtgtggctgtggtggtgtgttggggaggagcaacggcagcttgtaggctagggtttcttttttctttgctgaaagttaaagttgtgggtttttgggctgttagggttttaatttatttgggcttttgttttttgttgttttagggcttgtaatggactgttttgtgattttgaagaaatagtgtccatttgtaagattttatttttattttttgtgattttgatgccttaatcaattccaatatgtttaagttgaa

SEQ ID NO: 2466 - DNA, 787 bp, Gossypium hirsutum
  Clone ID: GOSHI-09MAY01-C93983_1
cggccgcgtgggcggacgcgtgggcgagccagctatttattgaagctacaggcactggtacggtccctgctattgctgtttccgttaatggaactctcaagataccaacttcttcagggaaacaagaaggcgagttgccaaaaaaacgtagagaagaccctccaacagtgagttcattgacattaatgagcatcaaagttcggtgtcttcaggattggcacccattgctcccatgacttgtaacagtttcaatttgaattcacaagggttggttcctatatggcctatgggtacttttagcgtactccctgctgcacctggttcaaaccaggcacagttgtgggcgattccagcaactgcaacgccgtttttttaacgtcacaggtcgaccaatatctagctttgtgtctgctatgcaaccagaggtgcaggattccagcgttgggtcgatgggctcaagtgttttgcccacttctagttcaggtgctactagtgttagtaacggtaataatagttcaaaccatagtactacgcagatgcttagggaattttctttggagattctcgataagagagagcttcaattcttgggttgtcccgcaaaccagcaagccccatgttcgaaaccttgatcccaaacactaggttaagtttctttgatttcgatgatacagagtagagttgttaggctcaggaattttctctttttatataaatatttgtagtaaaaaaaattgggaaaaaagttccaaacataaaaagtttatcaaaagagttttttttggcc

SEQ ID NO: 2467 - DNA, 546 bp, Gossypium hirsutum
  Clone ID: GOSHI-09MAY01-C93923_1
cggagcgtgggcggacgcgtgggtttcgagcttgttaagcccggatctctctcagttagatcgactcgattttgagatatgttactcttttcaacagtggctatttctttactgttgggatttgcaaactgaaggtcagagcttcgtaaaatgccactgacccaagaggcttgagggttaatgtttccagtgttttttcactgcaattcatggtgaatagggaaaaaatccatggttttttttctagttattttgttgcagaggaattcaatgaagactccgagcttaaatgattagaagattagaaaaccctcattgttagaatgttcaatttggtttggagaaaggtggtgtttgataaccaggagaatccctagaagaatagttgagaaggttgagaatttttttatttaatatttttactttaaaagaaccttttaatatttttaatatttttttaaattattgatgtgacattactagattaacaattaatacatgtggcatccatgtcagtacgctgacggcaccataatttaaaacata

SEQ ID NO: 2468 - DNA, 369 bp, Gossypium hirsutum
  Clone ID: GOSHI-09MAY01-C93843_1
cccaactcccataccttcccttctctccacctgaaatggggaatctctcttttcctcaaaagggtctcaagattgggtgtccccgaaacttcctggaggcccaagtgcccttactatcagcccccaccactgattctggccaagggagtggatgaagcacaatgggtcgatgcgcaaaagcgagagtatgttaggaagaggctgagaaggaaacgcctagaaagccatgtccaccctttaattccgattttgattcccgatttattattgttctccctgctctggttcaatccatttcatcttaatgattcctgacaattttccttgtctcagaattgtgtaataataagtacataactcttatgtctt

SEQ ID NO: 2469 - DNA, 873 bp, Gossypium hirsutum
  Clone ID: GOSHI-09MAY01-C93583_1
aaacaaaagcttattatcttgttattgatgttagcattagcattagcattaatttaatctaatataataataatagtattacacaagaaaacatgattattctcttgttaatcgaaaaccttttcatcctcttccttctttctttttttcggtctaccatgattgaaagtaaacgataagagcattaaaaagctgccaccatagccttcgacatttctacttcttcttcatcatcttcctctgcatcccacagaaagttggcgtaagatcccagcaccatgcagtcgtcaggagaagcagtgacggctcggtcgaagtaagacttagcacggctctcgtctctgtgtcgttcccagattaggttcccgtacaaagacaaaacttccccatctccagggctggctaagatagctctcccgtaatactcctctgctctctccatatccttttccacctgcaaaaccataatgcaatatccatcagattttcgaaagatcaaaacttttctatgtattagtgatgtcaaacttttttacctcgtgtaagaacctgccgtagtttctcaaaagaagtgggtcaccggggtttagtttcaacatttcacgataataatcgcccatcttccccttatcaccgtacgaatcatctccgttatcaccgccaattttcccgccagttccaaatccatcaccggaaaatccaatttcttccatcgagatcccgaattccgttcggaatccaccgtctatttcataatccgacacatactcctcctccggtatccccgccgtaaaacaccgagatccaccgggaacccgagtctccgacttgataatatcagtctcagacaaagctcgcttatttgcgcgcgag

SEQ ID NO: 2470 - DNA, 543 bp, Gossypium hirsutum
  Clone ID: GOSHI-09MAY01-C93553_1
accacctccagggccagctgatttgaatataaactccgctgtttaccctggaggccctcccgtacctgttcaagctcctaagcttttgaaatttgttgatacaacagagataacaagaggaccacaagaggttcctggatattgggttgtttctggggcaagattagtcgtcaagaagggaaggatctctctcctggtaaagtattctttactgactgcactattacctgatgaagatgacattgatgagcactagcggattttcccttccacttatcaccttgctttctttgcccgctatgttagtaaatattaatagaaaaaagttactgaagatgagtatagagaatgggtagtggggagtggaaacataacaagtcatatttacagggataaacttaatggggatgggtgaatggatgggaggttaaagagcttaggagatataaattcaagttgcatttcttgtaatgtaaattttatcattgcttgtttctaatataaattcttcaagtttcatgctcaatgatgattatgatttgc

SEQ ID NO: 2471 - DNA, 752 bp, Gossypium hirsutum
  Clone ID: GOSHI-09MAY01-C93443_1
cattcatttctcaggccctctaatgaaaggaggctccccaacaggcgtggttcggacttatccagtccacctatctccttggaacccgaaacccaaaacccgaagtgtacagacactcgattccctcccggtttctggatcgttttccacggtgacaccaaaggccagcaaccattccaagtttagtggaaaatgtgggaggttacattgtgttgagtgtcatttgaatccggtaagtaagtccaaggacaagtcaaagggtactcaaaagtttaggacatgtaatttggccggtttcaaattttccgggttttctgccactggagttttggaatatttgtatagttttaatgatgatgatgatgatgatgagattggtaatcatgtcaatgatcatgattatgtctatgaggatgttggtacatacgttcttaacgacaacgacgacaatgatgattttctggctaagttttggtctctgcatgacaagcagaacgatgacgacgacgacgacgacgatacgagttattgtgatgtggatttcatgctagacattgaggaagatgaagggtggtgtttattgagagaactgtgattggcagactcaatctttccatgtattgccttttgtttgtatttagcctttttctaaataaaacaatgctctattaaatacccaaacaaaaggtgcatacaaacatgaattaaaaagaattaaaagggaatttccggacagccttctatttccatcc

SEQ ID NO: 2472 - DNA, 500 bp, Gossypium hirsutum
  Clone ID: GOSHI-09MAY01-C93433_1
tgttggtcgtcttgagatgaagagatggagttgggttatttatacccttcatggtgaggtcctcacaatataaggtgtcttgtgagggggagctactaattaagtcatggagggcccttaaacacgtgcttctgaatatatttgcaggatgtattatcctgttgaagggctcacacatgagcattgatgcaataggcaagagtccaagtgtccttgcatgcaatgtctagcaaggtcatatagttagggccataggtggtaggctgtttagcaaatgtcagtctctgatgagctgtcgaggcgttccttggacaaggttttggtggtttcagccttccatagtcctaggccctacagccatgaaagatttgtttttcaatctttagtttaagtagatagtttaatattttaccattgctggaactcggctggtttctagacatcctaattatggttgttgcagattcacttgtcatgaaactgagacaaagattaatatg

SEQ ID NO: 2473 - DNA, 669 bp, Gossypium hirsutum
  Clone ID: GOSHI-09MAY01-C93673_1
ggcccgcccctctttttttcttttttttttttttttttttttctttttttttgaccactccaattctcaatatcaaatagttgacaagtttggacttttgaagtgcacagacccaatcttagactaaagacaaaagtttataaaaacaaagccggttgatttcagatttcaaagtttatttctcccaattatattcatggtaaaacaaaaacaaagctgtatgtaaaatactaagaatacaagaatcaatatgtaacatgataaaactaaaacaaaacaacaaccaaaaatagcaatctgtcagagcagtaaaatagaacacactactttatacagcatagagacagagcaacaaagaacagtagaataaaagggttcaaatctatgataaaatcgtgaaacacgaaaaacgtgaaatggtaaaagacagcaactttgtaaaacagtaaaaacgcaaacaaaaaagcaaagacaagcttaaaaacgcaaaacagtagaaaaagcgactcaaatctatgaaaaatgtttctttaacagcaaagaagttgaagaaaaagaaaaacagtaaagatatcaccttcgaaaaggaagagatatcggcaccgaaaatgggtagtttcttcgatagtaaagaaagcttccttttgttactctaaacgcttccctttt

SEQ ID NO: 2474 - DNA, 561 bp, Gossypium hirsutum
  Clone ID: LIB3825-012-Q1-K6-F4
gtttcttccttgtttttcttttcctttgttattctgctatctttagtcctttagttacgctgttttctctcgtttgtgtgttggcacttcgtataggtgcaggtgacatgggcggtcatacgcgtgcgatgaggctgaaggtggtggtggtggccattggtgaggagtgcggcggctgaaactgggggctagggtctagctgaaatgttgttgtggtaggactgggcgttttaggagcttgttgatacatatatgggccttgaggtatgttccagtgcctagaaattatcatgtaaatggactattggacttttattatccattattttttggttttaaataaaaaatatgaatatatgctagaataaagtagtgtgttctattttactgctctgacagattgctatttttggttgatgttttgttttagttttatcatgttacatattgattcttgtattcttagtattttacatacagctttgtttttgttataccatgaatataattgggacaaataaactttgaaatctaaaatcaaccggctttgtttttataaac

SEQ ID NO: 2475 - DNA, 532 bp, Gossypium hirsutum
  Clone ID: LIB3828-022-Q1-N6-F7
aagaaatcaaattacagatgttactaattacaagaacatacagcacaactgcagggtaaatgggcaaatcaaagttacaaactatgtcaagatgctggctatttatacaacaaatccaggaaactatgaaattaggtttaaatactatgggatatagaaaatatcgtcgctttccatatcataaacatctgttatggaagttgatgatgttggttcatctgtattaacaagtttagcctgcaatgactgcattgtattataatcccttccaaaaattaaagctgctaaacaataacactcccaacttgtatgatttgggcttctgcttttaaagactccactaaaagtgtatcaaatcataatactttataatatatttagaagtttgaatctcatttaaatgaaccaaccgattaaattaggaattgaaaattgactttcaaactagttttaaaccgtttgtgactactaattactaatataaaaaattccagaagcaggtgattaggggataaaataggtttacttacct

SEQ ID NO: 2476 - DNA, 540 bp, Gossypium hirsutum
  Clone ID: LIB3828-024-Q6-N6-D3
aaatcaaccccataaggaaatcaaattacagatgttactaattacaagaagcacatacagcacaactacagggtaaatgggcaaatcaaagttacaaactatgtcaagatgctggctatttatacaacaaattcaggaaactgtgaaattaggtttaaaaaaggtgagggggggggatactatgggaaataggaaagatcgtcgctttccatatcataaccatcagttatagaagttgatgttgttggttcatttgtattaacaagtttagccttagcttggcgatacttttcaagcatccggcgatattgttgacgtgcatctggagaatcaaccatagacaacacacgtgagactgcctcatcgattgctacatccactttctgtttgcggaacactttgagaatgtcctcttcttcatcatcaatgcaatccgactcactgcgaaaacctcgcaagcctacacctttccggcgccatcgaagtacaaccttgtctagaacaccaacagcccaacagataaccttgtagtttttcctt

SEQ ID NO: 2477 - DNA, 496 bp, Gossypium hirsutum
  Clone ID: LIB3825-006-Q1-N6-D1
aaatcaaccccataagaaataaaattacaggtgttactaattacaagaacatacagcacaactgggggggaaaggggcaaatcaaagttacaaactttgtcaaggaggctggctttttatacaacaaatccaggaaactatgaaattagggttaaatactatgggatataaaaaatatcggcgctttccatataaaaaacatctgttatggaagttgatgatgttggttcatctgtattaacaagtttagccttagcttggggatacttttaaagcatccggggatattgttgacgggcatttggagaatcaaccattgacaacacacgggagactgcctcatcgattggtacatccactttttgtttggggaacactttgaaaagggcctttttttcatcataaatgcaatccgactcactgggaaaacctcgcaagcctacacctttacggggccattgaagtacaaccttgtttagaacaccaacagcccaac

SEQ ID NO: 2478 - DNA, 505 bp, Gossypium hirsutum
  Clone ID: GOSHI-09MAY01-C93103_1
ggggccattaataaaaaagggcctaaatcaaaaaacattttttttctagattttttattagaccctcaaaaataaaaattcccccctaatcctttttttttaattctaaaaaaaattgggctaaaaatttattcattccctttccatatttcagttccacaacttacccctatagtaattggcttcataaccatcatcttcttcttctttacataattccaacggttgctttacagccttgtgaaaacccctaatgccccgcgaagaagatggcgaagccctgggggtcccatctaaagccaaacatccctcgttccagattctccttattgggtaagacaccttcctgcttttggagaacttggggagacaatttcggcgtgatttgtcgtgaagggcacaaccccaattacgggggtaccggcgacgttcaatgacaatatcacaactagataaacatccttcgtagattgatcggaaagggccgtcggaaactccgacggcc

SEQ ID NO: 2479 - DNA, 560 bp, Gossypium hirsutum
  Clone ID: GOSHI-09MAY01-C93093_2
tttttttttttttttttttttttttttttttcctaaatgtgtaaggtctgaatttaaccatctctttaatgtcttacaacctttctgacctttgaataggtcccctactacaccttggtaattcaacgatgttaaatattctagaaaataagtaaatacctttgttcgtttaactagtttaacaatgtagtccaacccattttatcttctataagacccatctgtttatttgcaagtgctgagtagagctgttgagataccacaaatccactctctccataatccacccttcagccaaggaagccctaggcgctgcagcctccatgtgcgtccttggggcgcgctccgctcaagggacggcccccctgacaccggttacaccaaaatggcaagcttttgcctcgttgacccttagaacctgcaaaaatagagacaaaaagaaagcaagaggcagaaacgaagcaaaacagtagcaaggaacagaaaagcatatttgtatttggctatatagccacaaacacaaaaaaatgtgacacacacgatcaagcaatcaaaaaaaa

SEQ ID NO: 2480 - DNA, 697 bp, Gossypium hirsutum
  Clone ID: GOSHI-09MAY01-C93093_1
ataaaaattgaggctaaatttattgatttttttaaatttaaggtcaaattgacaaaaaaaaatgtaaacatcgataactaaatttgttattataccaatatctaaaatcggggccatcagatcggattgcaagaaacgcatgaaaaccgcaaaactaattcacccaaccaacaagactcctatttatactgaaaggcaatgcctatcatcgcataatcttgattcaacagggttctcatcagtctattaattagaggggctaaaacagtagttaatttttgtttatttctgttaatttgcttagttcattatgtagtcaggaaacagcacgttttagggaagggagtccttttaatgaaaacgctgtgttttagggggaaggcttagtttcaaaacgaggtgttttgacacgtagctgtaaccgaatgacggctgtactttccttttaagcatgctctgtgtaatgggccaaaactgcccgggcccattagaaactaaaatcaaaataaccaataaaaaaccctagctcattagaatggcccgcagcttgagcaccttcagccaaggaagccctaggcgctgcagcctccatgtgcgtccttggggcgcgctccgctcaagggacggcccccctgacaccggttacaccaaaatgccaagctcctccctcgttgacccttagaacctgcacgaacgc

SEQ ID NO: 2481 - DNA, 866 bp, Gossypium hirsutum
  Clone ID: GOSHI-09MAY01-C93043_1
agtcaaaaagaaaatggatataaggaaaaaggaaactcatgtatacgtaatatacagaatagtacatgattccttataaacgtggaaaaaaaaaaacttttcaagtaatttctaactgcctaaactttgacagaaaacatcctttgtgagaactattcctaactaattagaaaattccaagcattgccttggctcaagaatccatgtcagatatttacctcaacattttgcagtagtttgctctgctagcacctgccaacaatggtggatttccaagttgcaacaccataaatagacatttcaagttgaacaatttgccaaaccaagggagaaatatgtagatgttcctgggatacatttgtcagggaaaaaaaatataatatgcacaatcctgccaagagtctccagaggttatcagcactgcattcatgtggtggtattattttgcccaaaaagtgaaccaccttccatgtaatttgtcttgcagccaactaatgatactatttccccagtctcaagctggcctccaacaattaatggcagacatgtctggtcgacatggaaaaataccatgacctgaatttggagcaccagctggtaaattattggcagaagcaagggggaacccaacatttgaggatggtctttcaacaggtggtctaaagtaacctgcttcccggacaaacaatggaccacaaggtgatggatttcttcctgatatccacccaccatgctgattatcagtgttatattctccagcaggcattctccactgttcatcagcaacaaatggcctccagccatcatatgaggatacgaatgctgaggatgtggtggcatggcaggctttgtgaatgagaaatggc

SEQ ID NO: 2482 - DNA, 882 bp, Gossypium hirsutum
  Clone ID: GOSHI-09MAY01-C93023_1
attttttttttttttttttaacaaaaaaaattgaatgcaataatcttccttttttgaagtgttgtacattaagaaactctccagctgcaagacagtgaagggtcaaatcttgctcaattgaattcctttttcttttcccagaaaaagaagttagtatcgaccgattatatacagatggacagatggaagcattcgaatcagagcaactctaaccgatgtgctcactggtcacctccacagtcgttattgttgacactgctagtcaaggataaaagttccattagttcctgacggtactcgaggcctctaaggtagtgtcccaacagcatacaccagaagagaagacgagcaagatagtctcgtgttaaggaaattaacggctgtagctggagcgaagtatcctcaacgagttcggaacaattttcacttccaatatttacagttctggttgccgtgttctctgacagaggaaccttggaatgcatcctcggagaaagagtggcaaggagaccatggactacagagtggatagtttctttcaattcaggggaagacggttcagaaagctcaactaccttttcgggttgtagtgatcttaagtagtcaagtaaatcattcttttcttccccaacaaactgttgcatttgcatggcctcatttttcttctttaattcatgtagttcctttttcactgaagctagacgagactgcaaatgaagaatatatttatgagtttcaggggatatttcacccaggccttcaaattcaatatcttcaaattggttctcagtggttttttcagattcagatgacgaatctttttccttgaaagtacttttacttttgtaccatctaacacaatctcctgtaggtcaaagtttg

SEQ ID NO: 2483 - DNA, 721 bp, Gossypium hirsutum
  unsure (1)..(721): unsure at all n locations
  Clone ID: AI727884.1
caacctgaaganattccatacgccacgacgaatgatctcaagactggcgacaagagtagccagcgtttctcgatgcaaatcaaacttganattcaacacagtttggagccacgcanatctcagcaccacattcaaaccaatggctccaaatnatatatacttgtgaggaacaaggagtttttctctcaaccaaggtttcttggattgtcggtttagtagtccccagtcatacacgaagtcccagtacgtacaaaatattgctgcaatggccgacactatcccaantattactctccatccaatccccgtgttaacgtagtaagccgttctcaggcaaacggntacgatggtgaggaaatatttgagtccattgtatccttggaccggatctctctcctcgaacaggcggcgtaggcactggagaagacgagccatgtagggaagcaccgccacgatgaagtagaaagtcgcaaacacattactgtctctgcacttgttttccctgtgtttaaaatctccccatccgtagtagcaaacatagaactccaagctcctaatggcttgtacctggctagttaattgatcagctaagaagaaatcaggcagtgtgaccttgtatagtggagcgcagatactgtgaaacaagcatgtaaggaagaagaaacgattcgttcgatacaagattttgaatggcaggaacaggatgataagtagaaccagg

SEQ ID NO: 2484 - DNA, 429 bp, Gossypium hirsutum
  Clone ID: LIB3830-002-Q1-N6-B8
gggggccccccaaattttaacaccacattcaaaccctgaaattcaagtaatttggggggggctgattaactattgggggggggaggattcccctcccctttgggacccagacaaactaatggatggtaacttggataaaatcccaacggccccccctctttttacttgggaggaaaaaggggtttggctctcaaccaagggttaaaggaatggcggtttaataggccccagtcatacacgaagtcccagtacgtacaaaatattggtgcaatggccgacactatcccaactattactttccatccaatccccgtgttaacgtaataagccgttctcaggcaaacgggtacgatggggaggaaatatttgagtccattgtatccttggaccggatctttttcctcaaaagggggggtaggcactggaaaa

SEQ ID NO: 2485 - DNA, 800 bp, Gossypium hirsutum
  Clone ID: GOSHI-09MAY01-C88593_2
tcctcgcgtccgcccacgcgtccggggaatcagtctttggtatcggtgatataagacaatctcaggaatggctaggaaatcggtggataaatttgaaggaaaggcatgatcttgtgagtaccatactctgggccggaaagcaagacgtaagcagatcctataatttcaataccgacaaaaacaccatttgtgagagtggacagtgtggtaaagaagccactgagtgtaaaggttctgctgttgaaccaggaaatgagagggcacaagatgcgagtgttgttccagatctttcaaaggatggtcggctttctcagttgaagtggaagtcatctaggaagagaaaacgtgtgacttcgacctgtgtacggaagctgaattgcagtcgaaacctcatcaaaagcactgcacagtcagttgcttgtgaacgatttttgatccctgcatccttaaaagtcgataatgagaactgcaagaacataggtgatccgttattcagttcttcagtagtgccgccgctaacaagcttggtaatgactaggtgattagagttgttgctttctgttttgtttggaagtgttcatttcggaagtctggcattgcggcatccatctccctcttttatttcttgtatgtaactttcagcctatggggctcttaactaaaaaaatcttgcaaatttcaggctacagttttggatgcattataataacctggtagatctctaacttactaaacctcgtttgtctaggatgtttccattaggatatctgcttgttttgtattctatttattgtatttgg

SEQ ID NO: 2486 - DNA, 831 bp, Gossypium hirsutum
  Clone ID: GOSHI-09MAY01-C88593_1
gctaactcaagatagtggtatgagagggtgttggtttagagctcgtataattaagaagcacagaaataagatgaagttgcaataccaagacatccaggatgcagctaatgaagctaacaaattagaggaatggattttagcaaccaaggttgccacttctgatgaagtgggtattcgtgtttctggccggacaactattcgaccgtcttcacaattcaccaaaggtagtacttcatgtattggtgttgggtctgttgttgatgtctggtggcatgatggttggtgggaaggccttgttgttcaggagttggaagataaatttcgtgttcatttcccaggagaaaagcgggaatcagtctttggtatcggtgatataagacaatctcaggaatggctaggaaatcggtggataaatttgaaggaaaggcatgatcttgtgagtaccatcctccgggccggaaagcaagacgcaagcagatcctataatttcaataccgacaaaaacaccatttgggtgagtggacagtgtggtaaagaagccactgagggtaaagggtctgctgttgaaccaggaaatgagaggccacaagatgcgagtgttgttccagatctttcaaaggatggtcggctttctcagttgaggtggaagtctttggagagaaacggtgactcgaccgtgtacgaactatttgcagcgaacctatcaagcctcaagtcatgcttggacgatttgatctgctcttaaagcatagagactgagactaggatcgtttcgtctaatatacgcgtacactgtatgtaggatgtgtgtttgttggtgaggattcgagc

SEQ ID NO: 2487 - DNA, 488 bp, Gossypium hirsutum
  Clone ID: LIB3543-032-Q1-K1-A2
ttaagtaagcacagaaataagatgaagttgcaataccaagacatccagcatgcagctaatgaagctaacaaattataggaatggattttagcaaccatagttgccacttctgatgaagtgggtattcgtgtttctggccggacaactattcgaccgtcttcacaattcaccaaaggtagtacttcatgtattggtgttgggtctgttgttgatgtctggtggcatgatggttggtgggaaggccttgttgttcatgagttggaagataaatttcgtgttcattttccatgagaaaagcgggaatcagtgctttggtatcggtgatataagacattctcaggaatggatatgaaatcggaggataaatatgaaggaaaggcatgatcttgtgagtaccatcatccacgccggaaagcaagtagaaatgatagggcacaagatgctagtgttgttccagatctttcaaaggatggtcggctttctcagtt

SEQ ID NO: 2488 - DNA, 671 bp, Gossypium hirsutum
  Clone ID: GOSHI-09MAY01-C88153_1
gtaggatggccaccaatcagacattcagggagaacagcatggcctctaatttggcaaagaacagtgatgaagctgctggttgtctgtatgtaaaggtgagcatggatggagcaccatacttgaggaaggttgacctcaagacctacaataactatagggaattctcatcagctttggagaagatgttcagctgctttactatcgggcagtgcggttccaacggtgatggtctcagtgagagtcgtttgatggatcttctccacggatctgagtatgtgctgacatatgaagacaaggatggtgattggatgcttgttggtgatgttccatgggagatgttcaccgattcgtgtaggaggctacggataatgaaaggttcagaggcaatcggactagctccaagagccatggagaaatgcaagaaccagaactaatgcaaaagacctggaaaaaacacaggaaactttactcaacaactttatatacatatgtgtgtgctttcagatattacagtttgatgtatttagcacaagtaagagaaaaaggagattgtattaggcaaattatggcattgaagacatatccaattatttaaggttgtctggtttacctttcttttgttttgtttaatttttgttttaatcaaattgtttacttttggggtgctgtgt

SEQ ID NO: 2489 - DNA, 526 bp, Gossypium hirsutum
  Clone ID: uC-gsronu33B158d10b2
aaaaacaaactaccttccgggagagaggttggtggccctcctcagcctccaaagccaggtcaagacaagaacattcttgttccttctgcaaatgagcattccaatgctcctgcttcaaaggcacaggtggtaggatggccaccaatacggtcattccggaagaatacgatggcctcaaattcggcgaaaaacagtgaggatgccgctggttgcctctatgtaaaggtgagcatggatggtgcaccatacctgaggaaggttgatctcaagacctacaaaacctataaggaaatctcatcagctttggagaagatgttcacctgttttacacttgggcactgcagctccaatggacttgctgtacgagatggtctgagtgagagtcgtttgatggatcttctccacggatctgagtacgtgctgacttatgaagacaaggacggtgattggatgctggttggagatgttccgtgggagatgctcatcgatacctgtaagagactacggatagtgaaaggttcagagg

SEQ ID NO: 2490 - DNA, 884 bp, Gossypium hirsutum
  Clone ID: GOSHI-09MAY01-C88163_1
caagctccgatccctaccaaattctatttgtaagatgaggtcattgcgttttctggatgcccacttcaatgaactttgtggacttccgaatgaaatcgggagattgacaaatctcgaggtcctcaatgtgagcagcaatttctctgatctgacagaacttcctgagtcgcttggtgaattaaccaaccttaaagagcttgatctcagtaacaaccaaatccaggttcttcctgatacatttggcaggcttgacaacctgaagaaactgaatttggaacaaaatcctcttgtcattcctcctctagaagtagtagagcaaggggttgatgcagtgaagattttcatggcaaagaggtgggccgacaaacttgtggaggaagaaagaaagagcatgatagaagtaaatgaagaggaagagaatgggtggttgacacgcagtacaacttggttgaagcgctctgtttcagtggttggtgagactgtatcagggtaccttggaactgctggtcctagggaccctattctggacgaggagcgatgagttcactctcaccttcgcttttgctgccaatttcaattattcaagttttcctcggctttcctcgaagcatcatttccatggttgaaaagctaacaaattttctacctcttctgattgagattctcgattgcaggaaaataaattgggaagaacccttgttatttatttataacatttatttccatcatcagtagtgtgtatgctttgtagtacgcactggcccccacggcaccccataaattttggatcccctttgcatttagtaatttttatatcagaatttggctacagacaggcacgttcatttatgattttttattttattttattggttgtggatgtt

SEQ ID NO: 2491 - DNA, 666 bp, Gossypium hirsutum
  Clone ID: GOSHI-09MAY01-C88133_1
agattttgttgctaaagtaaaggaagcattggcaaatgagcctcaaccccttacacccgagcaaatatacaacctgtcgtgggaggctgccacccaaagattcgtagaatattcagagcttgacagagttttgaataacagacataatccagcaaaagtgggatcgaaaataattgcaaaatcgtcgtcattgccaaacctttcagagatagttgatgggggtttagcatttgcccactactgtcttacaggaaacgagttgcttagactttgcaccggggcaatacctggtacacgggattacgacaagcaacattgtaaagaccttcatctcttacccccacaagtggaaaatcctatctatggctggtaagtcaatataataactgtatcgacaatcctgtgcataatagttgtaggaggctgccaaccatgtttgttagtcttttttgcttaagaagacaggtgtgagatatattcagacagtatcctatgagttttgttgtcttgttctgtttttattgctgttctcctttgtattaatgcatagaaatagatatcaaaatatttttaatataggaaaaaccaaacaatcctttgctgtaagtaacaatgttttaggtgtcggcataagctggtaataaaatggtggcagttattcctttt

SEQ ID NO: 2492 - DNA, 792 bp, Gossypium hirsutum
  Clone ID: GOSHI-09MAY01-C88093_1
cggccgcgtgggatgggagcctccctttcttcgtctgatgaagctactagtagcctcacatgtttgtttcctacgcctctcctcttcccaccgggattaatgagaagggaatgtattatggggtgaacctgagacaaacaaagattttaatggtgtgtgggaggctgcaaggcaaaaaccagcctatatctgatttatacgtggacgaagtccctattccttccagtgtcatgattggcacttcccaggaattatacgactacatagcagcggagctagtaaaatttgtgtcggcacatcccgagaaagatgatgaagccccagcaaatgataagaaactggggttcaccgtctcatctggagatgatcaatctacagccatatcaggttccaacattaaattgaagaatttcgctgcagataccacaggggtaaaagatctgatcactggaatgaatcgagctctggagaaacatggtctgaaattgcgagttcatgcgctagtcgatgatatcgttggaaatttagctggtggcagatactatgataaagactgcgtggctgcaatcaccttaggaatgggtaccaatgctgcttatgtcgatactactcagtcggctcctagatggcatgattctttgccaaagaaaggcgagatagttgtttgcatggaatggggaaacttaatacatgccatcttccaataactcagtatgatacttctttggatgctgcaagttcgaaccccggccatcggattttcgaaaagagatttctggaatgtatttggga

SEQ ID NO: 2493 - DNA, 424 bp, Gossypium hirsutum
  Clone ID: GOSHI-09MAY01-C88333_1
cgcgtgagggggatagtaagggacgcggtggacatagagagggagttcgtatgcgatgctctcccctgcgcgttggttgggatgaacggcgagttaatgagtcggtacatcgagttcgtagcggatcggctgctgggagcgttagggtaccggaaagatgtacaatgtggtcaacccatttgattggatggaactgatatcgttgcaagggaaaaccaatttcttcgagaaaagggttggagagtatcaaaaggcggcggtcatgtcgagtttgaatggtaatggtggcacccctgagttcaagatggatgaagacttttagggtttagtctagtttagtttgtttgttcggttttggcttttgtattgtatctttttactttctaatgtctccctctccataaatttataaaataggttatat

SEQ ID NO: 2494 - DNA, 626 bp, Gossypium hirsutum
  Clone ID: LIB3543-050-Q6-K6-H9
ggtgagaactagtggagcaagggggggggggggcgttgcggttaaagaagatttcgccgacgaagaagatttcataaaggccggtggctctgagattctctttgttcaaatgcaacaaaataaagaaatgggtaaacagtcgaaattagcggataagttaccgcccatatcaactggggggggggtattggacctggtagttattggttgtggtccggctggtcttgctcttgctgcagagtctgctaagttgggtttaaatgttggactaattggccctgatcttccttttaccaataattatggagtatgggaagatgagtttaaagatcttggccttgaaagatgtattgagcatgtttggcgggacaccatagtataccttgatgatgataagcctattatgattggtcgtgcttatggacgtgttagtcgatacttgctccatgaggagttgttgaggaggtgtatcgagtcaggtgtaatgtatcttaactcgaagtagagacgattgttgaagctaccgatggtcataatcttgtagtttgtgaacacaatcgtgtcgttccttgctggcttgctactgttgcttcaggagcagcttcaagtaaactgttgcaatatga

SEQ ID NO: 2495 - DNA, 597 bp, Gossypium hirsutum
  unsure (1)..(597): unsure at all n locations
  Clone ID: LIB3828-005-Q1-K6-C9
cggacgcgtggggaaaacaacaatggcgacgtgaagaagagagangtttttcttaaaattatttttatttgtcaatttcagtggtgatgatgataacgacgtctgtcggagctcggaacttcgaggccgtggcggtttctaagtccgccacttggaggtctcataggagaaaagatccggtgagtacgaaaatggcggtttcgaataatcaacggttgatatcgttggacgtgagcggtagcggagcggtgagggagagttacgtggcggttaaggagggtttcgccgatgaagaagattacgtaaaagccggcggatctcaacttctcttcgttcaaatgcaacagcataaggaaatggatgagcaatcgaagttagcggacaagttaccaccaatatcaatcgaagacaatatactagacctagtggtcattggcagtggaccagctggtcttgcccttgctgcagagtctgctaagttgggtttaaatgttggactaataagccctgatcttcctttcaccaataattatggattgtgggaggatgagattaaagatcttggactcgaaaagtgtatggagcatgtttggccga

SEQ ID NO: 2496 - DNA, 634 bp, Gossypium hirsutum
  Clone ID: GOSHI-09MAY01-C89583_1
gacaatacaagtatacaccagtttcaggttacagagaggagaaaaaagagtctttggtgacagaagagatcaaagccagtgcttcagaagtataccatggagatgagatctgtcaagtgaaatccaagtctttgctggaggagatgggcatgcccagagggcttttgcccttgaaagacattgaagaatgtggatatgtgaaggagacagggttcgtgtggcttaaacagaagaagagcataacccacaagtttgaaaagattgggaagcctgtttcgtatgcaactgaagtcactgcagtgattgagaaaaacaggataaagaagctgaatggggttaagagcaaggagcttttgatttgggtcacactgagtgatatctatgttgatgatccagccactggcaaaatcactttcaagacccctgctgggctgtccagatcttaccctgtatctgcttttgagattgaaggcgaggaatcatccaaggagaagaactaggacaaggtgtcccaatttccattaggagaagaacccttcatctctgggttaatttaatattcatggttttggattgctgtcatttcctgttgagtgtctttaactagtagcattacttctagtaatcaatcaat

SEQ ID NO: 2497 - DNA, 496 bp, Gossypium hirsutum
  Clone ID: GOSHI-09MAY01-C89663_1
ctccgaaagcatgacagtggggatgtatctttagttatggtgagtgagacaaacaatttggtatctgcttcagaagatgggaaggtttatatatgggagattgaaacagtggattatgcagggtggagctgagcaggtcactaaaggacactttggacatagaagatgtgttgagggtggctacaaaagaccgaagcagagccattgatatgcttgagtctgcaatttcagcgtatgaaaggttgctggagctcattctcaaggaagccaagaaaggtcctagtagcagcaaaagtggaaacgaaaaacatagcctctaagacaatatatatattgcctctaaattcttctatgcaaaagtaaaatgaagacaaatgcaccttgttcgaatatgcctttcccctttctgttcttttttttcttggtatgcgcaacagcttttttgcctattgaaatcatgatttaaatattggagataatggttattttgtgatct

SEQ ID NO: 2498 - DNA, 665 bp, Gossypium hirsutum
  Clone ID: GOSHI-09MAY01-C89133_1
caaaccaatcaaatcaaaggcacctaaaatcctttccttcccctttactctcttcttctttcccccatttcctcacctacttttaccttcttttcctcttcctttgtgtttacacaatctaagctacccccatggcaactcccctccctatctgatcctgtgaccagttttttccaataccctctttctccttctctcttttttcattattaaaaccctaatggagactcttcatggttcggtaccagccgcgtgtgcggacaccgcagccaacggcaacacggtgacgccttttctgagcaaaaccttcgacgtggtggacgatccgtccaccgactcggtcgtatcgtggagtagtgataacaacagcttcgttgtctggaaagtgcccgagtttgcgagggaccttttgcccatgtattttaagcacaataacttctccagcttcgtcagacaacttaatacttatgtttaagtatgtgcttgtaattactaatcgattatggtcaggcattggggttcgactgagcgcatgatatgtgattcacttagatataaaacttcaatcctgctttatgcattgcggacttgctatattcggtttagcaagtgaacacgataatttatgtctttgattatcctaatctttttcctatagggtttta

SEQ ID NO: 2499 - DNA, 1211 bp, Gossypium hirsutum
  Clone ID: GOSHI-09MAY01-C89123_1
ccccgcgtccgcccacgcgtccgttacaataaaaaacagatcgaaatctgaaaatcttcatctcagacagaggagatttataaaaatggctaagctaagctgcgatttccggtaccttctcatccccgctgcattcgtattcatatacatccagatgcggcttttcaccacgcaatctgaatatgcagatcgaatggcagaagcggtcgatgcagagcaccattgtacgagtcaaatgcgactactaattgatcaaattagtatgcaacaagagcaaatcgtggccctggaagaggggaagaagcgaaaggatcaggagtgcgcacaattgaagactcttgttaatgatcttgaaaagaaagctcttcaaagagtaattgacaaaacacaggtacctgtggcagctgtagtaatcatggcgtgcaatcgtgctgattatctggaaaggacagttgcgtctgtcttaaagtatcagagctctgttgcttcgaagtatccactttttgtatctcaggatggatcagatccaagggttaaaactaaggctttgagttataaggagctaacttatatgcagcacatagattatgatcccgtgcatacagaccggcctggggaattgatcgcatactacaagattgcccgtcactacaaatgggcattggatgagttgttctacaagcacaattttgaccgagtaataatacttgaagatgatatggaaattgcccctgatttttttgattactttgaggcagctgctgcccttctcgacaaggacaagtcaattatggctgtttcctcatggaatgacaatgggcaaaagcagtttgtgtatgacccatatgcactttatcgctcagatttctttcctggtcttggctggatgcttactaaatctgtatggaatgagctatcaccaaaatggccaaaagcttactgggatgactggttgagattaaaaaataatcacaatggtcgacaattccttcgtcctgaagtatgcagaacatataattttggtgagcatggttcaagcatggggcagtttttcgaaaaataccttgcacctattaagatgaatgacgtcaggtggactggaagtccaggatttgagctacctaactgaggaaaaatatgcccaatactttgcagacattttgaaagcggcaaaacctgtccctggaacagattctgctcttatggcatta

SEQ ID NO: 2500 - DNA, 590 bp, Gossypium hirsutum
  unsure (1)..(590): unsure at all n locations
  Clone ID: LIB3829-029-Q6-K6-C11
gcactttatcgctcanattctttcctggtcttggctggatgcttactagatctgtatggaatgagctatcaccaaaatggccaaaagcttactgggatgactggttgagattaaaagagaatcacaaaggtcgacaattccttcgtcctgaagtgtgcagaacatataatttcggcgagcatgtatgtatcaccttgtcatttagaagatttcttgtttgaaattgttgtgatgacaacttttatgaatgttgttagctttgacgagaatctttgcttggtagaccatctgcctatgtgtgtgtcttccttggggataggaattaggtagtacatgaatgaggcacacagtccatatgttttctgtgcggaattttatgtgctatgattctatttcattgcttctgaaagaatgtacagtgaacttggacgaatataatgcctctatggcttcagtgtttttagttgaagagtttccttcttcaacttttggaatggcttgttttcatgcttaaacaaaattgagattccccaaattaggtgtgttttcatctctctttaacactgcataggcgcaacttcagtaaattt

SEQ ID NO: 2501 - DNA, 624 bp, Gossypium hirsutum
  Clone ID: GOSHI-09MAY01-C89043_1
cccagcgtccggtggcaggtagtcaggaacatatctggaggccacaaccaaaaccaaacctttctcctgcacacagcaaagaaggatgagaaagattttaactatgtaaaatccacagttccggtgggagtttcttcagaaatagtgagcaaaagtttccagccattgaagagaatacagccgaggttggaatgggcaaaaccccaacaaagtgcagtgccagctgagaaaaggtggccaagttctggatcgaatccttcagtttcttattccctggcatcacctttgcaggcctcacctccgctagcaaagacagaaagccgtaatgtggctgttggaagtgattataagaaacttcagccctcaattagggaaccagttatgatgatgcagcggcctcaatctgtaaatacaaagcaggttccagctacttgtataagctcatctcctcctggaacgaccccctttttgtatccaagcagtagtgttgaaattacaaagtctaatggctttatgccccatattgcaagtgctagaagccttagttccaacagcttgagttcaaatccgatgcatccccagctttactatccacagcagcaacagttcttaagcagcagtagt

SEQ ID NO: 2502 - DNA, 547 bp, Gossypium hirsutum
  Clone ID: LIB3582-032-P1-K1-F9
gaagagaagactgaaatattggatccaaaagtaagaggttgctgatgcatagtgtagatgcgttggagttaaggctcacatgggaagaagcacaggacttgcttcgtccacccccaagtgtcaggcctagcattgtgactattgaggaccatgaatttgaagaatatgatgaacccccagtttttggaaagaggactatatttggtgcctggccatctggggaacaggagcaatgggcacagtgcgatgattgctccaaatggcgaaggttaccagttgatgttctcctcccttcaaagtggacatgttctgataatgtttgggattctagcaggtgtgcatgctctgcaccagaggagatcggcccaaaggaactggagaatattctcaaagtgggtacagatttgaagaagacaaaagttcaagaaggccctaaggtagccccagaacctgaacctacaagcttggatgctctggcaagcgctgcaactctaggtgacaaaatgggtgatgtgggggagtcttcagttggagctacaacaaaaca

SEQ ID NO: 2503 - DNA, 188 bp, Gossypium hirsutum
  Clone ID: uC-gsflmaxxa119a11b1
tcccgggtcgttccacgcctccgggtaacaggagcaatgggcccagtgcgatgatggctccaaatggcgaaggttaccagttgatgatctcctcccttcaaagtggaaatgttctgataatgtttgggattctagcatgtgggcctgtaatgaccaaaacactctatccattattagcagttgaatat

SEQ ID NO: 2504 - DNA, 768 bp, Gossypium hirsutum
  Clone ID: GOSHI-09MAY01-C84813_1
cccacgcgtccggttgattcggatactggcaactaggtgtatgacacacgctgtttatttctgtagtgaggacctcagcccctcagaatatcatcattatggccttgctgcgcccctatatactcatttcacttctcctattaggagatatgcagatgtgattgtgcacaggttgcttgctgcatctctagggatcgataagcttccaccagttttccaggacagatctcaactaactagcattgctgataatctgaattatcgacataggaatgcccaaatggcaagcagggcctctgttgagctccatactctcatttacttcagaaaacggcccactgacacagaagccagaatagtgaagataaggtccaacgggttcattgtgtttgtgcccaaatatggaatagaaggcccggtgtacttgacaggcagaggagagaagggaagcggggagtggcatgtggacgagcagcagcagaagattgtaaagatggacaatagtaatagtaatagcctttcctacagtgttctgcaatcagtgaggatccacatggaggttgtggaaccccaacccaaccgccctaaactgcagcttactcttatttcctagaagtagaagataacatcaacatgcacaaaggaggagcttttattaggttatatagtgttgtattattatataagatgcaaatggaatgaatcttgttgtggtaattatagtaactggcctttggtttgggttaattgatgttggattgacacaag

SEQ ID NO: 2505 - DNA, 540 bp, Gossypium hirsutum
  Clone ID: GOSHI-09MAY01-C84613_1
ttttcttcactcccgtgctcttcagacttttcatatcccgcttgcttctcattatctctctctcgctcgggtgtcattttaatgtttcccctcattctttttcgtgagagggagaaacccaaagattttgcctgtcgcttctttttttggtgatattgaaatcccctgttttcgctatgtgcttgaaatctatcgatgtccgtctgtctgcttctttctggttcttgtattgtctactttcgtgagggataatccctaagctttctattgcaaaactcactgtgtcactctctgcttgaaatctattgttgcgggtctgtctatttctttctggttgccttgtcggagactgatttcaggtctgctgctttagacaattctctgggtcagtcacaaaggttgattacctgacattgaggcatggatttatcatggcacatttggcacctgaaaacgaaacacaatctgatttccagaaatacatcatgagatcattagacgatgattgtaaagtttttgtagggatcaggggtatcatac

SEQ ID NO: 2506 - DNA, 594 bp, Gossypium hirsutum
  Clone ID: GOSHI-09MAY01-C84143_1
gtttgttttggttgaaaccacatatagagtcatggttggttggtttgggttttaggaatggcggactccattttgagaacattagattatgaaagcaaaggatttgtagcagtggggctgctttgtctgatgatgatgatgatgattcaaaagggttatgcaagagaattccaagtgaactggggtcttcatagtggctccaatgctcaaacttacaatcaatgggctgaacacaacagatttcagattggtgactcacttgtgtttaactacgcaccaaacgaagattcagtgctatatgtgagtgaggatgcctacaagaactgcaatgtagagtcaccctggtccaaatacaccgatggccacgctgttttctcattggatcattcagggccataccatttcatcagtggtaccaaaggcaattgccaaaagaacgagaagttagtggtcgtcgtcttagctgatcggaccaaccgttcttccaccgcaaacgtaaccaacgctccttctccgcgccatctggttcggtcgatgtaatggtgccgtctcagcacccgtaaacgaaaccaatgctttcttctctcaccaacc

SEQ ID NO: 2507 - DNA, 605 bp, Gossypium hirsutum
  Clone ID: GOSHI-09MAY01-C84343_1
cccacgcgtccggcgtggtccttttctccttcgcacgcgttgcaccgtaccataccgaccaaacccctccaacaacctcccactagactgattaggaaatgttgttggggaacgccatagccggtgctcgtataatcatggcgtcgtcatccaaccacatcgtcttcgaacctgatgacatccctttcggctcttttgagtggttcgtctttgcgggagtttcctgcttgcttgtgctcttcgccggcataatgtccggccttaccttgggcttgatgtctctgggcctcgttgacctcgaaattcttcagagaagcggcactatcaccgagatgaagcaagctgctgttatcttaccagttcttaaaaagcagcatcagcttctcggaactctgcttctctgtaacgcttgtgccatggacgcttcttcctataacccttgataaaatttttcacccccttgttgcagtgtcgctgtctgttacttttgttctggcttttggagagattattccacaagcgatattgttaagatatggactctctgttggtggcaaatttgtgtggctcgtgcgtattcagattattatttgttatcccatcgc

SEQ ID NO: 2508 - DNA, 787 bp, Gossypium hirsutum
  Clone ID: GOSHI-09MAY01-C85913_1
tggactcgtgggcaaaaacccagaaaaaaaaaataagaacatgccagcccaggatgacgaggagcagggccaggtattcgttgatgaatccgacataatccacgaagttgatgtcgacgaagaagatcttcctgatgctgacgatgaggatgatactgaaaatattgaggatccagatgattccattcacatattcactggccatacgggtgaactttatgcagttgcctgtagcccaacagatccagtgttagtggctactgggggtggagatgataaggggttcctttggaagataggtcatgctgattgggcttctgagctccaaggccataccgattcagtctctactttagcctttagcagtgatggacaactacttgcatctggaggttttgacggacttgttaaagtttgggataccttcggaaatttcaaacgcacacttgagggtcctggaggtggcattgagtggattaggtggcacccaaaaggtcatctgatcttagccggatctgaggattgcactgcttggatgtggaatgctgataatgggaactgtcttaatgtattctcaggccatgatgccattgtgacctgtggtgattttacccctgatggcaaaacaatatgtactggttctgaagatgctacattgaggatctggaatccaagaagtggtgaaagcattcatgttgtaagaggtcatccatatcatacagaaagactgacgtgcttgtctataagtctgattcactttagctatactggttctaagatggctctg

SEQ ID NO: 2509 - DNA, 1133 bp, Gossypium hirsutum
  Clone ID: GOSHI-09MAY01-C85803_1
cacgcccgtccggcgcaaaatgaggaagaggcagtagtttataaaggtgcttcacaaagctgttacaacccaggggtttctcgacggtgtcgcgatctttagctgaatatacaagtaatccttcagtttgcttaccttcttaccctgcaacttttaggtcgcagagtctcccatgtggtttgaatgaagcatcggggtgtcccggttattatgatcagaacgatacaatgtgggttcagcctggagacataaatggtttgaaaggcccaccggccagattgcttgatctttcaggaggatgcatgcctcttacccgtgttcctgctgagtatcaaaagattttcggaagacctctttatgtggccgagtacggagcactcaaacttggtaatcttttcaaaaagatgggtgacacattggcaattgacggaaaaggtcataagaaattcgtttaccttagaaactggaaagcgaacccgagtgcacctcctttggttctaacaaggaaagacaagaaagggaagggtgttcgcgaggaaatcacggatgtcactgcaggtgctggctcatctgacgagttctccgatgaggaaagagtggtagttgacgaacgggatcagaggaagactgacgataatcttgagcaattcaaatacgagttgcaggaaattcttgtgagttattcctgcaggattttcttgggttgtttcgaagaaatatatcagcaacggtataagaagacattggactatagaaagctcagtgtggagaagctagaggagttgtttgacaaggtgagagatgttgtagtcttgcatgaagaaccagtaagcaaaaggaaatttctctgtgcagtaggtagctagaagaagatccaacagattcgtgcctgtaaactcgaataagaccgacagttgaggtatgttgatcactgcttggtctctgatctgtctctagtgtttttttttttctaaggtttcataagtgattagataggataggagaggtgcaattcatgcatggatttgtgaggctcatggattgtcattgtaactgatcaaaccactacatgtggaactctgttgtaaattaaaatcccaagcaataaatcttttgttcttttctggacttct

SEQ ID NO: 2510 - DNA, 736 bp, Gossypium hirsutum
  Clone ID: GOSHI-09MAY01-C85743_1
cttcaaaatccaaaccgattgaaacagtcggtgaaagaaaattgcaaggcaaaaacaaaccagagcaacataaagctttagcaatggaggcgagactctctgcatctctgggtctcccttcttctgacttaaatcatccgccagtcaacaccgacttcggttccctttacagccatttcatcactctcacttcatccccgaaaaatcctcaaaaacccctcaaacctctcctacatcacctctcctttgcctctgcctccatttctggaggtcctcaacctgcaaaacccaccaagtttcgtattccgctccctttttccaatttaactgaatcccagcaacccaaatcgcctaaattccccaaatggctagaacccagatcgagaaacagctccaaagcccaaatccttatgaaaaacttatctgtcttcgaaagagctctaatcggtgcaggtggtggtggaattgccggtgcatttacttacgtatgccttctcccactcgataccatcaaaaccaaaatgcagacaaagggtgcttccgagatttatgctaacacctttgatgcagtagtcaaaactttccagacgaatggtattctgggattttaccgaggagtttcagctgttattgtaggttcgacggcttcttcagctgtttattttgggacatgtgaatttggtaagtttttttgtccaaattggagtatccggctttgcttattcctccactgctg

SEQ ID NO: 2511 - DNA, 601 bp, Gossypium hirsutum
  unsure (1)..(601): unsure at all n locations
  Clone ID: LIB3582-054-P1-K1-B11
caagcatcaagnanaatcgcctagggaggtgaaagagcaggaaggagaaaaacatggaggctccagagcagcacaacaagtccagagttgtgaagattgactctgttgaatcctgggacttctattttaaccaagctacaaatcaaggctgcccaattgttgtacactttactgcttcatggtgtattccttcagtgaccatgaacccctattttgaagaactggcctcagcttttcaagatgccctgtttctcaccgttgatgttgatgatgttaaggaggtagcaacgaggatggaggtgaaggcaatgccaacatttttactgatgaaaggagggactgtagtagagaagttggtgggagcaaacccagaagagataaggaaaaggactgatgcctttatgcaatccaatcgtgtatatgtcgcatagtatggatgcttgtgatgtctagacatgtttgaacgtgtaaataaaggtgttcgcgttcttataagtgtgattctgaaatgtgatcgataagatgacactctagaacccgattcacttgaccatatntgntgtataaagcatgaagatatcgaatntcttgttttgttttt

SEQ ID NO: 2512 - DNA, 456 bp, Gossypium hirsutum
  Clone ID: uC-gsronu33B127g07b1
tttattgcatcaaggagaatcgcctagggaggtgaaagagcaggaaggagaaaaacatggaggctccagagcagcacaacaagtccagagttgtgaagattgactctgttgaatcctgggacttctattttaaccaagctacaaatcaaggctgcccagtaagctattcaatcagtcacctccatgtctattttctttctagtggtaatagtttagctttggtccttgtcctccatcattgttccttacaacaatcccatctgtcccctttgctttgtcttataaaagttccatatccacattccacggttcatgtctttatcataaatggtcagtctgttgatctcaaccaaggaattctgctatggtttattttttaatttcagttctttttcttctggatttgttggagattgctgtacactctactgcttcatggggtattccttcagtgac

SEQ ID NO: 2513 - DNA, 478 bp, Gossypium hirsutum
  Clone ID: GOSHI-09MAY01-C85173_1
gcgaaaaaaattctagaactctcccctcttttctctgctagggttttgaaccctagcctttgcgccgccgtgatgcctccatcgtggcccaccgcttgcggtggttgtggtcgcgcaaagagaggattttagccctcattgggaacgcgtctagaggtcgaaccttctcgactcaaaagccgaaagaaaggtcattggcttccctttaagcccgagtttgacgccaggagagaagttcccgacgacggcatcgcggggtcgctcaggtaagcctttttttccttttatttttgttttaaaatggatttgaaaccaaaaataaataaataaaaaatgatcgaaaagaaaaaaaaagaataaagaattgaatccaaaaacaaccttttttcttatttttgctctcgatttccctaatctcttgtaatacaacctttttttgtatccgaaaaccccctaaaatcattccccccattttttt

SEQ ID NO: 2514 - DNA, 443 bp, Gossypium hirsutum
  Clone ID: GOSHI-09MAY01-C86783_1
agcacttggatctgcaactcaagcagcccaaatgggagctatattggcaccatttgtggtgattttgggtggtggttttccatttctggtgtttggggtatgtggattgattggaggaatgcttgcatcttacttaccagagacattaaacaagccattgtatgacacaatgacaggattggaagagggagaacttgcttgaaagttgaatatataaagggtgtcaattatttgtcacacagagcagcttcatttcatcattgagcattttaagctggcaaaattggattttcgctgcaacagaatcagaaaaatcaggattttcagtaagggaacaagggctaacaagtgttatatggtttaagattgttgatgaacgaaatgtaggagaaccaagttgaataagctttgatgaacaatatacatattgaataattttatct

SEQ ID NO: 2515 - DNA, 369 bp, Gossypium hirsutum
  Clone ID: GOSHI-09MAY01-C86743_1
ttttttttcttttttttcccagcgcccgacgaaactggatttgtgagcctgatggtaggttgcactcacaagtgggttttggatgtcaatgttgatgttttgaaaaggctgagcaatggattgaggcagtggaatgaggaagaactggctatagctttgctcggacttggcggtgccactgctgccggcacagctgctgagttgattgtcgaaatcggagcttaaattttcaaatacccttatttctacttattcacttcatgtagatgcatttcattactttctaagaattttgaaacagggaattgatgaaaactaatctgaagtacatttctgtaaatatagtccaagcaattctttttgttttgt

SEQ ID NO: 2516 - DNA, 603 bp, Gossypium hirsutum
  Clone ID: GOSHI-09MAY01-C86243_1
cggccgcgtgggcggccgcgtgggaatggttgtttgaagttgaactggatcatgcagatgtactacttcgttattcctctgcacttgttcagggtgcaacaaatgttctctggattgatatccagtcaaacgccaggtgtttccagtctctctttaagtaccttctcgatgaagttgcattgaagcctacacggttaaataaaattccagtacaggcccaaagggatctttaccttttactttcgaggttcatattcttttataacgcagttgaaaaacttgaaagcttcttgaagctatgccccacatttccaaatgctatattggttgggggaccagcagatatatttgtgactgaagtagctgaccagcttcaaaaattaaaagtggagccagtcctgctgcattatcttgttcagattaaagttcttgggggaatgcaactgagaattccaacaagtacgaggttgaagacttgtttgtataactttacctcacccggtggcccaatgtatcctacaagggctgtgcgtcatgcagcttgggatgccttggatttgctgtatcctgttggacgtttccctttgcatcttttaagcatgt

SEQ ID NO: 2517 - DNA, 827 bp, Gossypium hirsutum
  Clone ID: GOSHI-09MAY01-C87993_1
tgctgattttggcatggctcgcctcttccccgaggatcaaacacatgtcaacacccgtgtagctggcacaaatggatatatggcaccggagtatgtgatgaacggacgtctttcagtgaaggcagatgtgttcagctttggggttgtggttctggagctgataagtggccagagaaactcatccttcaacttagatgtggatgctcatagtctgcttgaatgggcatataagctttacaagaaaggcaaaagcttggagttcatggaccctgtcttagcctcgtcagcagtccctgaacaagtagctatgtgcatccagatagggttactgtgcacgcaaggcgatccgcaattacgacctgacatgcgacgtgtagttattttgctgtcaaagagacctggcagtctagaagagccaacaagacccggagctctgggtgctcgacaccgaagatcccacaggcctcctgggttctcatccactgctggaacatcgggtgtttcggattcccattcatctgaatcatcctttaatacttatactgcttctgcatctgcttctacatcagctcttgcaagccccttgaaatcagatcggcatgggaagcgcccaattcagagttaaaagttttgctgcagattttgggctctatttattctttgtatattatagacccccccataatttttgtaggtacatgttaatggaggattagttggcaaaagtaagggtgtatagttttgttactaggtgtttttttttctcaagtttaatattttagaagttcaaaccatgcacatgtctgttaagtaattaaacttgagac

SEQ ID NO: 2518 - DNA, 837 bp, Gossypium hirsutum
  Clone ID: GOSHI-09MAY01-C87943_1
gctcagacttaagccccggctttttcactgttgagtactgcgaaagtcgtatctccgtaatgagcagaagcagatgggaaaatgcttacttctttggaaaagtggtagaatggtttgcgttgcagaccaatgtgcaaggcgatcaagtttatatcttaattctcccctctgattggaaaaggatcatgttctgctcatgcccgaaaatagtttctagcatatgttgaaaaagcaaagactaccggatggttggattcatcatttcattacggcaattccataaacggtaaagagaatggggcctgccaataataatgagagtttcttcagttcacaaccgttacatttcaaagctgttacaaacttaaaaaaagtgacctttcaagtgctatctgaacacaaatgaagtagctgttacaaagggggttaatacaccattgaaggacgttttaaagagcattttatactccttacattcggcagcaaccttttaagctacctgctattttgttctttttaaaaagaataaattaagcaatcaaatcctcattaaggagatgatgtttattcggctagccatgggacagttcaagagtcaatttcaagctttcatgaacattcattcagttgaattgaagagaattcaatgaagaagttatttgtttcaagaattccaagagtcttgatttttaaatcaatttttcttaattagcacattaagtgaatgtttgtgactatttggctaccctattttagcactataaataggtgaattcagatttttgtaaaggatacttttttgatgaattttgaatgaaactctgttcatttggtgag

SEQ ID NO: 2519 - DNA, 590 bp, Gossypium hirsutum
  unsure (1)..(590): unsure at all n locations
  Clone ID: LIB3828-023-Q6-K6-E6
gcgttcggtttttggcttgnacagtggtaggtggagttttagccccacacacctagaagagttggtagccaatttctggggacggactctattgggggcaaagtgcttcaaatggcaaagtcattgctaaaggctcgactttcaggagagcgcatcttgaggtgttggggtggtggtggtggcggtgggccgggatgggccgttgaagatgtgaaacacaaaataggaaagctgttagaggaatatgaatccggaggagacattagggaagcttatcgatgcataaaggagttaggcatgccattcttccaccacgaggttgtaaagaaagcaatggtgatggttatggagaaaaagaacgaaagactttggggtttgcttgcacattgttttggctcagggctgataaccatgaaccagatgacaaagggtttctcaagagtagaagaatcacttgatgacttggctcttgatgtgcctgatgcccgaaaacagtttctagcatatgtcgaaaaagcaaagactaccggatggttggattcatcgtttcattatggcaattccataaacggtaaaggaaatgggggcct

SEQ ID NO: 2520 - DNA, 632 bp, Gossypium hirsutum
  Clone ID: GOSHI-09MAY01-C87973_1
ggggaaaagccccctttgccggccatcgaccaccgcaccggtcgccggacgccggcgacgacgccgccgttcgcggtggccggaaaacaaaaaagctccctttttctcctttttgcgaatagagtccagatctggggttagaaaagccgaaatcccggcgaaaagggccaaaatcgaaagagacctttcggttcttcctctttccaccgccgccggaaacaggtgcggcaaaaggcatggtggtggcagacagcataggagagtgggagtggtgctggtggcagacaacatgggagaatgggaagaggcaagtgggagtctagggttttgggattgggcttggatgttgggctaggttgattttaagttttgggttttattattagggttattttgttgatatgggcccgggcaaaaatggacttttccattggcttttaaaatcatccccttatgaagtcccttacttcatatgttaacaagtcccaattttcataataaaaatgtacaacaattcccttttaattaataaattcattaacagtcaggtttaaattgcacacccatcattacattttttttaaatttctctcttcaagtaaacaaataattataaccccctttttctactt

SEQ ID NO: 2521 - DNA, 825 bp, Gossypium hirsutum
  Clone ID: GOSHI-09MAY01-C87833_1
ggtttagctgctgctactgttgggttgactttgaagcctctcaacatcttgaacaaattgtgccaccagtgcttaattctttttctgaccaagatagcagagttcgttattatgcttgtgaagctctatataacattgcaaaggttgtccgaggagattttatcatattctttaatcagatatttgatgctttgtgcaagctatcagctgattctgcagccaatgtgcagagtgctgctcaccttttagataggctagtgaaggacattgttacagaaagtgaccagttcagtattgaagaatttataccattgttgagggaacgcatgaatgtcttgaatccctatgtccgtcagtttttggttggatggataactgtactggacagtgttccagatattgacatgttgggtttcctacctgattttcttgatggtttgtttaatatgttaagtgattccagtcatgaaatacggcaacaagctgattcagcactttctgagtttctccaagagatcaagaattccccatccgtagattatggtcgcatggctgaaatactagtgcaaagggctgcttctcctgatgaattcactcggttaacagctatgacttggataaatgagtttgtaaaacttggtggagaccagcttgttccttactatgctgacatactcggagccattctcccctgcatgtctgataaagaagagaaaattagagggtttgctcgtgaaaccaatgaggagcttcgttcagtcaagggtgaaccagaaaaaacctttaatgtgggagccattctctccattgcaaggaggcaactgt

SEQ ID NO: 2522 - DNA, 604 bp, Gossypium hirsutum
  Clone ID: GOSHI-09MAY01-C87563_1
tttgttttcaaactttggaattttcttggtgagtgttttcaggggattctattattcattttgggctggtgggtttttgtttcttttgggaggagttgacctaaaaggctaacatcaaattggtgtctgattaggggattctctggtcttaggcagggatttgaaggtgtttttgaagtgggtttggtggctttttttcttcttcttctcaaatggggtccatgtaatgaatctggtgatggatttcaagcaatttcttttttctgtgatttacatgttaaagaagaagctacatttgggttaattttcaaggtctgtccttgtgagaaagagctgggttgagcacttcagcttggtgcgtgttttttgtgcaagggttaaagtaaaacaggggttttcgttttagatttagaaagaacctttgtttttaggccacttctggtatattgccatagactaaggggttcccttgagtttcccattttgatgcagggttaaagtttttgtcttttggattctggagtagccgtgtttggaattctgctgctgaagctgtttccatttccactgcgagaaaatggcttgcatgaaacttggatccaaa

SEQ ID NO: 2523 - DNA, 978 bp, Gossypium hirsutum
  Clone ID: GOSHI-09MAY01-C87493_1
catgtatccatcggtcaaaggaacccagatctcatcggagtactcaatggtcaagggggtcccaatggctcgattgttggtgaacatccgtatggtgaacttccttctagaacactttttgtaaggaacatcaatagcaatgttgaagactcagagttaaagactctttttgagcaatatggagatatccgaactctttatactgcctgcaaacatcgtgggtttgttatgatctcttattatgatataagggcagccagaaatgcaatgagggctctgcaaaacaaaccattgaggcgtagggaacttgatatacattattcaattccaaaggacaatgcatctgaaaaagatgtagatcaaggggcagtggtggtttacaaagttgattcctttgtttcaactgatgagcttcaacgggtgtttggtgcttttggggaaattaaagaaatacgggaggttccaaacaagcataatcacaaagtcattgagttttatgatgttagagccgcagaagctgcccttaatgctctgaattggagtaacagtgctgggaaacagatcaaacttgaaccaagccgtccagggggtcttagggcgctttattcagcctgagcaggaacaagatgaacctaatatatgtggaagtccttttgatgagttatcagggcatattggagtaattgcatctggtggcatggagaatgcatctaaccaggtgttacattcagttatccagtcacctgttaatacatttgttgaacctcgtcggagttctactgttcctattaacttagcctctccagcaagagtggcacctataggccaaaaattaagtcttcgggagcccaaccactctatggatgaaatgaaatatgctaaccatgggataccgagtttccatcctcattccttacccgagtaccatgatagcttagccaatggtattgcattcactccccagcaccataacaacat

SEQ ID NO: 2524 - DNA, 649 bp, Gossypium hirsutum
  Clone ID: GOSHI-09MAY01-C87733_1
gggttatttagtgttttgtaaatggatttttttttgaactatttagtcttggacttttattcatttattttgggtttatttatttgcaaataaattaaatgggcccggacaaaattggttggctaccccctgtttattttttcgcagaatgcaattatattgcatatattcattgtttcctttccgaggtaagccccctgtaatagctaaaatagtagtcgtttaactccccatagaaatgtgcgtggtaaaaaaatggcccatgtataatttctaagttttaaacccaaacaaaaccgatgttattccctatcctaaccttattacgaaggttttgttgtatttgggcccagtatgaaactaaacctttgtgcttagggccttgagccccccaaaaagatgcctttagatcccccaagaaaagagaattttgcccatggaagtttgggattggagatggttaggatctatgtaataatttattattttaggtccccaagatttttaatatactaatcctatccccatttgcccatgggtaaattaagaaaattaattaaaagaaaaattaaaaaaaagattaaaaaaaggaaaaaaaaaaaaaaaaaaaaaaaaaaaaaaaaaaaaaaaaaaaaaaaaaaaaaaaaaa

SEQ ID NO: 2525 - DNA, 571 bp, Gossypium hirsutum
  Clone ID: GOSHI-09MAY01-C87693_1
tctacgcgtccgcccacgcgtccgcagccgtacaaggagaaaacaatgcctcgcacgaccaccgtcgactgccctggctgtcctccacttcgagccttgactttcgatgcgcttggactcatcaaagcaatcgaagctccagagaaaggaggaggaggagttgccaaagtggtggagagatggggaggtcctgatgcttccaaatgtgtgcttgccgcttccatgaatgaccgcaaaatcgaccccttattagctgttgcaagaaaaaatggtgtgattgagatacttaatccccttaatggtgaactttcccgtacggtttccgatgttagtaatgctggtgttaggccagaagatgatgctattgctgggctgcatttgttcagaagacagagagtggagttaaccccgaggtcatgcactttgctcacatgtaaaacaaaaggaaatgcaagcataaaaactggtgatctcgctgacactcaagctgattctggtgcctcaaaaacatggactgtatgtggctctggtaatatcttggtttctgaagtggatgggagtgaaagctatg

SEQ ID NO: 2526 - DNA, 843 bp, Gossypium hirsutum
  Clone ID: GOSHI-09MAY01-C87643_1
gtaaacgcaaagagatttttgcaggaaaatgttactgatggattattagcccttggatatgatgcttctatctgcaaatctcattgggaaaaatccccctcttatcccgctggggaatatgaatatatagatgtgataattgaaggggaacgattgctgatcgacattgatttcagatcagaattcgaaatcgcccgatcaacaaaaacttacaaatcaatcctccaaatgcttcccttcatctttgtaggcaaaaccgatcgtcttcagaagataattgctattgtttccgatgctgtaaagcaaagcctaaagaagaagggaatgcacgttcctccatggcgaaaagctgagtatgtcaagtccaaatggctctctcctcataaccgaaccacgccttatccttcgcccactgttacatccacatccacaattgaaacacccaaagaagttgaattagaaaccaaagctaaagagaaaacccaacctgaattgaatcccgaaatgaaaaactcagttgaagattctgagttgggggaatccatatttgctttctctgatagctctgaagaagggaaggaagaggagaaagaagcatggaagctacctgagataaaacccaagaattcactaattggggttaagctcgtgactggtttggcttcagtaatagaagatgaaccaataaaattttgactttttttaattttcccttcttctttttttgcacccttttgggttattagagaatcaaatactatggtacatgacttacctgtttgaatccccttctgttttttttatgtaagggttgatctgataatatgaaataaaatttttatt

SEQ ID NO: 2527 - DNA, 607 bp, Gossypium hirsutum
  Clone ID: GOSHI-09MAY01-C87603_1
ccccgcgtccgcccacgcgtcgcgaaaaaaaagaacaagaaaatggagaagaaattcatgggattttcttggtcacttgttgtggtttttttgtttatcatgattttgatagcgaaatcaaaatctgtggatgcaataacatgccaagaagctttattgtcactgatgccttgtcgacctttcttgaccggcggggaatccacacccgttgcaacatgttgttccgcggtggctaatatcaactccgccgctaccaccactgcaattcgcaaggacttgtgtcgttgtctcgaggcagctagtcgtagtgaaggtgttgatcccgacaaagctaaacagcttcctcagttgtgcggtgttactgtcgccatttcctttgatcctaccattaactgcgacacgatcaagtaaatgtggtgctgtatgtcaccatgaataaaagcatgaagagcaaggagaataaattaatgtatgtagttatatagttgaagaaattaatgatgtcttagttgattcttgtaatatgtactgaagaagaaattcatgactaagagctgtttgctccttccaatatctgaaaaagttaaaaagctgtcgtgtttaagtt

SEQ ID NO: 2528 - DNA, 950 bp, Gossypium hirsutum
  Clone ID: GOSHI-09MAY01-C87623_1
ttcctcgcgtccgcccacgcgtccgatcgtgaccagcctgttgaaggtcacatgcagccaaacatgaagagttcccgtttcgaagaaatgagcgaggctatcaagttcttagtgagccaaaagcttattaataggaaccaacttactgaaggtggggaactccaagcctcaaaagaagctatgcatgcacttcaaattttgagtttaaatgaggaactgtttttgaaacttctacgagatccaaactcatcattggtcaaaaattctaagaactcgccaaatgctcgagatgaggagtctaagcccttttccagatccaacttttcagagcaagagcctgttggtttaagacaactgaatgagactgttaatagaaaacagcgtaatttctttagaagaaagtccaagtctctggaaagagacttatcagatgaacagaaggtttccgaagcttcaactaaaattgtagttttgaagcctggaccgacatgctcacaaactgctgaaactggaagtagcattggttcgtcacccgaatctaagaacatcatcagacgtcgtgaaacaaatgagaaagttggttcccactttttcctgtctgaaattaaaagaaagtttagacacgctatgggaagagagcatcatagaatccctgcaaaagaaataccgaaaagactttccggtgagcggcaaagttcgagtgacaatggaggattaaaggaatatattgggatgaattctcctactaaagaccatttctttattgaaagaattgcgaaaccttccagtagtgtcaagaaaggagaaaagacaagcaagctaaagggccctgaatcgagtacagaatatgagactactcattttccaggcattcaaacatctatatcgaggcaaagaaacatctctctgagatgctaaccaatggggatgacattatggatcttttcagc

SEQ ID NO: 2529 - DNA, 751 bp, Gossypium hirsutum
  Clone ID: GOSHI-09MAY01-C87123_1
ctttgatctcttttgcaccctctctggtctcttctgtaaagttttgcactgactttatgtagcttagagcctttctattgttctcatcaaaacaaaatggtttgcagccacagtttcatagttccccagagagcttgccatattctcctctgttttctcttgatcttaaccacgacccaagctagatacaaagctgaaggtaattcattactcgtttaattcatttcatttcatacatttggcacgtttttgaagtgaatttcctttgattcccacttattttcaccgcaggtaaaccaaatcccatatctgataagagagtagtaaatgaagaaaaggcgatggtgttgagtggtcagataggttcaaggccgccaagatgtgagagaagatgcagtacatgcggtcactgtgaagccattcaagtgcctacaaatccccaactcagaattcaaaacaagccttcttcaacttcagtctctgatgttgcttatgcaagaagagatgacagctctaattacaaacccttaagttggaaatgcaagtgtggcaaacttcatcttcaacccctgaacataaattatccatctttcaaccttgtaaatctgcataagagaattacatatttcatcgggtcagttagttttcttgtctcatttttttttcactgttatttgacatattagatgctccctggaccgtatattagaacaaggtttgtatatatctttattgataagatttcttgggc

SEQ ID NO: 2530 - DNA, 458 bp, Gossypium hirsutum
  Clone ID: LIB3829-029-Q6-N6-H9
aactgaaccgatgaaatatgtaattctcttatgcagatttacaaggttgaaagatggataatttatgttcaggggttgaagatgaagttgccacacttgcatttccaacttaagggtttgtaattagagctgtcatctcttcttgcataagcaacatcaaagactgaagttgaagaaggcttgttttgaattctgagttggggatttgtaggcacttgaatggcttcacagtgaccgcatgtactgcatcttctctcacattttggcggccttgaacctatttgaccactcaacaccatcgccttttcttcatttactactctcttatcaaatatgggatttggtttaccttcagctttgtatctagcttgggtcggggttaagatcaagagaaaacgaggagaatatggcaagctctctggggaactatgaaactgggggtggaaaccattttgttt

SEQ ID NO: 2531 - DNA, 571 bp, Gossypium hirsutum
  Clone ID: GOSHI-09MAY01-C80913_1
gctcctcacgcgtccgatttcccccccttaaagacaaaaacatattttgtttgttgaatttgaaggtggtagggagatgagtagagcagcgtaagcagttaaaagggcagccaagctaatacctaaacacctctaccctggttccgtccgatataactcttcttattaaattaagtagagacttgatacgcggttgaatagcgtgagaagagacctactattattcctttacgaccgccattaacatccatctatcttagccattaagatctctctaattccaattttctgcttcccagtttggagcgagaatagtacccagaaaccaatcatgagtgagatgaaagataaattgaagggcttcatgaagaaagtcaacacccagttctcttcttcgtcttcttcttcttcttcttctggtaaattcaagggccaaggtcgagtcttgggttcctcttcttcttctggacctgttaaccccatccttacccgtccctctcctattcccaaccctgccccttcttcctcctcatccaattctaagcccgttttgccttctaaaccaccgggt

SEQ ID NO: 2532 - DNA, 634 bp, Gossypium hirsutum
  Clone ID: GOSHI-09MAY01-C80923_1
taaaaagtaaaagagcaccaagcaaaacaacatggcggatggtagtgagaaaaatgcggtggtgagcaacaagtccggatattcaaggattatgtttccgggtttccaaaagaatcagacatggcggtcgctgtcgacgagaatctaaaactgaaggttgccggtgattctcaaggcattctcgtgaagaatctttacttatcatgtgatccttatatgcgacttttgatgacgaaccgaagttcagaaatcttcggtacatacactccgggcgctccaataactgggtttggagtgggtaaagttattgattcaagaaacccagaattcaaggaaggagatctggtttggggcataacaggatgggaagagtattcattactgacatcaagtgaagggctctgtaaaatccatcatactgatatacccctttcctactatactggaattcttgggatgcctggtttgactgcatatggaggattctacgaggtttgtgcaccaaagaaaggggaatatgtgtttgtgtcagctgcatctggtgctggtggacagcttgttggccaatttgccaagctaatgggttgctatgttgttggcagtgctggcactcaagacaaggttgaattattga

SEQ ID NO: 2533 - DNA, 772 bp, Gossypium hirsutum
  Clone ID: GOSHI-09MAY01-C80833_1
cggacgcgtgggcggacgcgtgggcggacgcgtgggttcggatccctgcgggtttttcagtgaaccctagtcaaaaagagaagcagctagagcaaagagtttatgaattgttagtgattgattgattgatagtatatgttagagtttatatagaaaagaaaacgacgatttgatggaaaattagtgacagccaattatcatcaaaagtgcgaagccctaatagttttttttaagtcaatggattctgcaacgaacccgaatatcatcaagaaggatccagtaccagttacagtttcagcaccatcgtccacgggtatccagcaaggagttggtgagtcgccgtcgtcttctacttccccagcagcaccgagtcggtacgagtcacaaaagcgtcgagactggaacacgttcttgcagtacttgaagaaccataagccgccattgactctggctcgttgcagcggcgcacacgtgatcgagttcttgaagtacctcgaccagttcgggaaaaccaaggttcacatgacgggttgtccttatttcggacacccgaacccgcctggtccttgctcttgtccactcaagcaagcgtggggtagcctcgacgcgctgatcggacggctgagagctgcttacgaagagagcgggggacgaccggaatcgaacccgtttgcggcaagggctgtgaggatttatttgagggaagtgagggaaggacaggctagagctagagggataccttatgagaaaaagaacgaaaaagccttctgtc

SEQ ID NO: 2534 - DNA, 559 bp, Gossypium hirsutum
  Clone ID: GOSHI-09MAY01-C80683_1
catctttgttcccttcccctctttgctttctacttttctctataaagttacaaactttacttctaatttatctctctatcttgtctcctaactcctgccctttaaaaagtttgaaactttggtttaagaaccgcgagattcagttttctttttcaatgcaaggaggtgttggtgatggtggttcagaaagtgggtcagtgtccactgtgtcaagggaggaaaacatggtggtgtcctcggaggattcttcatgccctgatcagtctgagttggagttgggtcttgggttgagccttggtggtggtggtggtggttttaagatgcatcatgtttcaaagggtggtcaatttgctaggattttgactgctaaggatctcccttctctggttttttctgctgcttctccatcttcttcttcttcttcatcatcatcttctttaagtagagctgatgtcacagctaagatcaagaggactgctgattccatggctgctgctaatggctttagtcaacttgtggggtggcctcctgtccaaactcatagaataaatagcatggg

SEQ ID NO: 2535 - DNA, 562 bp, Gossypium hirsutum
  Clone ID: GOSHI-09MAY01-C80623_1
agaacgatcataagacccatctccttcttgtccaggcaaatctcattccttctcgcaaggtcttgacttaagcaaagtgtgaaggaggaagtggcaaacataatagcacccctgatggtgagaccgataacacggtggcctggctttgccttcttgggtggtgcaatgttctgcttgctggctagcagcacatgccaccttctctcttgcccctctgagcgcctatcatatatcatgctcaggctagactatgctgggatcacggctctcatttctacttccttgtatcctccagtgtattactgaaagaagtagctaaaatgaaactagagaactagagaagagtcgattactgaaagaagtagctaaaatttatctgcggttgaatttatgctcaacccattgttagtgaagtgtatattcttcattaaatcagtcttacagctctaagaaccattagctttcagccttaatttatgttctaaacatgcaaatacttgtaataatgtggcagagacaagaattaatgttttggaggttttaactctatgcattaatgtac

SEQ ID NO: 2536 - DNA, 735 bp, Gossypium hirsutum
  Clone ID: GOSHI-09MAY01-C80143_1
ggaatcaacgactatgaacccggaccggttccttcagaaagccgtgtggacagatgggggtttataaagcagaatgttagtaatagtagtgctgcagaaggcttaggaaagagtagggaagctagaagagttaggaaatggaggaaaatgattggggttggtgggagtgattggaaacattatgtaaggagaaagcctcatgttgttaaaagccccctcgcgtccgccctccccgccggtttaaggggtcttgtttggcagttgatctctggaagccgagaccttttgctgatgaacccgggggtctatgagcaacttgtaatatatgagacatctgcttcagaactagatataatccgagatatatcccgcacctttccgacgcatgttttctttcagcagagacatggacctggtcagaggtccctttacaatgttttgaaggcatactctgtcttcgacagagctgttggctatgtccagggaatgggctttttagcaggtcttttacttctttatatgagtgaagaggatgcattttggttattggttgcattactaaaaggagctgttcatgctcctatggaaggattatatcaggtggggctgcctcttgtacagcaatacctgtttcagtttgagcacttagtgagggagcacttgccaaagctgggtgagcattttagccgggagatgataaatccaagcatgtatgctagccagtggttcataact

SEQ ID NO: 2537 - DNA, 495 bp, Gossypium hirsutum
  unsure (1)..(495): unsure at all n locations
  Clone ID: LIB3585-057-P1-K1-G7
tgcacatgtttatgttgttacagcaacttgtaatatatgagacatctgcttcagaactaggtataatccgagatatatcccgcacctttccgacgcatgttttctttcagcagaggcatggacctggtcagaggtccctttacaatgttttaaaggcgtactctgtcttcgacagagctgttggctatgtccaggtttgtctcatgtcattggggggcgtcgtattaatatatgtctaggttaattgtgctctcggtttttgttgaaaatgcagggaatgggctttttagcaggttttttacttctttatatgagtgaagaggatgcattttggttattggttgcattactaaaaggagccgttcatgctcctatggaaggattatatcaggtattattgtatttaaaacctatttttactatctacaatgctgaattgaccattntatgttggtaatggttcattaaggacttagaaaaagaatgtgataccac

SEQ ID NO: 2538 - DNA, 574 bp, Gossypium hirsutum
  Clone ID: GOSHI-09MAY01-C80113_1
gggctcttgaagtgtcagagctaaatcaagatatcgatttccctgatcttcctaccggaggagtcgaagttccgcccggaagactcaaaaggtcaggatactaaaaacaaacagtctctttcttcgaatgttccgcaactggattctggtcctacgcgggagcactgcttctagtctagtgggtaatggaccacagcttcctgaagtagctggtgaatggggagggtattcgtccaattcaacaagaccttccccgggggaatggaacccggatcttgttcccaagtcttccataaaaccaaccgacttgggaagcgatcatgctgctactccaacttcaggaagtggccaattgacacattcttctcctacagatcctccaaataatgaatctggatgggattcgattgttcccgaacccaacgagtattctttgggtgatgaatcagtttcggatctcttagccgaagttgaagcgatggaatcacttaatggcttggcttcacctacatcaattttgcgttgtgatggggacttggctcaaggttctgaacctgattgttttagtcctgta

SEQ ID NO: 2539 - DNA, 687 bp, Gossypium hirsutum
  Clone ID: GOSHI-09MAY01-C80363_1
atcactttgttcaaaaatattaacactttttctcaactacgaacttccaattttcctttaaaagccctctctctcctttttctctatctcttcgatccttcattgatgcatggccgcgagtcttttggcgcgtgaggtatctgacctatgtctcggaaagcctgcgctgaggtccctctctgtctctgccaccgtcggcgatgccttgacgactttgaagagatccagagacaactatattagtttttggaactgcaaccatggtcatttttcggaagtcgacaaggttgacgccgtcgccgctcttgatgactgccgttgtgtgggcaaagtttgtgtggcggatatcatcggtttcttatgtaaggaagaaaacctgtcgaatcctggaattgctcttcaagctccagtttccgttttaattcctaaaacaggagactttgttcgacatttagaatctaatgcaagtttggtggaagccatggatttgattttggaaggagtgcaaaatattgttataccaatggagatcggcggtaaaaattcaagataaaagcttctccacaataatctttcgacatcaacccttcaccaccgcccgcgatattgttggctacctccacgccctccccgtcgttaccttggggattcaattagactttttagctcatgtgctgttaatccaat

SEQ ID NO: 2540 - DNA, 407 bp, Gossypium hirsutum
  Clone ID: uC-gsflmaxxa009d07b1
ctgacctatgtctcggaaagcctgcgctgcggtccctctctgtctctgccaccgccggcgatgcctggacgtctttggagagatccagaggccactctccttgaggagcatctctctggatcaagaaggaggtttgcaaccgtctcgcagaaggtctctctttaccttggcatcctacatgcttattttctcagccagggcaggcgatcttccagagttaattcctattgttaaagcatctctgacagataaaatagttgatccttacctcaaattagttgaggatgtgagactccaggctgtgcgtgtgaaatctgatgtggacagtgtagcatatggatcaaaggaagatgatgctgctgcatcaaaagcgtctttggcaatagagctagatgatcctcatttgg

SEQ ID NO: 2541 - DNA, 349 bp, Gossypium hirsutum
  Clone ID: uC-gsflmaxxa009d02b1
ccctcgcgtccgcagagcgatatttgttggtgtgcgaattggtgatcctactgccgtaggccatgccctgacgacttttaagagatccagagacaactatattagtttttggaactgcaaccatggtcatttctcggaagtcgacaaggttgacgccgtcgccgctcttgatgactgccgttgtgtaggcaaagtttgtgtggcggatatcatcggttttttatgtaaggaagaaaacctgttgaatcctggaattgctcttcaagctccagtttccgttttaattcctaaaacaggagactttgttcgacatttagaatctaatgcaagtttggcggaagccatggat

SEQ ID NO: 2542 - DNA, 890 bp, Gossypium hirsutum
  Clone ID: GOSHI-09MAY01-C80273_1
cccacgcgtcttattgggtacctgaagaaggtggatatctaattggcaatttacagccggctcacatggattttaggttcttcacacttgggaacctctggtccattgtttcatcactgggcacttcaaaacagaatgaagctattctcaacttaattgaaaacaaatgggatgatattgtggggcatatgcctctcaagatatgctatcctgcagtagagaatgaagagtggcgcataattacgggcagtgacccaaagaataccccttggtcataccataatggtggatcttggccaacacttctctggcagtttactttggcttgtgtcaagatgggcagattagaactagcccaaaaggccatagctttggcagagaagaggctttcaagtgaccattggcctgaatattatgacacccgaagtgggaagtttattggaaagcaatcccgactttcccagacatggaccattgccggtttcctgacctctaaaatgatggtggagaacccgaggacggcttctttgttattctgggatgaggactacaatcttctagagatctgtgtttgtggtcttagcaaaagcggccggaagaaatgttctcgtggtgctgccagatctcagatactcatataagtgaactgcattgtttgcaaggcagagagcctctctttccactgtacagccacaagtttaaggggatcaaagagcaattttttcaacccttagaagttctacatacaggtttgtattacaagatagtgtagtatagccacacacacattgtttttccaatcaatgatccaagttatttgcaatggcattgaatgtaaaagtgagtgggatgaacagaccctcaaacttacattgtgactcttcccaagg

SEQ ID NO: 2543 - DNA, 539 bp, Gossypium hirsutum
  Clone ID: GOSHI-09MAY01-C81483_1
cccacgcgtccgaaaccaaatgccctagccgacatgaatcagaaaaaaaaacgcaaaacccggttcaaaaagaatcccaaaaaaaacagtcccatgagtcaatcagattactcatacagttcgctaccaaaagagatatctctgaaaattgcatcttccctcgaggcaccggctctctcttcattggcttgttgttctcgggattggcaagaaatatgcgtgtcggattgtttatggaagtcgcttcttaaagaaagatggcctcttttatgcggagctgataaagaccctaacttcaaggactggcgaggattttatgtaaagcagcacgaagagcagaagcgtcaagccgaatccgtcattaatttggtggaacaacgctcgctattcggttcactcaatgctgtagactatctgcatgcgatcagttgcctggaaaggattcagctcggtttcagagatgttcaaatgctgctgttgaaaccaaagctgaatgttctgcttaacttgatcggactacattactaccttaacaacct

SEQ ID NO: 2544 - DNA, 671 bp, Gossypium hirsutum
  Clone ID: GOSHI-09MAY01-C81713_1
aacaaatggatacttgccttgcccccaaatgtccactccttccccttcttcccctacctatctcaccaacttaggcctcggctattccattgccatcgccgtcggtttcctcgtcctcctctccaccatcctcctcgcttcttacatctgtttccgctcttccacttctcctcgcgctttctcttccaatccctctgctatccccgcctccaactccgatggcatcctcctccctactattatcttcgttgccgaagatgaagccactgacaacgtcgtcctcggactcgaccaggccgttatcaattcttaccccaagttccagttctgtaaagactcgggtgctagtaacttgaacaccacatgttccatttgtctgtgtgagtacaaggatttggagatgttaaggatgatgcctgagtgtaagcattatttccatgttttttgcatcgatgcttggttaaaactcaatggatcttgtcccgtttgtcggaactcgccgcttccgaccccactttccacgcccttgtcggaagtcgtgccgttatctcagttcgctgcggatcgaaggaagattagtgacttttgggtgtcatcgtgttttttcccctgcccaacaaaaaagaaaaaattttttggggttaggtaattaacaaacacgacaattgggt

SEQ ID NO: 2545 - DNA, 582 bp, Gossypium hirsutum
  unsure (1)..(582): unsure at all n locations
  Clone ID: LIB3829-022-Q6-K6-F6
gcgttcggtgaagcagaactganagccttgggggtcacgtaggacatgattcatttacatcataccagtctcacaatggatcagtccactcaaactcttcaccaagtagttctgctaacctgccatatggcatgtgcccgctgccagctatgatacctcaatggggtgtcatctaatggaccggggggggcatctgttgtgatgctgtatccttatgatcataattctgcttgtggttcccctgctgaaccgctagacaatggctctcttggaacgatgggtttctcaggtgtgaatgaagtatcacagctaagcaatggaaggagctctggtggagtatttgacaagcaaatatttcatggtacctctgctcaacgattttaaccagaccagccttcttctccccacctccaaaggggatttggttctattgccagatcagcggcccagaagatggggattccccccacccgcttgcttttaacatttgcgggaagaatttgatgatggtggaaccctatgaagagggaacccctccttaacacgcttttttgtgttctcaatctcactcatgaaagcaac

SEQ ID NO: 2546 - DNA, 529 bp, Gossypium hirsutum
  Clone ID: LIB3585-015-P1-K1-F12
cagaactgagaggccttgtggctcacgtagacatgattcatttacatcataccagtctcacagatggatcagtccactcaaactcttcaccaagtagttctgctaacctgccatatggcatgtgcccgctgccagctatgaacctcaatggggtgtcatctaatggacctcccattccatctgttgtgatgctgtatccttatgatcataattctgcttgtggttcccctgctgaaccgctagacaatggctctcttggaacgatgggtttctcaggtgtgaatgaagtatcacagctaagcaatggaaggagctctggtggagtatttgacaagcaaatatttcatggtacctctgctcaacgattttaaccagaccagccttcttttcctcacctccaaaggtctagctatagattttttggtgtagtaatttctatggccaacttaatgagcttgtgtggttgtctctcggtctaggactatgacataatattgctggactggaattgaatttcaaatagaattat

SEQ ID NO: 2547 - DNA, 523 bp, Gossypium hirsutum
  Clone ID: GOSHI-09MAY01-C81043_1
ggagaacactggtccaatcaatatcgggaatccaggtgaatttacaatgcttgagcttgccgagacagtaaaggagcttattaatccgaaggtggagataaagatggtggagaacactccagacgatccacggcaaagaaaacctgacatcacaaaagcgaaagaattgctaggttgggagccgaaagtgaagttgcgagatggtcttcctctaatggaggaggattttaggttgaggctcggagtctccaaagagaactgaattttttttaaaaaaagccctttaatgaaattatatagaaggtgaaattttggattgggtgatttcagtgcttgtggtgggaaactgggagcttatgttgtgtgatttaatatagttaatgctctctcctttgccctgttttgttctttatgatgccatagaaaataaaccaatgtatcccccaaaatgtgaagagtttgtgaaactattttaattttggcagggcttataaatggtgtttgttaaaaaaaaaaaaaaaaa

SEQ ID NO: 2548 - DNA, 671 bp, Gossypium hirsutum
  Clone ID: GOSHI-09MAY01-C81273_1
tgtttacgcgtccgctcaacccccaactacgtggaatgtttgactcgaaccctcaattgagagaaatgatgcaaaaccctgaagtacttcgtcagatgttttcccctgagacaatgcagcaaatgctaactttacaacagtcacttctgtctcagctcaatcggcagcaatctacacaggattcaacgcagagcagtactactacaggagcacctggtactcctagtctggacttgttgatgaatatgttcggtggtctcagtgccggtagccttagtgttcccaaccaacccaatgttcccccagaagaactgtatgctacacaattatcacaactccgagaaatgggtttctacgacaccgaagagaacattagagcacttcgtgctacttctggaaacgtccacgccgcagttgagagacttcttggaaatcccgggcagtaatgcctcgaaatattcgtgtaaaattagttcatttggcatgtttgccatagccaaccacaaattatcgacatgcctgctgatccccttgtttgtgcgtgtttggtaagcaagtaaaacacattgatgacgatgatcctgagaactttatatcgataggctttgtgcgtaattcggattggatcattcaagtacttgcttatgtacatacacatcagattattgttt

SEQ ID NO: 2549 - DNA, 734 bp, Gossypium hirsutum
  Clone ID: GOSHI-09MAY01-C81213_1
gctctgttctgttcttttttttttgcttttcttctctatgattcttgtttatagcagagaaataactgtttgtcttattgttactgctagtggatgttcattaatttattgatttcggttcctccctaatgctttatagttcatatttagttcatctgtgccttttttatggttctatgtttcgttgtcctagttcccgatatggattaaatttgggatatcttcacatttggtggtctttgttgatgctattctgcactgaaccaatctatctctatgttgcttgatttgctttgtctaaaccctataccagtggttgcaggttgataggccacttggcttaattacttactgcttgttgttcctcctgattactgcatttgcttgtaatttctggttcttgcttctgtagcctcattgcattctattatttctactaagcaccataactcggacttgacttactctctcgctatagtaatctggaaatagatggaaacgtatctatgaaatgttgttctgcatttttcttcacaagtacattttctagaagcattttttatataaagggaagggggtagtggttgtccatggatcgaattcaggatgggtgtcaactgaagacttgaacacaagtcctttgccacttcactcgtggttcatttgacttcctagaagcatatttagtgcctgctctcttttactttgtggattttatggtggcttatttccta

SEQ ID NO: 2550 - DNA, 936 bp, Gossypium hirsutum
  Clone ID: GOSHI-09MAY01-C82983_1
gagattgccacgactcagacacaggttgaacaaccattatgccttgagtgtatgagggtgttgtctgacaaacttgacaaggaggttgaagatgtgactagggatatcgaagcatatgaagcctgtcttcagcgcctggagggggaaccacgagatgtactcagcgagactgatttttgtaaggagaaattaaagatcgaggaagaagaaagaaaacttgaagcagcaattgaagaaatagaaaaacagaatgctgcagtaaatgcagaactaaaagaattagagcaaaaatcaaaacgattcaaagaattggaagagcggtattggcaagagtttaacaactttcagtttcaattaatcgctcatcaggaagagagagatgcaattttggctaagactgaagtttcacaagcacatttggagctgttaaagcgaactaatgtgctcaatgatgctttccctatctggcatgatggagaatttggaactataaacaattttcgtcttggacgactgcctaaaattccagttgagtgggacgaaataaatgctgcctggggtcaagcttgcctcctacttcatacaatgtgccaatatttccgaccaaaatttcactatcggataaagataattcccctgggtagctaccctcggataatggacagcaaccacaatacatatgagttgtttggtccagtgaacctgttctggagtacacggtacgacaaagcaatgacactattcttaacttgcctcaaggactttgctgagtttgcaaatgccaaggatctagaaaacaacattccacctgagaaatgctttaacttaccctacaggatcgagaacgataaagttgaaaactactccatcacacaaagcttcaataagcaagagaattggaccaaagctttgaaatataccctctgtaatcttaag

SEQ ID NO: 2551 - DNA, 342 bp, Gossypium hirsutum
  unsure (1)..(342): unsure at all n locations
  Clone ID: LIB3493-036-P1-M1-B8
ggggatttggtggcttgggtggcggcggtatggctggtggtggagttggaggtnnanntcaangtgactttgacctatgaactattggtggtgttgacaactgtctaaaatctcagtggagggggacgaaataaatgctgcctggggtcaagcttgactactacttcatacaatgtgccaatattgccgaccaaaatttcactataggataaagataattgccctgagtagctacccttggataatggacagcaaccacaatacatatgagttgtttggtccagggaacctgtcgtgaattacacaggtacgacaaagcaatgacacttttcttaacttgcc

SEQ ID NO: 2552 - DNA, 769 bp, Gossypium hirsutum
  Clone ID: GOSHI-09MAY01-C82863_1
gaacatcaagaacataatagtctgtttgatggaatgatggggagtgatgggattaacagtgcctccatggttaaccctctcaaaagggccctcccgtcgctttactggaccgacgatgaaaccgctggaccatcgacgagcaagagattccatggggatagcaatgatgggagcatggagaaaacagatgggaatggttcaattgccactctgctcagccagctaccacaaacccctccattgcagcagcaacaagcagcaatgttggggtcaatgggagatgggatatttcgtcctccatatcaacttccaggactcaactggtactcttaattaaatttccaggtagagtgggggtcaagctgtcagtatcatgttacataattcttgatacagtcattaaaattatagtgtctgaaggatttgggagtattgggataaaaaagatttgagattttggttattagggcagagattagatgaatcaggcctcattgtttctttgagtgtaacagttagctgccaaatttcatctcttgaggccataggtaaattttataatatatatagttatatagattgtatacatacaaacatacatacattcatacatacatatatatatatgtagtttgttgtttattatatagagagagatgcaatgaaaaagaagaaaagggtggggataaatgaaggaggtggaaacttgctgtagaaaataaataataataactgatggatatgataaaatattttgtttttaggatac

SEQ ID NO: 2553 - DNA, 647 bp, Gossypium hirsutum
  Clone ID: GOSHI-09MAY01-C82453_1
ttgtttcgtgggatggctggtcctctgcttcttaaggcatcccgctcctccggcttcggctgcaacggtacaactgtctctccgccagaatcgtttcttctccgtgccgtccttggtgcgccgccgcagagccgactgggcaccaggacgaggtatcctcttcggagaagagtagtgtggtgctgaccgtgaaggatccaccgaagtaccataggtgggatgatcctgattacaggaaatggaaggataaggaggaagagatgcttcgagacatcgaacctatcattttgctagttaaagagattcttcactctagtaggtatatggatggggagcgcttaactgttgcagacgaggaaactgtggtagagaagcttcttcgtcatcatccacattctgaagataaaattggatgtggatttgattgtataatggttgatcgacatcctcaatttagacactcaagatgtctctttgttgttagaactgatggtggatggatagatttctcataccaaaagtgtctccgagcgtacattcgagataaatacccatctcatgcagaaagatttattagagaacattttaagcgtggtagtggctaaaatgtgaaaacataatggtaatagcgtggtgtgagtacggct

SEQ ID NO: 2554 - DNA, 599 bp, Gossypium hirsutum
  unsure (1)..(599): unsure at all n locations
  Clone ID: AI731172.1
gctgcttttctctcaaatttccatatgaaatctgctgcaagggtgacgtttaataacaggcactacgatttgcccccttggtctattagcattcttccggattgcaaaaatgtggcgtttaacactgcattagttggagttaaaacctcacggattcaaatgctgccagcaaacaccaagatgttcccatgggaggcttatggtgaaaacatttcttctctaggagcaagttcaagaatcacagctcctggactcttggagcaaatgaatgttaccagagataatagtgactacctgtggtacacaaccagtgttgacattagtccatcagaatcgtttcggcgaggaggacaaaaacccactctcaatgtggattcagctggccatgctcttcatgtttttgtcaacggacagttttcagggtcagcatatggaactagggaaaacaggagattcacatatacaggaccagtgaatctacatgctggaacaaatcacattgcactcctcagcgtanctgttggattgccggttagttgctcttgaccatgcttatctggatgcaaatgttagctatcacataattcagacatttccta

SEQ ID NO: 2555 - DNA, 462 bp, Gossypium hirsutum
  Clone ID: LIB3585-006-P1-K1-F8
ggtgaagacatttcttctctaggagcaagttcaagaatcacagctcctggactctgggagcatatgaatgttaccagagataatagtgactacctgtggtacacaaccagtgttgacattagtccatcagaatcgtttcggcgaggaggacaaaaacccactctcaatgtggattcagctggccatgctcttcatgtatttgtcaacggacagttttcaaggtcagcatatggaactagggaaaacaggagattcacatatacaggaccagtgaatctacatgctggaacaaatcacattgcactgctcagcgtagctgttggattgccgaatgatggactgcatttcgagacatggaaaactggcatccaaagtgtattgctacatggccttaaccaacgaaagaaggatttgacgtggcacaaatggtcataccatgttggcttaagaggagaagcaatg

SEQ ID NO: 2556 - DNA, 972 bp, Gossypium hirsutum
  Clone ID: GOSHI-09MAY01-C83943_1
cccagcgtccggttttctcgcagatcgccaccgaggttttttttcttttttctttgaagggaattttgaaacttggggggctgtttttcataggaaggcaataagatactgtctttgtgaaccatggggaccccagaaacttctcgagagccatgccctgatcggatcctcgatgatcttggtggtgctttcggtatgggcgctgtcggaggtgcctgccttccatttcttgaaagccactaacaactcccctagcggttctaggttgatcggaggaactcaagcagtgcggatgaatgcccctcgtgttggtggtagttttgctgtttggggtggcctgttttcaaccttcgattgcaccatggtatatgttcgacagaaagaagatctgtggaactcgattatagccagtgctgccactggagggttcctttctatgcgtcaaggactcggtgctgcttcaagatcggcattggttggtggggtattgcttgctttaatagaaggtgccgggatcatgttgaataaatttctcagtcaaccacagatgccaattatgatcgaagaaccggcaccgaatgtggccggtatgcctggatttccaatggggcaattgccgaaccaagcccctgcattggtcgacagttcgacgcagggttcaccagagtcttcctcctcatggttcggaggagtttttggtggtggaaagaaccaggacccgccagcgggtaatggaagtaagacggaggttttggagagctttgatgctcctgcggtgccatcatttgaatacaaatgaagtgatagataaagccatatgttaagcaatttgaaattgtgttttcaacttattgaaagcctgctctttatgggatatattgaaagcaatatttaggtatttgtgatttattcgttttccccctatttataaacgtacatgttatttataaatgttttatattcatcccctgt

SEQ ID NO: 2557 - DNA, 458 bp, Gossypium hirsutum
  Clone ID: LIB3493-038-P1-M1-D12
agaaagaagatccatggaactcgattatagctggtgctgccaccggagggtgtctttcaatgcgtcaaggacttggtgcagcttccagatcagcagtttttggtggggttttgcttgcattgattgaaggagctggaatcatgttgaataaatttctcagtcaaccacaaatgcctatcatgatagaagagccagcaccaaatgtagctggaatgcctggatacccaatggggcaattgccaaaccaagccccagtatcagttgacagcttgaggcaggcctcaccttcgtcatcatcaacatcatctggttcctcatcggattcttcatcttcatggtttggaggactttttggtggtggaaagaagcaggaatcagctacaggcagtggaagtagaactgaggttttggagagctttgatgctcctccggtgccatcatttgaatacaaatgaatt

SEQ ID NO: 2558 - DNA, 915 bp, Gossypium hirsutum
  Clone ID: GOSHI-09MAY01-C83883_1
gagaaatgaaagaaagtcgatgaatcgatcgtggaagaaagcttttgtatgcaatctatctaagcataacaaaacccattccttgtgcttccagtgaatgggtagatggagagcagctgcttcgcttctcttcacccacttaaccaaaacctccttcccttctcttcctcccaaacctcttttcctatccctttcttcaagccctgctttctgttttctccttgcaagaccattctcagctctcctatctcaacttcccatttatcctagcgattctgaaaatgggtctccttgtttttcccaacaaaatcatgggtttgtttcacaagaagaagaagaggaaattggcaagattcccatcaaagcttatttcctttgtaccagtatcgatttgaagagtatgcaagctgagaatttaagcaacatcgtacctccttcttctcgttcatcaaactatattgctctcagatattggggatttccctccaggctgttactgcacttggaatgaatggacaaagtcagtagctgccgttacatggtcatttttcagtatgggtctgctgtcttggttaacattgaggaccgtgaagttgagagctacctcgaaatagttcagagacatggctctggattgcgtccagaaatgaggagagacgattactgtgtaaaagagcagccactctgggctagggatatgcaggaagacaaacttccatgtggtcaaactttggacactgatgaatccgatttattggaggtcttgtcaaagcatacatgggatatttgttacaggtgaagggttggtatgttgcatttaatcggcaatgaaagacggacttaacatgattgccagttattactgtggaagctatcattggcgggatctaagtgctttggatcaatgtggagaag

SEQ ID NO: 2559 - DNA, 634 bp, Gossypium hirsutum
  Clone ID: AI055522.1
aatcctcttgaaccacttaatcaaaacacccttcccttctcctaaatccctttcacccaaacctctttcttcttccaacccacctcttctttttcgattcacgagacatttctccgctctgccctctccagtttctgtttatgccaccgatttcgataatgggtctcctgaatttccccatcaaaatcttgggtttgtttctcaaggaggagaagaagaagagaaacacggcaagatacccgtaaaagcttatttcctttgcaccagtatcgattagaagagtatgcaagctgagaagttaagcaacattatacctccttcttctcggtcatcaaatcatattgccctcatacattgggaattccctccagatattactggactaggaatgaaaaacaaagccagctgctatagaatatggatcggtttcaggactggactggtggcatggttaacattatggaccttgaagattatagttagcttgaaatggtttgagcatatcgtgttggatgggtacattattgaggttatagaatatactggtatgagctctctctcttagctatgaatgcatggctgacatagatctgtgatgataatgtagatgcaatgattctacgaatagttgcgg

SEQ ID NO: 2560 - DNA, 607 bp, Gossypium hirsutum
  unsure (1)..(607): unsure at all n locations
  Clone ID: AI055269.1
aatcctcttgaaccacttaatcaaaacacccttcccttctcctaaatccctttcacccaaacctctttcttcttccaacccacctcttctttttcgattcacgagacatttctccgctctgccctctccagtttctgtttatgccaccgatttcgataatgggtctcctgaatttccccatcaaaatcttggggtttgtttctcaaggaggagaagaagaagagaaacacggcaagatacccgtaaaagcttatttcctttgaccagatncgatttgaagagtatgcaagctgagaatttaagcaacattatacctccttcttctcgttcatcaaattatattgccctcaacattggngatttccctccagatattactggacttnggaatgaaaaacaaagccagctgcttaatggggnggtgttnnttcagnccggtcctgtggccttgttaaacattgagacctggaattgagaggcacttgaatggttcgaaaactgcttttgaatgctacagaatgagagagagatatactgtaaagacaccactgtgaaagggattgcatgaggacctgctcattgtcccaaacttggaactgtagatcgg

SEQ ID NO: 2561 - DNA, 764 bp, Gossypium hirsutum
  Clone ID: GOSHI-09MAY01-C83753_1
ctgcagtgtacccgtgtccggaatatcctcgggtcgtacccatcgcgtctcgtttttctttacttaaaatatttagtgcccatattctccactcctatttcaatcaataccgtcattcactccctaccctctttctgttaaagtctctcacgttcactctacagtaaagggaatatcccatctccttgtaaaaaaatgcagcttcactcggccgtggcattgatttgtgccactgtttctctttttgtcattgccggagctgaagatccctacagattcttcaactggaatgtcacttatggtgacattttaccctctcggcgttcatcaaacgggtattctcatcaatgggcaattcccaggccctgatatccactctgttaccaatgacaacctcattatcaacgtctttaacagcttaaacgagcctttcctcctttcctggaatggagtccaaaacaggaggaattcatatgaagatggtgtatacggaacaacatgccctatccctccaggaaagaacttcacatacattctgcaggtgaaggatcaaataggaagcttctattacttcccctctcttgggttccataaggctgctggtggttttggagggattagaatccttagccgaccacggatcccggttcccttcccagatcctgctggagattacactgttcttattggagattggtataaggccaatcacacggatttgagagctcaactggatagtggtaggaagctacctttccctgatg

SEQ ID NO: 2562 - DNA, 638 bp, Gossypium hirsutum
  Clone ID: GOSHI-09MAY01-C83143_1
ccttctcttccgattatcatttgctgtgggattgatgggacaggctgtcaaattggcgagggacagttttatgcgatcagccattgatattttgaagtgacaagagctaggccaacttggatggaactgttcttattacaacttggtctaaattatcttttcacaccatagattttggttggggagaacccatttaacagggcctgttgctttgcctgaaaagccagttctgcttttccttcctcatcagaaagataagaaaagcattaatttactgttggggttgcctgtttcagcaatgaatagctttgaagagctgatgcaggtttaagcagaagaaaaaaaaagacatgttttatagcaagttattttatgtcagatactcagattcatatgttgcattgcatgcagtcattatctgaggattttctgacagtgggttttcggtaaattgaagaacaaaaataacctcagatcagatagactccgaattctgagtcatataatttgtattataaggggttaagtgctccgtctatattcgtttgtttcagtcatgttttgggttacagtatccgaataagaaagcctgaaaggagcatgggtgattcaaacaaatattccttgtccccctttta

SEQ ID NO: 2563 - DNA, 656 bp, Gossypium hirsutum
  Clone ID: GOSHI-09MAY01-C83023_1
cttgaatccataatttcaataaaaaaggtttttctcaccttctgtttgtggaattctgatctacaaagtaccactggtgttttatgggcagtggacataagtaaaaggaatgggaggttgttgctgttgctcttctagaggagtagaaataagtagtggaccagcatattattactatccaagcgcatcagatgagcgcgtgcctctatctcctcattgcgtcgctgcctctgctctctctaccggcctcctagtcgacacatatccggaggtatactgcgcccgatgcatatagacctcctcctgctccggtgccattcgatgcaattttaggacctcaaactccttcagtagcccaaattcatagcagtaaaagtgacgaagcagcgcactcgactaatgtcgattctggtcaagaaacactcgctgccaatactcgagagactcgcacaaaatctgaggacacaacgggattgcgctgcaaagcacaatccgatacagaaattgagtcaccaaaggaactagaagtcgaactttcaaaaccagctgaaccagctgtgtctacaagggaggaggaggatgtttgtccaacctgttgggaagtgttgcgtgatcgaattatacaaatgcgagcacttttacctgatgtatctgag

SEQ ID NO: 2564 - DNA, 552 bp, Gossypium hirsutum
  Clone ID: GOSHI-09MAY01-C83333_1
tcgctttggccacctgaagccaggcagagtttattacttgcagtgcaggagctagggactcgatttccacaagaccttacaaaacttaatcctgttacggacatgaaaattgaagatcaagaaattgttgagttagtgaaacaaattgaggaacacgaaaagaagttgtttgctcatccactccacaagtctcaagatgagaatcaaattagatcttttcagaggaaggcagaggtgaatcatgagattcaacagctcaagtcaaaaatgcgtgattcccagcttcaaaaattccgtgatgaacttaagaaccgttcaagggtcctgaagaagttaggccatattgatgctgatggtgctgttcagttgaagggacgggcagcctgcttgatagacactggagatgaactgcttgtgacagaactgatgtttaatgatcagtaagaggagtttgaagtttaaaaacagtatgatttcatggcttgtcattttgctgcgtgcaaaagttcaaccttagagctgatttggtacattcagtgatcttgatcatca

SEQ ID NO: 2565 - DNA, 415 bp, Gossypium hirsutum
  Clone ID: uC-gsronu33B125c06b1
gaagggtaggtgcttgctcatccgcgccacaggtggcaggatgagcgtcatattcgaccatttgagaagaaggcagaggtggatcatgagattcaacacatgatgtcaaacatgcgcgattcccagcttcaaaaattccgtgaggagcttaagaaccgttcacgggtcctgaagaagctacgccatattgatgctgatggtgttgttcaccagaagggacggctagcctgcttgatagacactggagatgaactgattgtgacagaactgatgatcaatggacattcaagaatctggacatcacaagggagcagccatgcacgctgtttcattccattagataatcaagtgaacagatacagctgaggacagacagtgccatagcattacagctactgcaagaaagtgcaagaaa

SEQ ID NO: 2566 - DNA, 706 bp, Gossypium hirsutum
  Clone ID: GOSHI-09MAY01-C83253_1
tgggtgactttgggggaggggggcaggttacaggccatgtcaaaacgcagtacatttattggcactccacattgggtggcaccagaagttattcaggaaagtcgctatgatggaaaggttgatttatgggcacttggtatatctgcgattgaaatggcagagggactggggggaggagcagcagtgcatccaatgagggttatatttatgatatctattgagccagctccaatgcttgaggataaagaaaaatggtctcttgtctttcatgattttgttgctaagagccttacaaaggatccacgtctacgccctactgcatctgagatgttaaagcacaaattcattgagaaatgcaaatgtggagcttctgtaatgttgccaaagattgagaaggcaaagcaaataagggctgcgatggttcaacaagcacaaattcttgctcctacaatttctgaacctaatccaatggtaggttcaaatttaaatgatgattatggagatactgttccatcaaggcctcaggatatgggtcttcaagttgcaaatgaagcttctacaactggtactttgaataagcataacatattaggtggtgttgaagtgacgggtgaaggggagtttggcactgtaatagttcacaatgaggatgagtcacagaagccatttgctcaaactgaacttcacaatggtaaagaagcttcaa

SEQ ID NO: 2567 - DNA, 583 bp, Gossypium hirsutum
  Clone ID: LIB3584-044-P1-K1-A3
cccacgcgtccgtgctcgaatggaaagggcagctgaaaagggaaaagctattgctgctgctgttgaaggtgtagaaaaaaattggggagcatctttctcgggtcagagtacattcattgagacacttcgagagcgtatgttcaggccctcactgtctacgattataacagacaatccaaagattgtaacagtttcaccagatgacacagttttagcagctgcaaaaaagatgcttgaatctcgattaaactctgcagtcgtgacagttgaaaacaagccacgagggattttaacttcgaaggatatattgatgcgggtaatagcacagaatatgtctccagagactactcttgtagagaaggtcatgactcccaacccagaatgtgcaacaattgacacgccaattgttgatgctttgcataccatgcatgatgggaaatttttacacctccctgtggtagatagagatggagagatagttgcttgttttgatgtaatccatattactcatgcctgctgtgccactttaagtcaagttgggagtacttctggagtcaataatgaggctaccacaacaatgatg

SEQ ID NO: 2568 - DNA, 479 bp, Gossypium hirsutum
  Clone ID: LIB3584-061-P1-K1-C2
cccttgtattatgcattttccgtttttagttttgctttcagtagacagtagacctgttataagtctctgctatcttttgggatgatatgcaggtcatagtacattcattgagacacttcgagagcgtatgttcaggccctcactgtctacgattataacagacaatccaaagattgtaacagtttcaccagatgacacggttttagcagctgcaaaaaagatgcttgaatctcgattaaactctgcagtcgtgacagttgaaaacaagccacgagggattttaacttcgaaggatatattgatgcgggtaatagcacagaatctgcctccagagactactcttgtagagaaggtcatgactcccaacccagaatgtgcaacaattgacacaccaattgttgatgctttgcataccatgcatgatgggaaatttttacacctccttgtggtagatagagatggagagatagttgctgttt

SEQ ID NO: 2569 - DNA, 876 bp, Gossypium hirsutum
  Clone ID: GOSHI-09MAY01-C58952_1
catttaattgtaaaaaccccacattcagaaaactgtttccggagtatgtggataagcccaacaagcagcagcagtttgtgtcagagcatttatcaccagaatcccctcaaggagaaaattctaaacccgagactgaaaaagttgttaactcttcagggaaagatgttaaaaaagtagataccctcaggaatacccgaagaaaccagaaacagtctttcccgacgtggatgatgttgttgcttgtttccatctttggtattgtaatggcgttgccactgcttcaactttgatataggtgtcacaacatggaaaaaaaattgtagtgagtggttataacagtctctactttagggaatccttttaaatgctccaaaggtttgctctgtactagaaattatgtatagggggtttggttccttgggaggagggtcagttggatcttgactgatgtttctactatgttaagttcatgttggtgaccaattgatgtcgaaacattacatgcttgcaccattgttattattttagttggagtcgtttgattgatttggtttcatagctgttctgtgtcgtcctagtgctctccaaggtcaagtcgtgtgctactgggtattgagattcatgcactgaaaacatagaagattttggcttagctgtgaaattgagtaactgtctgggacgaggcgaaccaagaaccaactttgcgagccaggacgtgctgaagagccataagcttttttcttaatgctaatttgagctggcattatagaaattacaatggtaaggtctgtctccactttcctttttctttgtatcttacctaaaaccaccggttcgttgttggtgtactatgaatagctttgcctttttcctttc

SEQ ID NO: 2570 - DNA, 975 bp, Gossypium hirsutum
  Clone ID: GOSHI-09MAY01-C58942_1
cggccgcgtcgacccgacccagttcagattttggacttctttcaggagcaaaacaggtgtgaaactgaaggcttcagcagagcctccagcgctaacacgggagcttaaaggtgatgaactaaagggcataatggaaatggaaagtggttgtgatttgtttgacaagttgaaaaatgggttcctcagtttcaaaagccataaatatatggaaaacttggaatgctatcaagcactcgccaagggtcaagctcctaaatttatggtgattgcctgtgcagattcaagggtatgcccttcaaccatcttgggatttgaaccagagaagccttcatggttcgcaatgttgcgaacgcggccccaacatatgagagtggcccatcggaaactaatgctgcactggaatttgctgtaaattcacttgaagttgaaaacgttttcatcattggtcatagctgctgtggtggcattcgtgccctcatgagtatgcaagataaagcggaatcaagtagctttatccggagttgggttattgtcggaaagaatgcaaaactaagtacaaaggctgctgcttcaaacctcagttttgaccagcaatgcacacactgcgagaaggaatcaatcaacaattcattgttgaacctgcttacttatccatggatagaaaaaaaggtgaacaaagggatgctttctctgcacggtggctactatgactttgtcaactgtactttcgagaaatggacattggattacaagggaagcatcatgaatggaaaaaccagagttgtagtgaaggaccgattattttggtgctaaccttctcggtccatcttatcttttttatctggtgcttccgcatcgctgttccgttcacagtttacttgatcgtaagtgctaagtgtcaatgcagtctaaaatgtttattcttgggatatcaggaataactacttaggtgaataatatgttgcttctgatctg

SEQ ID NO: 2571 - DNA, 594 bp, Gossypium hirsutum
  Clone ID: uC-gsronu33B031b10b1
ttcatgcgtccgggagaggttactcaggtgcagcggggatgattgagactactagctgtggtaggactggagcgatggggaaagtgcaacataaagatgcaataaaagagtctatccggagttgggttactgctggaaagaatgcaaaactaagtacaaaggctgctgctttaaacctcagttttgaccagcaatgcacgcactgtgagaaggaattaatcaacacttcactgttgaacctgcttacttatccatggatagaagaaaaggtgaacaaagggatgctttctctgcacggtggctactatgactttgtcaactgtacttttgagaaatggacattggattacaagggaagcatcatgaatggaaaaaccagagttgtagtgaaggaccgattattttggtgctaaccttctcggtccatcttatcttttttatctgttgctttcccattcgcttgttcgttaacagtttaattgattcgtaagtgttaagtgtcaatgcagactaataatgttaaattccttgtgatattaaggaattactacttaagtggaataatatgtttggttttggatatggggttgaaag

SEQ ID NO: 2572 - DNA, 452 bp, Gossypium hirsutum
  Clone ID: GOSHI-09MAY01-C58912_1
ttgtcgcgtgggcggacgcgtgggctagcttccaagctgaccggagccggcggcggaggttgcgtgctaacactcttgccaacccatatatcaggagaagtcatcgataagctagtggaagagctcggatcattcggtttccagtgtttctcagccggaattggtggtaaaggtgtccaaatttccttcgatcattcttcctaatttgccgtccccatattttagtcgtaataagactctctgcgaataacatcatgaagcacattatatcgatgttatagttatttcccttccctttcgttttctgtacacttcactttcggattagccgttgtctagttaaaccggaacgaagaaaaactactgctacagagaacaatgttgtagctgtgtctattcctcctttgtacattagttgactgcatcaatttgtgttgtctttgctgttgaaa

SEQ ID NO: 2573 - DNA, 478 bp, Gossypium hirsutum
  Clone ID: LIB3825-030-Q6-N6-G5
aagttaaaacctcattgacttttaactttcaacagcaaagacaacacaaattggtgcagtaaactaatgtacaaaggaaaatagaaacagctacaacattgttttctgtagcagtagtttttcttcgttccagtttaactagaaaacggctaatccgaaaatgaagtgtacagaaaacgaaagggaagggaaataactataacatcgatataatgggcttcatgttgttattcgaaaagagtcttattaccactaaaatatggggacggaaaattaggaagaatgatcaaaggaaatttggacacctttaccaccaattccggctgtgaaactctggaaaccgaatgatccgagctcttcaactagtttatcgatgacttctcctgatatatctgattcatgttatcaaggcaacaagtgacagaaagcagcaaactattgatgaaactataaacaaaaacggatcaaagtcaaaata

SEQ ID NO: 2574 - DNA, 1040 bp, Gossypium hirsutum
  Clone ID: GOSHI-09MAY01-C58872_1
ccccgcgtccgccaaatttgttcaattcccactatcaaactagaggatcacatggagtcttgtcacaaattttcttttcctcttcttactcttctctctctctcttctcgttttttgttgctcatgctgaaggctcgctaacgccaaggcccttcaacaacaagattactggctgcttttgtctttggagattcgacggtagatcctgggaacaacaactacgtaaagaccctgtttaggggcaattttcctccttatggaaagggttttagagaccacgtgccgaccggaaggtttactaacgggaagctttccaccgatctcattgtttcttaatgtaggcattaaagaatatttgccaccatatttggatcccaaccttagcattgaggagctgatgacaggagttagcttcgcctccgccggctctggatttgatccacttacaccacagatgccgagcgtgatttcattacccaagcagctggagtattttaaagagtataaaaaacgactgcaatctgccattggaaatagaagaacggaagctattatcaaagaagctgtgtttctcatcagttgtggtactaatgactttgtagtcaactatttctcaccttaccaattcgacgaaaaagctataccgtctcagcttatcaacagttcgtcttgcaaagttttaagcaagtcctacaggtttggcttaattagaactactacaactatccaaagagatcataataacatatttaacaaatcaaattaatttcctatttttaacgatacggaggagtagattgttaatagctaaggataacctacaaatgatactagtttaccatatatgtttcatggtatataatttattcatctaccttttgatgaaggggaaggggttgcttgagccgtccaaaattttacttttcgactgtgagttacaagtggctacaacattccatatattttctggataagaaaaacgctagttaatcaaggttgtagggatatggggcttgagtcaaaatttgactattcaaatg

SEQ ID NO: 2575 - DNA, 773 bp, Gossypium hirsutum
  Clone ID: GOSHI-09MAY01-C58572_1
agagaactgctgaatctgttgctgttgctgctaacggatctagtcaagttgtggggtggcctcctatcagagcttatagaatgaatagcatggttaatcaagcaaaagtgctgacaatggagaaccgcaaaaaggagacctcgatggtcgagaacagcagcatcggcggctatcgtaacgatggtaacactaagctgaagaaatccacgtttgtgaaggtgaatatggatggaaccccaataggaaggaaggtcgatctgaatgcccatgaatcgtatgaaaagttagcgaaaacgttggaagatatgtttctcgaaaccgccccgagtgtcaatccatctggatcaacggcgctgcagcttgatatgttgaacaggatgacaagacgctcgagactgctggatggatcatccgatttcgtgcttacttacgaggacaaggaaggtgactggatgcttgttggagatgttccttgggagatgttccttacttcagtgaaaaggcttaggatcatgaggaaatctgaggcaactggattagctccaaggtaacaagaaacaaaaccagagacagagaagaaagccaatgtagaaatgtttttttgtttttggtttcaatgtcaattacagtgttgaagaaatatagtcaccataggttatgaatgtaatatttaatacaaataacagctagtgagagtgttgttctttgctttgatgcctgtaaataaaagcggcaagtttgttgttgttgtttaaaaaaaaaaaaaaaaaatt

SEQ ID NO: 2576 - DNA, 393 bp, Gossypium hirsutum
  Clone ID: LIB3149-049-Q1-K1-F7
acccgcacgcgtccgaaggagtcattgctaacggagcaagtctagtggtgggatggacgtctagtcatatctagacggggaagaggattttatatcactctaacgtgctgacattgggacaccggagattggagaacagcatactgtgaacagcaacatcagcagctttagtagcgatggatacacttatctgaagaaatccacgtttgtgaaggtgaaaatggatggaaccccaataggaaggaaggtcgatctgaatgcccatgaatcgtatgaaaagttagcgaaaacgttggaagatatgtttctcgaaaccgccccgggtgtcaatccatctggatcaacggcgctgcagcttgatatgcagaacaggatgacaagacactcgagact

SEQ ID NO: 2577 - DNA, 296 bp, Gossypium hirsutum
  Clone ID: GOSHI-09MAY01-C58792_1
gtcgttgtcatcctttccacggagagccaaggtaaatttttgctgttgataattcttacatgggaagtgtgggataaaaataatacttgtgggagacagacttctaaacgtatgcatttgaaggagaaattgaacaatttcatttcctgattgcgaggtgtaaaactagaaatacttggtctgttgataatggtatccagtggaatcctatatgtaagttggggttaatattatatattggttattaatgttaggccgacccaaaaaaaaaaaaaaaaaaaaaaaaaaataaataa

SEQ ID NO: 2578 - DNA, 509 bp, Gossypium hirsutum
  Clone ID: GOSHI-09MAY01-C58172_2
cccacgcgtccgaaaaaaaaaaacccggaagagatctccgaaatataatcgctttcttaatgccagatttctcgcctaattcttcgggattcattatttaaaatttcagcgaaaactagaagtaaaggaaaaagagggtgggctatttgataagttttgggagctttgagtatgaattgaaggagatttagttgaagagatgaatgtgagccatgcctcagtccacccagtggaagatctaccaaccacggacggaggcgtaggtataggcggcggcaacaacaacaacaacgaggtgcctagagtgaggatgaaggatattcaggggatgcctggaacggctggagggctcgcgttgcggatttgtcagtttgtttctgcagttatgggactttgtattatggcaaccaccagtgattttccatctgttaccgccttttgctaccttgtagctgccactggcttgcaaagtgtgtggagcatgtcgcaggctataattgacatttatg

SEQ ID NO: 2579 - DNA, 658 bp, Gossypium hirsutum
  Clone ID: GOSHI-09MAY01-C58172_1
ctctgaaaaaacccggaagagacaccgggggggggggggttcttaattccagatttctcgcctaattcttcgggattcattatttaaaatttcagcgaaaactagaagtaaagaaaaaagaagataggttattttaagttttgggagctttgagtatgaattgaaggagatttagttgaggagagggatgtgagccatgcctcagtccacccagtggaagatctaccagccgcggacggaggcgtaggtataggcggcggcaacaacaacaacaacgaggtgcctagagtgaggatgaaggatattcaggggatgcctggaacggcaggagggctcgcgttgcggatttgtcagtttgtttctgcagttatgggactttgtattatggcaaccaccagtgattttccatctgttaccgccttttgctaccttgtagctgccactggcttgcagagtgtgtggagcatatcgcaggctataattgacatttatgcccttttagtgaggcgctcattgcagaattatcgtgttgttagtttgtttgctattggtgatgggatcacatccactctgacgtttgctgcagcttgtgcttctgcgggcattactgttcttattgacaatgatctaaatagctgtgcacataaccattgtttac

SEQ ID NO: 2580 - DNA, 312 bp, Gossypium hirsutum
  Clone ID: LIB3584-043-P1-K1-F10
aagggctcaaagcaacgaaaacaaagaaaaatagagttaaaagaatttctcgcctaattctttgggattcattatttaaaatttcagcaaaaactagaagtaaaggaaaaagaagattggttatttgataagttttgggagctttgagtatgaattgaaggagatttagttgaagagatgaatttgagccatgcctcagtccacccagtggaagatctaccaaccacggacggaggcgtaggtataggcggcggcaacaacaacaacgaggtgcctagagtgaggatgaaggatattcaggggatgcctgga

SEQ ID NO: 2581 - DNA, 634 bp, Gossypium hirsutum
  Clone ID: GOSHI-09MAY01-C58352_1
tcattcctcaattcccttcttcctgtataaaccaaaccccttcacttcacgcccttctttctctttcgaaaaattaatccaaaagcatttcctaatggctcttcgttcgtcagtcaccagaagaaccctaacattgggcctaaattccacgatgctgctgcctctgtctcgatcattgcagactttctccctccccgatcttccttacgactatggcgctcttgagcccgccattagtggagagatcatgcaactccatcaccaaaaacaccatcaaacttacatcactaactataacaaggctttagagcagctccatgaggctattcagaaaggtgattcttccaccgtcgttaagttgcaaagcgccatcaagttcaacggcggaggtcacgtcaaccactccattttttggaagaaccttgcccctattcgtgaaggaggaggtgaacctccaaaagcttccttgggttgggctattgacacacactttggttcattggaatcattgattcagaagatgaatgctgagggtgctgctttgcagggctctggttgggtgtggcttggagtgaaccaggaattaaagaaactcgttatagaaacaactcaaatcaggatccactcgtgacta

SEQ ID NO: 2582 - DNA, 308 bp, Gossypium hirsutum
  Clone ID: GOSHI-09MAY01-C58332_1
ggtgcaacctccaccaccaagtactgcaccagatatcctctatagagtccacattgaaagtccggtgttgtgctttagggacgaggaatccacatctcgtcaaaaggaacaactagctgtttaaggccttcaatttagtgtttagctctcaatgtcgtttcaattttggcgttttcttgtggatttccctttttttttttttgggggggggggtggttggatctcaaattgattatgcatgtactgatactgggagttgctttcttttttacagcctgcctatatacatatatgtaagtctttttttc

SEQ ID NO: 2583 - DNA, 473 bp, Gossypium hirsutum
  Clone ID: GOSHI-09MAY01-C58202_1
atgctgtggtactgctttgctaccttgccattcatgccggtgatcataaagctttggaacaagctagggtcttgactgccattgaaggggcagatcgaacaatgtttgcacaacatcctgatttgaaagacttggtgtccagggccatttatcaactcaacctttaccatacccataccggagtccatcctcagaggcaattatatgcgccttaaattatgcacccaatatttccgtttatggttatttgttttgcttttcaggtaaaccctaaattggaaggcaaagctaacagggcatacgcataatagatttggtaagttggatgaaaaaagtataggttcagcaatagacaggtttctgtttaagaactatacgttgttcaaaataccttagatgcttttatatgccctttgatggttcaattgtctgaatattttctttcatgtttatatgagcaaattgattccttc

SEQ ID NO: 2584 - DNA, 409 bp, Gossypium hirsutum
  Clone ID: GOSHI-09MAY01-C59772_1
atctggccggcgcggcgctcccctgctctctggctccgggctgcggcgccgcggctggagcgagcccctgtcccggcgcggggcggcggcgggcggccggcaggcactgccttgcgtgtgagtgcacctcactcacatgtgctggagaatctggtaaaagcaccattgtgaagcagatgaggatcctgcatgttaatgggtttaatggagacagtgagaaggcaaccaaagtgcaggacatcaaaaacaacctgaaagaggcaatcgaaaccattgtggccgccatgagcaacctggtgccccccgtggagctggccaaccctgagaaccagttcagagtggactacattctgagtgtgatgaacgtgcctgactttgacttccctcccgaattctacgagcatgccaa

SEQ ID NO: 2585 - DNA, 386 bp, Gossypium hirsutum
  Clone ID: LIB3196-014-P1-M1-D6
atgcctgctgctgctgggtgctgtagaatctggtaaaagcaccattgtgaagcagatgacgatcctgcatgctaatgggtctaatggagagggcggcgaacaggacccgcaggctgcaaggagcaacagcgatggtgcgaaggcaaccaaagtgcaggacatcaaaaacaacctgatagaggcaatggaaaccattgtggccggcatgagcaacctggtgccccccgtggagctgtccaaccctgataaccagttcagagtggactacattctgagtgtgatgaacgcgcctgactctgactttcctcccgaattctacgagcatgccaaggctttgtgggaggaccattgagtacgcgcctgctatgaacgcttcaacgagttcc

SEQ ID NO: 2586 - DNA, 387 bp, Gossypium hirsutum
  Clone ID: LIB3149-060-Q1-K1-A2
gtgatggactctgggatgttgtgagtgacatggaggtgacaaacatcatcagagacacggggaaagagccggcattgtgctcgaaaaggttggcaacggaagctgcaaaacgtggcagtaaagataacatcacagtcattgttgtgttcctttgtccagtatccacagcagagagagtttactaagggtgtttttgattgttttttgtgaattcaattcgcttgaaataaagatgaattaaatcgtccatgttatgagcaacagcatttggcctttaggagctggttttgcttctaaaatattcatttaatattgatatatttattcgggcgatactttattctgaaataataaaattgattttaggtcaaaaaaaaaaaaataaaa

SEQ ID NO: 2587 - DNA, 286 bp, Gossypium hirsutum
  Clone ID: LIB3149-060-Q1-K1-H7
gcaaacgataaggagtcccaatcagaccggttagaagctaatccaaaagtcaccgtggatgagttaattattggacctactgctattcaaaggaaaacgaagtttcttggtttttgtactaacaatactttcctggttgtgtagtctgccaataaaaattctatcagaaatcgttgcgttgggtgtttttgattgttttttgtgaattcaattcgcttgaaataaagatgaattaaatcgtccatgttatgagcaacagcatttggcctttaggagctggttttgg

SEQ ID NO: 2588 - DNA, 476 bp, Gossypium hirsutum
  Clone ID: GOSHI-09MAY01-C59022_1
gcttgctcattttgctttgttctttaatcatgggcaatgttgctgtgccgggtctggcacgtttgttcacgaacgtgtttacgatgaattcatagagaaagcaaaggcacgtgcattgaggcgtgttgttggtgatcctttcaggaagggtgtcgagcaaggtcctcagattgacacggagcagtttgagaaagttttaagatacataagagcaggcatcgaaagcaacgcaacccttgaatgcggaggtgacagacttggaacgaaaggatactttgtccaaccaaccgttttctcaaacgttatggatgatatgctgatagcaaaagacgaaatcttcggtccagtacaatctatcctaaagttcaaggatattgatgaagtaattcgaagggcgaacaacacccgttacggtttatcagctggagttttcaccaaaagtgtagagacagcgagtaccttgactcgtgcgttaa

SEQ ID NO: 2589 - DNA, 382 bp, Gossypium hirsutum
  Clone ID: GOSHI-09MAY01-C59292_1
tcgacccacgcggccgcccacgcgtactaaaaaggattgaggatttacgggacaatgagccgcaaccaccacctggaggagttgattgaggggttgagtcgaatgtgggaagtaatgtctgaatgtcataggcgtcagtttcaaatcatctcagttgcatacaagaatggcatcatgagaatctctgtgctgtcagaatcacatcggcatgtcaccgctcatctcgaacatgaactaagcttgctgtgttccagttttacaaagtggattggtgccctgaaagcttatctgaaagccataaacagtgggctcagtaaatgtgttaccattggaaaatcttgggaaagatcaaagaaaaaaaatttttaaacccaatttaccc

SEQ ID NO: 2590 - DNA, 629 bp, Gossypium hirsutum
  Clone ID: GOSHI-09MAY01-C59252_1
gttttctccgatctcgctgtctcaatctttcccactttccatccctcttcgtctccttcaattcatttctttagtttaaaattctcactcatctctctctgtctctctctctctccactttaaaatctcaaaaaatccaaaaacaaacgaagatataggagtatcccggtttcactgcaaacgccattgatgagagcttagtttgtagagaaagagattcagttcgagcgatttatgtttgtagaaaaacgacgcttgggatttctttccttgctctgtttttacttattttgagggtctaacctttatgggtcaagacagtttcactccccaaaagagatcttttaccggtggcggcggcttacccacgaccaacaacgctgctgctggtggcggaagatcccgtgtattagcaggaatgccgcgtgggaggcagatccacaagaccttcaacaacattaaaatcacgatcctctgcggcttcgttaccatacttgttctacggggtacaatcggcgttggcaatttgggaagctccgaagccgatgctgttaaccaaaacctaatcgaagaaacgagccggatcctagctgagattcggttcgacttcgaccctaccgatccggacg

SEQ ID NO: 2591 - DNA, 392 bp, Gossypium hirsutum
  Clone ID: GOSHI-09MAY01-C54022_1
cccacgcgtccgatttgttctcttttctctctctctcttcaatggcgtcccatgaaaacatcaccgtcatcacctcccccaaaggcaacaactcggaagcagcagcatcggcggcagccaactcgccgaaaggaggccaatgtttgtgctcaccgacgactcaccaaggctctttccggtgcagatttcacagatcaagctcatcatcttggatgatgaaacgatcaaaatccatgcctaccaacaatacttccatggtttctctttctcccaagtcaggtgaaacttcataaaatccccaatatatatatacacacatatacataagtatatgtgtatctatatccaccatgtatgttttcataacaattccgatctgtataactctacct

SEQ ID NO: 2592 - DNA, 277 bp, Gossypium hirsutum
  Clone ID: GOSHI-09MAY01-C54242_1
gccacgcgaccgaggcgattacacacgatctgccgaccatggcatcagttgacggtgcagactttaacagcgtggatgctacattttgaagtcggcctaatggaactacacacgttatgataaccagcctgcctggtcattttaagagtgcatggctatctgcagactgtgtgttgaaatatattgcattgtatgaggaatgatcttgtcaatcacatagcgctttacatggggacaaagaatctgactctggctggacttaaatttcaagagagga

SEQ ID NO: 2593 - DNA, 410 bp, Gossypium hirsutum
  Clone ID: LIB3165-047-Q1-K1-G7
gatttctataagaaacaacagctgcgagagctatcaatgctgaatggtacacttcgtgaggaaggctctccaatgtctggttctttatcccctttccaaaacagcctcggaatgaagcgagcaaagactagggggtaaaaggatcccttctcgaggcctgttggagcttgtgtcttagtgtctgccgtaagccagcagttttcccggacattgcaggtattggctatatataggcaaatgcctccatgcacgatcggggcactggcatgggcactgttactgttgtgtgccagttaagttaggttgttctaacttatttgtttgatatatgaagtgtgtttatgttgtgtgtgttgggagaagttaaatgctagtattatttttacacagtgagcaatgggtgtgcgttc

SEQ ID NO: 2594 - DNA, 408 bp, Gossypium hirsutum
  Clone ID: LIB3493-002-P1-M1-E5
gtcgcgacggccgccctatttttttttttctaacgatgaaaaccaggaattttataataaacaccatccgacagagctatcaaagctcaatggtgcactcaatcgaggaaagactatacaatggaccgttactcaatcccctttccagaacagcctcagaatgaaacgagcaaagactatggggtaaaaggaacccttctagaggccagtcggagcttgtgtcttagcgtctgccataagccagcagctgtcccacgacattgcaggtattggctatatataggcaaatgcctccatgcacgatcggcgcactggcatggacactgatactgttgtgtgccagttaagttaggttgttctaacttatttgtttgatatatgaagtgtgtttatgttgtgtgtgttggg

SEQ ID NO: 2595 - DNA, 609 bp, Gossypium hirsutum
  Clone ID: GOSHI-09MAY01-C55522_1
cccacgcgtccgaattatttgaaatttgaagaaaaaaacatctctcaaaaagacccatagatgaaagggaaatggaaaggttcgaagagaaaactagggttgccagctgcccttctactgtgctcactctcattccttgctggattgtttgttcccacttttttctttcaggatgttccaatcattaaacccaagccgagaatgctcgaggcagtgcaggagaagacgtttcgtgatccgatggcaaatggagtaactggggagagttcgattgaatctattccatttcaggttttaagttggaaaccacgagcttactattttcccaactttgcaacttcagaacaatgtgaacatgtaatagaaatggcaaaggtgaaccttaaaccatctggtttggctttgcgcgagggagaaactgaagaaagcacaaaaggaactagaacaagttcgggaacttttattagtgcatcagaagatgaaaccgggaccttggacttaatcgagaaaaaaattgcaaaggttacaagcatcccacagagccatggagaggcatttaatattttgaggtacgagattgggcagaagtatgattctcattatgatgca

SEQ ID NO: 2596 - DNA, 333 bp, Gossypium hirsutum
  Clone ID: LIB3165-047-Q1-K1-F9
ctatttgctgattgaatccgtgaaactatatctatatatgcttttctttgtatggaagttagattggtatctgaaaagtgtacaaacctgatgtatccaatttggcaattttaatggctagtttcatttgttcaaaagaaaaaaagaaagaaaccacttttttatttcaagatgttccaataatataaacccaagccgataatgctcgaggcagtgcaagagaagacgtttcgtgatccgatggcaaatggagtgggccggggagagttagaatgaatctattccatcccaggttttaagttggaaaccactatcttactattcccccaactt

SEQ ID NO: 2597 - DNA, 229 bp, Gossypium hirsutum
  Clone ID: LIB3083-004-Q1-L1-E9
cagagatagttagagagagagagagagagagagagagagggccaatttgagtaactggggagagtcctattgaatctattccatttcaggttataagttggaaaccactagcttactattttcccaactgtgcaacttcaaaacaatgtgaacatgtaatagaaatggcaaaggtgaaccttaaaccatctggtttggctttgcgcgagggagaaactgaagaaagcac

SEQ ID NO: 2598 - DNA, 810 bp, Gossypium hirsutum
  Clone ID: GOSHI-09MAY01-C55472_1
tcacgcgtccgttctttctttggcaatggggaggatttattacacatcttgtgttgtgcaaaaccctgtcgccatgttcaacaccctttgttatcttcttcttcttcttcttcttctccacttttctctatctcagggcctgactttcccgcaggatatttcagctcttaaagccttcaaggcctctatcaagccaacctcaatcccttcatggtcttgtctcgcttcatgggacttcgccgctgccgacccttgcgctctccctccccccactcacttcacctgcggcattatttgctccattgactcaactcgtgtcacccaaatcacccttgatcctgctggttactccggccaactcacccctctcctttcccaactcacccaactcactattcttgatctttctgataacagcttcttcgggtctataccttcttccatttcttccctacgtagtctccaaactctgattctcaagtccaactccttctccgggtcaatccctgactctgttaccaccctgaaatcacttgaatccttggacatttctcataattcactttccggacctttgcccaaaaccctcaactcgctttctggtttgaggagactcgatctcagttacaaccaactcaccggttttctacctaaactgccttataacttattggagcttgctttaaagggtaattctttatccgggtacatctcgaattcctctttcgatgggttaactcagctggaagtcgttgaactcagtgaaaactcgttcaccggcacactcggagcccggacgcgtgggcggac

SEQ ID NO: 2599 - DNA, 493 bp, Gossypium hirsutum
  Clone ID: GOSHI-09MAY01-C55412_2
cttaatttgagcataattcaacgccaaacacaagccaccattagacccatttttaaaccccagctcctcctttgttacagaagttgaacgaaaatgtcgcctttatccaaggttgttgcttcatggtgcaagaagcatgcagatggagatgatgatgacaatgattttgactatgctcccgcagcatgcatggaaggcaatggcgacgatgatgatggagactatgacgttgctccagcagcttctctcgagggcgatgatgatgacgatggcagctatgattatgctccagctgcatgattggagtgaggtttatgagtgccccttaccgtggggtttctaacccaaaactttttgcaattctactatggagtgaggtttatgagtgcaccccccccccggtgcggctttaaagcaccttgtgactttggggttgtaaggaatatttcaattaaatgatattcaagggaaacatgggatcggattctatgtc

SEQ ID NO: 2600 - DNA, 526 bp, Gossypium hirsutum
  Clone ID: GOSHI-09MAY01-C55412_1
tataattcaaccccaaacacgtccgaaccaccattagacccatttttaaaccccaattcctcctttgttacagaagtagaacgaaaatgtcgcctttatccaaggtttttgcttcatggtgcaagaagcatgcagatggagatgatgatgacaatgattttgactatgctcccgcagcatgcatggaaggcaatggcgacgatgatgatggagactatgacgttgctccagcagcttctctcgagggtgatgatgatgacgatggcagctatgattatgctccagctgcatgattggagtgagtttatgagtgcccctaaccgtggggtttctaacccaaaacttttttgcatttatgagtgccccccccccccccccccgcgtgcgcctttaaagcaccctgtggttgtcgggtttataaggattattttaattaaatgatattcaaggagaacattggatcgtattctatgtcagctatcgttattattttagcaatctgtgacaaacgttaatatcatatacg

SEQ ID NO: 2601 - DNA, 549 bp, Gossypium hirsutum
  Clone ID: GOSHI-09MAY01-C55192_1
atttcatagcaatggagagttacgaagaaaaacgggaagttgaggatgaagaacaagaagaggctttgtcactctgtgatttgcctgtgaatttgattgaagaaaaggaactgaaaaatgaagaaaatggtgaaccatcacaagaagaagatttcaacttcggttcatggcctggccatggtggttcgtttaggtccgagccagaaatgtgtgtagctgatgaagtgttcttcaaaggccaaatcttacctttgcgtcactcagtgagttccgacaccgggttccgccctcatgacagccacaacatgtcccggtccttgtcgaggtcagaatccatggaccatggttcattaagtaggttcacaagtgtgagtagcagtagcactaggagcagtagccattactcaacgagtagtactaactcgaaacccggtatgaaaatccgaaacaacttcaacacacacccgagcccaaaaccttaaatccgatcaacccgaaccgccgtcacagtcgaatccaacgatcatcgtcgatgtgggatttttttaa

SEQ ID NO: 2602 - DNA, 673 bp, Gossypium hirsutum
  Clone ID: GOSHI-09MAY01-C56952_1
cttttatgcaaacctttatacactcaacaagcttcgtgagtcaaaaggaatgcagacaataaaactccgacctcactgtggggaggctggtgatattgaccatttagctgctgctttccttctgtgcaacaatatatctcacgggattaatctccggaaatcccctgttttgcagtacttgtattaccttgctcagatcggattggccatgtctcctctgagcaataattcccttttcctggactatcatcgcaacccatttccttcattctttcagcgtgggctaaatgtttctctttcatctgatgaccctttacaaattcatttgacgaaggaagcgcttgtggaagagtacagtgttgcagcacaggtttggaagctcagtgcttgcgacttatgtgagattgctagaaattctgtataccagtctgcgttttcgcacatgtcaaagttgcattggcttggccacaaatatttcctatgacgtccagaagggaatgacattcagaagacagatgtcccaaacattgaggattgcccttcgacatgagacatggattgatgagatccagtatctctactcggggagagcaagaattccacaagaaatagatcctgcgatgtaactgaatgtgatacgtgaatcatgaaatttcacgtagtgggacgatga

SEQ ID NO: 2603 - DNA, 592 bp, Gossypium hirsutum
  unsure (1)..(592): unsure at all n locations
  Clone ID: uC-gsflmaxxa038a12b1
tctgattctgccccttgtattattctgcataaacagtttacgagtgacttttggaatgaactccccctttaaaatagtacaattgattcaattactaatgttgatcatcttactgtccttttatcagatcggattggccatgtctcctctgagcaataattcccttttcctggactatcatcgcaacccatttccttcattctttcagcgtgggctaaatgtttctctttcatctgatgatcctttacaaattcatttgacgaaggaagctcttgtagaagagtacagtgttgcagcacaggtttgttacttgcttttgacagtactatatctataatactgtggaaaaccaaatggccagntctctctctctctgtatatatttatatatatccttttccaatattcctgaaaatgtggaacgaaaaaaaaaaattcatccaactgttcccccacacagtctaaaggaactagtaaattaaaagacacatggtaggtgcttaaccataatgcttgatgtctgtcatcatcttaaatcggtactttgcaggtttggaagctcagtgcttgtgacttatgtgagattgctaga

SEQ ID NO: 2604 - DNA, 651 bp, Gossypium hirsutum
  Clone ID: GOSHI-09MAY01-C56962_1
tttgtgtataacattcatagtaatattttttcagaaagaaaatggcggattctgctgtggctttggaggatgttgcttccgttgatatcatgactgagctacttcgccgtttcaagtgctcctccaaaccagacaaacgcctcattctcattggcccccctggatctggaaagggcacacagtcgcctatgattaaggatgattactgcttgtgccatttagccacaggtgatatgctcagagctgcagttgctgccaaaacacctcttgggattaatgccaaagaagccatggataaaggtgaacttgtctctgatgatttggtggttgggataattgatgaagccatgaagaaaccctcttgccaaaaaggtttcattttagatggttttccaaggactgtggttcaagcacagaagcttgatgagatgcttgagaagcagggaactaagatcgacaaggtgttgaactttgccatcgatgattccatattggaagagaggatcaccggtcgttggattcatccttctagcggccgaacctaccacaccaaatttgcacctcccaaagttcctggtcttgatgatgtcactggggagccattgattcaaagaagagatgacaccccagcagttctcaagtcaaggctag

SEQ ID NO: 2605 - DNA, 496 bp, Gossypium hirsutum
  Clone ID: GOSHI-09MAY01-C56922_1
ctgatgaacagcggggaatgcctgctcctttgactgacgttacttttgttctgaaattgcccgttgatccaacattgttaaaggtttcacctaaagctgtgttgaacagatcagagagagaactgaagtggcatgtgccagaggttccactgaagggtactcctggcaaattgagggtaaggatgcctttggattctgctgacattgatgaagaactagaagttgttggttatgtaaaattttcagtgcaaggagctacttcattgtctggggtctgtctaaagcctgctaccgagggtaagacagatttttatgaggtaaatcatcggtatcagagtggggtttatacatgcaattgaattctgatgagattgttttttccatacaaaatttctgttttcttttaatattcctttctcttttcaaggagatatgcgtttgctcacttttgtagaattactggatattctgtttgtaatctagaacatcttctgtc

SEQ ID NO: 2606 - DNA, 463 bp, Gossypium hirsutum
  Clone ID: GOSHI-09MAY01-C56862_1
ttagttcttcgtatgctataattttttgttttgaactgccagattcaacctaatggcgaagaagggttcttcaacgacgccttctagaaaagcaaaaaataaaaaagaagaatctgttccagaacagaagaattcagcttctaaagtggctggtaacgaaatcgacgagatatttgcaggtaaaaagaggaagaaacccgacccgaaagggtccgagaaaccgaacggcgatgaaatttcaaaacccaaatcgtcgaaaaagaagagtaaaaagagtagagaaaccaacagggaaggaggattcaatgagtcttcttctgggccttggaaaaggacagcagatggttttgcaatttacactgaagaagaattgggtattagtaaatctgatgctggaagtacgccactttgtccatttgattgtgaatgctgtttttgataaatgggggtttggttctaattt

SEQ ID NO: 2607 - DNA, 531 bp, Gossypium hirsutum
  Clone ID: GOSHI-09MAY01-C56462_1
ggataatggttatagaatcacttcaacagctgcaacttcagatcaatctgcactaatcttgagcattcctaagcgcaagcccggtgatgaaactcaagaaactttacgaacatctcaattccccagcacacatgttaaggaaaaatgggcaaaaaatctctatcttgcttgtctatgctatgggaggactgtatcatgaaatggggtatcaatggtggtgccaattttcctagggaaaaaagggggaggttccctacatgttatctccaccagtttccttttgatgtgttccccatgttaaatgtttatagcggccattaggatgtcttaaaaatatctcccaagtccttgtactattaaaatgttgcaatttagtcctaattttggttatttctggattttaaaatacaactgttaacaatgtttgctagtgtctgttaaatatgtgctatgtggcatacacgtggccctaacatgtaacataaaatgttatttagatatatatatataaatcgaaatttgggagagaat

SEQ ID NO: 2608 - DNA, 580 bp, Gossypium hirsutum
  Clone ID: GOSHI-09MAY01-C56022_1
gttcgtcatttattgacagatttttcggtatttatctctctaagaactagaacggatttattgagattattctttttttttcttagaatttccatttctttagtactcatgtgtattcttagccctgctgtcgctttatgcgcggggcccgaggcaattccagagtcttgacctcaacgactttccccccgacatttccccggccgaatccgctcaattagaacgcgaaacggaagaaaatgcccgggaatgtgatcgcttacacaatgagatatttcaaaaaactaaagaaatagctcgggcggcgggagtggacgataatcaaaaactggagaaaatcgtcgacgcggtcaagtttctttccgacgtggaggacttggccgaagaggcgcgaatcccctatctccatgagttctaagccaagatcgagaacaaagaaacttggttcgagatcgataaggaaatgaagcgctgggggggccgtggcctcttaacccaaaacggcaaaatggaatggaaaaggggtgctttggattgggagtaatcactatttttaggggggggggagaccattctccac

SEQ ID NO: 2609 - DNA, 537 bp, Gossypium hirsutum
  Clone ID: GOSHI-09MAY01-C57802_1
catgtccttccccttgatctcccactcgactcggatcacgactccctcgactcgtttagcgttttgcgtgcaataggtgtacccgcctcgacgtcttagctcagtaactcgaattaaacgatggagccgatggatatcgtagggaagtcgaaggaggacgcttcgcttcccaaagcaactatgaccaaaattataaaggaaatgttaccgccagatgtacgcgttgcaagagatactcaagatcttttgattgagtgctgtgtagagtttatcaatctcatttcatcagaatccaatgaagtttgtaacagagaggagaagcggactatagcacccgagcatgtactcaaggctctagaggttcttgggtttggagaatacattgaggaggtctacgctgcttatgagcaacacaagatcgagaccatgcatgactctttgaaaggaggcaaatggagcaacggagcagagatgactgaagaagaagcggcagctgagcagcaagaggagtttgctgaagcacgagcaagaatgaat

SEQ ID NO: 2610 - DNA, 623 bp, Gossypium hirsutum
  Clone ID: GOSHI-09MAY01-C57532_1
ccccgcgtccgctttttttgtgaggtttttcagatttggagcgttcagtctgtcgaatggttcatcgccggtcgcaacaatcgcatggtttgaagcagctcagttgtggcagccactcattgcaattccctagtgcttgttattccttatatttggcggctactgaatgtctgcggcagtacaaggccacaaaaagaaaccaacctttttaatgctttaaaatattcaacagctgtccctgtgatttttctctcggctcttaaatatcatgtttcacctgataggtggacatatgtttatcgtcgcctctggcttttttcaagtgttgtcaactcactctactcattttattgggacataacacgtgattgggaccttagtgtcttcaccagaatcttcaagttcaacaaaccaagtttgtgcaccaatctgttctatgggcgaagatgggtttatttttgggttatcggaagcaacttgattttgcgttgcacatggacatataaactgtctgctcatctccgccacaactacttgactgtgtttatggtcactgccttagagatgctaagaaggttccaatggatattcttccgagttgaaaatgaatggaacaaaattac

SEQ ID NO: 2611 - DNA, 495 bp, Gossypium hirsutum
  Clone ID: LIB3582-027-P1-K1-G6
ggctgatattctgacctccatggccaaggtataagcagatttggagcgttcagtctgtcgaatggttcatcgccaggttgcaacaatcgcatggtttgaagcagactcagtttgtggcagccactcagttgcaattccactagtgcttgttattccttatatttggcggctactgcaatgtctgcggcagtacaaggacacaaaagagaaaccaaccctttctaatggtaatacatctagctttaaaatattcaacagctgtccctgtgatttttctctcggctcttaaatatcatgtttcacctgataggtggacatatgtttatcgtcgcctctggcttttttcaagtgttgtcaactcactctactcattttattgggatataacacgtgattgggatcttagtgtcttcaccagaatcttcaagttcaacaaaccaagtttgtgcaccaatctgttctatgggcgaagatgggtttatttttgggttattg

SEQ ID NO: 2612 - DNA, 892 bp, Gossypium hirsutum
  Clone ID: GOSHI-09MAY01-C57462_1
gaaatcttctcagttcctttctttctttcttttcaaatgatttcttggaagaaaaaagtggattattgaagaaattagtttgagggtttctaaaaaaaaaatcaaattatcttcaatcgattatagaatggaagcttcgaattcgcgaatgcagacttttggtcagacggagattaattgggacaaactcgacaaaactaaattttatgtagtaggagctggaatctttactggagttacagtagcattatacccagtctctgttgtaaaaactaggcttcaggttgcttcgaaggacactgcagagagaagtgctttttctgttattagaggcatactgaaaacagatggaatccctggtctctatcgagggtttggaacagtcatcactggtgccattcctgccagggtgatatttctcactgctctggaaactacaaaagtagctgctttcagcatggttgaaccatttaaattctctgaacctacgcaagctgctatagcaaatggaattgctggaatgactgcatctctgtttgctcaagctgtttttgttccaattgatgtgattagtcaaaagttgatggtccaaggatactcaggccatgcaaagtacaacggaggtctagatgttgctcgtaaggttttaaagtctgatggaatccgaggattatacagaggatttggtttgtcagtcatgacttactctccatccagtgctgtatggtgggctagttatggttctagccaacgtgttatctggaggttcttgggccagggcacagacctaaaagaagtaacttctaatctatcgacatattggcagtgcaagctgttggaggaatcattgcaggtgctacagcttcctgcatacaacttcattggacacttt

SEQ ID NO: 2613 - DNA, 397 bp, Gossypium hirsutum
  Clone ID: GOSHI-09MAY01-C57182_1
ttgttggtatgggcccggacaaaaatgggcttttacatgagattaactaggagaataaacccacttgagtggagaacacgtcgctatccgttggtgcggacgtccttcttcgcatcaccgggaagtggctttacttcctgataggacatcaactctgttgtgggcgaaatacgaggcacattccacatgtgtgatcctaagatttcaatcacgtatatagttctgaaaggctgccaacacttcgatctcgggacagggctacaagctaaaatacgtgctgtttccgtagtgccaacgaagtgcttcatcgggtttttccatcctgaggcgatggatgagggacaacttcgactttttgcattgtgcaatgtcattcgataacatctgggacgagatt

SEQ ID NO: 2614 - DNA, 376 bp, Gossypium hirsutum
  Clone ID: GOSHI-09MAY01-C57172_1
gatcttgggttaccgtcagatcttcacggcgaaccccgataatgtccagcatatactcaaaacccgttttaataattacccaaaaggtgagttcttcattaatgttttctttgattttctcggcaacggaatatttaacgccgatggggaagcttggaagttcgagagacaggtttcgagtcacgagtttaatactaggtctcttcgtaagtttgtagaaaccgtcgttgatgctgagcttaacgaccggttggttccgatgttatccggcgctgttaccggcaagacagtgcttgatttgcaggatgttcttcagagatttgcttttgataatatttgcaagattgcttttgggtatgacccagaatgtctttta

SEQ ID NO: 2615 - DNA, 744 bp, Gossypium hirsutum
  Clone ID: GOSHI-09MAY01-C57162_1
ccctaatctcttcttatcaaggaaatagcggttgctgatcatctctggattctgtatttcttgatctctcgtggatctgatcatttatttgctggattattgtatatctttcaggatcttggatttcaatttccttgtattgaagaaaaaagatggctcgtacgaagcaaactgctcgcaaatcaaccggagggaaggctcccaggaagcagctcgccaccaaggctgcaaggaaatctgcgcctacgaccggcggagtcaagaagcctcaccgctaccgtcctggaaccgtcgcccttcgtgaaatccgtaaatatcaaaagagcaccgaacttttgatccgcaagttacccttccagcgtcttgttcgtgaaattgcccaagacttcaagacggatttgaggtttcaaagccatgcggtcctggcattgcaggaggctgcagaggcataccttgtgggtttgttcgaggataccaacttgtgcgctatccatgccaagagggtcaccattatgcccaaggatattcaactcgctaggcgaattcgtggggagcgtgcttaattttcttttttaatttgtattgattcaggggttgtttttgtgggtaatttcggattctatgtaatctaactggattacatctttaaaagatttccattattcatgcagcttgaatagctggttcattcacatcatattttgtcggttttgcgatgaatgatatttgatactgtgttggatt

SEQ ID NO: 2616 - DNA, 898 bp, Gossypium hirsutum
  Clone ID: GOSHI-09MAY01-C57132_1
ataacttcaaaaacttgaatatacctatgtcggaaatgtactcataattaacatcgggttacggttattctttgctggttaggtacccgatttatcatattccaatgggaaggactataaaggacttgtccacgtgcttcctcacgtatcatactctatcttcttctttccaaggtaacttttcactccatatacatataaatgtgtgtgtgtgtgtgtgtgtatgtatatgtgcttgtttagtgatattcttttatcttcttctttccaagaaatcgatcccgaggatgatatcaagctagccgaaaagaatcaaaaggaaaaagagggcaacatctctcttccgccgtttgggttagcaacttacaagatgcaaggggacgtgtggttgtcctcctccggttgtggaggaggggaccaagaaaggctattgtcacttttgggtgttgccgattcgtggctaaagcaactaagcgttcaacaccatgacttcaactatttctcgggtattcgacatggctaaaaaagccctctacatccctaataaacatggaaaaaagttcactcatcactcatttatcatcaaaagccaaaaaaaaaaaggaggaaaaaaaagaaagtaacattttgggtttttttgaagctttagttatggggatgcttttgagcccttgttagaaaaccccgtttttaggccatgtttttagtagatgttttcttttcaagtttgtgggcttttgttgtaaagaaatgggtgagatttgagagttagtgtgaggctcttttaagcttttgaaccttttttttttctttttttttttcgtggacctgtatgaatatgttctcctgttacccttagtataaagctaatgaaaatgttctcaataagtttttcccc

SEQ ID NO: 2617 - DNA, 1036 bp, Gossypium hirsutum
  Clone ID: GOSHI-09MAY01-C57082_1
attgcactctttgctttgctttccttctctcaaggctaatagcatttgtcatttaaagttgggtttttttttttgggaggaaatctttgttttttgttgtttgttgtgtggtgtgcatgggagctccaactgggactctctcttccatccactcctatttttcctttcaaaatgttggacctcaacagctatggttacgagcttagggagggtttgggtccatttggcattaatgttaacaacaattgcggcagttgcagcagcagctgcaattctagcagtagcggcggtgctgatgatggtggtggtggcaccaaaacacgacgactccttgatgaagagaatcgaattgttcctaaaacgttgcctcttttgttttggacaaaccaacgacctaatgatgaagatgagccgaaagatgtcgacgaccactcttcttctgccattttcaagaatgatggagagggtttagtggggtggccaccagtgaaagcatggaggaagaaggtgcggcgccgcgtagccaatgtaagggcggcggtggagaatagctgtggtggtagggcttcaagttcaacgtacgtgaaggtaaagatggaaggaaatgcaattgccaggaaaattgacattagtcttcaccactcctttgaatcgctcacaaccaccctgatgagaatgtttgatatatctgatgagaatgggcaaaagagctttaaactcacttatctggacagagaaggagactggctgcttgctgaagatgttcgatggaggaccttcattcgatccttgaaatacatcaaattaattcgaagcagatgctaataagttagtgatgggatggatgaaacttgaaagaatggtcacggccttttcaattttgcttcaatgtaaacatatagtaaatgaaacactagttgtttaagacacaggtatgtagatttgagtgcaataatgataccctgcttcaattattccaaaaaccttccctgccaacttcatcagcctttgaatatttcttaaacatgaatctatt

SEQ ID NO: 2618 - DNA, 428 bp, Gossypium hirsutum
  Clone ID: GOSHI-09MAY01-C57072_1
aacccccataccagcaagaatacatctaagtaaatcctctagccgcttcaaaaaacagagaaagaaaaccaatcttttctcttcaatattcgaccgaccgatggtctcccaatcgactgctctcctgcctctccttttgacccatagagtggtcaatcaaggcttcattgaaccaagaagattcgtacgaagtatgggtggcgtgagtacgggggctgtgctggcgtacggaggcgcgggcgtggttgctggagggttcggaggctggggctgctggagcagaggcgttgtccagttcttggctgcggcgcaaaatcctagctagggtttctgctttgatttttttttttgggctgtagggtatttgggtctaagttttgggttgtgttaggtttgggctaagtttgggtattgggtcattgtaataa

SEQ ID NO: 2619 - DNA, 541 bp, Gossypium hirsutum
  Clone ID: GOSHI-09MAY01-C50982_1
agctcctccaccacttcctgatgagccagagccaaaaagacagaaacttgatgatgccaagcttgttccagaagatcagtttcttgctcaacatccgggtcctgcttgcattactgtgtctgttcccaaccttgatgaagggaatctcaaaggacaacttcttgagatcactgtgcaggccttatctgaaacagttggcagtttgaaggagaaaattgcaggggagattcagcttcctgcaaataagcagaaattgagtggaaaagctgggtttctgaaggacaatatgacccttgcatattacaatgttggagcaggagaaacgcttgctctttcattgagggaacgtggtgggaggaagaggtgatgagttttttgaacgaggctatccaagcttccagtgggaacttaaaaattatcgtgggattcttatctcaatcctctttgttgttatattttggagattaaagtggcttggtcttgtactactaggattactatcataatattactgctatagttaaaacattcttgttctttt

SEQ ID NO: 2620 - DNA, 429 bp, Gossypium hirsutum
  Clone ID: LIB3149-033-Q1-K1-H1
gcttgttccagaagatcagttttttgctcaacatccgggtcctgcttgcattactgtgtctgttcccaaccttgatgaagggaatctcaaaggacaacttcttgagatcacagtgcaggccttatctgaaacagttggcagtttgaaggagaaaattgcaggggagattcagcttcctgcaaataagcagaaattgagtggaaaagctgggtttctgaaggacaatatgacccttgcatattacaatgttggagcaggagaaacgcttgctctttcattgagggaacgtggtgggaggaagaggtgatgagttttttgaacgaggctatccaagcttccagtgggaacttaaaaattatcacattttcacttcagaacagccatttgtttggagtcatggtcaaggatgttatgtgaaacctgataagc

SEQ ID NO: 2621 - DNA, 545 bp, Gossypium hirsutum
  Clone ID: LIB3825-010-Q1-N6-A12
aacaggctaaattggaagggttaataaattataaatgatcaacgcacattccaaatgctacatgacaaacagactaagaagcatccaatgaaatatcaaatctgaaaagggagcacattcccgttactattaaaaaaattgcggggcatatagggaaacaatctacgacgaaaaaataaaaggggcaagatggtccacatatcccaaattatgcacactgtgaccctaacttaacagaacacatcagtaaattcaaagtataatacaaccttatgggacagggcaccagccatccaaagtctgttcagacccaataatttggtgatgatctgcacatatagttattcttaggcgatagaaggccctttgattggccactttcaaactcactataagaccctgaaaaaccaagacgagacgagattaataattgatctgccataactgctgggtctgctttgattgtggctggccttgagacccactcatggacccatccctagggttttgctgctgagggtccagcgatactcccgtttgcgaat

SEQ ID NO: 2622 - DNA, 447 bp, Gossypium hirsutum
  Clone ID: LIB3146-023-Q1-K1-B10
ggcggggcgagcgacccgttcgttggtgggtttttattagggcttcaattcacctccacagcattttgggggaggggtatacccaaattggtaccattcacaaacgggagtttcgctggaccctcagcagcaaaaccctagggatgggtccctgagtgggtctcaaggccagccaccatcaaagcatacccagcaggtatggcaaaacaattactaatcttgtctgcttctggtttattaggggcttataatgagtttgaaagtggccaatcaaagggccttctagcgactgagaataactatacctgcagataatcaacaatgatgggtctgaagagacattggctggctactgccctgtgccatgaaggtgtattctacttttaaattattgatctggtctggtctgtacgttaacttacgaacacaacatgctaatttgggata

SEQ ID NO: 2623 - DNA, 435 bp, Gossypium hirsutum
  Clone ID: LIB3146-024-Q1-K1-B12
gcaggctggtgggtttcgacaagggctacaaccaccttcacagcattttgggtcacttggatacccaaatttctaccattcacaaacgggagtatcgctggaccctcagcagcaaaaccctagggatgggtccctgagtgggtctcaaggccagccaccatcaaagcagacccagcagttatggcaaaacaattactaatctcgtctcctcctggtttttcagggtcttatagtgagtttgaaagtggccaatcaaagggccttctagcgactgagaataactatacgtgcagataatcaacaatgatgggtctgaagagactttggctggctactgccctgtgccatgaggttgtattctacttttaatttattgttctgttctgttctgttatgttaacttaggaacacagtgtgctaatttgggatagtgga

SEQ ID NO: 2624 - DNA, 391 bp, Gossypium hirsutum
  Clone ID: LIB3146-040-Q1-K1-E1
cccacgcgtccgcccacgcgtccgaagtgataagtggtatgggacgagatgttaccgttttgatctatcttgatgttagaaaagctttggaaagtaagcatgcttgcttctttcaagtttcagtccggtgatgattctatgaaccgaagcaataactgcaaaaggcatgaagctttacatttcagacaacaaagcgatattgactgagggttttgatggggtggtacgtgtcaagtgctttgagaaaatagaatcatggccagatagaaaacctatacctttctcaaatgtttaaaattggatgatgaaatgatcagttttttttctctcttttatacctgtgtgatgacaaatttgtattggatcttatgaaattcattttgtttgatat

SEQ ID NO: 2625 - DNA, 225 bp, Gossypium hirsutum
  Clone ID: LIB3146-021-Q1-K1-H1
tttacatttcagacaacaaagtgatattgactgagggttttgatggggtggtacctgtcaagtgctttgagaaaaatagaatcatggccagacagaaaacctatacctttctcaaatgtttaaaattggatgaaatgatcagcttttttttttttttttcactttcttttaaacctgtgtgatgacaaattttgaattgggatcttataaaaagatgttccattt

SEQ ID NO: 2626 - DNA, 535 bp, Gossypium hirsutum
  Clone ID: GOSHI-09MAY01-C50442_1
attctttccgttttcatctgtcaaagctgtagaatactgtgggaattgaagcataatttgtatcaatttatttggccagttatcacattttttcagagaataaaatggaagagaagtatgaaactctgaagattcagcaagaatcgccaaattctggagtttttaacctaatcattaaccgcccatctgtcagtaatgcacttggactcaatttctttagtgaattccccaaagttcttaatgcgctcgaccaaaaccctaccgtcgccgtcatcgttctatccgggtccggcaaccacttctgcggaggtatcgaccttaaaagcctcgcagctatcgccgatgataactcgggtgatcaaggccgcaccagcgaacggttacggagaaaaatcaagctcctgcaagatgcgatcaccgccatcgagcggtgcccgaagccggtaatcgcggcgatacacggcgcgtgtcttggcttggggatcaatatcgtgacggcctgtgacataaggtattggactaaggatgcattttt

SEQ ID NO: 2627 - DNA, 987 bp, Gossypium hirsutum
  Clone ID: GOSHI-09MAY01-C50652_1
cctttctagtgtaaaaggaacccccattattattgctttcactgcacatccccatccctctaaacctccaactcttctttataaacgccaccaactttctcctccaatccccacttcttcttcgctgcttcttactttcttactttctttctttcaatgatgctgctattttctttttgtttgttttatatatatcttgtctcctttgggaaagttcctacatctcttcatctttgtcttgggattctgggttctatttcattggtttagagatcaataatgattggcatatcatgtagcagtgtttttcatctaaagtcttgcatgtggaaacgaggttatctatctatatgtgatacagccaaggatgacttgccggctcacttctacttaacataaatcatgctctctacataagcagctaaaagttagagcactaagctaaaacctgtatatgttgtcatcaattaatttataataaatgttaattgatcggcaagtcatctgtggctatatcattgtctcattttctcattctagatttatgatgaaaatacaaaaatagagctgaatccttgagtgctgatgaactgctccataaacgcaacaaaacccttagcttcaaggtaaatcagaatgtctagtcttttattttttccttttgcctatgttgcaatctctatcctactttatttaccttttattcttaattatctaagctcaactcagtataccttttttaaattattgaattactatttcaattatctactcgagcttagccatggacaccttactttccctactactatcttaacctttctctcttgcaggtttcaatttgctccatttccttgtttgcttagtgaagctcatgtatcgattccagatcaacataacaaagcatataatttgtacataaagttattaatttcaagtattttatattcactgctcccggtgcaagtgttacccttgggtcttaat

SEQ ID NO: 2628 - DNA, 695 bp, Gossypium hirsutum
  Clone ID: GOSHI-09MAY01-C50602_1
ctgcaaggctatagaacaacaaacaatatgttaaggatgatgattatggtgaagaaatggagagagttgatgttttattgacattacctgatgaagaccgaaatcctcatatggatgataccgatatcaaagctctaattcaggatatgatagctgccgcaacagatacatccgctgtgaccaaccaatgggcaatggcggaagtaataaagcatgcgcgtgtcctccgcaaaatccaatatgagctcgattcaaccgttggtcccaaccgaatggtcaacgaatccgatctacctcaccttaactacctacgctgcgtaatacgtgaaacattccgcatgcacccggccggaccgtttttaatcccacacgagtcccttcgggccacgaccatcaacggcttttacatcccggctaagacacgtgtcttcatcaacacccatgggttgggccgaaacactaaattatgggacgatgttgaatcgttcaggcccgagaggcattggctggctgatggcgctcgagtcgagatcagccacggagctgatttcaaaatcctgcctttcagcgccgggaaaaggaaatgtcccggcgcgccacttggagtgacactggtgctcatggctttggctcggctctttcattgctttgattgggctccccggaatggtatgaggcccgaagatataaatacc

SEQ ID NO: 2629 - DNA, 320 bp, Gossypium hirsutum
  unsure (1)..(320): unsure at all n locations
  Clone ID: LIB3146-038-P1-K1-D10
ntaatggtcaacgactgctaccgacctcgccttaactaccatgatccctacataagaagagaggtgtggcatgcacccggccggaccgtttttaatcccacacgagtcccttcgggccacgaccgtcaacggtgcccacatacaacctggtacacgtgtcttcatcaacacccatgggttggaccggaacactagattatgggactgatgttgaatcgttcaggcccgagaggcattggctggctgatggcgctcgagtcgagatcagccacggagctgatttcaaaatcctgcctttcagcgccgggaaaaggaaatgt

SEQ ID NO: 2630 - DNA, 605 bp, Gossypium hirsutum
  Clone ID: GOSHI-09MAY01-C50132_1
tgggttcgtcgaaagcttgtgccccatacattatcccgacaacaaggttcataacccgcgaacacgctaatgatgttccgttctgcggcgtttactatctcaacttcttcagattagtatggaggacagcgtacgttatagtaacagctgtgctagcaatgatattccctttcttcaacgatttcttgggtttgatcggagctgggtcggtttggccattaacggtttacttcccgatcgagatgcacattgcgcaagcgaaaataccaaagtattcattcaggtgggtatggttgaaaatactaagctgggtttgcttgataatatcacttatagcagcagctggatctgttgaaggactaattcaaagccttaagacatataagccatttcagactcggaatgaggagtaatccttgcttaaaggttaggttttatgaaatacttaacattgttcaataagacagagtttgcagtaaatgtaatttattgttgtcttcacttatgtattccatatgcaaatctgcttgttgtagtgtggctccttttgaaagagaatagagtaaccaattttaatttgatacaatttgatccgtttatttctt

SEQ ID NO: 2631 - DNA, 858 bp, Gossypium hirsutum
  Clone ID: GOSHI-09MAY01-C50092_1
ccacagtcttccaaaggaaagaaaataaagactggaactgatggcagtcatgatgagatgaaaattttacatgattcaagtgtcagcaaggctgttgatatggctgtcgggttcacaaatgcattggcaggattagctgttaatgacgtaattcaaagaactgctggaaggctagattcgctgcactcagagggggttcataggctttcagaaatgtgctgtttagcaatgtctcatcttctgatgctgggaaaatctgtcatatctggttctaacaaagttcaagatgaagatgccgatggtgatatgatgaatattgactggccagaagattctgttgagaaggcttaactaataagattgaaggcacaatcaatgacaggatacgtggaagctgtatccagcagctttatcacaggcatatccgatgtagctggagcttatctagcggccattaagagtgttaatgcagattcacatgaagcacttacaaaagcatctatccaggagaaagctaattccttctctgaacatctccgtagtgatcagaacattgcagtgagcaaaatccaggatggactccaaaatttttcgtatgtggtcctttcgaactcaatgccagctgcttgaaaacctgaattctctgcatgtcttgttagtgcgaatgtaaatagttgcatcttagatgggttttaacccccagtattactaaactttttatgctctacaccattgaaactgaactcattttttaagcagggggtaaagcagtttcttttgtgtagatttcattgttaaacttgaatgttaatctggaatgttaaacaaaccatttccacgttaaggatgaaatgaaat

SEQ ID NO: 2632 - DNA, 584 bp, Gossypium hirsutum
  Clone ID: GOSHI-09MAY01-C50002_1
gaattcccgggtcgacccacgcgtccgcccacgcgtccgaacattgtttgcacttgttattgccataaccaaggatcttccagatgtagaaggagatcgcaaatttcaaatatcaacattagcaacaaagcttggagttagaaatattgcatttcttggttccggacttctactggtgaattatgttgctgctgtgttggctgcaatatacatgcctcaggctttcaggcgtagtttaatgatacctgctcatatctttttggcggtctgcttgatttttcagacatgggtgttggaacaagcaaattacaaaaaggaagcaatctcggggttctatcgtttcatatggaatctcttctatgcagagtatgcgattttccccttcgtgtagaatcctaatctccaccctccatactttttgttttgcaaatttttattttcattgagggagagtagttacgtgagtatctatatgaattcccatctaatattcattgcatcttttaataacgctatcttgaattagttcttatgcaaataaataaataaattcaataggaaaaaaaaaaaaaaagggcggccgc

SEQ ID NO: 2633 - DNA, 583 bp, Gossypium hirsutum
  Clone ID: GOSHI-09MAY01-C50392_1
catgcaggatttattgatgaggatgactttagactccatttgctggtggggtttggagttgaaactggaactctggctcccactttaccagataacaacttcggtcgggcgttagatactgcaaacatcattagttaaaaaaatgacctactgaaatactctaaaaaccagaaaacgctatttcagtgtgggctccgaagctctacttggaaagagcatcaaagacattgttgacttcacttacaatgtcataaggagaagaaaatctgagattaaagaaattcgagaatctttgcaaaaccagcggagtataaagcatgacatatttgtcaagatttattgagctaagttgaagatccagaaggaagcttaactgacaaaagtcttagagatattgtcctgaattttgtgattgctggccgtgacacaacagctacgactctcacatgggccatatacatgataatgaccaatgctcgtgtagctgtaaagctctactcagaacttaaagcttttgaagaagctcaagcaaaggaggagaggttttcatttctaccatgtgactcgtaagtccttgtttcct

SEQ ID NO: 2634 - DNA, 336 bp, Gossypium hirsutum
  unsure (1)..(336): unsure at all n locations
  Clone ID: LIB3146-016-Q1-K1-A6
gggttggtggttgaaatgggacctttgcttcccactttaccagataccaccttcgttcggccgttggatcctgcaaacatcattgttccactgaggttcgttgatccactctggaaattgaaaagatttctcaatgtgggctccgaagctctacttggaaagagcatcaaagtcattgatgccttcacttacaatgtcataaggagaagaaaatctgagataaaagaaattcgagaatcttgcaaaaccagcaagataaagcatgacatattgtcaaagattatgaactaagtgaagatccagaaggaaatttaactgacanaagtcttagagata

SEQ ID NO: 2635 - DNA, 659 bp, Gossypium hirsutum
  Clone ID: GOSHI-09MAY01-C51912_1
gttcagatcagttctcattggaacttttttagagagagagggaaatggagctctcacagcatggtttcctggaggagctattggctccaagaagggacagttggaccactttttcagctggggcgactgagttcctccctagcggctcatggaactttgattcttttgatgagaatccaactttggctacatcaaatctctccttggttgcattctctccaccaccaccacctgatcaaacccccagctttgaatgtcctttcagcgatcaaccctacccttttgttgatggattcacagtgcgggacatggattcttcgtacaccaacgtcaatgtcgtccacccccacacatctcctttcccagctactcaacaagacttcccatccatggttgatgatgaagatcagtttggtcttcttaccactgatcatcaacaacacagcttggaagaaacaaagagtagctgcaaagtcgagattgagcaaaccagcaacattcagggtttcaacatgggcgacttgttgttaggcaagaaaagggctaagacaaaaaagttagaaggtcagccttcaaaagatttaatggcagagagaaggagaaggaagcgactggatgacaagctttcaatgctgagatcaatagtccccaagatcagc

SEQ ID NO: 2636 - DNA, 216 bp, Gossypium hirsutum
  unsure (1)..(216): unsure at all n locations
  Clone ID: LIB3583-048-P1-K1-A8
gttcctcccngtggctcatggactttgatcttttgagagaatccaactttggctacatcaaatctctccttggttgcattctctccaccccancacctgatcaaacccccgctttgaatgtcctttcagtgatcaaccctacccttttgcggctgcgattcacagcgcggtgcggggggggttggtacttccgcgttgcttccccgcaccgtcctg

SEQ ID NO: 2637 - DNA, 398 bp, Gossypium hirsutum
  Clone ID: GOSHI-09MAY01-C51542_1
cccacgcgtccgccctatcttcgcatcctcagctttagcttaatctcttgtaaaagccatttctttagcttgttgtttatctaagtttttgctccaatgtctgattctggtggttcagcctctgctaacaggatgttgtgttccgttcctgaaaggctacagctgcatatggccatgttggccttgcagtttggctacgcagggttccatgtggtctccagggctgccctaaacatgggaattagcaaacttgtattcccagtttataggaatatcattgcgttgcttctgctccttccctttgcatattttcttgagaagaaggagagacctcccattactctaaattttcttttacagttcttcctcctcgctcttgttggaataacagcaaatca

SEQ ID NO: 2638 - DNA, 672 bp, Gossypium hirsutum
  Clone ID: GOSHI-09MAY01-C51402_1
ctttgggataccagaaagagtcctccattacctcttgcaatttagggtttaagacttatgactgggattacagatggatggactacccgccacaggctagagatttgaagcacccatctgaccaatccattgctacttataaagcttcactcggtcttgcgaactcttattcgctgttacttttccccagaatacagtacgggtcagaagtacatttacactggatctcatgactctagggtttatatctatgatgtggcaaccggagcccaagttgcagtactcaagcaccatacatcaccggtaagagactgtagttggcacccatactacccgatgctggtcagctcttcttgggatggagatgtggttaagtgggaattccctggtagtggagaagcaccaacccctgtgagcaagaaaagaatccgaaggagatattactactgaagggttaaggccaaccgtaacatctgtaagttgtaaatcatatatatactattctatatatgttgtttaaatatatatcagctccaataatgataaattgtttgaacaaaataaacatacttccatgcatatattttttcgcggtacataaataaacaatgtaatcctcaacgtttagtcaagggcttcatccttgatcccgtatgaagatcgcatacatac

SEQ ID NO: 2639 - DNA, 405 bp, Gossypium hirsutum
  Clone ID: LIB3146-027-Q1-K1-D8
cggacgcgtgggcggacgcgtgggattttgtgtttctcattctcactatagggtctggtttgaagtatttatatcgttatctcaatttcttgtaccttatatcgcagcacgggtcagaagtacatttacactggatctcatgactctcgggttttgtatctatgatgtggtaaccggagcccaagttgcagtactcaagcaccatacatcaccggttagagactgtagttggcacccatactacccgatgctggtcagctcttcttgagatggagatgtggttaagtgggaattccctggtagtggagaagcaccaacccctgtgagcaagaaaagaatccgaaggagatattactattgaatggtgaaagccaaccgtaacatcttgtagttgtaaatcatata

SEQ ID NO: 2640 - DNA, 870 bp, Gossypium hirsutum
  Clone ID: GOSHI-09MAY01-C51762_1
acaaaccctgctgaggggacggaagaatctttggcaacttacaactagccgggtactagtactgctttcttcttctgctgcttctacaagcatacatcaatttttgaaaaattatgaagatcttaacacattcatcttggctggggaagccttctgtggagttgaggtagttgaattcaggaagaaattgaagggtgtttgtgaaaactatttttcagcatttcatcagcaaaatatatctgcacttaaaatggttttagagaaggaaacttggcttatattgccaccggagatgatgcaaataattaattttgctggtctattaggtgacggggtaccttttattgctgcatctgatggtaactcttctaagcctagggtgcttcacactgacaaatcagcaaaaaaaattgacagagttgccaagaagagtggattttctccttgggttagaaatggaaatccatttttgctaaaactaagtggtattgccaaagaagctaatgattgctccccgcttagtggagcaacctctggtggatacgagggaaatgttcataatcttcatgttgatattgtctcttcctgcaatggtgatgtaaaccatatcaacggctccaattctatatcagaagaggaaaatgaggatttacttgctgacttcattgatgaagatagccaactccctagtcgaatatcacaacccaactttccaagaagtcgctcgttgcatttcagtaatgatgagtttacagcacaaactggatcatctgtttgtcttctaaggtcaatggataaatatgcaaggttgatgcagaaacttgaaatagtaaatgttgagtttttcaagggcatatgccagttatttga

SEQ ID NO: 2641 - DNA, 811 bp, Gossypium hirsutum
  Clone ID: GOSHI-09MAY01-C51152_1
cccacgcgtccgcccacgcgtccgctcttttcaatgctctggcaaaggctaatattaacattcgtgctatagcccaaggttgttctgagtacaatatcacagtggttctcaagcgtgaagattgtatacgggctttaagagctgtgcattcaaggttttatctttcaaggacgaccatagcaatggggatcattggacctggattgattggtgcgacattactcgaccagttgagggatcaggcagcagtcctcaaggaagaatttaacattgatttgcgtgttatggggattactggttcgaggacaatgcttttaagtgaagttggtctcgacttgtcaagatggagagaacttctgaagcagaaaggacaagttgctgatttagaaaaatttactcaacacgtgcatggaaaccattttattccaaatactgttttggtagattgtacggcggactctaatgttgcaagctgttaccatgactggttgcgtaaagggattcatgtgatcactccaaacaaaatggccaattcaggaccacttgataagtacctaaagttgagagctcttcaacggcaatcctacacacattacttctatgaagcaactgtaggagcaggtcttccaattattagcactttacgaggcctccttgaaaccggggacagaatatttgcgcattgagggcttttttagtggcactttgagctatattttcaacaacttcaccggtaataaaaccttcagtgaggtggtggcagaggcaaaagcagcaggttttactgaaccagatcctagggatgatctgt

SEQ ID NO: 2642 - DNA, 528 bp, Gossypium hirsutum
  Clone ID: LIB3543-021-Q1-K1-E8
atcagtatagccgtatggaggagaggcatgaggaggaggaagatgatggggaagaagaggaagaggaggatgaggaagaaaatgatataaagactattaacaaagatgaaggtcaaacgaaagagcaatcacagttcagagatagcttgtcagaggagcgcggtagaaaatctcagcctgaaacagtggataagtccagtgcagtagtccaaaaccagaaaggaattataacacaaaacgaagaagaaagtaaagcagttcaacaacagagatacaaggtatttgtgtccccgatttcccttttttccctccccaccttttctttttgcatcatttgcaatgtactctgatttctaaaatgtaataatctattctgttcctcctccattgcacaaactttattcttggaacatggtttaaatatcttgtaaagttcttggcatagtgatgttttaagagttcaaaggtttctattttgcatttctatgacatgctactatgtattttggtcatgcagagagttaatgg

SEQ ID NO: 2643 - DNA, 435 bp, Gossypium hirsutum
  Clone ID: LIB3146-024-Q1-K1-E7
atcagtagacccatatgcagatgctgtggtggaaggtgaaggagaaaaggtgaaaggggaggtgtctgagcatcagtatagccgtatggaggagaggcatgaggaggaggaagatgatggggaagaagaggaagaggaggatgaggaagaaaatgatatcaagactattaacaaagatgaaggtcaaacgaaagagcaatcacagttcacagatagcttgtcagaggagcgcggtagaaaatctcagcctgaaacagtggataagtccagtgcagtacgtccaaaaccagaaaggaattataacacacaacgaacaagaaagtatagcagttcaacaacagagatacaaggaggctcaagaaaggcaacaaatgtctaaaatgttggagagcttatgctacgagaatcccatgcttcttaattatgtggagatct

SEQ ID NO: 2644 - DNA, 1113 bp, Gossypium hirsutum
  Clone ID: GOSHI-09MAY01-C51382_1
tcgcggcgcgtgggcggacgcgtgggtgcgaatgttttctaccccgtcccagtccaactcagatgccccttgttcatcttcttcttccgttgcagttcatttagctggcagcaagctttccttcgagaaacccatgcaaaaacatatgactgtttaatcttctgtctggtggagagatgagtggggcaataaaagcagtcattttcaactctcaaggcagctgtcttttccaaagggctgctttattccattccactcctgtccttgaacacaaaaaacgcaattactggcaatttggtaagaggaaaagaaggatgcgtgcaaaacaagaattactgcgcaattttggtgcttatgcagatatcatgtttgagaactggagagatgagtttcatgaagatgatccatcatcaagtagaggtccgtcatggttcaaaaaacaacaaagtaagggatctagaagagattggtccggcatcttacggtttttgtacacgggttgaggaccttttgagttttgtgaagacattgatgatgacatagagaacatatttaggtctgcatttggtggaagccggttcttttattggtccttcattaatgatgagtaccctcagtggaggagatccagatacttcggataactatgagaaatcttggaggtggagctctcgatttgatgaggattcagactcaacagaatctggtaatgctgagagttcagaccaagatacaattgcagataggcgggcccttggactaagtgcatctggtcctctaacacttgaagatgtcaaaactgcatatcgagcctgcgcactgaaatggcatccagatcgtcatcatggctcttccaaggctgtcgctcccgtgcatttcggcccttgtaactcagcatatcagtcgttatgcgataagttggcgttgaactgagaaatgttttgaagcatgcgctctagatgtcctcaagccgataacatttgtcatatttatgataatgggtgttgacattttgtattttaggtagatcagataataacagtgggcggcatgaacacatcatgtatggattcatgtgattttaacacttcaaatttgcattctaattttaag

SEQ ID NO: 2645 - DNA, 520 bp, Gossypium hirsutum
  Clone ID: LIB3584-020-P1-K1-H6
cggacgcgtgggtaccccgtaccagtccaactcagatgcccgttgttcatgtccttcttccggggcagtgcatttagcttaaaaaaacgaaaagtaaaagtgaaaaattatcacccgcttaaactcctgaaaaagggcagcaagctttccttcgagaaacccatgcaaaaacatatgactgcctaatcttctgtctggcggagagatgaatagggcaataaacgcagtcattatcaactctcaaggcagctgtcttttccaaagggctggtttattccattccactgcggtgcttgaacacaaaaaacgcaattactggcaatttggtaagaggaaaagaaggatgcgtgcaaaacaagaattactgcgcaatttgggtgcttatgcagatatcatgtgtgagaactggagagatgagtgtcatgaagatgatccatcatcaagtggaggtccgacatggttcaaaaaacaacaaagaccttgtgagttttggaagacattggtgatgacgtagagaaca

SEQ ID NO: 2646 - DNA, 723 bp, Gossypium hirsutum
  Clone ID: GOSHI-09MAY01-C51242_1
gtgatatgggaatatgggacaaaagctagcttcattgctggcagaggtaccctagcatgcgtgttaattaatggtgttgttgttttggttacggccaccatgtaacatagacggacaaggcttcactgcttgcggaagtgatccaacacgtgaaagagcttaaacggcaaacgtgtttgatagcagaaacaagtccggtaccgaccgaaaccgatgaactaacggtggatacatcggaccaagatggtaagttcgtgataaaagcttcgctttgctgtgaagataggtccgatcttttgcctgacctaatcaaagcattgaaagatttacgtctcaaaacactgaaagctgagatcacgacgctgggcgggcgtgtcaagaatgtactcttcattaccggagaggaacaagaatcgagctgtagcagtgatggtggtgacgttattggttcaatacaagaagcattgaaaccggtgatggagaagagcacttgtggggatgaatctaattcttcagggaatgttaagagacaacgaaccaacatcagtactgttcttcaacgcaggtctctttaacttattacaagagggccttgatcgacaacttcatttttgtgtgtgtgtgttttagtttatgtgtttccacaagtagaacaaaatagatgatgatgaacatgataatccaaggtctgtcgtttgtgtgcttaaaagaatgggttcaatt

SEQ ID NO: 2647 - DNA, 409 bp, Gossypium hirsutum
  Clone ID: LIB3146-025-Q1-K2-D11
ctaagagtcacagtgaagctgaaaggagaagaagagaacgaatcaacaaccatctcgcaaagctacgcagcttactcccaagcaccaccaaaacggacaatgcttcactgcttgcggaagtgatccaacacgtgaaagagcttaaacggcaaacgtgtttgatagcagaaacaagtccggtaccgaccgaaaccgatgaactaacggtggatacatcggaccaagatggtaagttcgtgataaaagcttcgctttgctgtgaagataggtccgatcttttgcctgacctaatcaaagcattgaaagatttacgtctcaaaacactgaaagctgagatcacgacgctgggcgggcgtgtcaagaatgtactcttcattaccggagaggaacaagaatcgagctgtagcag

SEQ ID NO: 2648 - DNA, 662 bp, Gossypium hirsutum
  Clone ID: GOSHI-09MAY01-C51202_1
gcaacccccatgattagcattgtgaaggacatagtgaataacatcagggccatggaagaagaggaagaagaagagaaaagttgtggtatagagaaaggaaacggggttaataaaacgaattccacatcaccaaattcaaaaaggaaagaaaacttcaagacaaggagggcatacttttattgggtgacgagggaacaaggttccttcgattggttcaaagggataatgaatgaagtggctgaaatggaccataaccatgtaatcgagcttcataattactgcacaagtgtgtatgaagaaggcgatgctcgctcagctctcattactatgcttcaatcactcaatcatgctaaaaatggggtcgacatcgtctctggtacgagagtaaaatcccacttcgccaagcctaattggcgcagtgtctacaagcatattgctgtcaatcacaacaactctcgagtgggggttttttattgtggggcaccggcgctgacaaaagagcttcgccagctagcttcagatttctcccacaagacgtccaccaagtttgatttccataaagagaacttttaatcccatgccagggtcccggatagggagaacctaaaaaagaaatgccttggagctaaccagactctagagacagttacaagcaccttcat

SEQ ID NO: 2649 - DNA, 997 bp, Gossypium hirsutum
  Clone ID: GOSHI-09MAY01-C51222_1
tccacgcgtccgtccacgcgttcgcccacgcgtgcgcctatacaacctcccgagggagtaaattcagtaacgtttcagggaagaaaatatggggagtgaagaggaaccaaaagaaggtttcccgaagatggtgaaccctgggaaagccacaattctggctctgggaaaggctttccctcaccagcttgtcatgcaagaatttctggttgatgggtattttaagaacaccaactgcgatgacccagatctcaggaagaagctaagccgactctgcaaaacaactactgttaaaacaaggtatgtggtaatgtcagaagaaatcctgaagcagtatccagagcttgccattgaaggactccccactgtgaagcaacgattggatatctgtaacgatgctgtcacggagatggctgttgaagcctcacgagtttgtatcaaaaaatggggacggcctatatcagacttaacccacttagtctatgtttcctcgagtgaagctcggctgcctggtggtgacctttacttggccaaaggacttggactcagccctgagacgcaacgtgtgatgctctatttcatgggctgctctgggggtgcagctggccttcgtgtagcaaaagacattgccgaaaacaatcccggaagtcggatcttactagctacttctgaaactaccattattggtttcaaacctccaagtgcagatagaccatatgatctggttggtgcagctctttttggcgatggtgctggagctatgatcattggctctgatccagttttgagcattgagagacctctctttgagcttcacactgcaatgcagaatttcttgcctgatactgagaagacgattgatgggaaacttacagaagaggggattagtttcaagcttgcaagggagcttcctcagataattgaagataacgttgaaagtttctgtgagaagttgatggcaaccgttggattgactgacaaggactacaacaagatgttt

SEQ ID NO: 2650 - DNA, 725 bp, Gossypium hirsutum
  Clone ID: GOSHI-09MAY01-C52862_1
ctctatctttctcctttcttttgatccctctcctccaccgccaccagtccctgacccgagctctctcttgccttcaagtttcgtacagacgatatcgggaaattgtataaggtagaacaatgccgaaggtgaagacaaaccgtgtaaaatatccggaaggatgggaattgattgagcctaccctccgtgaactacaagcaaagatgagagaagctgagaatgatcctcacgatggtaagcgaaaatgtgagacgttgtggcctattttcaaaattgcacatcagaagagccgctacatttttgacctataccatcggaggaaggaaatatcaaaggaattgtatgagttctgcttggatcaaggctatgctgaccgcaaccttattgctaaatggaagaagccgggttacgagcgtttgtgctgcttgagatgtatgcagccacgggatcacaactttgctacaacttgtgtctgccgagtgcccaagcacttaagggaggaaaaggttattgaatgtgtccattgtggatgcaagggctgtgcaagcggagattagattcaccttgttctttttccctagttttctaagtcaatgagagaagtttaaactgtagttgctgccacactgctcattaacttctgtagttttatttgcactgctgtagtttctgaatctgaatcttgcgatgatgctatgtctggagaacctgtgtacaacttgctg

SEQ ID NO: 2651 - DNA, 463 bp, Gossypium hirsutum
  Clone ID: GOSHI-09MAY01-C52832_1
gcgggatgttcgttccgatgctcaaactcataataggctgtgaccccaagtattccacaggcatttccaagcgtatgatcatgggtgcagctggatcaactgtatactataacctgagacttaggcacccaacactggaaatgcctctcatagattatgacttggcattgctatttcagcccatgcttatgcttggaatcagcattggagttgcccttaatgtcatgtttgctgattggatggtcacggttctgcttatcattctcttcattggtacatcaacgaaagccttattcaaaggtatagacacatggaagaaagagacaatattgaaaaaggaagctgccaaggtggaatcagaagagtccaaaccagctgatggagcttctcaagattataaaccattacctagtggccctggcaaccagacagaagatgaagttcctctcctacaaaacatata

SEQ ID NO: 2652 - DNA, 666 bp, Gossypium hirsutum
  Clone ID: GOSHI-09MAY01-C52562_1
gcgtaagcgtgccgttgtaaataatccaattctaatcaaggggacttactagcccatacccggatgcttaaatatgttggttggccttcatttgggttcatcatatgatatctaataactatataaactggaatatgatggatcatgcatcgatgggatactatgatttaatatcttcttatattctaacagagtgaaattgctatttgctctctgattgtggtttcatgtgatgatgagtgtttcctatagggggatgcaaagaaattatcaacacgttatgaatctaaatcctagcagtagttatatgaactggaatatgactgaatatgcgtatttcagcagagggatattactatatactctgatttctttcattcatatagactaactggttgctacatgttacttcaagagaagcaaattataggcaggtataaatctaaatccctgttccctacggtataaatctaaattataggcaggtataaatctaaattacctttttcctaatagagtcatgtggaagaggaggatttcaatttactatgcccttatgttttatgctcaagtaacacgtttaggtccaattcaattactgagttgcttaaactggagctgggctggattaaatatttttagcttctatttttgctaattattaga

SEQ ID NO: 2653 - DNA, 672 bp, Gossypium hirsutum
  Clone ID: GOSHI-09MAY01-C52532_1
attagccgagtacatcatcgccatttggtttcactcgtggggtactgtatatctgagcatcaaagattgcttgtctatgattatgtcccgaacaatacccttcattaccatctccatggtaaaggcaggccggttatggattgggctcttcgagtcaaggttgctgccggagctgctcgcgggatagcttacctccatgaagactgtcatcctcgcatcattcatagggacatcaagtcatcaaatattcttcttgacaggaattttgaggctcaggacctgcattgggattttctgtcgtgccgttcaggtttcggattttgggcttgcaaaattagctttggattcaaatacccatgtaaccacacgtgtgatgggaacctttggatatatggctccagagtaggcaacaagtggcaagttaactgaaaaatccgatgtttattcctttggtgttgttctcttggagttaattaccgggcgcaaacctgttgatgattctcagccgttaggtgacgagagcctggttgaatgggctcgatctttgcttgctgaagcgattgaacattaagattttgatatgttggtggatccgaggctggaaaagaactacgtggatcacgaaatgtttcgaatgattgaggcagctgctccttgcgtgtgacattcagc

SEQ ID NO: 2654 - DNA, 686 bp, Gossypium hirsutum
  Clone ID: GOSHI-09MAY01-C52702_2
accaaaactagaatgcctaaagcagtgggtccctcgagaagccagcggtccaattactcatgcaacatagtcctgtgacagccaatcgatatatgtgagttttgaagatggaagtgttggtgtgcttactgcttcaacactcagattgagatgtcgaattagtcccgcagcatatttacctccaaatccaagcttgagagtttttccactcgtcattgcggcacacccatccgacccaaatcaatttgctttgggattaacagatggtggagtccaaattgtggagccattggagtcggaaggaaaatggggcacctctcctccagctgaaaatggtgctggaccaagtaccacatcaggtgtaactggttcagaacctccccagcggtgaccagcacacgtgcaggtattgatagaaaggatataaccaaagcatccatctctagcatgcatttttatcatatgctccctggtgtcatgttaaaaagaaattctcaaggggaagcttcagaagtataatggattggtatgaatcgcatgacatcctttttgcagccaaggcatatagtgttgatttcagggatcttggtgtaaatttaggagatgttggcttagagaaggtgggtctgtctgactatagacttgaaaaaaaaggaagcgaaatcagacaaaatttttgttggttt

SEQ ID NO: 2655 - DNA, 563 bp, Gossypium hirsutum
  Clone ID: LIB3825-008-Q1-N6-F2
ccgtatcatatttcgtgtcacatccaaatattacacggtacggacaaatagtagccgttaaaacaatttcttaatttaaaaaaaaaaataaccgaagcataagcaaaaaaataaacataattaatatagtttctaaaaggctaaataataatgggaaacccgccaggattcctagttataaaccaacagaaattttttgtctgatttcgctcccttttttttcaagtctatagtcagaccagcttctctaagccaacatctcctaaatttacaccaaaatccctgaaatcaacactatatgccttggctgcaaaaaggacgtcatgcgattcataccaatccattatacttctgaagctcccccttgagaatttctgcacgtgtgctggtcaccgctggggaggttctgaaccagttacacctgatgtggtacttggtccagcaccattttcagctggaggagaggtgccccattttccttccgactccaatggctcaacaatttggaccccaccatctgttaatcccaaagcaaattgatttgggtcggatgggtgtgccgc

SEQ ID NO: 2656 - DNA, 428 bp, Gossypium hirsutum
  Clone ID: LIB3146-040-Q1-K1-C7
taccgtccggattcccggcagacgataaacaaagttagtgcattagcatgaggatggcatcttacttagagcttgagcacgggggggcacactgggtggcttggttacagctacgccgaggatcgtgatttatatgttgccggcgatctctatgagaacgatgttgttacccctgccatgattgttgttcctcgtaaaaagaaaaaagtaggagagtcgcatgttaaagaaggcaaaaagcaaaggtgggaggcgagcgaggagaaagcagcagcagcaacaagccccattgttatggccaagccaactccaaaacccgttgatgaagacctttacaaaatctcccctgacctcctttacccaaaacccaaaaagaaaaaagggttggggttactttcaagctgcttggttccaagttggttatcgtg

SEQ ID NO: 2657 - DNA, 378 bp, Gossypium hirsutum
  Clone ID: LIB3146-040-Q1-K1-C8
cccactcgtacaatcacaatgcgacttattattattccgaaacgggatcgaacactggggggcttttttacagctactccctagatcgaaatttatatgttgccggcgatctctatgagaacgatgttgttacccctgccatgattgttgttcctcgtaaaaagaaaaaagtttgagagtcgcatgttaaagaaggcaaaaagcaaatgtgggaggctagcgaagagaaagcatcaacagcaacaagccccattgttatggccaaaccaacttcaaaacccgttgatgaagacctttacaaaatcttccctgaccttctttacccaaaacccaaaaagaaaaaagggttggggttactttcaagctgcttggttccaa

SEQ ID NO: 2658 - DNA, 219 bp, Gossypium hirsutum
  Clone ID: LIB3146-040-Q1-K1-C6
cttccggggttggaaccattgcccttccgttaactaagggtttggaaacggttaggcaaactggattgcgtcgttacagctacgccgaggatcgtgatttatatgttgccggcgatctctatgagaacgatgttgttacccctgccatgattgttgttcctcgtaaaaagaaaaaagtaggagagtcgcatgttaaaaaaggcaaaaagcaaaagtggg

SEQ ID NO: 2659 - DNA, 397 bp, Gossypium hirsutum
  Clone ID: LIB3146-039-Q1-K1-H2
cttgaaactactcccaaaaattccactaacaaaaccagttcgtgtgtgagacaatgaagggtaaggcaaccaagaacccaatcttcgccttcaccacatggatccgacgacaaccaccgaagatgaaagcgtttttagcgactatctcagggatggcagctcttttgttcttgagaatggtggtggaagatcacaacaatctttttgttgctgctgaggctgttcatgctttgggtacttttgtccttatttacaagcttaccaaagagaaagcttgtgctggtacatccttttttttctttgattgatgttcttttggatgtttatgcataatcagtgatattttgtagctataaatgcctcttgctgtaagaaaaaaaatagaatctttgacctt

SEQ ID NO: 2660 - DNA, 382 bp, Gossypium hirsutum
  Clone ID: LIB3196-041-P1-M1-A5
taacctttttgacactcttctaacttgaaactactcccaaaaattcctctaacaaaaccagttcgtgtgtgagacaatgaagggtaaggcaaccaagaacccaatcttcgccttcaccacatggatccgacgacaaccaccgaagatgaaagcgtttttagtgaccatctcagggatggcagctcttttgttcttgagaatggtggtggaagatcacaacaatctttttgttgctgctgagactgttcatgctttgggtacttttgtccttatttacaagcttaccaaagagaaagcttgtgctggactttcccttaaatcacaggaactaacagctatatttttagccgttcgattatactgcagttttgtaatggaatac

SEQ ID NO: 2661 - DNA, 469 bp, Gossypium hirsutum
  Clone ID: GOSHI-09MAY01-C52142_1
accggttctcattcgactggtctgtaaataatacctctgttagtccagacgggaagttgcttgcagtccttggagacagtaccgactgcctaattgccgatgctcagtctggcaaagtcactggcaccctagaaggacatttggactattcttttgcttcagcttggcaccctgatgggaacattcttgctactgggaatcaggacacaacttgcagattgtgggatgtaagaaaaccagcccagtccctagctgtattgaagggaagaatgggagcaattagagctctcaagttcacatcagatggtcgatttcttgccatggctgagccagctgacttcgttcatgtcttcgacaccaagtccgggtatgtgaagtgccaggaaattgacttttttggtgaggttgctggaatatcctttagcccagatacagaatcgcctgcggttgaactctaacaagatcgcga

SEQ ID NO: 2662 - DNA, 410 bp, Gossypium hirsutum
  Clone ID: GOSHI-09MAY01-C52102_1
cccacgcgtccgcccacgcgtccgcccacgcgtccggtcgagtccaccactgaaggtgttgaaccagggcccaaacctgtaataatatccgaggcgcttgccaagtttttgggtactggaggaagagaaatgctagcaaccgaggcagaaaatcgtgtttgggagtacataaaggttaatcgtttggaggatccgtcgaattcaatggtggtactgtgtgatgccaatcttcgtgaacttcttggatgcgaaagcatatcggtgatgggcgtacgggagacgcttctacgacatcatttatttaagcagtcttaagatctctgatatatgtctgctagtattaactggtagaacaaatagtgacgacccttttctctttagtacgcggttcttttgttatgtaggttctt

SEQ ID NO: 2663 - DNA, 876 bp, Gossypium hirsutum
  Clone ID: GOSHI-09MAY01-C52292_1
aactacaccggtccacagttggaggattattgaatgcaacatgtggaaatgcaacagagctgataatagctttatttgctctctaccgaagcaaaaacatgttctcaagtactctcttctgggttccattctctccaatctcctccttgttcttggctcctctctcctttgtggaggcctagccaacctcaaaaaggaacaacgatatgacaggaagcaagcagatttgaactcttcgctgctgttgctgggattgctttgccacatgttgccattgatgtctcgatacgcggcagcgccaggggttttgattgctgactctacacttcagctgtcaagagcaagtagcattcttatgcttgtggcttatatcggatatatcatcttccagcttaaaactcataggcagattttcgactctcttcaggaagacgaagaagaagaagaggaggaagaaaaggcagtgataggattttggagtgcatttagctggttggttggtatgactctcatcattgctttgctatctgagtatgtggtgggcacaattgaggctgcttcagaaacatggggcatttccattagcttcatcagcataattttgatacccattgttgggaatgcagctgaacatgctggagctatcattttcgcctttaaaaacaaactggacatatctttgggtgttgctttgggttctgcaactcaaatctccatgtttgctgttccattatgtgttgtggttgggtggattatgagaatcaaaatggaccttgatttcaatcttctcgaaactggttgtcttgctttaacaatacctgttgttgcctttacgctacaggatggaacttcacattacatgaaaggagtggtact

SEQ ID NO: 2664 - DNA, 806 bp, Gossypium hirsutum
  Clone ID: GOSHI-09MAY01-C53882_1
gttcaactttgaaaacctccaattcactttcttatctcttttctttttcctttcattgtgtttgtggcgttctttttaccaacaccaaaagcgattggtttcggagaccatactggataacactgcaaaacaaaagtcttactgtatttctttattgggtcactttgtttttagaaagggaacaagtatatggcggcaaacggaacccggattgggccaatgtggcaaggaagccgttggcgaagaattgttaccggatgataagcagggaaaccgggatgtgtcacgatgatagtgcaaaaggcgttaaggctcagactattgatgagcttcactttttgcaaaagaagagatctgcgccaactacgcctctcgaagggaaccagggtgccttcgctagcttgcccgacgacgagcgccgcaggcagcagcttcagtccatcagtgcatctttggcgtcgctgacgagagggacaggccccaaggtggtaaggggagatccagcagcgaagagtagtcaagcggtggagcatgtggcgcaccgccaccaccacgtggaagcacccgccatcagcgtcagtgacgacagttctttgaaattcacccatgttttatacaacctctcccctgcagagttgtacgagcaggctgtaaagtatgagaaagggtcttttatcacgtcgtcaggtgcattagccaccttgtcaggagccaagacggggcggtctccgagagataagagggttgttatggatgacaccacccaaaatgagctttggtgggggaaggggctcacccaacattga

SEQ ID NO: 2665 - DNA, 840 bp, Gossypium hirsutum
  Clone ID: GOSHI-09MAY01-C53562_1
acgcaactcatatttatgaaagaggaccgattgttttgttagcaccaacctgggcaatcttcggggcggtgtcttgtcaccctggatagacacctccagagctgattaattttgtggcacgatgcagttcaagacacggttctccccccacttgcatggccaagacctggtcatagcccctttgaaggccctttttatgctcacgatctggacatgatttatgaagaaatggcttaaataatgaccaacgcgcaggagctagcaccaaggaggcaaggggaagatcaagctaatgtgacacctgattcttctgtaactgccaattcaaagtcagatcttgataatttgcttctggttcaggaaatgttgaaggacctggtgaagtggaaagctaaaattaagcaacagctgacagatatttcaagtgcggttagcgttctgcagaaatcaaggcagtaaattctcatcaactttgcatggatagaactgagtggagaaattcatttgaatcccgcaacgccccttccccaccaaccctccatctcccatattttcggatagcttaaattaacatttatattaagtaggatttagattttgtataggactcacagactgaagctgagccccctgcactttctgatacactacatctgtggcaccctatcagacctttaacctacaaaaacgtgacacttaatatttgtgagttgcaggttgtcaatatgatgctctttagagtagaaacatcttttcccgagtatagatttctgtagaatggcatatatttaaaatatatatagatatggattattgttgctccggtggtttgtatcaacc

SEQ ID NO: 2666 - DNA, 1242 bp, Gossypium hirsutum
  Clone ID: GOSHI-09MAY01-C53492_1
gcaaagggaatctagtgaggattgtagaagcaggaagaggaatcttttgggcccattttcagtgcattcatttctctcaatttctccgtggtgattttcttcatcagcttgaaataccagaaaaatcgctaagaatattaggaaaaagcttcctgaaaccgtcactgttaaaggtgctagcggtatcatatgggatctaggactgactgcagatggtgatacctcccgcttcgaccctgcgtgctgaaattttgtactagaccattctttggaagagaatgacttgttgatcttcaagtacaatgggttgtcccattttgatgttcttatgtttgagggccagagcttgtgtgagaagggatcttcttattttgtgaggaagtgtgtgcatccggaatcggagaatggataccaaaataaacgaaagattgatgagaaccctgatgaaattgtgcacaaatcttcacagtgtggtcttgaaagcagtcccgagaaatctactaacaatgacattggcacagcgccatcaaggggacctatcaactctgcacctactaataagaagatgcggtatgcaggttcttctactaaatcgatctatgctaggcaccttggaggcaaagaacgttgtacttttcctggagaagtgaggttcgaaactgagtttgatggtgcaataatggatgaaggtgactttagccctccccctacatgtgataacgggcctttgactcaattcgagaaagcaaatgctgttgcaaaggcacaggaagcattaaccagagatggttttatggtggttatgaagcctacacatgtatggagaccgttttacatggctatccctgttgcctggacggctaaacatcacttaaaagaaaacacagatatcattctacgcattaacaagcgtacatggaggaccaggtataattatcacaaaaatcgtgattgtggagggctttctggtggttggaagtgttttgtgaatgacaataatttaatagaacatgatgtgtgtgtatttgagccttccaatataggaggaaaacctatcatcctggatgttatcatcattcgggttctggactcagcagttcaagcaccagtacctctgaccataacacaccctgcctcttgctaaatcgcagcagttaactctcagaatctgccagaaatgaaatagcagtttagtgatggcatcatctctaggtacgtcaagctatggatgtttgatattgt

SEQ ID NO: 2667 - DNA, 389 bp, Gossypium hirsutum
  Clone ID: LIB3196-043-P1-M1-D1
aaatgctgttgcaaaggcacaaggagcattaaccagagatgggtttatggggggtatgaagcctacacatgtatggagacgggtttacatggtaaatttcatccctgaacttgatagagaaaaatacccctttgctgcattaaaattagatgatggtgttaaacctccaccttgtttattgtctgggtacatgcaggcaatccctgttgcctggacggctaaacatcacttaaaagaaaacacagatatcattctacgcattaacaagcgtacatggaggaccagatataattatcacaaaaatcgtgattgtggagggctttctggtggttggaagtgttttgtgaatgacaataatttaatagaacatgatgtgtgtgtatttgagc

SEQ ID NO: 2668 - DNA, 738 bp, Gossypium hirsutum
  Clone ID: GOSHI-09MAY01-C53732_1
atgccccatattttcccctcatttggccgatgctcatccccccagacaacaagctacacgttcaagcctggggaatgacttttcagctcttgaaatctcctcttggcttcgattttaacaaagtaaaaaggaaatctatggcgtattcgccaggtaagaacctctttcctttctttttatttgctttcaaatataaaaatgataaacccaaaagaacgaaaaccaggaaaaaaaatagagtatccagatatttaaatcgaaaatcacctttgaattttggtggccttttggtgtatttcagtatgcgtaaatatttgcaggtacactcggtggcttttatagccggaaaaataaaaatttaaaaatctattttttctttttgctatttttccattatattttgctgcttctcgtgtattccttttgctgtgtttgtttttccttctcgtagtttctgttgacgtggaggcgtacggagaagaaatcactcgtggggaggccgttcgtgagaggagcaatctggtgacctggtgtttccagaggcttcccctgcacgggccatttggaccaattctgggattgggcttagtggagtgctattttatttgggttgttttgggtttcaagttaataggttttttttatagtttgggccaataaattggactttgggttagtgttttaggcctttatttttgtaaaaggacttggactttttaatttattattattattatt

SEQ ID NO: 2669 - DNA, 739 bp, Gossypium hirsutum
  Clone ID: GOSHI-09MAY01-C53192_1
gctaccactgtggcagtgaagaggttgaaagaagtaacctcagctaaacgggagtttgagcagcacatggaggtgatcggtcatattagacacgagaatgtgtccgcacttagagcatattattattcgaaagacgagaagcttgtggttcatgattactatgaacttggaagtatctctgctttgctacatggtaaaaggggcgaagaccggacaccgttggactgggaaactaggcttaaaattgctattggtgctgctaaaggcattgcctatatccacagacaaaacaatggcaagcttgttcatggaaacataaaagcctccaacattttccttaactcaaaacggtacggttgtgtctcagatatcggtttagcagcagtgatgagcccgatgcctctgcctgtaatgcgtgctgcaggttaccgtgccccggaggtaactgatacaaggaaagcaactcaagcatccgatgtatacagtttcggggtctttttactcgagctattaaccgggagatctccaatacatgccaccggtggggaggagatcgttcatttggtgagatgggtgcattcggtagttcgagaagagtggaccgctgaagtgtttgatgtagaactcctacggtatccgaatatagaggaggaaatggtggagatgctacaaattgcaatgagttgtgtggcgagggtagtggagcagagaccgaaaatggccggactagtgaaaatgg

SEQ ID NO: 2670 - DNA, 489 bp, Gossypium hirsutum
  Clone ID: GOSHI-09MAY01-C53172_1
ccctttcttccgagcaaagagaaaataggggtacggtaggaatcagaagaagagaaagggaaaggaagatgaagaggtggtttgatccatggccgggggtctgcgagggagagttcaaccggacctggcccttccttgttggtttcgctgtaactggaaccatcatcaccaagttctccctcggtctcactgaggaagatgccaagaactcgcctttcgctcagaagcacaagaggtgatcaacccctttcaaaaaccaggagtctgccacaagcttgatggtaacaagctgatatcatatcaatggctgcaagaaaggtggccatatttcgatggttctttttttttttcctttttctttttgtgaaactccaacagcaaaaatgtacaaggacacctgaaatttaataaaattaagcatgcaagtgtcttcttattaaaaaaaaaaaaaaaaaataaaaaaaaaataaaaaataaaaaaaagggcgg

SEQ ID NO: 2671 - DNA, 388 bp, Gossypium hirsutum
  Clone ID: uC-gsflnu33B115g08b1
tcttctggttaatttccatgctgttggtagtatttaaaagtaagacaaattttgtttataatttcacaaaatttttcaaggaaaatgtcttcatatggtgccattttctgcagattgaagttgtcgatctagtttctgaaggatgtactggaggcaagttgagttcaacaacactaaggaagcttgaagctgagaaagccaaaaaccagtagtctgccacaagcttgatggtaacaagctgatatcatatcaatggctgcaagaaaggtggccatatttcgatggttctttttttttttcctttttctttttgtgaaactccaacagcaaaaatgtacaaggacacctgaaatttaataaaattaagcatgcaagtgtcttcttattc

SEQ ID NO: 2672 - DNA, 372 bp, Gossypium hirsutum
  Clone ID: LIB3146-053-Q1-K1-H1
cggacgcgtgggccatggccggttttcttcaagagagagttcaaccggacctggcccttcgttgttggtttcgctgtaactggaaccatcatcaccaagttctccctgggtctcactgaggaagatgccaagaactcgcctttcgctcagaagcacaagaggtgatcaactgatttcaaatgctcatctggtttgaggcttttgtttgttttcattcttttctttttaatttcaatgaactatacaaataacaataaagaaatcatcagttctgagttctcgaagtgtgaaatatgattcttgggggctaagtggcttctcatgaatttgcccttggacaatttaaagcgcctttacaggttccttggtctt

SEQ ID NO: 2673 - DNA, 511 bp, Gossypium hirsutum
  Clone ID: GOSHI-09MAY01-C53132_1
gtccgttttagacccatttaaaggtcaaaaaacctttgcagccaaattttctctccttttctctgccgtcctcattctccgggaaaaccagaaaaaaaacccctaaaaccatgcaaacagcccaacccccaaaaccccatccgctctgcgacataatcatcttaggagcctcaggttttactggcaaatatgtagtaaaagaggctctgaagtttctcaacaccccatcttctcctcttaaaactttagcacttgctggccgtagccgtgaaaagcttgttaaaactcttcaatgggcagcccatcctagttctcctcccaatgatgttagcgttatcactgccgatactaccgacccaccttcgctttccagtctttgtaaccagacgaagcttttgcttaattgagtcggaccttataggatccatggtgaacctgatgttgctggttgtgccttctatgggggtgaatatttggatataactggagagccttgagttatgggaaaaat

SEQ ID NO: 2674 - DNA, 421 bp, Gossypium hirsutum
  Clone ID: uC-gsflnu33B107d09b1
tctataaaaaaaaaaacccaagtttttttccttttcccctataaatctcctatatcttctctttttgttcaatcttacctaaaacagttgatctaaacaatattgaaagctgagcaaccatgggtggttgtgctaccaagcccaaggttttgaagggtgacgaaccggagatccctgctccagcaccgtcgaaagaggcggttcccgaaccaaaggaggctgctcttgctgttgctgctgatggtgaaaagaaggtggaagctgatgaggttgctaaggataaagatgttatcgatgatgatgccattgatgatcaatcaaacaagagacgatctcttagtaacttgttccaagagaaagaaaaggggacagctgagagtgaaaccacaccatcagagccaacgaaaaatgaaacaccgga

SEQ ID NO: 2675 - DNA, 346 bp, Gossypium hirsutum
  Clone ID: LIB3146-051-Q1-K1-H3
gtaatagcaaggttgaaatggaagatccccttaaagccaatcctaaacgtggtcggccagagggttcaaagaataaacagaaaaagcttgctagtggagttgatcaaaacaatattgaaagctgagcaaacatgggtggttgtgctaccaagcccaaggttttgaagggtgacgaacccgagatccctgctccagcaccgtcgaaagaggcggttcccgaaccaaaggaggctgctcttgctgttgctgctgatggtgaaaagaaggtggaagctgatgaggttgctaaggacaaagatgttatcgatgatgatgccattgatgatcaatcaaacaagagacgatc

SEQ ID NO: 2676 - DNA, 590 bp, Gossypium hirsutum
  Clone ID: GOSHI-09MAY01-C53362_1
cgtccgcccaaaccccgcccggggggggggtctgagttagtgaagaaggttgataagtgggaaaagctatcatgggttatgcacaattggttattggtcctgcaggcagtggcaagtcaacctactgctctagcctgtaccagcattgcgaaacccttggacggtcaatacatattgtgatttttttatcctgctgcagaaaatttcgactatcctgtagccatggatatacgagaactcattaggttggatgatgtgatggaggagcttggcttgggtccaaatggtggccttatatactgcatggaacatcttgaagataatcttgatgattggctgaatgaagaattggacaattacttggatgacgactatctggtatttgattgtccaggccaaatagaacttttttcacatgtaccagtgctccgtaactttgtagagcacttgaagcgcaagaactttaatgtgtgtgctgtatacttgcttgattcccagtttatcacagatgttactaagtacgtaagtggatgcatggcatcactttctgcaatggtccagcttgaagtaccacatattaatatcctctc

SEQ ID NO: 2677 - DNA, 839 bp, Gossypium hirsutum
  Clone ID: GOSHI-09MAY01-C53312_1
atcaaaccctaatattttgttcctttatttgagaattcttctcttcttctatcatcaggtgtctcctaccatcgtccatgtcttctctctctcgtctctgcaaatcaattgtgtttttcttcccttctcccaccgccgtgtccgctggtttttcccggatccgacccgtatccgacacggaaattatggtgtctggtttaataaatgcaaaccctattgtgtacgagaagaaagagcggcgggttcgtaacgaagcagctgtacctgatgaatacgctgttgaacctattgaccaactagaaattttttatcatattagagatataaaggatcctgaacatccctattctttggaagagcttaaagtaataactgaagatgctattgaagttgataacgagcgaagttatgttagggtcacatttactcctacggttgaacattgtagtatggctacggttattggtctttgcttgagagtcaaacttatgaggagtcttccttctcgctacaagatggatataagggttgcacctggaactcatgcaactgaagctgcagttaataaacaactgaatgataaagaacgtgttgcagctgcgctagaaaaccctaaccttttggatatggttgatgaatgtctggctccatcctatgcttgaattttttattattaccagacgtggtgaactagatttgtttttcttcatacaataaactttactttggctctttggatatttcattttattcgtatgaacttccctactttggttcataattacagattaaagttgtatttttaaggcataatgcccaaaatacccctacatttgact

SEQ ID NO: 2678 - DNA, 458 bp, Gossypium hirsutum
  Clone ID: GOSHI-09MAY01-C53252_1
ttaagcaaccctatccattgatctgtggccatgtttaaattgacagaaagggcatctccttcaacttcgatcactacaaaccccagatccatgcccaactgtatactttgaacgcatgcaagagcctccgccgctaacaccaaggtttattttcacaaatgggttcttcggtggccgccacttttccagctctattttttaccaggtaaaccagtccataaactccatgtataatactgaatctggccaaatccaattcaattgatgccatatttcttttgtcatcggacaatcacgcgaatcatgttctcaggattccacctttcctgcgcatcttgggcatattgttgtatttgttaatcttttatactttagattacatagagtaggattttttttttgagaaacaccaaattgtaatcttcaatttcaatggtagattcaagccccataatttc

SEQ ID NO: 2679 - DNA, 705 bp, Gossypium hirsutum
  Clone ID: GOSHI-09MAY01-C53272_1
gtaatgagaaaaattcccaagcgaagctgggaatcatacttgtatattaataaatcatacccttcaaactgaaaaaggcataacagtaaccgccctatgaaagctgggaagaaaaaaaggaaagtgcgagaataattccctttccctaacatcatgcagacaaatacataaagtctcctgtaataggattacgaccagtgagggaaagggatgccaaatacccaacaccacatttgtaccacatttgttgagtagtatgtatgtcttgctctagtcttcatattctgtctcttcgtcatcatcttcattgttttcccggtacctccatccatcatctacattgtcacggtcttcttcagtttcttcgctatcctcttcctcaaatacttgttctttgattggccactgtttcttgggtataggcaaagtcgcaggagatggactcgagcctttctgtcgagcaacctttgccggaggcatcttcacatttggcttggccctactttgttgtttctgactttttcccattaactcgctttccagcataagcatcttgatcactggcttcatccatctcattgtcagcattggctgtggcgttctcagcattctcatctgacatatgtccaggatgctctctccttaaatggagttttagtttgtattcatgtatgtaagctttctcacaaccttcataagggcaag

SEQ ID NO: 2680 - DNA, 366 bp, Gossypium hirsutum
  Clone ID: GOSHI-09MAY01-C53232_1
caatttttctcaaattgtgagcttgcagagtgtgatggatccatcaatccgagcttgactatgtgctttgcttcaccagtgataaatgccaagttttctgaaatatatctaaggattcccttgttgtagaaaatacgatttaattttctcagtttcctgttgctttagttttctaaagattaggatttatatgggatcaacttttatttttggggttcaaactttaaagtgatgaccaaactgtttagggagacagcttcagttggaaaaaaaaaaacatcaatggcaacgtgtctggtcacaatgtgatatgtgtttgtactttggcttccacttcccattaatggtaaactagtctttttggtt

SEQ ID NO: 2681 - DNA, 674 bp, Gossypium hirsutum
  Clone ID: GOSHI-09MAY01-C48982_1
aactgctggtgctgctcttgctactcatattccaagtggccagcttggtttcactggatcaactgaaacgggaaaaattgtccttgagttggctgcaaaaagcaaccttaagcccgtaacattggagctcggaggaaaatcgccttttattgtttgcaaggatgctgatgtcgacaaggcggttgagcttgcccactttgctttgttcttcaatcaaggacaatgttgctgtgctggctctcgtacatacgtacatgagagtgtgtatgatgaatttttagagaaggcaaaggcacgtgcattgaaacgtagtgttggcgatccatttgtagcaggcattgaacaaggtcctcagattgattcagaacagtttgaaaagatcatgaggtacataagatcaggtgttgaaagtggagcaactctagaaaccggaggggagaggataggggacaagggcttctatattcaacccacagttttctccaacgtgaaggaggacatgttgattgcaaaggatgagatatttggtccagttcagtctatcctgaaattcaaggacatcaacgaggttattcggagggcaaatacgacgtcatatggactggcagcgggtgtgtttacgcaggacatagacacagcaaacaccttgacacgagcactgaaagtgggggaaa

SEQ ID NO: 2682 - DNA, 497 bp, Gossypium hirsutum
  Clone ID: GOSHI-09MAY01-C48902_1
gattttgaagatgaagagcaagcatgttgctgggacattcaccaaaaagaaaaagaatgttgttctggaggtgtgcaaggacattccgtcatggccagggagacacctattcgctagcggagagcagcatcgttattttggattgaagactgaaacgagagggattattgagttcgagtgcagaagtgagagagaatatgatatgtggactcaaggtgtgtcgaggcttcttttgattgctgctgaaactgaaaggaagcacagaagacaaagttcaactacatggcctcctggtggccagaatttggacttagattagctcatctgccttgcttttaagctagattgcttacagggagctcaatgcaaagcaatgggcgaaccattctagccaaggcaaaatatctgggaacattttgagctgatggtgcaatcaaaaagctgtgactgtaacctttttttgtagagtgagagagtggaactagttacttagggat

SEQ ID NO: 2683 - DNA, 733 bp, Gossypium hirsutum
  Clone ID: GOSHI-09MAY01-C48582_1
gtctgggtgcaggataatgtgagttggggatggggttttggaattccagccattgctatggcgatagctgttgtatttttcttttcaggtactcgtttgtaccgcaaccaaaagcctggaggcagccctctcacacgcctctgtcaggttgtggtagcctccttcaggaaatgccgagtggccatccctgctgataagtctctcctgtatgagaccacggatgctgaatctaatatcaagggaagccggaaggtcgagcacacagaagatcttagtttcttcgacaaagcggctgtggaaaccgaatcagacgaaaaaaagggtacagtaaactcatggagactttgcacagttactcaagtggaggagctaaaagctgtaattcgcttgcttcccatatgggccaccgggatcatctttgctgcagtctacagtcagatgagcaatttatttgtgttgcaaggcgaaagaatgaatacgcacgttggcaattctacgttcaagatcccaccagcatcgctttcgatattcgacaccctcagtgtgatcttttgggtgccaatctatgacagaatcattgtcccagtgacgagaaaattcaccggtcacaagaacggcctaactcaacttcaacggatgggcattggcctcttcatatcaatatttgccatggtagttgcagcgattctggaactcgaacgactccgggaagtgaggaggcacaattactatg

SEQ ID NO: 2684 - DNA, 420 bp, Gossypium hirsutum
  Clone ID: GOSHI-09MAY01-C48472_1
gcgtattgtcaatggttgatccatcgagagatcctaccaaatctggtgcttctctagtccttccaactcggaaggataacgttgtcgcagaatctgtcgcttcaaaagaaattaggagttcaaatggagatttgaccaggaatcagaaaaagaagatttgcaacagggctaagaaggcggctcaaggttgtgtaggaagggaagcttctgaggagaatgagatagattccaagactggtggcacggaagacactaatgctgatgcaaaatcaaatgaagtttgtggtgatgaacaggcaaatagttctgaggttaaagacgatgcaaagagagatggaattaacaatggtaaccaaggaaaggagcgccatagaagggggagccgtgctacaaggaaaaagctattggcagaagttgatc

SEQ ID NO: 2685 - DNA, 612 bp, Gossypium hirsutum
  Clone ID: GOSHI-09MAY01-C48092_1
cccacgcgtaaagcaacttttcttttccctgtcctgctgcaatggctgagcagatgcctttagggcgcgcaagagaagaaacccagagttcagatgaagaaacaaagtgccataagtcatatgatcacatactctctttgcttgaagctgaagaggatgagccaaaccaagacctgtcttctctcctcacaactttgcaacaggaactttcttctgactctgttttagatgacccccttccttacccaacatcagccgccttagatgctggccaaaaaaaccccaggcctaacaccacagcagaagctaccaataccaacaccatcaccggcagcttagaagacgaggatattcaggatgataaagagaaagtcatacgccatttgcttgaagcttctgatgatgagcttgggattcctaatagggaacatggctttgatgttggagtttttgagtttgaacacggttgtgacaatggtggaaatgggcttgctttatgtgataggtctgcgggaatttgaagatgacgctgctgattattatactttgttgcagtctgaactttgcctggaattatgagctgagaatgggccttgtgtcaggatgattata

SEQ ID NO: 2686 - DNA, 645 bp, Gossypium hirsutum
  Clone ID: GOSHI-09MAY01-C49992_1
cggacgcgtgggcggagcgtgggtcggtaacaactgatgtgaaccccatctgttttcccatgaacactgcttggaggcacacaatggcatctactgcaaactaagaggccacctccccgtgaaccactgttttgaaggcgaggacctcccccgaaacatttctaaccaccattcctgagactgaattttcccgagattcattaaaagcagcgtcgaaattaagtttgacaacagaaccagttggtgggcaccaacccatacactcatgcctcatgatcgcccacaaagaacagcaaaacactcgacattgtatgctggaattattcttgaacacctagggcaatctctgaagatattatcaatgttttcagcagttgcctgacatctgggacatactaccaccgagagcaatcgcttacactgaagattcataaagtggggaataaaattctaagaaattttccagattaggattttaattttccttggaatgtgaatattccacagttttttgtaaaatattctagcctcagtctgtaaataattaggaaaatgccttgtaatagtttataagcagttcgcacaaagaattttttagaggcctcccccttccataccataaagtccacatgaggttcctttgct

SEQ ID NO: 2687 - DNA, 1398 bp, Gossypium hirsutum
  Clone ID: GOSHI-09MAY01-C49972_1
gttaaacctaatgtagttatatataatactttgttggtggccgccggggggggcccagaggccttggcaagccaggagtatttacaaagagatgctttctaatggattttcaccaaattgggcaacgtacgctgcacttttacgagcttatggaagagctcggtatggtgaagatgctctaaatgtgtataaagagatgaaagataagggattggagttgactgttgttctttacaatacccttttagcaatgtgtgctgatgttggttttgcagatgaagctgctgaaatttttgaagacatgaaaaattccggggcttgcaaacctgacagttggacgttttcatctttgatcaccatatattcttgtagcgggaaagtttcggaggctgaggggattttgaacatgatgcttgaagctggctttgagcccaacatttttgttctgacatcccttatccaatgctacgggaaagctcagcgtaccgacgatgttgtgaggatgtttaaccgagtttacgaattgggaattacttccggacgcgtggggttttgcggttgtcttctgaatgtgatgacacttacacctagagaagagcttggtaaggtaatggattgcatcgagaaggctaaaccagaactaggtcgtgtggtaacttttgataggggagcaaaacggtgaagggaatttcaagaacgaagcatcggaacttcccactcgtcccccctccgatgtaaagaagccttactgtaactgtttgattgatctctgtgttaacttagatttgttggaaagagcttgtgatctgttagagctgggactttcactagagatttatgccggaatacaatcaaggtctccaacacaatggtccttgaatctcaagagtctatctctcggggcagctttaactgcactacatgtttggatcaatgatttgacaaaggtacaggagtctggggaggagcttcccccattgctcggaatcaataccggacacgggaaacacaaatactcggagaaaggattggcaactgtcatcgagtcgcatttgaaggaactagatgctccattccatgaagcctcagataaagctggctggtttttgacgacaaaagttgccgccgagtcatggttggagtcgagacgttcacccaacttggtagttgcataggttgtgtgtgttcatgaacgagtctttgccctaggtcagttctttgcatcaatatataatgtctagaaacgaaatattttctgactcctctttttcatctttattagcatcctctaatttaatggtgggaaaattttgtagcatggtacactatattcctatatatcctgatgtaagttaatgaagtactgccaaattactggagtctcgcatgagttgggcc

SEQ ID NO: 2688 - DNA, 569 bp, Gossypium hirsutum
  Clone ID: LIB3825-004-Q1-K6-F5
ggcaaaactcgttcatgaacacacacaacctagcactaccaattgggtgaacgtctcgactccaaccatgactcggcggcaacttttgtcgtcaaaaaccagccagctttatctgaggcttcatggaatggagcatctagttccttcaaatgcgactcgatgacagttgccaatcctttctccgagtatttgtgtttcccgtgtccggtattgattccgagcaatgggggaagctcctccccagactcctgtacctttgtcaaatcattgatccaaacatgtagtgcagttaaagctgccccgagagatagactcttgagattcaaggaccattgtgttggagaccttgattgtattccggcataaatctctagtgaaagtcccagctctaacagatcacaagctctttccaacaaatctaagttaacacagagatcaatcaaacagttacagtgtatgtgtcatcacattcagaagacaaccgcaaaacctataatccggagtaattcccaattcgtaaactcggttaaacatccttacaacatcgtcggtacgctgagctttcccgt

SEQ ID NO: 2689 - DNA, 734 bp, Gossypium hirsutum
  Clone ID: GOSHI-09MAY01-C49962_1
attcaatccttctggttttgagtggcagaagattgttgatgattggactgattggaataagtggataaacaaccgaggtggtataggtgtaccttcagaaaaaagttgggaatcgtggtgggaagaagagcaagagcatcttcaatattctggcaagcgtggtattattgctgagatattgttagctttacgtttctttatctaccagtatgggcttgtctatcacttgcatgttacaagggaaaccaaaagttttttggtttatggtgcatcatggcttgggattgttctaatattgtttgtaatgaagactgtatctgttggaaggcggaggttcagtgcaagctatcagcttgttttccggctcatcaagggattaatattcttgacatttgtgtccattctggttattttggtcacacttgctcatatgacaattcaagacattatagtgtgtatttttatcttcatgcctacgggttggggaatgctcctgattgctcacgctttgacgcctgttgttaacaaagctggcttctggggatcagttcgaacacttgctcgtggatatgagattgtaatgggcttgcttcttttcactcctgttgcattcctttgcctggtttccattttgtctctgagtttcaaactcgaatgcttttcaaccaagcattcagcacaggtctgcagattttcacgtattctaagccgccaccgttaagatcgcacatttt

SEQ ID NO: 2690 - DNA, 1174 bp, Gossypium hirsutum
  Clone ID: GOSHI-09MAY01-C49852_1
gcagcgtcttacagcacaggaagtgcttgaacatccatggctacaaaatgccaagaaagcacccaatgttccattgggtgagactgtgaaagctaggctcaaacaattttctgtaatgaacaagctgaagaagagagcactaagggtgattgctgagcatttgtcagttgaggaagtagctggcataaaagaggcttttgacgttatggacactggaaaacgaggtaaaataaaccttgaggagcttcggatggggttgcaaaagcttggccaacagattcctgatgcagatttgcagatcctagtggaagctgctgatgttgatggtgatggaactctgaattatggcgagtttgtagcagtttcagttcacctcaggaaaatggcgaacgatgagcacttgcacaaagcttttgccttctttgatctaaatcaaagtggtttcttagagatagaagatctgcgagattccttaaacgatgaagttgataccagtgaggaagttatcaatgccattatgcttgatgttgatactgacaaggatgggcgcataagttacgaggagtttgttgcaatgatgaaagctggtactgattggagaaaagcatccagacaatattcacgagaaagattcaacagtctaagcttgaagttgatgagagatggctcattgcaattaggcaattgagtacaagtctaatggaaatgaatgaatcaaagaacagtaagtacccttgctgtggaaggggggaaaaagagggaaaaacaaagattatccttgatttttgtttggttggatatcggtcaatttctttttaattttccaatttgttgtcaagtggaacctttgaggtggatagtgttaggttgctgtcatgtgttatagtatgatgaattcggaatcattgtgatgaattagtagttgaagaacatagatggaaatctgaagtgatggttaaatatgatccacaattttggttgtggctgtaaatatgaatgtgacttaggctttagtcgacagtctgtcaacatgtcttaatcgtaagaaaagaagtctctgtatgtctggtattcaatttgtctgtttcaattgctttcattgtgctgtctgttaaaagatacaactactttgagctttttaggtaattcccagatttattttattatccaagtc

SEQ ID NO: 2691 - DNA, 759 bp, Gossypium hirsutum
  Clone ID: GOSHI-09MAY01-C49572_1
ggcctctcattttctctcaagccttctcagtccggcgtaactctggggaaggctccggtcgccgggctaccgtgacagacgctgattacccgcaatagcgccgcggcccatggcggctggaaaataaaaagttttctttttttgggttttttcggcttccctagtttaaaggcatctttcatcggagatgacagacctaggccactcacggcggcagaatacgagaagtcagtaaaaaaactatagagcagaacaacaaaagattctacttcagaagatcacttgattataaaaaaatgcttgaacaccgaggttgagactctcggaaacataaggcataaaaacagggtcaaactatatagctacaaacggagcgagcagagtggtggtgctgatatttggtgatggaagttgagggcaatggtatgggtttaataatgggtagagcttcagaaaatgatagtaatgagggtgtgttggttttcggaaggtaatgggtgaacggctatggtgatagtgagggatgagggttgaagatgatttgaacagtaagaccgtgaaaggtttttagaatttggtttagcactgttgtgttcgctgattgaagattggagactcgttttctccttagcttattcgtgaaattttggcttatattatgtaatacaaatcgcaacgagcatcttgattcgttttcaaaaaataaaattacaaataaattaaaaaataaaaaaacagtatttcgctttttatgtttca

SEQ ID NO: 2692 - DNA, 465 bp, Gossypium hirsutum
  Clone ID: LIB3189-010-P1-K1-E1
gacccacgcgtccgcggacgcgtgggcccacgcgttttctgacgcgtgggggcctctcattttctcgcaagccttctcagtccggcgtaactctggggaaggctccggtcgccgggctaccgtgacagacgctgattacccgcaatagcgccgcggcccatggcggctggaaaataaaaagttttcttttttgggttttttcggcttccctagtttaaaggcatctttcatcggagatgacagacctaggccaactcacggcggcagaatacgagaagtcaggtgagttttcggcccccttttttcttattttatgtttattttttaaaaaaacgcaagttaaaaaaataaagaagaagaatgaaagaataaaaagacccacctttttttatttccgattatttttctctatatttgtattcgattctctttttttcgtatttgatttctctctgtgtctcagaa

SEQ ID NO: 2693 - DNA, 883 bp, Gossypium hirsutum
  Clone ID: GOSHI-09MAY01-C49482_1
tctcgaagcagtttagtagattcgggtctccttttaccatgtaagaggttactccgctctctaaggcatcttttgcaatctgatgggcacgcatgttttctattctgggaatatgcttgaactctattgtttgataatggacacacatgttttgaatatctcgaatgattgcttctatggctgatttgtctgtttctgttgtttgacacttcctgattattgtccgtgaatccccctttaatttgtgcttctcgaaaacccattaagatcactaacttaattgcttctaaccctgcatatgcttctgccgcgaacggagatggaacactattgtgaaggatcgtcttcaatgccagaattttatttctacgaccccaaaccaccatccagagacagatctaaaagttctcttgtcgaatgcaacgtcaaagtgtatctcaaccattgttgtcttcctgtgatggatatccgttcgtgtactagctggtttcttaagtaccatattaaccataaagcgtagcaaaagattcgactctgctcctcagacccctgcaggaatacccagggcattgtctgaatacgtgagagcagtcttcatcccccgaacaacaacggaggcagcgaacgttcgtgagcacccttttactcctaaggtttataagcgtgggcagataattccaggagatacgccaaactgtaattgcgatttttgtaggaagttgtaggctccagagtttgctgtaaaatttttttgattcggtctgtaatataatactactaggatctagtaaagaatactgtaatagtttataggcactccgtacagataattccccagattgttttcccttccaaacttgaaaatcagcatgacttattctgc

SEQ ID NO: 2694 - DNA, 247 bp, Gossypium hirsutum
  Clone ID: LIB3135-059-Q1-K1-A11
gcgatttctacgaccccaaaccaccattcagagacagatctaaaagttctcttgtcgaagtcaacgtcaaagtgtatctcaaccattggtaagatttccgtacttctgtgccttcgagccacatctggtgatttctgctttgttcttgccccattgtgttcaaccttgtaacttagaatgttctgtgcaagttgtcttcctgtgatggatatccgttcgtgtactagcttggttcttaagtaccata

SEQ ID NO: 2695 - DNA, 445 bp, Gossypium hirsutum
  Clone ID: LIB3135-058-Q1-K1-B4
cccacgcgtccggaaattacaggcctcaatattacgccgaaagttttgatcaaaccaagaaacggcgagactactatcattatacacgcgaggaaatctctccattgtggcatgatggacttaaatttctgttcgtgactgatggaacgctcagaatacattattatacgcctttgtttgatggtgtggttgttggaactgaagatgtgctaataacaccgttcacttgtgatcgaacttgttctggtgatgctgttgtagctggtattatgaggaaactgaccacttaccctgagatctttgaaaatcaagatgtcttagagagacagctccgcttcgcagttgcagcaggaattatatcacaatggacaattggtgctgtgagaggttttcctaccgagagtgctacacaaaatctgaaagaacaggtttatgtaccttcaat

SEQ ID NO: 2696 - DNA, 342 bp, Gossypium hirsutum
  Clone ID: LIB3135-058-Q1-K1-F11
cccacgcgtccgggctgatgtattttttagtaggtagcgttccgagttcctagggaggagttgggcttccaagttatctattatcgctctaagtagatttaatcgccacttacatttgcggtgctgctttttctttcacatgttagttcgatgatacaataaagtgtacacaaataggcgttctataaaatgccgtgttctgacattgagctaataacaccgttcacttgtgatcgaacttgttctggtgatgctgttgtagctggtattatgaggaaactgaccacttaccctgacatctttgaaaatcaaggtgtcttagatagacagctccgcttttca

SEQ ID NO: 2697 - DNA, 595 bp, Gossypium hirsutum
  Clone ID: GOSHI-09MAY01-C49142_1
tcgcgccaatgctgtagctgcaggaagggttgctggaattgatccaatagaacagataaccaagagatgcattcgtattatcagaactccagaggcagaagttcctagtgtgtgtgtgctatgcagaggtcatgattttagcaagtcagggtttggtcctcgcactgttatactctgtggtgagggggagagagaatatcatgtgggttgtttgagagatcataacattgatgaccttaaggagttaccaaaaggaaagtggttttgttgcacggattgcaatagaatccattctgctttacagaaattggtcattcgtggggaggagcagcttcctgattcatctctggctgttgtgaagaagaagcatgtagaaagtagtttacggagcaaggccaaacttgatataagatggagggttctcagcgggaaaatgacatctttagatgacaccagagtaacgctatcaaaggctgttgcgatcttccatgagcgctttgatcctataagtgactctggatcgagtagaggtgatcttatcccatcaatggtttatgggagaactgtcaagggccaagattttggaggcatgtac

SEQ ID NO: 2698 - DNA, 435 bp, Gossypium hirsutum
  Clone ID: GOSHI-09MAY01-C49172_1
aggtcttaaagagcctccctgatgcagagaaggatccggcagataaacaaagtgaaaccatttcatctcaatgattttcatagtaagtttgatatcgagcttgctgttagtcggttttaagtcaaggcagtttgtttaggccaagaaacaaagaggtaaagtattttacctagttgggaattgcatgtgtttgtttttggccactttcgaattccttgtttagatgcaattgttgtatatgatttaatgttgcagcaaagatgatctgcatctctatttatgaacaaatattgtattttgttaattcaacatcatctaatttgtacttgtcatgcgacttcgaaccttatttcaattcgtttttgtccttccttttcccggcggccgaagtattataataaatataaaaattgaaaaagagatattaaaaaataa

SEQ ID NO: 2699 - DNA, 656 bp, Gossypium hirsutum
  Clone ID: GOSHI-09MAY01-C49202_1
gatggaattcacctacagaactccaatgatgtgctaattcatagcagtgatctcgcctgtggagatgactgtgtttccatacaaacaggatgctcaaatgtatacatacacaatgtgaactgtggaccagggcatggaataagcattggaagcttaggaagggataatactaaagcctgtgtctcaaacatcactgtcagggatatcgttatgcataacacaatgaatggtgtcagaattaagacatggcagggtggatcgggatctgttcagggggttctgttctctaacattcaagtttccgaggtccaacttccaattgtgatcgatcagttctactgcgacaaaaggaaatgttcgaacgaaacagctgcagtcgctctatcaggaatcacctatgaaaaaataagaggaacatacacagtaaaacctgtccacttcgcctgcagcgatagccttccatgtataggtgtaaccttatctgccattgaactaaaaccagtgcaggaacattactacctctacgatccattctgttggcaactttcggagagttgaccacccctcctgttcccccaatcagttgtttacaaattgggaagccaacaaataacagagtccaatctgatcatgatgtgtgctgagcattagtgtag

SEQ ID NO: 2700 - DNA, 475 bp, Gossypium hirsutum
  Clone ID: GOSHI-09MAY01-C49222_1
aaaaagggatgccccccatcccagcttgcattggcctgggtccctccccaagggaacgatgtctgtcccattcctggaactaccaagatcgaaaacttcaatcagaacattggagctttgtccgtgaaattaacacccgaagagatggcagagctagaatccattgcttcagcagattcagtgaagggagaccgatatggtggcactgtcgcaacctactatgaatcggatactcctcccttgtcttcatggaaaccttaaatgagagcatacttgttcaaatcaatacaatcttcaagatgagttatggacctaatgtaaggcctctactttgtttttagaataaattttctgtgagatttaataataaaacggcttttggtgatagattgggccagcttggttggagctatacccccgtttgtaatatgttcagaatgtcgattcccggttaataaagcaaaagtttctatcc

SEQ ID NO: 2701 - DNA, 984 bp, Gossypium hirsutum
  Clone ID: GOSHI-09MAY01-C44912_1
cgtatgttctactacataatgagttgcccatttgctgaatccctcgcgtccgcccccgcgtccggagctttgcaagatgacccaacgttggcagcagctttggttaggatgcatttccatgattgcttcgttgagggatgtgatggctccattctgattgactcgaccaaggacaacacagcagaaaaagactcacctggaaacttaagcttgcgaggctatgaagttattgatgatgcaaaggagcagctggaagatcagtgccctggcattgtctcctgtgctgatattgttgcaatggctgccagagatgccattttctggtcagagggacctgtgtatgatataccaaaaggaagaaaagatggaaggaggtccaagatagaagacaccataaacctgccattccccaccttcaacacctcagagctcatcagcgccttcggcaagcgaggtttcagtgctcaagaaatggttgctttatctggggcacatacgttaggagtggcaagggtgttcgtccttcaaaaacagattgagttacgcagatgctaacctggattcgaatttcgccaagacgttgtccaagacatgcagtgccggcgacaacgcggagcaaccgttcgatgccacgcataacaccttcgacaacttctacttcaacgcattgataaggaaaagtggggttcttttctccgatcaagtactgtatacgacgccgagaacaagaaacattgtgtatggttacgccatgaaccaagctatgtttttctttgatttccagcaggcaatggtgaaaatggggaaggttgatgttaaggaaggatctaatggggaagttcgacagaattgccgcaaaattaattgaagtttattatactagtttgagttctacagcttgattttctgtaatctaaattgtatcaaccacaaattctgccatttctatgtttatggttacataaaaattaaataatccataaa

SEQ ID NO: 2702 - DNA, 373 bp, Gossypium hirsutum
  Clone ID: uC-gsronu33B138d08b1
tttgttgtagttggtcattgtacatacataatggtgttgaacttagtgaagatgataacgatggctaatctgctaagtatgcttatattaatggaggtggtggcgggtgggtttccatttggagttgatggtcttcgcatggactactacataatgagttgcccatttgctgaatccatagtgaagaacactgttaatagagctttgcaagatgacccaacgttggcagcagctgtggctaggatgcattcccatgactgctccgttgagggatgggatggctccattctgattgactcgaccaaggacaacacagcatataaagactcacctggtaacgtaagcttgcgaggctatgaagatattgatgatg

SEQ ID NO: 2703 - DNA, 510 bp, Gossypium hirsutum
  Clone ID: GOSHI-09MAY01-C44592_1
gaaaaaaaagaggcagaaataagtatcaaatgcaattgagattcatacctgtgtttttcttccatcttttcacttaaattttgcttttagaagaggaaaaaagagagccaatttaggctctgagatgtatatgaaattcattgttcttcctctgatgcttgttgctgaaaatcaagttaaattccaagaaagggagtgggaaaaagagagataaacaaagttcctcatctaggtggactccaatggcggcatcggttatgaaagaaggtaaaaaaacggagcccgttgttattgtgaagcttgcggagtgcgattgttgcggtttaacggaggagtgtacgcaagcttacattgctagcgtaagagaaaaattcgaagggcggtggctttgcgggctttgctcggaggccgttaacgacgagacggttagatcggaggaagatatcacgactaacgaagcaatggatcggcacatgaagttttgtgagcagtttaaatcgtcgagtccac

SEQ ID NO: 2704 - DNA, 238 bp, Gossypium hirsutum
  Clone ID: GOSHI-09MAY01-C44542_1
tcctttcgtccggcttttgtacatgaggatacttgtaacaggcggcagttcacttgagaattgtaagaccttgtttttgctgcatgcattgcttgtagcaaatgaaaatgattccccaacataaattttacagaacaaactttaagcagaaccggtccaagcttttcatgaagatttgtcagatagcgaaattcatctggttttcgtattataatcttaaatatgttgtatttatatt

SEQ ID NO: 2705 - DNA, 603 bp, Gossypium hirsutum
  Clone ID: GOSHI-09MAY01-C44532_1
cccacgcgttcggttgtaatggagactaagggcggtcaaaagaagtctagtagtggtagtagtagatctttacaatacgaagctcctctcggatacagcattgaagacattcgtccaaacggcggcatcgtaaagttccgatccgctgcttactacaactgcgttaggaagccatgctgatataccttcaaacaaaatggcactctcgatcttagagtaggatttacttcggcatcttatatttatttatgtttgtttttgtttcacctgctctctataatttaacaagagattctaagaatcagagactgaagcttccttgatcaaattcgaaaaccattgaaaacaatttctagtgatattgttagcattgagcttttgctgtaatgagaatggacatggaatcgccgctgcctccttcaccaataggcttcgagggctttgaaaaacgcttggaaatcactttcttcgatccacccgccttcaatgacccaaatggatacggtcttcgagccctatctagagcccaaatcgactcaatcctcgagccagcttgctgcaccattgtttctcagatctcaaattccaacttcgactcgtacg

SEQ ID NO: 2706 - DNA, 550 bp, Gossypium hirsutum
  Clone ID: GOSHI-09MAY01-C44422_1
cggtaatgtgcagtcagagctacttttccgaaaggacaaagcaactttcacttttgagaagggttgggctttcgctctgaaaatctacttcaatggagataattgtgttatgccaccgccccacgcctatccttggttgcctaacggcagttcccatcaccttatctccacacttagtctgttgacaactctcttggcagcattggcatttttattgggatatgcttaaagttcaaccatttttatactgggaaatctggtatgctccaaaattttgactgaatcagttcgactgtagaatgtacggcgtgagaagttgcagtttgtgtcagttagagggagtcaatgtgcagtggtgtcgttttaatgtatggtcagtgaattcactcgtgctgttgtatgtatgcatgttcgtttatgtacttaaaccaaaaacaatgttgattgtagaattcccacgatattttattacagtagtaacagacataaatcattgacagagaaactttagctaacttatgcgttgcggttgtttaggttcgtaagcatc

SEQ ID NO: 2707 - DNA, 608 bp, Gossypium hirsutum
  Clone ID: GOSHI-09MAY01-C44782_1
catggatctgggagatattccgagcatatgatgcctgaagttgaaaaggaccatggccgaaaaggctcacacgtgggtcttcatgacgcggcagcatgctataatagttatggctgacagcctatattacactaagtttaggtgttactgcaagccaaatatgggagggcgcaattgctatgcagatgagcattacttgccacacttttttcaatatgattgatcctggtggaatagcaaaccggtcagtaacatatgtggattggtctgaacggaagtggcatcctaaatcatttaaggccgaagatattacattgaagttcctcgagaaccttacaaccattgacgacatagtccatttcacaagtgatgaaaagaggatgcttacaggaccatgcctgtggaatggaataaagagaccttgttatttattcgcaagaaagtttatccagaaacattgagaggtgatgtctattctctaatataccactatctgtgtagcttccctttcccttgctttcctaggctggataatgtattatcttgatttgtggatcagatcacaagcggactagatcaatgcattcaacaggattaaaattttgatt

SEQ ID NO: 2708 - DNA, 801 bp, Gossypium hirsutum
  Clone ID: GOSHI-09MAY01-C44752_1
gagagataccttcgcttaagaataggcttctaaagcttcctgactctgacaaaatatccattgcttttcccgatgatggtgcttggaaaagatttcataaacagctgcaacattttccaactattgtttgtaataaagttcggataggggaccaacgaatcgtacgcatcaaagagggagatgctacagggcggcatgtggtgattgttgatgatttggttcaatcaggtggcactctgattgaatgccagaaagtattagcagccagtggagcaacaaaaataagtgcatatgtgacgcatggaattttccctaaaagctcgtggcaacgctttgaacatgataatggagggcaacttgagaaagggctaacctatttctggatcactgattcatgccctcacacagtgaaagaggtaaagtgcaaacgtccatttgaaattcttagcctttctggttccattgcagctgctcttcaggtataaaagtaaccctttcaaagttactaataaatcatttcattacattttttgagtgaatttaagttgttttgtttattgaaaaaaaatgtaatgagattagaaccctccttcggcagcagaattttctatttaggttattcggttttttttttctttcgatttttgggtatgttactcggagttggatgttgatgttgagtacggatatatcttatttagttatgttcaaatttctttttcaaacttgagtacaaatggcatgatattcattccggtacaagcgaatgttcaaatatgcaaggctcttatagaggaaaaa

SEQ ID NO: 2709 - DNA, 1218 bp, Gossypium hirsutum
  Clone ID: GOSHI-09MAY01-C44652_1
ccctgcctccgcttttttatttttctcgagaccaacacgcacctttagtaaccagttacttacttttggctttggcttttatcttttgtttatactaaaaaggagtggtggaggctcttttttttttttttccattgacattcttgataagtagggaaggccatgtgaattgtttgaactggactacgattatcgactttcttgacggggtaaacgtatcggttattctcggtattggtacaaaatgggtaaatgcaaaggttgtgggaaattaggaaggatgctaccgggtgacgggcctgcaaaagcttaccattatgctcttctttgttcccctgttgtttctgtttgggattgcattgtccgtaagatgagatactcctacatacctgaatgggtgtagtctttggtgttatataattatataggtagcatcggaagcttttttttagaatacaattatagaagaaggaaaaaaagacagctacatagggaaaaatatacaatttaggggaacctttttaaagtttcatggataacaaggcttgtaataaagtgcgaccgggtgtgagaaaagcgaaaaagaagcaagtgaaggatgagttggatcgtattaaacaggccgagaagaaaaaaaggcgcttagagaaagcccttgctacttccgccgccatacgttctgaactagagaaaaagaaacagcagaaaaaggaagaacaacaaaggcttgatgaagaaggtgctgcaattgctgaggcggttgctttgcatgtcctacttggtgaagacactgatgatgttggcaatttcgatctatttatcaatggaggaagtggtcctagccttccccatcaagttcattcaaaaggtttggtcactaatgcatcatatcgagctggatgtgagtgggcaatgttcggaaacagtgactggtctttctcatgtggagactacggaagggatctgattgaaccatgttttgaggatagtgtttggggaactgcaggactttcagctggtcttatcgccgcgcaagctgtttcggcacttcggattacagagaatgcagaggtaaacacggtcgtcctcaacgggatgttgagaggctagacaagcgtgtttgttgctacatcaaacctttgctctcaaaatctgaataatggcttgatgtatatatatatatatcttgatgccctctgtagtcgagctgcttttctt

SEQ ID NO: 2710 - DNA, 643 bp, Gossypium hirsutum
  Clone ID: GOSHI-09MAY01-C44192_1
gtcatgagcaacaagtatgctgccatgagagaacaaagtcgacaaatatcaaatccaaaaccggtggagaataacataacctctgctaaggtctcattgcttgaagtaggcaattcgcatcttgataacctcaagggtgggccatctgctggactggcctcaacatggcgatcaatgaaatctggctttcaaaattttaaagcaaatattgaggccagaaagtttcttcctgtacgccagaatcaggaagccacactcatttcccatgtcaactcatccgattctgagtcccttgatgagatattccagagattgaaacgaccgtcagtagaccacagtgacgagaatgaaaatgagaacgacacagaaaccaagtctacaagatgatatcaaattcattcggaaaaaaaatgtgcctgttgctgtcgtggaaactgtgatacgaaatgtacagagctcattgaatttttacagtcctgtatgaaagatgtttggggtcagcagcaggaaatttcagactaatacaatatgggaaaaataattattccctggctgtatgattccagctaattgtaatttgaactgaacatttaggcattccattcagcttcttacacgtgatatataatataatcatttcgtg

SEQ ID NO: 2711 - DNA, 533 bp, Gossypium hirsutum
  Clone ID: GOSHI-09MAY01-C44112_1
cccacgcgtccgctgaatagtcggtgaagcagaggaggcagaaatggtgagagtcgccacctactttggaatgtcattaggcgccttcgttttctggcaatctatggaaaaagtccacgtttggatcgctctccaccaagacgagaagaaagagagactgaatagtgaagcggagatcaggagaatgagggaggagctgcttcatcaagccaagcagaatgagcgtctcgcgtaaattctgcgttgttgtcgttgctgtttctttcttcttcttttttcccaactattttaagcccgatttgttttaattagactcaagtggaactgtggttgaaaaccataatattgcctttgatgatgagctggataaccccatgacatgccatggacgaattgttgtttctttctgcttcataaatgccatcactacctgtgtgaaatcgatgaaaacccaatttcttttccctaataaaaaataaaaaaaaaatataaaaaaaaaagaacagaaaaaaacaaaattatattagacaaaa

SEQ ID NO: 2712 - DNA, 413 bp, Gossypium hirsutum
  Clone ID: LIB3148-054-Q1-K1-D5
cccacgcgtccgcggacgcgtggggggtgatgcaagcaataagggtgcattgaaaagctccaatgtaacgcatatcttaaccgtggctaacctatctcttcctttgtatccaaatgagtttgctcataaaattatcgaagcttcatcgatgaagctaaaagactaggtggtggtgtgttggttcactgctttatgggaatatctagaagtgtgacagtggttattgcttatctaatgaaaaagcatggtatgaggctttctcaagctttggaacatgtaaagcgtagacgacctcaagcttctccgaattctggtttcattttacagctgcaacaatttgaaaaaacccttcgaggttgatcattgttcggtcacttccctaggcccttgaagttccatctgtaaggaatatg

SEQ ID NO: 2713 - DNA, 325 bp, Gossypium hirsutum
  Clone ID: LIB3148-025-Q1-K1-F3
cccacgcgtccggacgacctcaagcttctccgaattctggtttcattttacagctgcaacaatttgaaaaaacccttcgaggtaaggaatatgaaaagactcggctcgatcggtctgcattagtttgtcggtccattttctccttcttcaacaaaaagcagtgagaagaaaggcctggctttttggcattgttacgatgcactcgataaagatgctagtatattgtgtgatggttaaatgtaatcaacatatactagccaaataaacatgatccaatttattaaactatatgaattggaacatacaataatagaatggaaatttt

SEQ ID NO: 2714 - DNA, 1314 bp, Gossypium hirsutum
  Clone ID: GOSHI-09MAY01-C44202_1
tgcatatgcctctgctgcgaatgatgagggaacatttctgtggataaccgtttttatcaccagtagatttcccctcatatcccaaccaactagtcctgtcgctgatttgaaggttctactatccagtgctgcatcaaatttgatcgatattctcggtacgttttcctgtatactgtgactcttgaaaatttttttctcagttttcttctcagcatttattccctcatattctaccatatgtctttgaatattctgagctaatcccctccctcgcgtccgtttgccctcgcgaatgagtttgtttctaaaggaccatatcaaccataacgcatagcagaaaagccgacactggtaattgttgctgttcttgaaaacccaggacactctcggaaaacatgaagacgctcttctactccaaaataacatcgtggacagcgggcagttgaactaaccctcctcaagctgagattaccaaagtgagggatataatcccatgaaatcctccagattgtaattgcaatttttgaaggcaattgtaggctccataattttttgtaaaaatttcttatttcggtctgtaataagtagtcattagctgtagaagcatcttgtagtagtttatacgcactacgtacctgaaaactcaccagatagttctccactccacacctgaatatcctcatgttcggtctctgccagaggaatttgtagaatcttccgagcagtatcttcttgaaagccaccttgtcaatcccctgaatccagttgtcttcccagatagaaatgcaactccctttaccaactctccaacccaatcctctttgaagaagtccttttgacgcccagatgctcttccaggtgaatgaaggaattgatgttcagaaaaactctcccgtcctccctatcgtctgagcaaaattgtgttcaagccgatttcaagaaaaaagaacaaaagcaatctacgaaaaacctaaaaatatcatgccaaaggcggcagatagaaacgtgctagggtagcagactacacaatataaagtctcaaaatcattgtgtttttttagttttaaaattttacgcaacgtttgggcatcaaaacggcggtggaaggttgcgtttggtaatttcaagcgatcgagaaggtttaattctgccctaagtctctatatttttaagacatttgaactttaaaaaaaaaaaaaaaaaaaaaaaaaaaaaaaaaaaaaaaaaaaaaaaaaaaaaaaaaaaaaaaaaaaaaaaaaaaaaaaaaaaaaaaaaaaaagggggggggccgttttaaagaacccaactttcctt

SEQ ID NO: 2715 - DNA, 513 bp, Gossypium hirsutum
  Clone ID: LIB3585-059-P1-K1-F4
aacatcattaagctatctgtattggatgttgctccttcacccatttcttcaatccggatttctttgccaatcttcatccaaggttgaaatatgacgttccagttcttttcctatcaggacactctcgaaaaacatgaagactctcttctactccagaataacaccgtggacagcaggcagttgaaatgaccttcctcaaattgagattaccaagatgaggggtataatcccatgaaatcctccaaattgtaatttcaatttttgaaggcaattgttggctccataattttttgtaaaatttttttatttcggtctgtagtaagtagtcattggctgtagaagcatcttgtaataatttatgggcactacgtactgaaaactcaccagatagttctccactccacacttgaatatcctcatgttcggtctctgccaggggaatttgtagaatctttcgagcagtatcttcttgaaaggtactattaattaagtctgacttccattttctgcttg

SEQ ID NO: 2716 - DNA, 332 bp, Gossypium hirsutum
  Clone ID: LIB3148-023-Q1-K1-A8
cagaacagctggaaaccataaaggctattgaagagtcatttccaaggtcccatctgttgtgtcgatagctattccccacagatttaaacatcattaagctatctgtattggatgttgctccttcacccatttcttcaatccggatttctttgccaatcttcatccaaggttgaaatatgacgttccagttcttttcctatcagtttatttctaaatgaccatatcaaccataacgcatagcagaaaagccgacactggtaatagttgttgttgttgaaaacccaggttagccactcccatgtattctgactcgtattctccatgacccatga

SEQ ID NO: 2717 - DNA, 776 bp, Gossypium hirsutum
  Clone ID: GOSHI-09MAY01-C44222_1
cccacttcgtccgcgaagttaaggctgctgccggaccttacggtgtaagaaccgaacaacctgttcaacgtacatgggttccaccacagccaccacctgtggcaataccagaagcagctgaagccattagaaggccaaaaccattagcttcaaaagaacaatcggctgatgaacaatcaatggttcaccccgcagagccaattgatgagttacagaggatcacaaaaatatcggagtcaggaggttcagtggagatgaatgtaggttttccgagtggaacctccagtgatgtacaagaacatccggttagctatgaagggaattgaaactggactccgtatccagggtaagctcgatgtaaagtctatcgatgtgccataatattgagcatccctgtagtatatgcagaactttctcatcatgatacgttctttatgtacacccaataatgataataagggtggaactctgtaaatgggggtgggttatgtttatttggagctagaatgctggcttgcactaaacgaccaatacctctataagataaatcaagaggccaaggcttgtttatctctactaaattgcaccagtttataaatccgacagccttagcacttgaaaaaaaaaaaaaaaaaaaaaaaaaaaaaaaaaaaaaaaaaaaaaaaaaaaaaaaaaaaaaaaaaaaaaaagggagggttgtgttgtggttttaaggtacgaaccctaccgtgcataacttcacactcttttatattgtcactaaaatccaattaaaa

SEQ ID NO: 2718 - DNA, 756 bp, Gossypium hirsutum
  Clone ID: GOSHI-09MAY01-C45952_1
ccttcctttacccttctctcttctacggtcccagcggcaatcaaatgaaaaaaaaaggaaaataaaaatagagcaaagtctaattgtcttgcttatcaagaaactctgaccctgacgaagtcaaacccggcagcgatcacccgttttctcatttcattctcgcgttccctttatctgattattagttcctttgaattggggaaaaaaaaacccagatcataaccaatggtactgccattgttgaagttaggaactttggccttaaaaactctgagtaagcctgtggccgctaggctcaagaaacaagctgcgtatgcccctaggttccgcgagttcatcgtcgcctccgcccaggcaaaccatcgaatcacaactagaatgcaaaggcgcatttacagtcatgcaactgatgctgcgatacgccccttggatgaggagaaagctgtgcaggctgctgtagatcttatgggggagctttttgtcttcacggttgctggagctgtcttgatctttgaagttcaaaggagttctaggtcgggagccaagaaggaggaagcacgccgaaaagatttggaggtattcattgagcagtctcctttctttttattgttttcctcttttgtatcaaggtgataaacatgatgctaaccaagatggagtttagtcctatgttgctctaactcttcatatttgttgaaatacccgtgtgcgacatctatgttcatgaaccaacacatactcgaaaatgatacaaaa

SEQ ID NO: 2719 - DNA, 570 bp, Gossypium hirsutum
  Clone ID: GOSHI-09MAY01-C45942_1
cgcaaagcgcaattgaggataagaactagaaaacttgttgcgattgcgatctcgggttatcttctccaataaattagtggttgcatttttctttttcttgcaagagcttttatattgaactgctggaatggctgaggagggtcataaggtcaccttgaatgtgtatgacttgagtcagggaatggctcggcagctttcgatgaccttattagggaaggttattgagggaatatggcacactggtatggtagtttatggtaatgaatactatttcggtggaggaatccaacacattcctgctgggacggcaccatacgggagaccaattaaagtgatcgatctaggtgtcactcatgtgcctaaagatttgtttgagatgtatttacaggagattagtcctcgttacacagccgagacctacagtttgcttacccacaattgcaacaacttcagcaatgaagttgcccaatttctagttggtactaacattccagactatattttgcaacttccaaatgaagttatgagcagtccaatgggttcacttttaatgcccatgatacaaaatct

SEQ ID NO: 2720 - DNA, 465 bp, Gossypium hirsutum
  Clone ID: GOSHI-09MAY01-C45512_2
ctttttacaacagttatgtacatcattatatggaaggggagtccatgagagtaagttttgagccatggtttgtggagtacaaggttgatgttgtactcgctggacacgtccatgcctatgagagatccgaacgcatatcgaatattgcgtataacattgttaatggattgggcactcccataaaggatccatctgctccggtgtacttgaccattggagatggaggaaatctggaaggattggtgacagagatgacagagccacagccgaactactcggcgtatcgtgaagccagtttcggtcatggaatactggaaattaagaacaggactcatgcttactttggctggcatcgaaatcaagacggttatgctgtggaagccgattccctatggttgaacaatagatattggagcgtttcagattcagaagaattatctgtagccactgccaccatatgatttt

SEQ ID NO: 2721 - DNA, 500 bp, Gossypium hirsutum
  Clone ID: GOSHI-09MAY01-C45512_1
tgggtataacattgttaatggattgtgcactcccataaaggatccctttggtccagtgtacttgacccttggagatggaggaaatttggaaggattggttaaaaatgtttgttttttttaacaggattacagagccacagccgaacttctcggcgtttcgtgaagccagtttcggtcatggaatactggaaatttagaacaggactcatgcttactttgggtggcatcgaaatcaaaacggttatgctgtggaagccgattccctatggttgcacaatagatattggagcgtttcagattcagaagaattatctgtagccactgccaccatatgattttaccttgtgtcgctttagctagcaagctcaattatatctgtcaaggtgtttttattcattgcaaaacttacaagttttacttccagtaaaagtaaggtattggaaatataatgcgtaaaactgggataccccttaaccaagcaggtgggtggttgcctttcg

SEQ ID NO: 2722 - DNA, 479 bp, Gossypium hirsutum
  Clone ID: GOSHI-09MAY01-C45702_1
aaaaaccagaactgccaagtactgattctggtcacatggagccaggggtgcctaaaccagttttgaatggtgataaggcagaagagaccgacaccgagactgatcagataaatccaatggatgtagttgaagattcattgcggtctcttgatgatgcagcagaggcagttggtttgcctgctgacgaggaaaactcaaatgatataaacaaaaccgaaggtaatagttctgtgtactgtgccgaggaaagacatgcttttggcgatgcaattagtggttccttaaatggttctcctaaggtatcaggggctttgattcccgggtcaaatgagtctgggtcggagtccgtaattttaactcggatacatcattctcctgaaaatacacattgagacaatttctatatccatgttctttttataatgcgcccaaaaaaaaaaataaagtatgaggatgctagaatgaagaaaccttaaaag

SEQ ID NO: 2723 - DNA, 952 bp, Gossypium hirsutum
  Clone ID: GOSHI-09MAY01-C45632_1
attcactatctctttgcatccttttttacccacttaacaagaacaacaacaataaattaatcaatcatgagggttttcccagcgctttttcttgcatctcttgctttagtgttgggcgcctctcgtgctgatcctgacttgcttcaggatgtatgtgttgccgatctttcttctggaataaaattgaatgggttcccctgcaagcacccttcaactataggagcaaatgacttcttctttgccggtctggccaatccaaacttccctaacaacactttgggatcgcttgttacggcagctaatgtggaaaaaatcccaggtttgaacacccttggagtctccatgtctcgtatcgactacgccgtcggtggggtcaaccctccccacacccacccacgagcatcagagattgcattcgtgttggaaggagaattagaggttggcttcttcactacatccaatgtgttaatatcaaagcatatcaagaagggagaaatatttgtgttccctaaaggattgatgcatttccaaaagaacattgggaagacacgtgcatctgctattactgcgttcgatagccagttttcaggaacacagtccattgctactaccctatttgcagcctcaccaacaattccaaatgatgtattgagcaaggcattccagattcatcctagagaggttgagagaatcaaggtcaaattgacacctaaaaaatagattaaatcaagtttaatatgttgtgttcttaataataagaaattaaaaacgaagaagcttagagttatgattatatttaaaatagaaaataagcatctatatggtattcaaatttattattattgtgtttgaacacttgaaactgctttacaattccatcttgcgagacaggaagcttccaagttccccctgaaacctttctattttaaaatatatgatattttctatgaaa

SEQ ID NO: 2724 - DNA, 555 bp, Gossypium hirsutum
  unsure (1)..(555): unsure at all n locations
  Clone ID: LIB3828-016-Q1-K6-H7
tccgcagaaacaacaacccaataaattaatcaatcatgnnagggctnnttcccagcgctnnttttcttgcatttctcttgcnntttagtgnnttgggcgccntnnctcgtgcnntgatcctgnacnnttgcttcaggnnatgtatnngtgttgccccgatctnnttcttctnnggaataaaatnntgaatgggtnntcccctgcaagnncacccctcaactgattaggagccannaatgacttctctttctttgccgnngtctggccccaatccaaaacnnttccctaacaacccactttnngggatcgnncttgttacgnnngcagctanatggtgnngaaaaannaatcccaggntnnttgaaccacncnncttgggnagtcttccattgtnnctcgtatttcgacttacccgccgnntcgggtggggttcaaacccttccnnccacatcccacccacgaatgcatcagagaattgcatttcgttgttgtgaagggagaattagaggggttggcttctttcactacaatccaatgtgtttgatatcaaaagcg

SEQ ID NO: 2725 - DNA, 570 bp, Gossypium hirsutum
  Clone ID: GOSHI-09MAY01-C45172_2
aaaaggtgccattgcaattcaatagtccgcatcaaatgcaggaccctcagcacccccgcgtccggcagcatcaacaagcaatgcaaggtcaaatgggaatcaggcctgggggacccaataatagcatgcatcccatgcattcagaggctagccttggaggcggcagcagtggtggtccccctcaaccttcaggcccaagtgatggacgtgctggaaacaagcaagagggctccgaagctggtggtaatgggcagggcagcacaactggtgggcatggtggcggtgatggagcggatgaggcaaagtgactgtcctaatcagtcattttgtttggataccatgtggctgttgatagtaggtttctcttacaataggatttgtattcccctggtgatcttctcatagactgttgtaaaatgaaaattcttcttattgctttttaatgtagcagtttaggtagttttaactcttttaagaggttgttggcatgctaatgaattaaagaaacaggctgttaagacaaggatagttttgttgtaagaggaggtacaaaagcatgtggttactacc

SEQ ID NO: 2726 - DNA, 921 bp, Gossypium hirsutum
  Clone ID: GOSHI-09MAY01-C45172_1
attatttgaaaactctatttcaagaattaaattaaattttaaaaaggaacaagaattccttcatactcatcagctcaaacaaggtttaggatttcttttggagtaaggtaaaagctcacacaaagatgccgcagccaccgcaaatgattcctgtgatgccttcatatccacctactaatatcactactgaacagattcagaagtaccttgatgagaataagaagttgattttggcaattttggacaatcagaatcttggaaaactcgctgaatgcgcccagtatcaagctcagctgcaaaagaatttgatgtatttagctgcaattgcggatgctcaacctcaatcgacgccagcaatgtcgcctcagatggcaccgcatccagcaatgcaacccggaggatattttatgcaacatcctcaagctgctgcaatgtcacagcaacctggcatgtaccctcaaaaggtgccattgcaattcaatagtccgcatcaaatgcaggaccctcagcacctcctatatcagcagcatcaacaagcaatgcaaggtcaaatgggaatcaggcctgggggacccaataatagcatgcatcccatgcattcagaggctagccttggaggcggctgcagtgctggcccccctcaatcttcaggcccaagtgatggacgtgctggaaacaagcaaaaccctgaaaccggtgccaatggacagggcagcacaaccggcgacagagccgaggaggcaaagtgactgtcctggtcagtcattttgtttggataccatgtggctgtgtgatagtaggtttctcttacaataggatttgtattcccctggtgatcttctcatagactgttgtaaaatgaaaattcttcttattgctttttaatgtagccagttatgtagttttaactctttttaagag

SEQ ID NO: 2727 - DNA, 590 bp, Gossypium hirsutum
  Clone ID: GOSHI-09MAY01-C45132_1
cccacgcgtccgcccacgcgtccgcccacgcgtccgcttgcacctgataggagcaaattgtcaaaacgccatggtgcggcttcagttggtcagtacagagatatgggttatctgcctcaggcgacggtgaattacttggcacttctaggttggggtgatggaactgaaaatgaatttttcaccattgatcaacttgttgaaaaattctcaattggtcgcgttaacaaaagtggcgctgtttttgactcggcgcaagttaaggtggatgaatggtcagcacttaagagcgattccctttgaggagttgtcccagcttattggtgagcgctggaagagtactgggcttctcacacagtcagaagggccatttgtagatgatgcagttcagctgcttaaggatgggatcgacttggtaactgattcggatacagcactctctaacttgctgtcttaccctgtacatgctactttgacgagccctgaaggtagacccattgtcgaagataagctttctgaagtttctgcccacctattagctgcctatgatagtggtgaactctttggtgcattggaagaaggccttgctggct

SEQ ID NO: 2728 - DNA, 485 bp, Gossypium hirsutum
  Clone ID: GOSHI-09MAY01-C45052_1
gccaccattgctcctgcaccacagctggtggaaaaaacaaaccaacaagtggaacaaacttatcccaagtttgtttttggggattatatgtctgtttatgttcagcagaagttccttcccaaggaaccaaggttccaagctgtaaaggcagtgtaatatcaagaagaagctcaaaaccatgaatgatgtttttgattgaaagagtggggccctttctttcctggaaaataaaattgcagggaaggatatgaagagctcaagtcagtatacaatgttactagggtgtttgtttgtttgtttgtttgttgtgtttttttttttttttggtcttttccttttttggttgggagtttgtggtgatgaacatgatgagatgctcgatcaaattgctaaagttgggtgtgtaaatttgaatcacatatatattttattaaaaaaaaaacagacatagaaaaaaataactaaaaataactaaacaatttttg

SEQ ID NO: 2729 - DNA, 791 bp, Gossypium hirsutum
  Clone ID: GOSHI-09MAY01-C45012_1
atgggtcctttgaatcttaatgcatttgacttgatcattctctctcaaggcttgaatcttgcaacactttttgaccgcgggaaggacaccatgaagcaccagacaagatttgtttcacggaagccagcaagggtggttctgtctagcatggaagttgttgctcaatcaatgggctataagacacacattcgcaattataagatgagagttgaaggcccttcagctaataagacttctcatttgtcagttatcctcgaagttttcgaggtcgctcccacatttttaatggtagatatggaaaaagcagctggtgatgccggagaatacctaaagttttaccaggcattttatagcaacctcgaggagataatatggaaaccaccaaatgaatcaagcaaaactaggatcaccaaatctaggagtaaaagacgttgacctgtcatcccacaacattgccagtatttcaatggcatatatgttgtattacaaccttgaggtcaacggtacgaccaacttggcccatgaaactcctctctttgccccatgagaaataggaaactatagtttttatttataccttttggatggatggtgtttgtaaagctctcttgtttttgattcatagcttgtttccttcagtaaatgccatctgttgtaaaaatactagtccacgaagtacacagactttgacattttagagttggctttacctggaaatctctttgtcttggagtttgtattgtaatttgtgtgtaagatgttatatatttataaaattttgacccgttaat

SEQ ID NO: 2730 - DNA, 531 bp, Gossypium hirsutum
  Clone ID: LIB3585-012-P1-K1-H6
cggactggcaggcccgacccaggcgacgcgactgctcatttttcagttgtcctcgaagttttcgaggttgctcccacgtttttgatggtggatattcaaaaggcagctggtgatgccggggactacctaaagttctacaagacattttgtagcaacctggatgacatcatatggaaaccacctaacgaatcaagcaaatcaaggatcacaaagtccaagagtaaaagacgttgaacattgcccgtattttgagtccataatcactatgtatacgtaggattacaagttacaacctcgacgttgacgtaacggcttacctaacccttccaaactcctctgcagccccaaagaggaataggaaaaacatatatgtatgtatagtatttatctggactttctgtgtggttaatgtttgtaaagctttctttgatttgatccataatttatttccttgagcaaaatgctatatgttgcaaccatgctgtaaacacgcaaagtacccgagtttatcaaaaggagaatggcatttta

SEQ ID NO: 2731 - DNA, 968 bp, Gossypium hirsutum
  Clone ID: GOSHI-09MAY01-C45382_1
ctaggctggaaattaatttcctggataaaggtcttggctaagatgatctgacccgagtaattggtgatagtagtatgtcctctaaaagcttttgtagacattggaatatggggatatatagctaccaaaggattaacttgaattttgtgtaattctttttagagcctgttgtatgaaataatcactggcattgaaactgaatcaaccaatgttccaagttcatcttctgctgcacctagagttttgatgactaagccagttagtgaactcgtctcagaagttgcaccttttgctagattggtagtattccatttcactttgtttttggccctcgcgtccgccctcgcctccgactaagtatatttttaaattttgttatttcttataattgcaggatcccatgcttagtagaaatattagacctgacggtgatgagcaatcaaatttacaggataagcctaatggccaaagtgatgaatgttgctcatatacaagctcaaacagggaaagttggggaagatgctcttcactggggggcagtgatgaagaatcttcagcagactgtacggctgctaataacggaaatcaggtgactcttgatgtgcttgcaacacctctgaaaagcacgcagcaaaaatcaagtgatccacccaaagaggaaaaaaagaagcagttgatgcagaagaaacagaagaagagagattcaacaaccccaaagccgaaacatgagaaattagaaaagctagaagcccttagtaagcggctacgcctttgcatcctaaaacgggtaagtcaccggaggcctcgttccacgtgagtgaccccaggaaacattaagctgttttttttcttgattctagtattttcagtatgaagtgttccaagtcattttaaactcgaagcataattatgcggatttccgagctttactttgataatgtaaatgcagcatccacgtatttaaattg

SEQ ID NO: 2732 - DNA, 273 bp, Gossypium hirsutum
  Clone ID: GOSHI-09MAY01-C45312_2
cccacgcgtccgcccacgcgtccgttccaatccaggtcttagcgatggtatccctattgatgacccatagaatgattgtcaacgaaatgtcgataaatcattaaacaaattgcaatttaaaagaatagtgaggttttggaaaataaataattagttctataaatagaatgttatgtttttcattaagtttatgaactgattttcaaaaaaaaaaaaaaaaaaaaaaaaaaaaaaaaaaaaaaacaaacaaattttaaaaaaaaaaaataaatt

SEQ ID NO: 2733 - DNA, 528 bp, Gossypium hirsutum
  Clone ID: GOSHI-09MAY01-C45312_1
cggacgcgtgggttttttttctctgttttttcttaaaaaaaattcttgcttaataaacacagagaccacattttgaaacaaaaatggcacgccaacttgttgttcttgctttggttttgatttttctcgccggcgtcgtttctaccgacgcctcatccgccggtggcagccctgcaagtgcaccagctggagcttctacagttggcagtactgctagttcctcccctacttctcaggctaccaatccaggtcttagcgatggtatccctattgatgacccataaaatgattgtcaacgaaatgtcgataaatcattaaacaaattgcaatttaaaagaatggtgaggttttggaaaataaataattagttctataaatagaatgttatgtttttcattaagtttatgaactgattttcatatatatgatttcacttacaacattatactcttaacaaatctactaaaacgagtagattggtgaactgtgtttttttttgtgaattatgaaaggatggtaaagccctaa

SEQ ID NO: 2734 - DNA, 663 bp, Gossypium hirsutum
  Clone ID: GOSHI-09MAY01-C45202_1
aaagaatataatcgcattggaggccaaacgagaccgattccttttctctgccaagggagagagatttgagacgatgactgaaatttcaagaaatagatcgctccgtttcttactgtttttcgcttccgtttctctacactttatctcaggtttttctgatgactctaaaggttcaaacaacagctcaaagacaaaatctaatgcgattaataatactgggaccaaggtaatcttcatagtgcttggacttgttgcagttgggttgttttcatttttccttttcaagttgtggcaaaagaagaaacgagacgaacaatatgcccgtcttttgaagttgtttgaagaagatgatgagctcgaggtcgagcttggcctgcgggactagcagcacattgagaactgagctcgtcctaattgaggcttaaatggcaacaatggcttgtgtgttgtttaggaatctcatttttgtgaaggacaatgtcaggattttaggcatatgctgtggtgaggtctgataatttttcaaccttaaagttgtactatttgtaatgatatgttggaatttattatgaatttaagttttttgtggatgcttagaaatgaggttggtcggttaccattttgtacaagatgtttgaaagaaaagttagttcattggtttgt

SEQ ID NO: 2735 - DNA, 429 bp, Gossypium hirsutum
  unsure (1)..(429): unsure at all n locations
  Clone ID: LIB3582-053-P1-K1-G9
cccacgcttccgcccacgcgtccggggggactgagtgttgatggatccattcagaaatataagctggtttgaagcaaacatggctacatatcagaatttaataacacagtccatgtatgacaaacaactcgatagtggaaggggaactttacttcacttgtgtgatgatgtgattcagggggaagtgaaanangtaatcatctcattctttatactaatggagcaaggtaaagccaccatggaggatttggatctaaggtgcgaggaactaattaaagaggaatttggggagagctgtaactttgatgtggatgatgcagttgaaaagctagagaagttgaaaattgtttctcgggattctattggacgattttattgtgttggactgaaacgtgcaaatgagattatttggtgtcaccactgaggaac

SEQ ID NO: 2736 - DNA, 393 bp, Gossypium hirsutum
  Clone ID: LIB3148-059-Q1-K1-D8
ggaaatagtgcttcctgaaaagaaaaatccaggattaactcccatggactgggtcaagttccttgcctctgctgttgtggggccggttactgtgtttagttctcttcaaatgcctacagctgatctttgggtcatctttgccattttgtcaactgtgattggttactgcgctaagacatatttcacgtttgaagcaaacatggctacatatcagaatttaataacacagtccatgtatgacaaacaactcgatagtggaaggggaactttacttcacttgtgtgatgatgtgattcaacaggaagtgaaagaggtaatcgaggtaatcatctcattctttatactaatggagcaaggtaaagccaccatggaggatttggatctaaggtgcga

SEQ ID NO: 2737 - DNA, 877 bp, Gossypium hirsutum
  Clone ID: GOSHI-09MAY01-C46822_1
cttgacgaggcataatgtggcaagtcatctccacaaatatcgagtccggaggagacacattttacctaaggatgatgatcgaagatggctacaaagacctcaaacgcaaagaatttgtaattatccgcataaaccgatcatggccttccctccatataaccatgtcccggttggtccagtctatcccatgtggcgagcaccttctcatccacccaccatccagatgtggggcacccaaggttaccccccatggcaaccaaccgaaagttggcattggaagccctatcccggggtgcaggctgatgcatggggttgcccagttatgccgccacctcaaggatatttctctacattccctcaaaatgcgtccgggtttcaaccgtgcaacgtggacaaaagaaatggcatgccgcaaaccttagttgaacatcatccggaagaggaggtgattgacaagatggtgaaagaggcaataaacaaaccttggctaccattgccattaggtctaaagcctccttccactgatagtgttcttgctgaactttatagacaaggcatctccaccgtccctccttacatcaatgcttccggccgttagttcatgttgacatgaaactatagctttgagatttttttcccaaattttagaactctttcagaaggaaagcacgtgcctttggagcgcgtggttcaatgtttttctttcttttgttgatagcatcatttcacaggtggacacgaagtaggaaaaagaagtttgttaaactatgtcataagtccccatacttgttgtaaatttatttttaagaattagttctgttttaaaaaaaaaaaaaaaaataaaaaaaaaaaaaaaagagatagaataaagaggggg

SEQ ID NO: 2738 - DNA, 593 bp, Gossypium hirsutum
  Clone ID: GOSHI-09MAY01-C46532_1
ctactaccatttcaggaatggagataaatatgccggagagtattttggagacaaaatgcatggatttggcgtttatcacttcgctaacgggcactgttacgaaggatcatggcacgaaggtcgtaaacaagggtatggaatgtatactttccggagtggtgacaccagatgcggcgagtgggattccggcacccttaaaacacctttaccccaactaaccgatgcagtccttcgagcagttgaggctgctagaaaaacagctgtgaacgctgttcatcttcgccgggtcgatgatcaagtaaaaaaggccgttttggccgcaaatagagctgcaacggccgctagggttgccgcagtaagagcggttcagaaccagatggatgccaaattttgtgatatagacgtataagacaatagctttgctggaaattgtaggtgttttctatgtagtttgaagaggtaaccctggtgagcaaaaaaaaacgctcgctcgttggaggtttgagagatttatgttgaagggtttttcattgatcacaaaatgtaacttgtatatactctttgtatatcaatggaaaatcagatttcaactt

SEQ ID NO: 2739 - DNA, 636 bp, Gossypium hirsutum
  Clone ID: GOSHI-09MAY01-C46522_1
gctaatttagttccgaattgttttgttgccgaacgaagaattcttgtagtatgctctgcgagacaattgtattatactttcaacggcatcgttgtaacggcatctcgatgtcggatcttcggctcattctttgtgttatagaacccacataaattcggtggttagtatacttagaagtagatggcagtctctatagatcatttagcttagtgtgccattacgtcttacatttttacactctgtgaacattgctggaggaagctgctgaagaagaaagtcggcccgaaaatgagtacaatttgcagctaccgatgaaggaaaaaaatttcttacaaggggaaaattctggaaaacacaatagatgtgagaatattggaatttggagaatatatgaaactccaaacattgtttttctaggtcgaatgatgttgtctttgcattatattcaatttaaggattgctatataatttaatttgatataattttgggttattgctgtcggtcaattagatatgctgcatttacattatataattcaattcttatttaaattttataataaatgttaattcaggggtgtcctataccaattatactaagtgattgtttccattcattgctgagttgatttttcg

SEQ ID NO: 2740 - DNA, 592 bp, Gossypium hirsutum
  Clone ID: GOSHI-09MAY01-C46442_1
cccgggtccattgttgtagacatcgatggtgacggaagtttcatgatgaacgtccaagaatgagcaacgatccgtgtagagaatcttcccatcaagatactattgttaaataatcaacatttaggcatggttgttcaatgggaggatcgattttacaaggcaaaccgagctcatacgtttttaggcaacccatcggacgagtctgatatattcccaaacatgttgttattcgccgaagcatgcggaatacccgctgctcgtgtgacgaagaaggaagatctccgacaagcgattcagaaaatgttggaaactcctggaccgtacttgttagacgtaatcgtaccgcatcaaggacacgtcttgcctatgatccctgggggaggggcattcaaagatgtgatcacggatggtgatggaagaacaaaatattgattttaatgaactttctgttatatgtatgtatgagcaaccatggaagcttagctgtgggctaataatctagttttcctcttctaagaaactcagggtatacttttatgttgtcttgaagtatatgtgtttgtatatttgggtacgaatataaagatatgat

SEQ ID NO: 2741 - DNA, 339 bp, Gossypium hirsutum
  Clone ID: GOSHI-09MAY01-C46782_1
tcttgtctctaacaaataaccaaagcaccggggcagggttgaaccatatattgggggcattaacgaatcaagtgaagagatatctaccacctcaaaggtcaggtatcgctgctctagacttctagtatctccaatctcttggatgatggcattagttatttacttaaaaatcgtggtgtgataaatttaaggatatacttttagtaagctgatttatttattttgtattcttgggatttaaaaagcaaacttcaatttaatttataaacatttttttggaaataaagtgctaccgaaaagcgagggcttacttcttttataatgcacaacaaaatcaat

SEQ ID NO: 2742 - DNA, 466 bp, Gossypium hirsutum
  Clone ID: GOSHI-09MAY01-C46182_1
cccatgcgttcttccacgcgtccgcttttatttgtcaatggcttcatctgtatcattgtacgaggttcttggtgtaccagtgagtgcaaacggtaatgaaatcaaggcagcttatagaagacttgcgaggacgtggcaccctggtgcgccctcgcgttcgcagaaagaaatgtctgctgatcggggcatgagaatccatgcagcgtattccacgttgtcggatcctaatcaacgtgcggattatgataggaatcttagacggtggaaccgtccctttacgactatggaagcaactgcgacggcggtgggttcctatgggttctctagttatggtggtaataggaattgggagaccgagcactgctggcacgtaattatatgtattcttttttcattattaatgtatgtttcatgttcgtggtccatacaaatcagatctttttagaatcgatatgtatcttttaat

SEQ ID NO: 2743 - DNA, 434 bp, Gossypium hirsutum
  Clone ID: LIB3148-050-Q1-K1-E3
ttcatctgtctcattgtacgaggttcttggtgtaccagtgagtgcaaacggtagtgaaatcaaggcagcttatagaagacttgcgagaacgtggcaccctgatgttgtgtctgtaaaccagaaagaaatgtctgctgatcggttcatgagaatccatgcagcgtattccacgttgtcggatcctaatcaacgtgcggattatgataggaatcttagacggtggaaccgtccctttacgactatggaagcaactgcgacgtcggtggcttcgtatgggttttctagttatggtgctaataggaattgggagaccgatcagtgctggtagttaattatatgtattttttttatgttcgttttatatccatgaaatttaatctttttagaaattatagttatctctaacttttattcttaaaaatgtaatatatttt

SEQ ID NO: 2744 - DNA, 693 bp, Gossypium hirsutum
  Clone ID: GOSHI-09MAY01-C46052_1
gtgtatcttaatcggcgttcgttagtatcagtccggtgatgcttggtgtattgtgcacacgacctcccaagccttggatcctcaactccctatctctgatcgcccacggtggttcagcggctcaccatcacgaaaatcgtttattgcactggccttcacatttcgccgatttatctgccgataatcggcgctgccggcaccattcaacggcttgtcggcttggtggcggctcagagggtggtgcagcttctatatggcatgcgattttgccatgcggaggagacagaggagtgaagaatagaggagatgtgtggaagaatgtggagaggaaaggggaaggttcctggaatgtgtcgtgggatgccagaccgctcgtggcttcaccggatctgttgcttctgttgagtctggcttgtctgcgccgatgccatgatgaattgaggacgttacctcgtgctgatataaaccgatgctttttaatcagatgaaagatagtatcattggctcagtctgcgttgatattaaggtacaggttttacgaatgacagttgtcaagcatactcatgactggtgagctgaagaactctgtgaaacgcaagaaactgtgatatgaaaactagtggatgactaaaagcgaaaacgatgttttggggattggctgtagatcaccttttgggggctattgggtttttt

SEQ ID NO: 2745 - DNA, 967 bp, Gossypium hirsutum
  Clone ID: GOSHI-09MAY01-C46012_1
gaaacagttaaattccgattcagcaaccggccgaagaaggggactagaaatgacgatggggtgtaccgatggtctaaacaatctcaaaggtttcaggaagtcgatgggatactagcattaggactcgacccgttgtcttttgctgtgaaagcagctcatgagttcgggggcaagttttccttctgcttggagaatcattggatcataaaatcggagagcagctacctcgtctttggtgcagaagatcaagtgccaaacatgcaattcacagatctgttaaccgaagaatcaaaaatgacctcactttatcctataaaggtcaccggtatctcaattaatggcacgatgctggatattccatcatatgtatgggatatgactgacaaaggagccggtgggatgattgtggactcaggtactaccgtaacgcatctggtggaacaggcgttcgataaagtcattgctgctttcgaaccttctttaagcatgtataacaagacgaaaggtaatttggattattgcttcaatgctccaccagctgaaatttttgatgagagtatcattccccgagtggccatccatttcgaggggggagctaagctcgagccggcggtcgacggttatatcttcgacgattctaaaggagtgaaatgccttgggtttgttagggtagcttggcctgaaatgaacataatgggcaacctcttaatgcaaaatcatttgtgggaatttgatctcgcaaacaaaaaggtgggtttcgctcctagcaagtgcatgttggattaattcaccattaaattaaacccctactataggcatggagtactgtaattgaaatttcaagttttcatgtcaacagcttttcagtaatataacatattacataatgtgatgcattatagttttaattttctagccaaataacaatacattccgacttcacaataatatattcattatttccttt

SEQ ID NO: 2746 - DNA, 536 bp, Gossypium hirsutum
  Clone ID: LIB3828-033-Q6-N6-D4
gtaaagaaaaaatgaatgtattattgtgttatttggctagaaaattaaaactagctataatgcatcacacattatgtaatatgttgtattattgaaaagctgttgacatgaaaacttggaaattcaattacagtactccatgcctatagtaggggtttaatttaatggtggattaatccaacatgcacttgctacgagcgaaacccacctttttgtttgcgagatcgaattcccacaaatgattttgcattaagaggttgcccagtatgttcatttgaggccaagctaacctagtaaaccctaggcatttcactcctttagaatcgtcgaagatataaccgttgaccgccggctcgagcttagctcccccctcgaaatggagggccactcggggaacgcgcgtctcatcaaactctccagctggtggagcattgaagcaataatccaaattccctttcgtcttgttatacatgcttaaagaaggttcgaaagcagcaatgactttttcgaacacctgttccaccagatgcgttacg

SEQ ID NO: 2747 - DNA, 533 bp, Gossypium hirsutum
  Clone ID: GOSHI-09MAY01-C46382_1
gaacgtgatgtcgttgcatcggacaaaagcgacactcatcggtctcttcgagaccggccgagccaacgagtgggtcgtcaccgagaagcttggagatgtagcgaagaaagtcgctgaagctaataaaaacaagaccaatagcaaagcggtcaagagatgtagatcaaaatttatcggatagattaaacacattggagttgggattttcagcgttccttttcctatgtgggggctttgattttatgtacgggaagaacaattacttcatatacctttggctacaagccattacctttttcattacaggcattggctatgtcggcaccatcatttgatcattttgtcagtttgtttttctgttgtttttttattctaaattttctcgcctgccaaacaagcaaaatataggtccattttcaatagagtactgtacagaggacaaagctgtagccatctttctttgttaatggagaatttctttgttatgacagatttaaggacaatgagatgcaaaaatgaagcttttttggtgt

SEQ ID NO: 2748 - DNA, 652 bp, Gossypium hirsutum
  Clone ID: GOSHI-09MAY01-C46292_1
ttctggcccatcatcccacaaaactggggagggagaggggttcctactctttcactctcaattcccacaacttgcttaacccaaaatacccactttttcacatccttataaataacttcatttccctacccataactcatggattgcttggtattgcctgtttgcttattgggggggcgcggcgggggatcacggctaggctaccggcgtctaacgcgcgagttggagccacaagtgagggtggtggtagggaaagagaaacgagaattttgggtggaccctttggtgttagaggagaatccattccgggttttgatggaaacattgaagaaagggaatggcagccatgcaacaaggcagaagaaaaacaaggtgatattcctggacgtggatgctatcttgtttgagcacatgctgtggttgatgaacaatgattcttcttctttgttccaacttgctctccaccatattatcgactcctatgctcaagactaccacaactttcaccttgctcttactaattttacctcatatataaccttttctattgtaaacacacacaaaccataacagtactgcaaaatttctcttcttcttctttacctttctgtttttcctttttccttcttaatattaatttagcgtacgaatc

SEQ ID NO: 2749 - DNA, 420 bp, Gossypium hirsutum
  Clone ID: LIB3148-052-Q1-K1-A12
ggcccattcaatcccaacaaaagcttgtcaatcacaatttttcctccttcactttcactctcaagtcccacaactttcttaacccaaaaacacccactttttcacatccatataaattacttcatttccctacccataactcatggattgcttggtattgcctgtttgcttattgggaaagcgcagcatgggatcacggctaggctaccggcgtctaacgcgcgagttggagccacaagtgagggtggtggtagggaaagagaaacgagaattttgggtggaccctttggtgttagaagagagtccgttccgggttttgatggaaacattgaagaaagggaatggcagccatgcaacaagggagaagaaaaagaaagtgatattcgtggacgtggatgctatcttgtttgagcacatgct

SEQ ID NO: 2750 - DNA, 428 bp, Gossypium hirsutum
  Clone ID: GOSHI-09MAY01-C47942_1
tccacgcgtccggctgctttgaagttccacagcgataagggcattgaaaacttttacagtctacactcatggttgggcatagcttgccttttcttattcggcattcagtgggctgctggattcgcaactttttggtacccaggtggctcaagaaacagcagagctgcattgttgccctggcatgtgttcttcgggatgtatacgtatgcacttgctgttgctactgctactacgggtatcttagaaaagcttacatttctccaaacaaaccgggtaatatcacgctactctacggaggcattgctagtgaactcattgggtattttgattggtgtgctgggtgggtttttgtgatttctggccacactcactcctgggaatggcaaaagtgatgtccacaggggactagtggaatgaataggttatag

SEQ ID NO: 2751 - DNA, 435 bp, Gossypium hirsutum
  Clone ID: GOSHI-09MAY01-C47862_2
gttgagattgaaataaagttatttaaaaaagggggtggggatgatgcacgcaggccaagtcaagagatggacttccttactgttatttcataggagtccttaatgactagtagtttggagccttaaccggtttttttcggcgctcggttccttcgtcttaaggcaaggtcagtttactttttcgagtgtgaatggaactcttagtcgagctgatggcgagatcgattttttgttcgaggttcaagagaaaagagagggaccaccgcccaatgatgcttttacgaaagtacggtcaccggtggcgaagaccttctcgacactatcgaacctaaaatccactctcaatcgctcttatttttattagaggaattgttgtcgtatcctggacttaagggaggccaaaagtgccctatctgccttgttgtgatagggggg

SEQ ID NO: 2752 - DNA, 831 bp, Gossypium hirsutum
  Clone ID: GOSHI-09MAY01-C47862_1
atgctttcatttctttgttgagattgaaataaagttatttaaaaaagggggtaggtataatgcacgcaggccaagtcaagaaaaggacttccttacttttatttcatagtagtcttaatgactagtagtttgaagccttaaccggtttttttcggcgctcggtttcttcgtcttaagtcaagttcagtttactttttcgattttgaatggaactcttagtcgagctgatggcgagatcgattttttgttcgaggttcaagagaaaagcaccaaaaaaagccacaccctctccttcacggtttttcaacctcgccatggctacactagactccgatgtccccatggtacccgtcggcgagtcttccaacagctccgccgcttcctcttccactaagaaacccaagcgtttcgagatcaaaaagtggagcgccgttgccctttgggcttgggatattgttgtggataattgtgcaatttgcaggaatcacatcatggatctctgtatcgaatgccaagcaaaccaagccagcgccaccagtgaggaatgcactgttgcttggggggtctgcaaccatgcatttcactttcactgtatcagtcgatggttgaagactcgtcaagtgtgtccattggataatagtgagtgggaagttccaaaagtatggtcactaaatcttttggactgttttatcagttgaatccacttgcctttccaagtacggtgtgcaagaagatctacatattttcttcaggtttctgttgattctactgcagctgcttaaactttttttttttggaaaacatttggatttatgaattaggtatttggaa

SEQ ID NO: 2753 - DNA, 542 bp, Gossypium hirsutum
  Clone ID: GOSHI-09MAY01-C47822_1
ctggaactcacgttgatgcccctagccacttctttcaaaagtattatgaggagggctttgatgtttccacacttagcctgcaacacttactggtcctgttctagtagttgatgttccaagaaacaagaacattactgctgaagttatgaagtcggtgaatattccccggggagtccatcgtgtgcttttcaaaacacttaatacagacaggaggttgatgcatagaagagagtttgcttcagacttcacagggtttaagaaggatggggcgcaatggttggttgataacaccgacatcaaactcgttggaatcgattacctatctatttctgcttatgttgatgctgcccctactcatcatatacttctgaaaagtagggaaatcgtatagtcgaaggtctaaacctctatagaataaaaccgaagaagtatacgggtcaatgcctacctttaaggatggttggtgcagatggatgcccaacaagatgccttcttactgcttaaaacacaaatgctgacttcaagttggtaagatatatgcc

SEQ ID NO: 2754 - DNA, 587 bp, Gossypium hirsutum
  Clone ID: GOSHI-09MAY01-C47532_1
agctttccaatcttttaagggataaaggcctgacaatggacgatatggttacacttttaggtggccatacagttggtgtggcacattgcttttttttctcgggtcggcttactaatttccaagggacagggaaacccgacccaagtatggatgcgggtttggtaactacgctgaaagggatttgtggtaatggatcgaaccctaaggcgtttctggaccagggcacgtcttttagttttgataatgagttttataggcagattcgggcgaagaaaggggtgatgaagatagatcaagagttggctgatgatagattatcgagtggaatcgtatcgagatttgcttcaaatgcgaatttgtttagaacaaggtttgctcaagcaatggtgaagatggggaatattcaagttcttgttggaaatgctggagaaattaggaaaaattgtagagttattaactctaaatgagtttccccttcaaataaatcgaaatatgtactcatcttgaactaaatgaaggagttaaaatttttgagttgtcaaaaaaaaaaaaaaaaaaaaaaaaaaaaaaaaaaaaagggggcggcc

SEQ ID NO: 2755 - DNA, 1410 bp, Gossypium hirsutum
  Clone ID: GOSHI-09MAY01-C47652_1
ggcaagtgatgatggggaaaagggtgttcggagacggcagcggcggcgccgatccagaagcggatgagttcaagtcgatggtggtggaactgttgccgcgtccccccgcgcgccccatcggcgacttcattccggcgcttgaatggctggacctgcaaggggtgcaagctaaaatgaagaaactccataacaaattcgataggttcttgagtgccattcttgaagaacacaaaaccaaagctcgacaaagtaatgggcaagtgaaacacaaggattttttaagtacgttgatttcattggagaatgttgatggcgctgaaggtggaaagctctccgacactgagatcaaagcattacttttgaacatgttcacagcaggaactgatacatcttcaagcacagttgagtgggcaatggctgagctaattcggcatcccaacatcatggctcaagttcgtaaagaattggactcagtcgttggtcgagaccgcctcgtctccgacttggacttgcccaatctaacctacttccaagccgtcatcaaagaaaccttccgcctccacccgtccaccccgctctccctccctcgtatggcctccgacagctgcgacatcaacggctaccacatccccaagggcgccaccctcttggtcaacgtatgggccatttctcgagaccctaacgagtggaacaacccgcttgagtttcggcccgagaggttcttgcccggcggcgaaaggccgaacgctgatgttaggggcaatgattttgaggtcataccgttcggcgccgggcgtagaatctgtgccggaatgagcttgggattgcgcatggttcaactgttgacagcgacgttagcgcatcccgtcctgtgggagttggctgatggattaatgcctgagatgctggacatggaggaagcttatgggttgactttacaacgtgcggcaccattgatggtgcatccaaggccaaggctatcaaagcatgcttattgaaaacgttgtcgtttcagggtgaggaggacttaagggtgttcaaacttcggttaaaaccgaattaaccgattaaatcgatcttattttgttaatcaatcggtggttgaacttagttgtgtcgaaggtcggttaatggctttttgaaatttagcttattggttaattcgattccaaatcgaataattaaccgaattaatcgaacttaataattaatattatgtattaatttaagacttatgtagtgtttttattatgtagtttttcaagtcataaaattttggttaattcggttaacttttaagataaataaatatatttcagtttatttccatttaaaaaaaaaaaaaaaaaaaaaaaaaataaaaaaaataaaaaaaaaaataaataaaaaaaaaaataaaaatattaatat

SEQ ID NO: 2756 - DNA, 552 bp, Gossypium hirsutum
  Clone ID: GOSHI-09MAY01-C47152_1
agcgctgagccggtccggaatctgcccgcactgcgacccacgtcgtaccgatataccacgcagctaaactctttatggatacaacatggttacagcaatcccaccagctaaaatgtggcacggcttgtatccttgatggtgacactctcattccccagatgcttcctcaggcttttaagagtgttgagtacattgaaggcaatggtgaggccggtagcatcaagaaggtcacttttggagaaggaagccaattcaaatacgtgaagcagaaggttgaagcagtagacaaagacaaatttgtgtatatttacagtgtgatcgaaggtgatgcattgatggataagcttgagaagatctcttacgagacgaagttagagacctctccggatgggggatcagtatgcaagactactagtaagtattacaccattggtgagtttgagctcaaggaagagggaatcaaggcaggcaaagaaaaagcattgggaatgttcaaagccattgaagcgtacctgctggcaaattcttacacctattgtaatgatccccata

SEQ ID NO: 2757 - DNA, 382 bp, Gossypium hirsutum
  Clone ID: GOSHI-09MAY01-C40992_1
cggacgcgtgggatgcaagtgcatcgtcttcttcagtctatcagcaggccattggaaaatggccatcctagatcgtgtggatgggccttttagcagagtttgtaagacattgttctacttgagtttctccaacattgaaggtatggaaccggttacaaatttgcgtacctctttagccggagaaaatcatacaaggaagaagctggtggtaaaatgataacaagagcaaatgctctgtagctacagggactttctggcaaagcaaagaagctgaaagcatgcatggctgtgagtggtgtgtagcttcaccagattttttccttccattttggtaattggacattataacattacaataaaagttccaatggtttaattgaat

SEQ ID NO: 2758 - DNA, 464 bp, Gossypium hirsutum
  Clone ID: GOSHI-09MAY01-C40802_1
cccacgcgtccgttctctacttaaggcattgttctctctccctatttgtaaagtttcacttgtggtttgggagtgaaatatattatggtagtgcccgcggacgtaggcaagatttgccgaacctcgttaaaatcttggtgttctttactatttaatgttcatattttgtgagtgtgattgtagtgatttattgtgctattaaattacgatagagggatattctgcctaggaaagacttggtacttaagtgatcctcgtgatccacctctctttcctgggaattgaacttactgtgattattcaggacaataattttactctttcacacgcttccgcacaacagagacttttccttttgcacgtgaaaggtctacggagataggtggaagtccatactacatggctccggaggtgctgaaaaggaattatgggcctgaaatgcatgtttggagtgctggggtgat

SEQ ID NO: 2759 - DNA, 533 bp, Gossypium hirsutum
  Clone ID: LIB3825-018-Q1-N6-F11
aatgggaactataagccaattaactggttaatttaatatacatcaaatgtaaaatatctttcaaataagcctcaaaattatgttacttttacatcagtttttatacttgacctcacttgtggatgcttagccaccataatctcttcttgctgcgacctcacttcgctaggagcaacattgtcacattttttacattatatgatagagtagcatcacacacattctcttgtaacacaaattctagttttacataatccataaataagaaaggcgaatccaattcatttacaaggtaaatgcgtatatgacaaaaacaaaaagcaacactacaactatatctgtagaatcaagaatgcaaaagagagagcaaagcatgcaaataggttaaaatcaagaatggtgaatcaagagtggtagtgcagagagagagatactggtgagaataattgccccctctcgttttgcctgtttcacaacactccacagactatttcttgaagctggatcaagaccggtactgggttcatccataa

SEQ ID NO: 2760 - DNA, 232 bp, Gossypium hirsutum
  Clone ID: LIB3147-031-Q1-K1-G6
cccactcgttcgaccactcgtccgcttttctttctcttttgcattcttgattctacagagataggtgtagtgttactttttgtttttgtcatatacgcatttaccttgtaaatgaattggattcgcctttcttatttatggattatgaaaaactagaatttgtgtgtgactgtatataatagaaaaaaagtaataaaagcgccattattcccaaaaatgggggcggacgata

SEQ ID NO: 2761 - DNA, 833 bp, Gossypium hirsutum
  Clone ID: GOSHI-09MAY01-C40542_1
gtttgtttgaagatggaaggattcaaaccgccagcagagttatgaagagttggtggagaagggagtgaaggagcatatggacttggtttctaagatcttggaagctctcctcatgagaggtcatgttgaagaagcccttggacgaatcgagctactaatgcaaaatgggtgtgcaaccaatttagatagccttctatctattctctctgagaaagggaagactattgctgctctcaagttgttagattttggtttagagagagcctgcagcatagatgtttcgagttacgagaaggtgttggatgctctcttaactgccggaaaaactctcaatgcgtattcaatattgtgtaaaataatggagaaaggagggatcactaactggagtagccttgaggatttaatcaagagccttaaccaggaagggaacacaaagcaagccgatatactctctagaatgattaaaggaggggcagcagctagtggaaacaagaaagggaagaaacaagcaactgttgctagctaaattaccttttgattagggaaaaaaaaaagctttagatagttctattgtgggaatacgacgatcttgagtttcatttgcaggaagctcatagcctgatttgcacttcgatgctttcactaccctggatttttcagggtcacatagaatctttgcgtcttgtggtttaaactttaagcaattcaattttaaggagaaaaggaaaaagatagtacggaactgtgagcatgaaatatgcatttgctccaacatctgtcttgtttgggaattatgtagcagtttttttaataatctagagcatctgttttct

SEQ ID NO: 2762 - DNA, 457 bp, Gossypium hirsutum
  Clone ID: GOSHI-09MAY01-C40572_1
cccacgcgtccgatcaaatgaagagagcaaatcacttcacaaacaggagtctttaaaggccttgcggaacaaaatcaacaatgacattgtcaccgtgcaaaagaaggcaaggactatcaaggcacagctcgaagaaatggaccgtgccaatgcaactaacaagcgcctctcagggtgcaaagaaggcacgttagcttacaggactaggattgcagtaaccaatgggttgcgcaataagttgaaggagctgatgatggatttccaaggtttgaggcagaagatgatgaccgagtataaggaaacagtagggagaaggtattttacagtgactggcgaaaaccccgatgaggcaatcatcgagaagataatatcagatgggaatggaggggaggggttcttaacaagggcgatacaagaacatggtcgagggaaagtgctggagacggtggttgagatt

SEQ ID NO: 2763 - DNA, 505 bp, Gossypium hirsutum
  Clone ID: GOSHI-09MAY01-C40502_1
cttgggttttaggcccagtttggaaaatagggtaagagatgagggagagagcaagaggagcagcgaccggcgagagagatggcaggagcgttttggggaacaagagtgatggagatagtgtagaagcacgactctggtggtctcgtttggaagagaattaagctcacttccacccgcaaagccaacgccaagaagcgtctccatcgcgtttggcagaatgaagctgttttgagagcatgcgcagaaccacctccttcgaaagcaacggatgtagctggtggtggtggtgagaaaggtgtggaacaatcaacttaatggacaattaaggaagacactacataagcctgaaaggaagaaattggtgactctttgggggttaatggtgcaaaacttttacaatctgagatttgaaatttagttgtatgggatcattgaccaccttttttttttgttgttaaagacgattgtgtgaggcggtggtcaatgctttaggcaaaccttaata

SEQ ID NO: 2764 - DNA, 638 bp, Gossypium hirsutum
  unsure (1)..(638): unsure at all n locations
  Clone ID: AW187324.1
caaatccctaaaatttcctctcttcttttttttctccgttcgttcttttcccctctctatatcgtataaaaaatttcataaaccttaatgattttcgttcaaaccactgattttacaaaggaggttgatttgatttcagtaatctgatttcttttttaaagtaattcgaggaatctcgtttcaccaacttgaaaggaagttcaaatttctctgcttgtacttcaattcctggtatttttcatatagggagagagcaagaggagcagcgaccggcgagagagatggtaggagcgttttggggaacaaaagtgatggagatagtgaagaagcacaattctggtgatctcgtttggaagagaattaagctcacttccacccgcaagccaacgccaagaagcatctccatcgcgtttggcagggacaatgaatcaaagtagacaaattcccatgaagaaggtaatancactgaacactctcatgatctaagccttaactcggatggtccaaaaagtttaatancaaataatgatgggtcatccccaagttcagccccacgccaagaaaaaattgtgagtacggttgcaatttcaaactgtattancttttatgtattacaacatcaatatcaatgtccatca

SEQ ID NO: 2765 - DNA, 614 bp, Gossypium hirsutum
  Clone ID: GOSHI-09MAY01-C40402_1
gcaggatacatgggaagaagttgatcctgattagctttcgtatgaggtaaactgggtagagtctactgcatttaactttctgcttaaacactctaagtatgattctatcatccaggaactccttgcacttggtgaagttgttggaactgagagcagagggctttcggctgattcacttgcctccttgccttccataaagtacaaggcaggaagcagtcagacaggaagcaatgattcgtgtggtcatatgccgtgtagactacgatgatggtgactccctgacagtgctttcttgcaagcattcatatcatcccgagtgcataaataattggttgaaaataaacaaggtctgccctgtttgtagtgctgaggtctcaacctcgggtcagagctagtactttgggaatactcctccatcgagccacaaggtcgcagcgtcttgttttaatacacgcagaatgtaccagttctttatggtaaaagacatgtatctacaacatccattcctctattaacttgtgttcaccttatgggaattagtttttaccgtctgtcttatgccgactggccgggctttttagaaaaatgacaatcaccaaattgtgtttgatttt

SEQ ID NO: 2766 - DNA, 480 bp, Gossypium hirsutum
  Clone ID: GOSHI-09MAY01-C40422_1
gttactaccaaacatctaagattatgccagccggaattgttgccgggatcagttttcttatgactgggttttacttgtacaaattagctaccggtggcaaccatattccagccaaggccgaatgacgatgttgagcatgttgacttttaccaattttaacagatctgacaagatcattgaagctcagatggttgtagtagaaaacttttaagtgtatcacgtatgctgtactctaccctgatgtgtgtatgaaaagggaaaaagacaaaaagttgtgttatttgtgaaagaaaccctggtttgtgatcaaaattgtgtttgtgtctatgcaattttctcatattgaagattaaatttctttttgttcttggaatgacttaaattccctggtgagttgtggtttataaggatgcaaatccaaacatgtatgaatttgcagaaattccaaggttcaccttggaacaggaactgctttgcttg

SEQ ID NO: 2767 - DNA, 668 bp, Gossypium hirsutum
  Clone ID: GOSHI-09MAY01-C40192_1
tttatatggtcattgctaaacctggaagcgtgaggacatacaaaaggtttgaggcagagatatatgtcctcacaaaagatgaaggtggacgtcataccgcctttgaatcaaattacaggccccagttttatctgaggacagcagatgtgactggaaaagtggaattacccgaaagtgttaagatggttctgccaggggacaatgttactgcaacttttgagctcatctcacctgtgcctcttgaagcaggacaaagatttgccttgagggaaggaggtagaaccgtaggtgctggtgtagtatcaaaagtactgacctaagaagttgccattcccatagcaatgcctggttttctccatcttgttgatcgcagaaatggagaaattgatagaacaatcagttggtgatattttctgttctagaattactaaagagattgttagtgatatgaaaaatgagggctgttattgaaattattttgattcaatttcgctggtggttggtaagcagacagcatgtttttccctgtttccacccaaaaaatcacgattgaacagctttttaatgtcattgaaaataatagtcctgttgaacagtgctatagtgccatgtaaacttggtattttgcacgtattaatcaatcatttttccttgaagttgtttcttgt

SEQ ID NO: 2768 - DNA, 298 bp, Gossypium hirsutum
  Clone ID: uC-gsflnu33B050h12b1
ttttcacgcgtccgaattacaggcctcagttctatctgaggacagcagatgtgactggaaaagtggaattacccgaaagtgttaagatggttctgccgggggacaacgttactgcaacttttgagctcatctcacctgtgcctcttgaagcaggacaaagatttgccttgagggaaggaggttgaaccgtcggtgctggtgtagtatcaaaagtactgagctatggattcgctattgccagatatatttcctgatatattggcatgaaagcttccaggggatacgacgtcggttttac

SEQ ID NO: 2769 - DNA, 503 bp, Gossypium hirsutum
  Clone ID: GOSHI-09MAY01-C40172_1
ggtttctccttcatccaggtaaaagtctttctcctttttctgttcttcattccttttccttctcccattcttcatcttctagtccgtcgcatatcttctcttctcaggctactgtttcgtttcctctctttctctctttctcaagcaaatctcattcctcttcgatgggttttggcttaagattcatcttctgggtgcggttctgcaagagtctgttgttgtttcagaatgggtaagggcaacaaagaaaggacctccaatcaatttacgtggacaaaaccgatggaacatctttttcttgaaattctagcagagaaggcccagaaaggaaataagccttttagtactttcaaagcaatttctattaatcgatttgtcaaagctatttctgaaagatttcaagtccaatacaatgtcgaagtatgtggaaaatcatttgaggactgtaaaaaaccagtgacaaagtggacaatgagaagaatgaagatgatgaaattatactc

SEQ ID NO: 2770 - DNA, 606 bp, Gossypium hirsutum
  Clone ID: GOSHI-09MAY01-C40132_3
tattaaccctccccgctttcatccattcaaacccaaagaagacaaacccaagccaccatgtagccaccgcaaacggtggccgacggaaggtggtccattcggattctaactccgttcagacttgcaatcaagaatctaacctctctttgctttgaaaatttttgattaatattctgcaaccctttttttctttgtatttcagatttcttttttgtctaccaaaaataaaacaaaaaaaccccctgttcaaatatgagattgtggcttttaaagccatttacaagattatttactcctattttttggtcgtttttctttctcggttgtactgcttgcgtgcgaatctttctttgcaggtgacagatgagtgtcaggcgcatggaaggccggtggttggtgccccgaacggtggtggtggcgcgcgtgatggccaaggctaaggggagtggcggctgaaaacttggtgactaggttttttggctgctgaaaatgtttatttgttgggctaggtgggctttaggttttttattgtttgggtcatttgatgttggaattgggcctgctgtttgggttttgtaattgttttatttggtcttgggccgggcc

SEQ ID NO: 2771 - DNA, 905 bp, Gossypium hirsutum
  Clone ID: GOSHI-09MAY01-C40132_2
tcgcccacgcgtctcgcacgtagatatggcgattagaccttaacccgactcgctttcatctctttcaaaccccaaagaagacacgcccaagctgccatgtagccaccgccaacggtggccgacggagggtggtccattcggattctaaccccgttcagacttgcgatcaagaatctaacctctatgatagcaaggaatcaaaaagatagtatcaccctctttattagatttggtttcaacagagaagaaactccgatatataccaacggtctacgattcaggtgagttacccgcttttatccttttcttttctttttataaacagtccaaaaaaaatgaaaaaagaaagaagaaccacgcaaaaaaaaaacagtgaaatattgggtcgaatcgaaagagaaaaaaaaaggaacaatcacctctttgctttgaaaatttttgattaatattctgtaacctcttttttgtatttcaaatctcttttttgtattcaaaataaagaacaaaacccccaaaataccaaatcgttttccccgttccaaatgatagattcaggctttttaaagccgatctaccaaacattcattccatattttttttggttttgggtcctttggttatttttttcccatcattcgcatgctttctcttgcccttgtattcgtttctgttacaggtgccatgcgacgcgtggaagaggcgacagtcaggggcgtggtggccgaggcggcatgcgtgggaaagccaatggtggaagcggtggctgaagaagggggagcggctggaggcttggggcttgctaaaaatttttaagattagctgggttagggtttagttttaggcctattgggtttgggcttgtaaaattatttgctgggctattatattttatttgtttatgggcc

SEQ ID NO: 2772 - DNA, 676 bp, Gossypium hirsutum
  Clone ID: GOSHI-09MAY01-C40132_1
gccgttttcatccattctccgcccaaagaagacaagcccaagctgccatgtagccaccgccaacggtggccgacggagggtggtccattcggattctaaccccgttcagacttgcgatcaagaatctaacctctatgatagcaaggaatcaaaaagatagtatcaccctctttattagatttggtttcaacagagaagaaactccgatatataccaacggtctacgattcaggtgccatgcgacgcgtggaagaggcgacagtcaggggcgtggtggccgaggcggcatgcgtgggaaagccaatggtggaagcggtggctgaagaagggggagcggctggaggcttggggcttgctaaaaatttttaagattagctgggttagggtttagttttaggcctattgggtttgggcttgtaaaattatttgctgggctattatattttatttgtttatgggcccgggcaacattgggcttgtacaataccctcatcgagtctatgtaactccgtaacctgaaatatttcatttgggcacgagtgacacactgcagacataaagttcgctctttgtgcattttttgtaatatctttcatcatttcctcacaccaaatgtgatcaccctttatctgtccaacatatttttccactcattttggaaacaaggctaataacc

SEQ ID NO: 2773 - DNA, 636 bp, Gossypium hirsutum
  Clone ID: LIB3543-064-Q6-K6-A10
agcgtccgccccgctccgatgaactccggcacgccgcgggatcatctcaacccgtttccctagcttctctttcctttcaaaaaaatcttccgtgaaagaacaaaatcgcaaatttctccatctttctccttttgaatttctttgtgcaaaataatatataacattaaaaagatttgtatccgtgggggggagaactaacttcagttcgctcttccttttctttattgtccatgcttctttcctccacatgattgccgccatatctccaccacctccaaccgccacgctaggccctggaaggatccgaatccccaactcgaaccgccactccattcgcttcagtaacttagggttcctgctgtggaagccgaaactgaactggctatcgtatgagcgggttcagcagatgcagatggcgtgggtccggagtatggccggtggttgcttcaagagtaaggagccgctgcctgaacaccggatcaaggtcgaagaagacagtggcggccaagactttttcgattccgatgccatggcctccaaggtttcgcctgagcatcttgtcatcatggttaatggcctgattggaagtgctgctggattggagatttgctgctgaaaaagttgtggcgaaactac

SEQ ID NO: 2774 - DNA, 493 bp, Gossypium hirsutum
  Clone ID: LIB3147-026-Q1-K1-C5
cgaggcgtgcgcccacgcttcctcccactcgttcgcccacttttttcttccacgcgtccagccgccatatctaaaagaaacttctttcgccacgcttggccctgtaaagatcccaatccccaactcgaatcgccactccatttgcttcagtaacttagggtccctgctgcggaagccgaaactgaactggctatcgcatgagccggagcagcatatgcacatggcgtgggtccggagtatggccggtggttgcttcaagagtaaggagacgctgcctgaactccggatcaaagtctaagaagacagtggcgaccaagatcttttcgatccccacgccatggcctccaaagattctgctgatcatcttgtgatcatgcccaatggcctgattggaaagtacctttcattttataggaatttcatatgagattaaaaattttaggcgaataaataatcaattaaactaatactttgttaaaaaaaaagtaaactc

SEQ ID NO: 2775 - DNA, 382 bp, Gossypium hirsutum
  Clone ID: GOSHI-09MAY01-C41962_2
cagtaatgttcatccggtcgataacgtagctgtttctgatgaactcgaagtccgagtttgagtggagaaaaccaccacgcttgctgatgattcctagcagagtctgcttcccctgagaaaatcattaatctctggtgcaagtataccccaagttctgatccatcaggtatggaaaataaatcagcattgggtctctggcaatcaagattctactttccgaggagcgtgatgtgtgtaattcttttataatgggggcagctcagccccccacttgaaaatcatttttaaccttttgggtctattattgtaattactaccaatttgaggaaataattttaacctttttctctcccaaaaaaaaaaaaaaaaaaaaaaaaacccc

SEQ ID NO: 2776 - DNA, 544 bp, Gossypium hirsutum
  Clone ID: LIB3825-007-Q1-N6-C12
aaatcaaagtcttggcacctttaaacccattacctcccgtgacagaattttcaaaaagtcttaaaatttgtgggagaaaaaaagttaaaattattttctaaaacttgtggaaattacattttagaccccaaaagttaaaaatgattttcagtggggggctgagctgcccccattataaaaacaaattacacacatcacgctcatcttgattgccagagacccaatgctgatttattttccatacctgatggatcagaacttggggtgtacttgcaccagagattaatgattttctcaggggaagcagactctgctcggtatcatcagcaagcgtggtggttttctcaactcaaactcggacttcgagttcatcagaaacagctacgttatcgaccggatgaacattactgttctcacttcattttgaagattgaatgtcatcttcatcaggaaaaggatctaattctatcttcttttccgtctctctattgagcgtcacgactttcatcataaaacaagaagagagattattcccctgattcag

SEQ ID NO: 2777 - DNA, 1174 bp, Gossypium hirsutum
  Clone ID: GOSHI-09MAY01-C41932_1
gttgcctatacatgtggtatatgcaacattataatccataaaaatgcatttcattgcctctcattatcaaaagtaagtggcatgaccatcaccttcttcacacatatttccatcatattgaagatttagggttttgaattgcctaagatgccatgatgaagtcaatacagagcatggtagttactattgttcaaagtgcaatggtatattccacgtgaagtgtgcattgaaggataaagattcatatgaaatagtagaaaatgaagatgagactgagatgcccaatgaaagttccatcattgttattgagagcaacgatgctggagaagctacaaaaataaagcatttcaagcatatgcataatctaatgtcaggtccctttgttggaggatatgaaaatagttgcgacgggtgtatgttgccaatctcggatccgttttactactgttcagaatgtgtttttttccttcataaagcgtgtgccgagttacctaagatgaagaatgtttggcatcatcattgccaagagcctcttgcccttatttctgacaaagcttttgtgtgtcaactatgttggcacatatctaatgcctttgcttatgaatgttgtggatgcgagggaaatacttgtctccgatgtgtgattgctcttactcctggtgctcgaacatgtttgaaacatgttcaccccctctatttctacagagactacgacggtcagtgcaatgcttgtggtgatacaacaaggggatacccgcccgtccgccctcgcgtccgcaattttgtgctacatcttcgttgtttttcacttccaattacagctcgtcacaaatgcgatgagcatcttctttcactcactgatcatgatgataacagttattcagagcgtcatcattgtgatatctgcgaagaaagtcgagatccaaatcgttggttttataattgtgcaacatgtgatacttctgctgatcgtaattgtgttcttggagaatatccattcctcaactcaggagcattcaagaaggaaatgatcatccacatccactcacctttgtgaagaagaagtattactacccagattgtgataaatgcggtaagccttgtgaaggtgtggctcttgaatgctcaaagtcggaatgcaaatatattgtccactggaaatgtgtaggagaca

SEQ ID NO: 2778 - DNA, 652 bp, Gossypium hirsutum
  Clone ID: GOSHI-09MAY01-C41512_1
aaaaaaattctatgaatcagcactcaggctgttaccaggttaccttggagctgcattagctggagctgagctccatgtcatcgagggacgaaatggggatgctgtatctcttcttgagcgttatctcaaagattgggctgatgactctcttcatgtcaaattggctcaagtatttgctgctacaaatatgcttcaagactctttgtcacattatcaatctgcattgagaataaatcctcaaaatgaagctgccaaaaaggggctagaacgcctggaaaagcagatgaagggggtggatccggatgcgcctgaagaagaagaaaatgaggttgatgatgcagatgcagaacaagaagaggccgagcttctgtaggatttgtagtcatgtgttcagtaaatattggatgactctcgagcataatcgatatttacgagaagaaaaaccgatgatgaaccaagttgagaatccatactctgccatctgaatctgaaattatatgcagcaaatttataatgaggatgccagtaaatcaacatgcagtggaaatttgaagttaaagtttgaaatcattgtttgatatttgacaatgtatatttgaaactgattattcactggttcaattttgcatggaaatatacttacagttaagac

SEQ ID NO: 2779 - DNA, 989 bp, Gossypium hirsutum
  Clone ID: GOSHI-09MAY01-C41472_1
cccacgcgtccgtcttttttttttttaatttcatcccctaattacagctttagtaaacatgggttctgcttcgaaatcgaaagattttcaagacggagttgatggtgatgcactgagatcaacaatggctactgatcaaaacgtgatgcaaaaacatgctgcgttcttcgataggaatcatgacggccttgtttatccatgggagacttttcaaggttttcgagcaattggagctggttatttattgtcaatggcgggtgctgtcttcatcaacctttctcttagtggcacaactcgaccaggaaaatttccatctcttctctttcctattgaggttaaaaacatccaaatgggaaaacatgggagtgactctggtgtatacgaccgtgaaggaaggttcgtaccttcgaaatttgatgaaatcttcagcaagtacgcacgaacacatgctaatgcgttgacatctgatgaattaatggcgatgctcaaatctaacagggaacctaaagattacaaaggctggtttggatgctgctcaaatttctttatcgtaagttaaacacagtttaatttaggggggggggggttcaattttaaaattaaagtttggttcgaagtaaagattgaatcacttgaactcgttagattaagcttgtttgattattattaaataagtcgattctcatgctcaactttaagctagataatttttgtctgaggagatatgttgattgggcaggttgggttggtcttggttcaagtcgtcaaataaggttttaaaaatttcaggttattttggttggaccattttgaagttcgatttgaacatcattgaaaccaagtcatccaaatttgaaatttgatttttttgtcgagttggttcagtttcaagtcagtttgagttcaggttgaacataagcgtttaggttattgaatttttatgatcaaatccagttttgtcatgcaaaggttaaattttcgaattaatg

SEQ ID NO: 2780 - DNA, 486 bp, Gossypium hirsutum
  Clone ID: GOSHI-09MAY01-C41722_1
ggaagccaaaagatgttcatccgccatcttccttgtgggtatcaatctacttttcctcacttcagtgagtggatgctacacttgtgttcacccaagaccaagtggttcacctcccaccaaaaggagctgccctagagatgctctgaagctaggggtttgtgccaaggtgctgaatggaacagttgctggcgtagtggtggcgaaccctccagatactcagtgctgctcagcgctaggggggcttgtggatttggaagctgcagtgtgtctttgcactgccattaaagctaatgttcttggcattaacattgatattcccattgcattgagtttgcttatcaacacttgtgggaagaacctaccttctgacttcatttgtgcttaaccaatgttttgtaggtaatttcaacaaattaactctgctggaatggaccctttttttccccccattcagtactttataatttcctaattggacaattgttc

SEQ ID NO: 2781 - DNA, 797 bp, Gossypium hirsutum
  Clone ID: GOSHI-09MAY01-C41692_1
ggctttttcatacttcattcccattgcatttattcactaggttataaaggacaaaacaaatgggagcatttaagtccctagcattggtcgcctttctccttgctatgttgactattgtgtcggagagcagggttgtaaggaaagacttgggcatcgatcttggtggtgtaggagtagggattggagcaggtgtagggctgggtctcggaggtggtggttcagggtctggagctggggctggttctggttccggttctggttccagttccagttcaagttcaagctcttcctcttcatcctattcaaactcgggttcagggtcagatgcaggttcgtatgcggggtcttctgctgggtctcgagcaggatcaggatctggtggtaacaagggacggcaaggtggttcaggtcatggtgagggatatggggaggggtcaggcaggggaaatggttcaggcaatggtgaaggttatggcgagggacatggctatggagagggtcatggcagcggtggggacaattaaaatctaactttgagtgcatgcttgcttgaaaagagaaaaaaaatatatatccataaataaatgaagtagcatgttatttacccgtgtaatgcatcgagtaatggatgttcatatggtttcctataactaaatgtcagtccccaatgcttttgataattaacaagtccttggctgttgcacctctagagttatacatacattatatgattctgttggatgctaaaaaaaaaaaaaaaaataaaaaaaaaaaaaattacaaaaaatattataatt

SEQ ID NO: 2782 - DNA, 279 bp, Gossypium hirsutum
  Clone ID: LIB3147-044-Q1-K1-F9
cccacgcgtccgtcgcgagggccgccctttttttttttttttattacatgttaaaatgagatggcagtgtttagattttaaaatttcgaccatctcgtaatctcacattacggctatcctgtaatatagggtgtaatctcttgttatagcttttgataattaacaagtccttggctgttgcacctctagagttatacatacattatatgattctgttggatgctaatggctttctaacgcttctaattaatgtcacaaaaataatataattggactctc

SEQ ID NO: 2783 - DNA, 374 bp, Gossypium hirsutum
  Clone ID: GOSHI-09MAY01-C41152_1
ataaggcccttctctacaccgccgtcaacagatggttcggccgactcaaattcctgcaccaaatccggcccggattcaggcgagggaatcatagagcaccaccgcggcgtatccttgaaggtatttgtggcgagaaacgtgtgcgtggaggggagatcggccccgagacgtgcgccgattggagtcttactggcggcgctggaggtagtggctggtggggcgtttgaagagcggctagggttttgttctttttgttttttgctttgctgtattggctattgggtttgggccaattgactgggcctgaactgttttctttttgtgtttggacccaagccgattgggccttattacaatgtgaatgagattttttt

SEQ ID NO: 2784 - DNA, 429 bp, Gossypium hirsutum
  Clone ID: GOSHI-09MAY01-C41012_1
cccacgcgtccgcccacgcgtccggtttcaaacgacgacatcaaggaattgttttctgagggtggtgacctgaaacgattttcggtccactatgataggagcgggagatcaaagggaacagcagatattgtcttcacacggcgagcagatgctttggctgcagtaaagaggtacaacaatgttgagctcgatgggaagccgatgaaaatcgagattgttggaacaaacatcgctacccctcctgcacctttaggagctaatggtgcctttcgaagttctaatggagccattaaaggtggccaaggcaagggtggtggatttggtaggcaacgtggtggtggtgctgctggaagaggctgtggacgacggaagggtcgtggagaaaaggtttctgcagaagatcttgacgccgatctagagaagtatcat

SEQ ID NO: 2785 - DNA, 1035 bp, Gossypium hirsutum
  Clone ID: GOSHI-09MAY01-C41022_1
gtccttcaaagagatctgaaataggagctagttcaaagtctgtcgaagatggcaggaacaagctctgcgcggattgttttagttgttgtgtctggtgttttagcattgattgggtcagcacaggctcaactgcagatgaacttttatgccagcagctgtcctaaagccgagcagattgtgctggactatgttaaacagaacatccctaatgccccatccctcgctgcttctttcttaagaatgcacttacatgattgcattgtcaggggctccgcgccttcggtgcttctaaacaacacatctggccaagcttagaagactgcagtcccaaatctaacactgaggggctttgatttcattgaaagagtgaagagcctcctcgaagccgaatgccccggcgttgtctcttgtgccgatatcctcactttggctgccagagactctgtagtaaccactggaggtccattttggaatgttccaacacgaagaagagacggtgtgatatccaatatcaccgaagcaaataccaacattccaagccctttccacaacttcactactctcctttctctgttcaataacctaggacttaactcgaccgacttggttctcctatccggtggtcacaccatcggcatatcccattgcccggctgtttcgccccgattgtacaattccaccggccccggcggaatcgacccaaccatggacagcgagtacgctgaaaacctcaaggccaacaagggtaaaaccgcgagcgataacaccacaatacttgagatggaccctgggagtcggaaaaccttcgatcttagctactactcactcttgctcaaaagaaggggtcttttccagtccgatgctgctttaaccactgattcaactagcttggctttcatcaaccagctcctttccagccccacacagttcttctttgatgagtttggcaaagctatggagaaaatgggtcggattaatgttaagactggatccgaaggcgagatcaggaagcaatgtgcacttgttaacagctaa

SEQ ID NO: 2786 - DNA, 407 bp, Gossypium hirsutum
  Clone ID: LIB3147-040-Q1-K1-D4
ctgagggattggaaaagattgaaagcctccttagtcatgacaacaatgaaatatacgagaaggcagtgaagattcttgaaacttattgggtggaggatgaggacgagcctttaccccctggtgatgctgcacaatctgggctccaatttggaggcaatcaacttcctgtcccctctggtggattcaatttcaattgaaggaagcttggttggagtggaatgaaactcagtggtcagtactttcttggtgtttctcggaattcacatatcgttcaagtaatgcataagtatgtcctcaagaagtcgtcaaataaagacaaggtggtaaagacgctttgagagtccagaagccgtacaaatattatttttctacttatctttgcagagtcatcttttcacatcgtatac

SEQ ID NO: 2787 - DNA, 294 bp, Gossypium hirsutum
  Clone ID: LIB3147-040-Q1-K1-C12
gcagtttcaatataaaataaaaaaaaaaaatattcatgacaacaatgaaatatacaaaaaaagcaaaaaaaaaaaaaaaaaaagaaatgggtggaggatgaggacgaagcctttaccccctggtgatgctgcacaatctgggctccaatttggaggcaatcaacttcctgtcccctctggtggattcaatttcaattgaaggaagcttggttggagtggaatgaaactcagtggtcagtactttcttggtgtttctcggaattcacatatcgttcaagtaatgcatatgtatgt

SEQ ID NO: 2788 - DNA, 578 bp, Gossypium hirsutum
  Clone ID: GOSHI-09MAY01-C42882_1
atgacatttgaagaccaggaaaggcaggcaacagctactaatatcgatggtttagaaattctagatgaaattatgacaagaagccgtggagaaatccggcgtacacagagtcctaaagtatcaagtacaactccatcttcagtaggggacataaaaccttcttacagccgagggatctttcaaaatgcctatagtcctcggattagtcaactgaggggaaagaatgaaaagggacttgaattaaagcaaactcccagtcctgggccatctacacttggacaagggggtcgtgcttcatcatcaatctaaaagaaaaataataataagtcctcttttttaatgtctatttagtggtgtggtttgataagtttaaatgtcagtgcaactcgagaggtcttttgtttcagtgtgtttttcctgttccgtcttaacaatagggtgattgacacttcttttactttattattttaccctttactaccgaagcatggaataacagcacgtatgccaattgtttacaaactaataaaaaaaacctcatgtacggtaaatttatataaaattaaagctaaggtttt

SEQ ID NO: 2789 - DNA, 1384 bp, Gossypium hirsutum
  Clone ID: GOSHI-09MAY01-C42542_1
cggtctcttggggtgatttcttcatctctttaatttgtatctataaaatttatatttctttattttctcatagcaataaaaccttgttcaaaataaaaaaaaaaaggcaataaaacccttcaatttttgttcccattaatcctaagatggctgtcaagtctcacataatctcaggatttaccataccattgaaacccactgcttcttcttcaagctcggggaatagtagcaccctctgtttagttaagaaaccactcacttcttccttcttcaatggcggagtagcttccctaaaacttacaaggttaaggagtgttcctggaagatctcattgttacagacaaagaggaggtgcccttggtacgcgcatgaacctttttgatcggtttgctagagttgttaagtcgtatgcaaatgcactcttaagttcctttgaagacccagagaaaattttagaccaagctgtgcttgaaatgaatgatgacttggtaaagatgagacaggccacagcgcaagtattagcgtcctttatacggttggaaaataagtacaaagctgcacaacaggcttctgaagattggtcccgtaaagcacagctggctctgcagaaaggagaagaggatcttgcacgtgaagcccttaagaggcgtaaatcttttgctgataatgctaattcattgaaagctcaacttgatcaacagcaaactgttgttgataatcttgtctctaacacaccgcttttggagagcaagatacaagaggcaaagtcgaagaaagagactttgaaagctcgtgctcaatctgcaaaaactgcaactaaagtcaatgagatggtgggaaatgtcaacactggcagtgctttagcagcttttgagaagatggaagagaaagttttggcaatggagtctgaagcagaagcccttgggcagttaaccactgatgatcttgaaggaaagtttgcattacttgagagcacatcagttgatgatgatcttgcaaaaatgaaaagggaactctctggtagctcgcagaaaggagagcttccacctggaagaactgtttctgctagcaataatacagcatttccttatcgagattctgagattgagatggagctcaatgaactgaggcgaaaggcaaaggacttctaagttcctgatctggatacctgaatgatggtatttttatttcatgaacaaatcaaaacagttttatcatattgagctagaatccgaacagatcatttgtatagctgcagtccaaactcaatgaactataaccagttttggatggttatgtacatactttttatgtatttatcattgtcatgttgcccttataacctaatgcccaccagcggcaatgacccatgtttttggaccaa

SEQ ID NO: 2790 - DNA, 858 bp, Gossypium hirsutum
  Clone ID: GOSHI-09MAY01-C42572_1
cggacgcgtgggctggatcacctgctcaattgactatcttttatgcgggtgaagtgaatgtctttgatgatattacccctgagaaggctcaagctatcatgtttttggctgggaacgggtcttccatggcttctaattcagcttatccaaaacccccggtccagactcctattttgaaaccagttcaagttgatagttggcctgcgaaccagctcataaatacgcaactgagcttcggtaagccaagccctttacctgtttcatctcatgctggtacgcagtcttggagtgggtccactagtaccgaagaacagataatatgcaaggcctcagtaccttcaactccatctacccctattagcaaattggagagtccaaatttggtgaataccatgggatctgatgctgccaccggcatgatgccttctgttccacaggctcgcaaagcttccttggctcggtttttggagaagcgcaaggggaggataatgagtacagcatcaccatacaatcttagcaagaagtctctagattatgcaactaccatggaatcgaatgcataaacaaagtttatggcgatctctgcagcaactaaggaggggaaactccatgatttatgatttggcattagaagggaatgaatgcaaagtttatgtttggcattttgtttctctaatgaaaaaatatatttaatgttgactatgcttgattaccatcaactagagtttaatcagtaggtggtggtttaaggttataatagttttttttttttttttttttttttttggttgatattaatgttggatgttttagctactttgtaacccattcaattgttggtacatgggtgaaataatg

SEQ ID NO: 2791 - DNA, 411 bp, Gossypium hirsutum
  Clone ID: LIB3147-058-Q1-K1-H11
gataaagacaaggaaaaaaagaaggatagaagtgggcatcatgattctggtgctgatcactcagaaaagcaccatgaaaaggttggaagttttttacctcttacatgttttgccccgagtatagtggaaaaatggttaaagtcaatcagtctgttaatttatccattatttgttcaagaataacattgtttcttttgagctatgcatgggatgttttcttttgatcagttaagctttggtatagtaagggataaaataatggcgaaagttgattggcatatcaatatgttcctggattgtgaaagacgcaattttgtcatacaggcataccatagagatttattggagcacatgcctgcaccagttgcggtgatacgacgcccaccaacattgccgaatattattacccgt

SEQ ID NO: 2792 - DNA, 325 bp, Gossypium hirsutum
  Clone ID: LIB3148-025-Q1-K1-B9
cccgagtatagtggaaaaatggttaaagtcaatcagtctgttaatttatccattatttgttcaagaataacattgtttcttttgagctatgcatgggatgttttcttttgatcagtaaaaataagcagttgtgctgatcccgggaattaaactactgtggtctgtgcccctgtgcaagtttgtattttaatttgtcttctgaaagtatataaaaaattttaatcttgaaattagattaattttaaatggaattccatgtaaaattctttataattcatatattttcagaaaaggaagcatgatggagatgaagatcttagtgatg

SEQ ID NO: 2793 - DNA, 987 bp, Gossypium hirsutum
  Clone ID: GOSHI-09MAY01-C42792_1
tacgatggttttttaggcttaaaaggacaagcatgagggccaaaagcaacccattttcattccactttttctcatattttcagttctgtttctctgcttctctgcttctgttgcccacaacgatgaagaagtagaggatgagagggaattcgattacaaggagaatagttcgaagggccacttcattggggagatcttaagacagaatgggccgcttgcaaaaatggtgctatgcagtccccaatcgatttaacaaatgatagagtgaaaataataacgaaacctgtagagctagagaagaattacaagcctgcagaatcaattatcaaaaacagaggccatgatatttcgcttcaatggccggatcataaagcgggttcaattataatcgatggaattgaatatgggctcctacaagttcattggcactcaccttctgaacataccattgcgggcgcgggcgcggccgtggaggcacatatggtgcataaagccgcggaccctaatgtgaagagcggtttagctgtttctgcactactttacgaacatggttcacctaatgatttcctaccccagctcataagcaacattacagatatgactgatgtggtccaacaaagatcaatgggggtgactgatccaaaccttatagaaattgatggcgtggagtattatagatacattggttctttgactgtccctccttgcactgaaggtgtcatttggattattaacaagaagatagcaactgtttcgaaggaacaagtacatgcaatccgagaggctgttcatgattatgcagaacaaaatgcaagaccagtgcagacacccaatgaacgagagatggaacttcatagtccccacagctgaaaatctaaaacgctgtatttactacaccattttacgtatcttatatgctatatgagtgttggtatatttgagtattaaattctaattaaataatgttttataatatttatttctccc

SEQ ID NO: 2794 - DNA, 563 bp, Gossypium hirsutum
  unsure (1)..(563): unsure at all n locations
  Clone ID: LIB3543-037-Q1-K1-H8
aatgggttttgtgtttttggggagggatcaagcatgaaaggccaaaaacaacccgttttcattccactttttctcatattttcagttctgtttctctgcttcgtgcttctgttgccagcacgacgaaaatgtagatagaggaattcgttacatgggtgggtagaaagggcccatcattggggagatcttaagaaagaatgggctgcttgcaaaactggtgctttgcagtccccaatcgatttaacaaatgatngagtgaaaataatagcgaaatctgtaaatctagagaagaattacaagcctgcagaatcaattatcaaaaacaggggccatgatatttcgcttcaatggccggatcataaagcgggttcaattacaatcgatggaatcgaatatgttctcctacaagttcattggcactcaccttctgaacataccattaatggcaaaaggtttgcgttggaggctcttttggtgcataaagccgcccaccctaatgttgaagagcggattagctgtttctgcactactttacgaacatggttcacctaatgattacctat

SEQ ID NO: 2795 - DNA, 825 bp, Gossypium hirsutum
  Clone ID: GOSHI-09MAY01-C42762_1
gaggagatgaagatttagctagagattaccgagaaagagcttacatagaggcaaataccatccaacgaagtagaaagacaaggaatagaaattctggacactctgcggcatctgtacatggagtggtacttgcttaggcagcttctgtgttatcagacccatatgatatgcccagttggttacctcatcatgttacgttattggcacgcttcagtggggagccatcacctgttaaatcaacagtgacaaaagcagttgcagagggtcggcgtactcatgctgatacatggaatgttcaaaaggattcatttaccgaagaacaacttgaggtcctagcagatacatcatcttcgtcatcatattttgcttgatctagatttgctttcctttaccaagagagagaagatttagcagaaatacaatgattgagaatagtagtgacaagttctatgatttacttataagtatcgtcatagttgaactatagcatgatttttatttacattgccaaatataaccttttatctccccccccccccaaaaaaaaagaagtttattgttggccatgtaatagaaattcttgcctacattattattctttggtgttaaaggcttctctataaatagggttgataagatcatcaaatggtatatcccataacacacaatcatgcatgaatatgcttgttgattcttaatttcttttccaccttggaattcaaaaaaaaaaaaagaacctactaaaacaaacaaaaaaaaaataaaaggaaaaaaaaaaaaaaaaaaatataaaatagaaaaaacaaaaaagactattaaaataaa

SEQ ID NO: 2796 - DNA, 487 bp, Gossypium hirsutum
  Clone ID: GOSHI-09MAY01-C42682_1
ttcactgcatcctctatattaataataatggtgttgtagaagggaagagagaataaaagggcggaaagaaagaaactaagccaaaaagaagaagaaggaaggactgagttgaataatattgaaaggttagtgagttgaaaaataacataaaaatggcaacatttgcagggactcaacaaaaatgcatggcctgtgacaagactgtttacttggttgataagctcactgctgataatagggtctttcacaaagcctgtttcagatgccaccattgtaagggtactctcaagcttagcaattacaattcttttgaaggggtgctttattgcaggcctcactatgatcagctcttcaaaagaactggcagtctagacaagagttttgaaggaacaccaaagattgccaaacctgaaaaacacatagaaaatgagaatgcacagaaagtggtgaatttatttcgtggaaccaaagaaaaatgtgtgggatg

SEQ ID NO: 2797 - DNA, 1587 bp, Gossypium hirsutum
  Clone ID: GOSHI-09MAY01-C42672_1
cggacgcgtgggtttccaagttgaagggcgaaatatgcttggataatttatcaattaaagaacttcatgaggtttttaaggcaacatttgggcgagacactactgttaaggacaagctgtggcttaaaaggaggattgctatgggattgaccaattcctgtgatgtttctactacaacttttgtaattaaagacaacaaattggtgaaaaaggataatgaagatggttttaacaatgtgaatcttggtgctggaaaagaacacctggcagttgcagttgggtacaatgaggacttgctcaataaccttagcagtcaaattgatgaacatcaaactacttcggaggtgagactgggaaataatgttgtggaaaacaattttgcaagtgaagatcttgctgcagatcagagagctgcaaagagagttcggaagccaacaaagcggtatattgaagaactttctgaagcagagtccaaagagtacagtggcaggtcaattgcttcaactaaaaacattgggtttagacccctgccttcaaaagctcatgctaggcctgctagaaatgtgtcctcccacgcgtccgctgttatcacgaggttggtttcccttggaggatttgggattcaggttccgtgtgtttatcggattcgaagaagccgaccaaggaagaatgtcacagcacttttgaaattccatcccagtggcatgggcatgacagctacgcttataaagaagggttttgacgtacatggctctcaaatggacaatgggagtatgaacaaagttttggaagccaaatctactcctgagcaagctccggaacagtttgtagctgaatcgaagaaagagacgacaccaactgatatggggcagaatatgggattaaaatatgtagatccatctggagatgctcctggtggttatgttgttacagtgccaacagcaaaaggtggaattagaaggaaacatcatcgagcttggactctctctgaggttatgaagctagttgagggtgtgtccaagtatggagctggccgatggtctaagattaaaaggcttgcctttgcatcctattcgtatagaacttctgttgatctcaaggacaaatggcggaatctgctgaaagctagctttgcccagacacctacggacaaaggggcaaattcacggaagcatccttcgatgccgattcccgcaccaattttgttacgcgtgagagagcttgccgagatgcaggcacaggcttcattgccaaatctgagcacggggaagctgtcggcatgtggtggccgaagtgtaaatgaaacaagacccggatacttgtaacattgtaaataatataataatagatattagttgtgtctaaactagaaataatagtctaattgactgtactgtctagaagggagagggaaaaaaagtgttgaatggtttggaccggatgggcagatgagagaagtttgtttaacataagctgcgctaactaggatatttcttccttcgtttgaaccaggaatggcctttcaaatacaaacttgggacttgcgagttaacttgcagtgcagatagtcagtcttcccgtttccaa

SEQ ID NO: 2798 - DNA, 837 bp, Gossypium hirsutum
  Clone ID: GOSHI-09MAY01-C42082_1
tttgtatcaaggcatgcatctttgatctttgattagaacggattgcttggtgcatttaagttatccagcctttttaagctctggctcaattttgtccaaggattggctcttgtaatttccatagatccaaaatggaattaattctctgattgtcaggtttttgagcactctgatttttttgatgcataaagttggcaggtctgctcactggaatatgttgaatgctaacttcttcggaagatttctgagtttaaggtgctatttttcctgtttaaagtttagttcatcaatatctggttatgtccatgattgactccttaaaattcttatttgatctaggtgataataccttgattgcattatgcagactgcagagtgatatatttccttacacctttcttaaacattcttaaacagcttttgagattgagttcacaagatctcagatcatagctgcaatcccttggacctttttctgtgcatggtatgcctcgcagaagcattggctggctaataatattctgggtctcgcttgctgcattcagggaattgaaatgctttctcttggatcttttaagactggtgccattctattggctgggctttttgtatatgatattttctgggtctttttcactcctgtgatggttagtgtcgcgaagtctttcgatgctcctataaagcttttgttccctacagctgactctacccgaccattttccatgcttggacttggtgacattgtaattcctggtatttttgtagcactagcattaagatatgacgtatctagggggaaagagaggcagtattttaagagcgcattttttgggtaca

SEQ ID NO: 2799 - DNA, 403 bp, Gossypium hirsutum
  unsure (1)..(403): unsure at all n locations
  Clone ID: LIB3147-051-Q1-K1-F3
cccacgcgtncgcccacgcgtncgcccacgcgttcggccaaagcagtggaatgaggaccatatcatttggcgttttccattcttccgctcttttgagattgagttcacaagatctcagatcatagctgcaatccctggaacctttttctgtgcatggtatgcctcgcagaagcattggctggctaataatattctgggtcttgctttctgcattcagggaattgaaatgctttctcttggatcatttaagactggtgccattctcttggctgggctttttgtatatgatattttctgggtttttttcactcctgtgatggtcagtgtggcgaagtcttttgatgctcctataaagcttttgttcccaacagcagactctgcacgaccattttncatgcttgga

SEQ ID NO: 2800 - DNA, 572 bp, Gossypium hirsutum
  Clone ID: GOSHI-09MAY01-C42052_1
ggatatagataagagggtgatcaaattgtacctttgttaacagatttgtggaagaggattgagaaatctggttatatgggtggaagtggaagtggaagtaataatttggatttgcagaagattgatcagcgtgttgacagattagagtacagtgcagttatggagcttgttgcagatgtgcagttagtgttaaaaagtgcaatgcgggtttatgggttttctctcgaggtcaggtctgaagcaaggaaagtacatgatctgttttttgatttgttgaagatcgcatttccggatactgatttccgagaagctagaaatgctctctccttctctagtctggtaactacctccaccatgggctcatctgccagacaggctgctggtgacaagaggcagaagctgataaatgaggtggaatctgattcaggactcactcaaaagtcattgcaacgccggtccagtcatgctggtgaggacacaagggttagagtgcacatgccccaaaaggaatcaagggttgggtgtgtaagtggcattaccaaggaactataccagcaagacgattctattct

SEQ ID NO: 2801 - DNA, 677 bp, Gossypium hirsutum
  Clone ID: GOSHI-09MAY01-C42012_1
ctcagcattcccttcgccagttcatggacgagtgttctaaaacccagtctgatcgttcaggcgtttcctggccagaaattgatgttcaatcagataggacccaactctctatatcagtacccatggctgcctctgattacatttcttttacttcctctactaacaatgataaagtaacactatcccctctcagattgtcacgccggttcgatcccattcacatgggattgggtgtgggcagtgttattaatgactcaaaccagaggcaagcaaattggattcctatctcttgggaggcatccttgggtggtcctcttggcgaggtattgcacagtactaacagcagcacaggtgagtgtaagagctcatcggcacttaacctcatgacagagggctgggatagtagtcctcggttaggatcatcacctaccggtgtcttacaaaagacttccttcggttctctttctaatagcagtgcgggaagcagtccaacagcggagcacaacaagacacatgaaggtgctagtctttgcaataacctccttggttcagcccttgttcagtcttcctctctacctgcttcttgaatccacttcactaggttgtgggaggagaaaaatggagaaatggaagcatggatttttatatctattgacaaacatggaacaattaattat

SEQ ID NO: 2802 - DNA, 883 bp, Gossypium hirsutum
  Clone ID: GOSHI-09MAY01-C42352_1
gtgggactgtactcgtgggcacatctcctcttgcctgtacttagtagcaaaaactgtaatcgacaatcgagagatctaattttacaactggtggaatggatcttatccgtctcaaaagctcgttcaattttagtaaataatgctgttagaaaaggggaacgtttggtgcctccatcttcatttgagatactgatgcgagctaccttccctgcatcttcatctagggtgaaggcgactgaaaggtttgaggccatatatcccacagtaaaggaagttgcacttgctggtgctcacggaagcaaagcaatgagacaagtggctcttcagatgttcgcctttgctatcaaagcagcaggagaaagctctcctgagttatccaaagaggcagctggaatagtcatatggtgtttgaaccaaaacgctgagtgctacaagcagtgggacaaggtttatctcgataatctggaagcgagtgtgagtgttcttagaaggctttcacatgaatggaaagaacactccacaaaacttactactcttgaccctttgagggaaaccatcaagaattttaggaacaagaatgagaaagaaatgggcaatgagtcagatgctgctacacaggcactgtttcaggatgcaaacaagtactgtaagcttatactggaaaactatcgcgaggccctgggtgcctaaaacattggcctttctccttgtcgcatttggtgtgggtgccgctgttgtaccccccacatggaagattgggaatggaaccaactgtatgttatttatcactctcaaatccctgtctaaaaaattccgttaagttacgtctttcccggttaaatgcattttgatctggaatttccaactggtaaagggaaaaaaa

SEQ ID NO: 2803 - DNA, 355 bp, Gossypium hirsutum
  unsure (1)..(355): unsure at all n locations
  Clone ID: LIB3147-056-Q1-K1-A3
cccacgcgtccgaaagaacactccacaaaacttactactcttgaccctttgagggaaaccatcaagaattttaggaacaagaatgagaaaatgggcaatgagtcagacgctgctacacgggcactgtttcaggatgcagacaagtactgtaagcttatagctggaagactatcgcgaggccctgggtgcctaaaatcgttggcctttctcgtcgtcgcatttggtgtgggtgctgctgtttagctccaacatggatggtgggactggacaactgatgtagtatcnctctcaaatcctgctaaagctcggttggtatttcttctcgtaagtcattttattgagttcaactgtaagg

SEQ ID NO: 2804 - DNA, 596 bp, Gossypium hirsutum
  Clone ID: GOSHI-09MAY01-C42272_1
ccctcgcgtccggtgcttttgtggttgctgacagctgcttgcatcaaaacgggaaggccacaaattgcaagacgcgcaatagaccttgctgagacacgcttgttgaaagatgggtggccagaatattatgacggcaaacttgggagatatgtcggtaaacaggctaggaagtatcagacatggtcaatagcaggatatttagtggcaaaaatgatgatggaggatccgtcgcacttggggatgatttctttggaggaggacaaacagatgaaaccattgataaaaagatcatcttcttggacttgctaaaaaaaggaaagaaaaaaaaccagaattgggaaatggaaacagaccaacttccgaattttcattgtaccggtaccagtcttgcttcttcttttacgttatgtttccaagtcaagaaaatagtgacaaaaaaaaagaaaagaaagaagattttgcagccatggctgatggctcatgcattgtttatttccattacaagtatacattaaaaggaagtttaagtttccccgttagcacatgccatatttataccctattttgacttatctgccaaaaagaaagaacaaaaa

SEQ ID NO: 2805 - DNA, 303 bp, Gossypium hirsutum
  Clone ID: LIB3147-055-Q1-K1-A10
cccacgcgtccgggattacccgctgagtttaagcatatcaataagcggaggaaaaaaagggccagaattgggaaatggaaagagaccaacttcagaattttcattgtaccggtaccagtctttcttcttcttttacgttatgtttccaagtcaagaaaatagtgacaaaaaaaaagaaaagaaaagaagattttgcagccatggctgatggctcatgcattgtttatttccattacaagtatacattaaaaggaagttaagtttcctggtaacagatgccatatctataccctatttgactta

SEQ ID NO: 2806 - DNA, 625 bp, Gossypium hirsutum
  Clone ID: GOSHI-09MAY01-C42202_1
cccacgcgtccgaattacagtggcaaatccttctgatcttgtgaaagttcgacttcaagcggaagggcgattacctcctggagttcctaggcgctattctggggcacttaatgcttattcaactattgctagacaggaaggagttaaggctctttggaccgggattggacccaatatagcacgaaatgctattataaatgctgctgaacttgcaagctacgatcaagtaaagcagacgattttgaaaatccctggattcactgataatgttgtcactcatctcctttctggtcttggagctggattttttgccgtctgtattggttctccagttgatgtggttaagtcaagaatgatgggagattcagcttacaagagcacgctcgattgttttatcaaaactttgaaaaatgatggacctatggctttttacaagggttttatcccgaatttcggacggctaggatcatggaatgtgatcatgtttcttaccttagaacaggcaaagaaaattgtgagagatctagagtcatcttaaggagcttaaaaagaaccaaaatcccacaaagcaaggaattgaaggtgggactgccattgaaattgaagatttacagagaataaattt

SEQ ID NO: 2807 - DNA, 441 bp, Gossypium hirsutum
  Clone ID: LIB3147-054-Q1-K1-E10
gctaaatgaaagacgggcaatgcaagggaagagccgaaatgacttttttgattttgtccttgaagaacttcagaaagagggaacaattctaacagaggcaattgctctggatttgatgttcgttctactatttgctagctttgaaacaacttccctggctctaactttagcaattaaattcctttctgacgacccttcagtgctgaaaaactaagggaagagcatgaagcaattctacgaaatagggaagacacagactctggacttacatggaaagaatataaatcaatgacatatacattccagttcatcaatgaaacagttagactagcaaatatagtgccgggaatcttcaggaaagcactaagagaaatccaattcaaaggatataccattccagctggttgggcagtaatggtgtgtcccccagctgtgcacctg

SEQ ID NO: 2808 - DNA, 326 bp, Gossypium hirsutum
  Clone ID: LIB3147-060-Q1-K1-E10
tttccgggtcgagccgcgccttccggttattgaatctcagccatctcaagggatttatcctaatgactcttttgattttgtcctggcagaacttcacaaagagggaacaattctaacagaggcaattgctctggatttgatgttcgttctactatgtgctagctttgaaacaactttcctggctctaaccttaaaaactaaaaggcctccagacgacccatgtgtgaccacggatctcgatgctgaacctgatgacactcttcgagatactgcttacactcactctgatcctacatgaaatgagtatgaactctagacagagagct

SEQ ID NO: 2809 - DNA, 692 bp, Gossypium hirsutum
  Clone ID: GOSHI-09MAY01-C43952_1
gtttcgacattgatgcaaatggtatcttgaacgtgtctgctgaagataagactgcaggtgggaagaacaagatgacaattacgaatgataagggaagattgagcaaggaagagattgaaagaatggtacaagaagcagagaggtataaagcagaggatgaggaagtgaagaagaaggtggaagctaagaatgggcttgagaattatgcttacaatatgaggaacaccgtgaaagatgacaagtttgctgggaaactcgaccctgcagagaagcagaagattgagaaagccattgatgatacaattgaatggcttgatgggaaccagctggctgaagttgatgaatttgaggacaagttgaaggaattggaaggtatttgcaatcccatcattgcaaagatgtatcaaggtggtgctggaggtcatgtgccaatgggtggtggtgctgagatgcctaacggtggtgggtctggtgggtctggtgcagggcccaagattgaagaagtggattaagttccatggcttttcttctgcatattaaattgtctggtgttgtctctgttccttcctttttttttttttgtttttttgtgcacctcggtttggctagtattatgtgatgggtgcgataggtgaggtttttagatgtaaaaacgtaacaatgtaataagaacttgaaatttcattcgcctc

SEQ ID NO: 2810 - DNA, 463 bp, Gossypium hirsutum
  Clone ID: LIB3135-034-Q1-K1-F9
gtgcagcagttcaatccgtttgaagagtctggggtcgggtggacatttgacagtgcggatgcaagcaagttgatacatgcattacgtaactgtttgttgacatatcggcagtataaaacaagttgggaagggttgcaaatacggggaatgaagcaagatttgagctgggacaatgcagctgataagtatgaggaagtgcttgttgcagccaaatatcagtggtgagagctctgcttggtctgattgaaccctcttatcacctttttaccgcaaaatttgggtcttgttttaaaatgttggattaatgttggattcctagataattgctctctttttggagggcatgtattgaacttacattgccaagggtcataattaattcataatgtcatgtttacttgtcttaatatttcaaaaattattaaaaatggtattttattttattaaattatgtgtatatatt

SEQ ID NO: 2811 - DNA, 305 bp, Gossypium hirsutum
  Clone ID: LIB3148-018-Q1-K1-F5
gcatgtatcaacttgcattaggtaactgtttgttgacttatcggcagtataaaacaagttgggagggttgacaaatacggggagtgaagcaagatttgagctgggacaatgcagctgagaagtatgaggaagtgcttgttgcagccaaatatcagtggtgagagctctgtttgatctgatttaacctttttatcacctttttaccacaaattttgggtcttgttatcaaatgttgttttaaatgttgtattcttatttcttttgctctcttttattttgattgtttgtgttttttttttttaatt

SEQ ID NO: 2812 - DNA, 442 bp, Gossypium hirsutum
  Clone ID: uC-gsronu33b112h06b1
tcttacgcgtccggccgatgttgatggtgacggccagatcaactacgatgaattcgtcaaagtcatgatggccaagtaaggatctctccaaccaaaaaaaaaaaaaaacagagtagataagtttgcagagatttcaatctcgtaattggttcgtgggtcgttcgtttatcgtttgcattaattcgtcgaccggcttgtttgctctgctttttcttttagtagtctgggtttttatttttcttatatttggttttggtttttgtttttgttttttttgctttctattcttggtgcctttgaaacctttagaacaatttgcaagattccaatgtttttttttgcttatgggtgactaatttttactatattttaaaattttaaaagtgctttattttcaatggcttgtctgatttgccttttcgaataaaaaaaaatatcttaa

SEQ ID NO: 2813 - DNA, 337 bp, Gossypium hirsutum
  Clone ID: LIB3148-018-Q1-K1-E3
gttcgtttatcgtttgcattaattcgtcgaccggcttgtttgctctgctttttcttttagtagtctgggtttttatttttcttatatttggtttttgtttttgtttttgttttttttgctttctattcttggtgcctttgaaacctttagaacaatttgcaagattccaatgtttttttttgcttttaaaaaaaaaaacaaaaaaaataaaaaaaaaaaaaaactaatttaaaactattatagatatacactgacctattactaaaagactgacatctactttgggaaaaacatttgctcataccgtcatgtatgactccgatccggctgataaggt

SEQ ID NO: 2814 - DNA, 649 bp, Gossypium hirsutum
  Clone ID: GOSHI-09MAY01-C43842_1
ctctgccctccggtctcgtacaataattttttatgccgatttgtacctgtttgcatcaaaagatgcatcaaaaagtattatgtcctgcattctctcattcatttgtctctgtattttgacagtcttccaggtatgtttttcctttcccacttctttaagttcagctaaataagtctgtattttctgtactagatccccttctgatacaaactttctttcatgcaccatttgatttcgcgagttccacatcacccataaggcacagcaaaacacctgacattgttccttggttcctttttcgaagacccaaggtattgctggaagacatggagactgttctcttccccggagccacaacgagggcatctcacatttgtggttaatcgtttgcatcgaagattcactagtgcacgaatatagttccaggatatcctccaggccaaaagtagaatttttgatggtatttgtaagctccataattttctgtagaaatctttgaaatcgcgctgtgataaatgactcggatccgaattagcttcttgtaatagtgtataagcgctccttactgacaattctccggacggttatgcctttcaaacgagcatgtcttcactgtgtgttttggcaagagggatctgtaaaatttttt

SEQ ID NO: 2815 - DNA, 418 bp, Gossypium hirsutum
  Clone ID: GOSHI-09MAY01-C43562_1
gagtgttgaacttggtcttaggagacttcaaggaatagtggaaaccaggcgcggggacctaatctatctcagagacagagaagcagatatgagagaagtaagtgaagcaacaaatgctagagtggcatggttcagtatcatgtcccttggtgtctgcatcgcggtttcggttttgcagatatggtatttgaagcgttactttgtaaagaagaagctcatctagattatatacacaagtagtttgtgaagcaaagttaaaaatgtctttgaagaactagaaaaaggaaagatagaagaattcacttaattcttgctggaccaattggcttcctttcatttccctgctgattttgggaatgaaagattggtgatggtttattgttcaatggtcatatgaaagtcttcttttttaaatcta

SEQ ID NO: 2816 - DNA, 414 bp, Gossypium hirsutum
  Clone ID: GOSHI-09MAY01-C43402_1
gccttcatccacagaaagaatatcatagattacgtagaataatgggtcaacggctgacataccggacccgccatagctatgccaccaagtccaaccagcaccgggtcgtcaaaactcctggtggaaaacttgtctaccagacaactaagaagagagctagcggacccaaatgtccagttactggcaaacgcatccaagggattcctcacttgagacctgcggaatacaagaggcctaggtcacctaggaacaggtggactgcgaaccgtgcctatggtggtgtgtcatactggcagtgcagtcagggagaggatcattcgggcctttttggttgaagaacagaagatagtgaagaaagttttgaagattcaaaaaaccaaggaaaaagtttcatcaaagaactaaaagatgaga

SEQ ID NO: 2817 - DNA, 492 bp, Gossypium hirsutum
  Clone ID: GOSHI-09MAY01-C43432_1
aaaatctttaaataaaacaattaaatgtgtggaaattgaagtcatttaaagtgacaatgtctggtgagtctgcaagtataatttacaggtaagttaaagatgatagaagatgctcagaacggaaataagaaccttccttttgtgggtgagaatcgatatactatcttatatgtttgtactaattgtgtcggcaaagctcaaatgaacttgtctaagcccagtttatttatacttgtaagattctctgcactgtatcatctatttatattatacttaaaattgttatttaaaccgataaaaatcattacgttattatatgatccatccgtttcttttggaaaaaatttgatgacacggccatattttgtcttttacttggatcagtggtggaggcacgaccttaacaccaactacaccgggcacgacaacaacttcatcatcatcaacaaccaccacgcccttcatcatgaccccaggcaccaacaccccaac

SEQ ID NO: 2818 - DNA, 714 bp, Gossypium hirsutum
  Clone ID: GOSHI-09MAY01-C43742_1
ttcttcgcgtccgcttttggcaagttcctcaatacgcatttataggagcctctgaagttttcatgtatgttggtcagctggagttcttcaatgcacagactccggacggattgaaaagcttcggcagtgccctttgcatgacatcgatctcgctagggaactatgttagcagcttactagtgacaatggttatgaagatctcgacagaagatcacatgccaggatggataccgggcaacctgaacaagggtcacctagactggttttacttcctcttagctggactaacgacaattgacttgattgtctacatagcatgcgcccgatggtacaagagtatcaagctggaaggaaaaactgcagaaaatattgatgaccaagttagctttaagctataatatatacatatcggtgctaaaacatataattaccggtatagattaatagaataatgaggaaactgggttagagggttggtccccaacatgatgatgttgagaaattaaagatttaagtcgaaagaaaagtggggtatcgtgagagagaaatcaattttcctctcaactctcttgaattcccatcacttgaattgtcctgtctgtttgtaaatatgcagaatgttatctgcataaaagagctttctcttggactttaatgaaagcgtaatcctcctccgccctaagattagcaaaatttagaataaaatcccatgaa

SEQ ID NO: 2819 - DNA, 293 bp, Gossypium hirsutum
  Clone ID: GOSHI-09MAY01-C43692_1
acgaaacaaaatggtgaaaaacaaattgaaaaatttggcattgtcattcttggcaataacactattgctgattatattcacaccggtaaatggatataggacgattgcgggaggtaaaacgccggtggaagatgtggagaaagacaaagcaatgcaagctttagggacgtttgcggcggaagagcacaacaaaaaatcatgaaaatgatggagacacatcgtatcagatagaatttcctcgtgtaggggccagaacaatagttcagatcaatcttctaacatgagggtgaaat

SEQ ID NO: 2820 - DNA, 307 bp, Gossypium hirsutum
  Clone ID: GOSHI-09MAY01-C43092_1
cgaagttgaatgcaagttaatcagaatcttcatggtgcattggtaatttcctaattgcatgtcaatttattcatgctccatttttatgttatattcatatattgaatctatctttgtgtatcctagttccaattatgctttagagtatatcaggacggctatatatcgatatcgatgcctcgtgtatgtagtttttcaatttttttcatttgtttcagtgactacatatgggaatatatgatccttggaatgttgggcagtatctttagttgattaatgaaaggtctttcatttgtttgtgaattaa

SEQ ID NO: 2821 - DNA, 578 bp, Gossypium hirsutum
  Clone ID: LIB3828-003-Q1-N6-H11
aaattaaatgctaaatttattcggataataacttaaattcgggtctactcttaatgtaccaaagtaaccaaacctaaatgataatatttggttattaattattattggtataataaacaataaatatatagtagtaacaattaaatgaatacacatttttctcttactaacaatttactgtgttttcattattgccctcaactctcatcccatcacatctattttcacttattcaacaactattcaagttcaccccatcaagctccggccataaaccgatcatctcgaacctcaaacctcatcgtaatctagctattgacgaggcattccggaggaggcactggatatcgtttctggtctgaacaataatcataattcatatatttttttcttacatttttgaagtttgtcttttgtttcgagtctaacgtccaatatttcttcgaattccaccaatgctcgggtaaaaaacagagtttgttattattattgttgttgttggagtcggtttttcggcaaccgctgatatcgaaaccttggaaatgagctttgaaaggagccatgctccaattaatctt

SEQ ID NO: 2822 - DNA, 379 bp, Gossypium hirsutum
  Clone ID: LIB3148-006-Q1-K1-C7
ctccggaatgcctcgtcaatagctagattacgatgaggtttgaggttcgagatgatcggtttatggccggagcttgatggggtgaacttgaatagttgttgaataagtgaaaatagatgtgatgggatgagagttgagggcaataatgaaaacacagtaaattgttagtaagagaaaaatgtgtattcatttaattgttactactatatatttattgtttattataccaataataattaataaccaaatattatcatttaaaaaaaaaaaaaaaaaaaaaaaaaaaaaaaaaaaaaaaaaaaaaaaaaaaaaaaaaaaaaaaaaaaaaaaaaaaaaaaaaaaaaaaaaaaaaaaaaagggggcggccgttttaaaggat

SEQ ID NO: 2823 - DNA, 267 bp, Gossypium hirsutum
  Clone ID: LIB3148-041-Q1-K1-D3
cccacgcgtccggttgttttctccggaatgtcttattaatagcgagattacgatgaggtttgaggtttgagatgatcggtttatggccggagcttgatggggtgaacttaaatagttgttgaataagtgaaaatagattgatgggatgagaattgagggcatttatgaaaacacagtaattttttagtatgagaataatgttgtatttttattttggttattcttttttattgtttaatttttaggtattgtttttttttttacatt

SEQ ID NO: 2824 - DNA, 366 bp, Gossypium hirsutum
  Clone ID: GOSHI-09MAY01-C43032_1
caaaacctttattcgagggagctgattggaccaggtgagagacgagatggattttactgcttctggcaggttttgacggtcaaagcgattttggttgaagcttcatcctctttggaactttggcataaaaggttgcgtcatcctttcgacaaactagtaaacttacttccttatgttagtaactctagagatcatttgaataaagcatgtgaaatttgtcatcgtgctaagcagactacaaatagttttccaattagtgaacaaaaagtcacttgtatttttgagttagttcattgcgatttatggggggttttatgacactccttcaacttgtggatttcattattttttggaccaaaacccaat

SEQ ID NO: 2825 - DNA, 594 bp, Gossypium hirsutum
  Clone ID: GOSHI-09MAY01-C43242_1
gggtcgaccacgcgtgcggccacgcgtacgaccacacgtccgcccacgcgtccgggatgatttcgagacatttcaagcggcaataagggcagagtgctacgtacacatcaactctaactcagagcctctcgctctctcttgatgaattttacaagaattcacgatcggttggagtgtctgcgatttctggtgctggaatgaatgaattctttaaagccattgaagcctgtgccgaggaatacatggaaacttacaaggctgatctggacaagagacgagcagaaaaacaacgcctagaggaagaacgccggaaagagagcatggataagttgaggagggatatggagcaaacgagaggcgaaaccgttgtcttgagtactggtttgaaagacaaagatggaagaagaaatacaatgatggatcctgaagatgaagtggaagaaccagaagatgaagatgattatgacaggttcaccgacgaggatgaagatcttatccaggaggatgaagatgaagagattgccaggttctccttttaggaattgtttagcaccggcaagtctagcatctacgatcaaatgaactgggatttgt

SEQ ID NO: 2826 - DNA, 861 bp, Gossypium hirsutum
  Clone ID: GOSHI-09MAY01-C43212_1
gttgcttcgtcatatttatgataacattaggcaaagttaaatagaaacaatggggcacttgggatttcttgcagctgcattactctcactcctcaactttgttcatggctcccttggaccctggaccaatgctcatgccactttttatggaggtggtgatgcttctggaacaatgggtggagcttgtggctatggaaacctaaatagccaaggttatggtattaacacagcagccttgagcaccgcattgtttgacaatggcttgagctgtggtgcatgctatgagctgaagtgtgtgaatgatccacaatggtgcctgcctggttccattgtggtcactgccaccaacttctgccctccaggaggctggtgtgaccctcccaatcaccactttgatctctctcagcctatttttcaacacattgcgcaatacagagctggtattgttcctgtaatgtacagaagggtaaagtgcaggagaagggggtatcaggttcacaatcaatggacattcctacttcattttagtactgatcaccaatgtttgaggtgctggggatgtacattcagtatccattaaagggtcaaagaccagatggcaagcaatgtcaaggaactggggccagaactggcaaagcaattcttaccttaatggccaaagcctctctttcatcggcacgaccagtaacggacacagtgttgtttctttcgacgttgctccatccggttggtcctttggacagacttacactggaggccagtttggggctaccaaaatataacagccccttgctatatactatatgatattatagtaaaaatatgtctgaagaaaaacttaagcgagttttttttttttaa

SEQ ID NO: 2827 - DNA, 573 bp, Gossypium hirsutum
  Clone ID: GOSHI-09MAY01-C78872_1
atgatatcaagattgacgtgaaagctaactatcggccacaacatgttccattagtttccctcatgagtgaactgaatggtaaagccataataggtcaccctctaacagttgaggttttgaatgatggttactatgacaatccgagtcaagaagctgctatggagtgcaccgaagttgaccattccttgaagcaaaattcaggtggacgagtccctagaaagcatataaaattgcaatcgcaattcccaccacgtaaatcagcaaaagtaaagaaatcgggactgttgtctaagaagattcggaaattgtcttcattgacgggtcagaagctatgtgtgggtttcaggaaacccatagcggagaagcccaaaggtcctgtaatagcttgcatccctctaaagttagtcttcagcaggataaacgaagcattgaacggctcagcaaggccaacgcaccgatcattaacatcaagcaattcatgagtaagtgatctaagccatactggatattggagtataggaacaagcaggcggttcattttaaaagccttaccatttagcatggtcagcatgc

SEQ ID NO: 2828 - DNA, 574 bp, Gossypium hirsutum
  Clone ID: GOSHI-09MAY01-C78512_1
tccattcgtccggccaggttcaggttcagctgagggttgttggattattttcagataacaaaagatggcagctgcaatgaaactcatctctgttatgggattgattgtgcttattagcctgggaaaggtggttgatgcagcaggggaatgtgggaaatcatctcctgataatgaggcaatgaagctagccccatgtgctgaagctgcacaagatgagaatgcccctgtttcagccagttgctgcgcccaggtgaggaaaatcggccaaagtccgaaatgtctctgtgccgttatgctctctaacactgctaaagcatctggaatcaagcctgagattgccgtaaccatccctaaacgctgcaacatagccaaccgtccagtcggttacaaatgtggagcatatacacttccttgaaaggaaaatttgggagacataaaaagtgctggagctcacttgttgtaccacttaatatgtagctttaagcttacctttgtatgaataacagcttaaagcatgtttatattatatccaatcttgaagttcaataaaatcatccatgtttctgcttttaaa

SEQ ID NO: 2829 - DNA, 706 bp, Gossypium hirsutum
  Clone ID: GOSHI-09MAY01-C78422_2
acggtctttatcctggcaataatgttggtttacaaatgtgggataactatccatttgtctcaatgaaacctaacaaagaagagaaggctggcctagcagaagccataaccagcaatcttctttcaactggtcacatagacttgcaaagaaaattgttttgtagcatacaattgataggtggagtggctttaactggtgggctaattcctgccgtggaagagagagtcttacataccattccttcaaatgaagcaattcatactgctgaggttttgcaatcaagaacgaatccaacatttgcgtcctggaaaggtggagctatccttggagtcctagattatgggcgggatgcatggatacatcgagaggactggatccggaatgagattcatatctggagtggccaggaatacaaggattcttattttcttcaggcacaggcaatgcgttacataaatgccgacaagctggtggataggtgaaaacttctctaaaaccagtggtcatctacaaggttgaaggagcaagtgactaggttagtggggttgggattagaaaagcacttgtctattagaacacatactgctgctccttggcggggttcgtttttgttttaagaaacttgtatatccatgggagtttgcagtccagaatcttcagcataatcaatacaaactagaatgcgatgcatcatcaactttgtatg

SEQ ID NO: 2830 - DNA, 487 bp, Gossypium hirsutum
  unsure (1)..(487): unsure at all n locations
  Clone ID: LIB3582-027-P1-K1-E7
gttaactgttgtgttagctttttatgctagttccttgtgttgtgttagctagtctagactctaggagtaagcttacttgaaatgtttgcttataccatgatgattattacagatccttggagtcctagattttgggcgggatgcatgggtacatcgagaggactggatccggaatgggattcacatcgggagtggcaggaaatacaaggattcttattttcttcaggcacaggcaatgtgttacataaattcgtagaagctggtagataggtgaaaacttctctaaaaccagaggtcatctacaaggttgaaggtgatatttctcttggaaagtaaacaaggcattaagttcctaatccacacactgtagctgtctagaaactactgagacatgccaatggttcttcattttgtcgttttcaggagcaagtgactagttgactgcagtttgggattagaaaagcactngtctattagaacacatact

SEQ ID NO: 2831 - DNA, 626 bp, Gossypium hirsutum
  Clone ID: GOSHI-09MAY01-C78612_1
cccacgcgtccgcccacgcgtccggctgcctatcacaaatccaaaaaaccctaactctaaaagtctcctaaaagctaattccggctttcagccgtttccttttatctgttctatctctttcttttatttgtttctttaaatacccactgttagtctttttttcaatcttgcgttctttcgtttttctttttttggtagaaatggttggaaaatgagttttttttaacctctgttagtttttgaattgattttctttcttctatttgtttgaaagtgtttgaattgaattttttccctgcttgtttgaatttacaaaaactgctacggttagtgtttgaattgaatttctttccctgtttgtttggatagaaaatttctttttgtttttcctgtttggctcgttaaacgagccgattccgccttcacccaaatcttgaaaaagaatataaaaaaggaaaattatgtctttagaagtgtctaggaaagaggacgaacagccaacgccaccaacaggtggtcataacggaaacggcatggcggtgttgcagagcatggcgacgacgcaccggttacggctgaaccctaacacggagcacaagccggaaagctacgagggtttgcatttg

SEQ ID NO: 2832 - DNA, 806 bp, Gossypium hirsutum
  Clone ID: GOSHI-09MAY01-C78632_1
cccacgcgtccggtgacgggataaaaccatttgtttcgatttaaacgctttaaagattcttggttttctgatatagattttttttcttgggacttctttgttttccgcgattctgtgggaaagtgagaagttttttttctgggatagaagatgagtaacccatctgcaggagcctcttcaaaatcaaaagtcggttcttcacaaccttcagaaacatctttcaagcgcaaaagaggagtgtttcaaaaagatttgcagcatatgatgtatggttttggagatgatcctaatccacttccggagactgtggcccttgtggaggattttgtggtggaatatgtaacagatatggcacataaagctcaagatattggatcaaagagaggaaagctatcggtcgacgattttctatatctcattcgcaaggacttgccgaaactaaatcgttggactgaattgctatcaatgcaagaagagctgaagcaagcaaggaaggcatttgaggttgatgaagaaaaattgggtacattagagtagcctttattttctacttctggcctgggtcaaggctctactacatttagcaatgtaagaaatgcttatatactgtttttgttagaagctggaacaatatgatactattgctgtaaatctcagatactgtgtgtattgaaaatctatgttgtttgtattcggatcagtgttaaatacggatgaatatagttgatatgagcatattcaaaatttttaaaagcttataaaagaattaaaggaatgaaaaaagtgtgggaaattttaagaaaaat

SEQ ID NO: 2833 - DNA, 596 bp, Gossypium hirsutum
  Clone ID: GOSHI-09MAY01-C78252_1
cccacgcgtccgcttttattaattttcaccccttttctcttgaaaatcaaaatctaataatatctgaaactctctccagttgttctctcgatcacaagcgctagccctctcttccttactctccagcttcgatctatctcttctttctttatttttcttttaaaaccctcacatgttagccctaactcactgagtccaagtcccattcctccgaactctgataatcatcgttttccagccaaatttgccggttaattaaacctaataaattaaggataccattccctatctctcttttaaggtatattttatcaagattctctagaagattttgccggtgtcactgataaacaaggttctttttcttctgagatgaatatgcaacaagttgtgtttccaaaatcttctgctaatggatttggccgtcaaaggggtgatagagaggttggggctaggttggagaataagatgcagctgggaaaatccaatcaaagcagaatacaaactaccggggccctggctgttgggaagactgtaggtaatgagagtttttcccgtgatcggttagtttatctgacaacatgtcttattgggca

SEQ ID NO: 2834 - DNA, 507 bp, Gossypium hirsutum
  Clone ID: LIB3585-043-P1-K1-F12
aaagaatgagatgcaaatagagacagcgagtgctaaagacaacattgcaggcttccatggcttaagagttcccaccataagcattcgacaatatattgatcgaatcttcaagtatgctcggtgcagtccttcgtgctttcttgttgcatacatttacttggataggttcagtcaacaaactgatatgcatttgacttcccttaatgttcatcgactccttattaccagtgttatggtggcagcaaaatttattgatgacacgtatttcaacaatgcatattatgcccgagtgggaggaataagcacagctgaattgaacaggttggagatgaaatttttgcttagtctagattttagacttcaagtgagcatcaatacgtttcgaagatactgtttacaactccaaaaggaagggaaccaagttgaacggcctatccgagcttgtgggattaaagagagttggcccagcaaaagtgatacgcagtgtgctcccacaattgcaagatg

SEQ ID NO: 2835 - DNA, 423 bp, Gossypium hirsutum
  Clone ID: uC-gsflnu33B012f11b1
tgtccacgcgtccgccatggcttaagagtacccagcataagaattagacattatatcgaacgaatgttgaagtatgctcagtgcataccttgctgatatcttgtagcatacatatactcggataggtgaggataacaaattgatgtgacgttgacttcctgtatacgatcataggttccttattaccagtgttatggtggcagcaaactccattgatgacacgtatttcaacaatgcatattatggcatagtgggaggaatatgcgcagctaaagtgaacaggtgggagatgaaaggaatgcattagactagattttagactttaggtgagtatcattacgcttgaaagaggctgcttacagctccaaaaggaagggaatcaagtcgaacgggctatccgggctagtgggattaaagagagtt

SEQ ID NO: 2836 - DNA, 648 bp, Gossypium hirsutum
  Clone ID: GOSHI-09MAY01-C79512_1
cccacgcgtccgcggacgcgtgggcggacgcgtgggctctgccagtggatccaacttactgattgccttgtaagcaaccagcagcagagtcattgctcatctgcagttcgtaggctttgtgaagaatggcatcttggttttgaaaaattacctgataaggcggcatcagagaccattaagagttttttgttggctatccaatctataatccaacagcaggctgaggagcacaaccagaaaaaaaaatctgagaagcttcagaaaaggttgcagaaggagttaatttcactgactgagatggagaaaaaggttgagggaagtgtattaactttagatatgaactccacgctgagcccaaagcatcctctttcattgaagcgtgccaaaactgaagccttaaagaagcgagttgatgtggagaaaggcaaacatctgaactcagtccaattaagcaagaccatgattttaaacaatctaaaaactagcctgcccaatgtatttcaggcattaatgggattctcgaaagcttgtgttgaggtctttgaggccattcatggcaacagtcagccaaaaattccttgtgcatcatagaactcaacaactaaattttattgaatggtggaaatgtatgtaaatgctttctaccgt

SEQ ID NO: 2837 - DNA, 510 bp, Gossypium hirsutum
  Clone ID: GOSHI-09MAY01-C79402_1
tagcagctatcttagatccccgattcaagatgaagctggttgagtattactattcccaaaggtgcggcagtactgctttagaacgaatcaaagaagcatctgatggtatcaaggaactcttaatgcatactctatctgctcaacttgattgatcagggttcagctttgcctggcagtagcttacctagcagtagtaatgatactagatatagactaaagggcttcgacaaattcctccatgagacatctcagagccaaactgcaatatcggacttggaaaaatatttagatgagcccgtgtttccttgtaactgtgacttcaatatcttaaattggtggagagttcacacaccaaggtatccaatcttgtcgatgatggcacgtgatgttctaggaactcctatgtcaaccgttgcacaggagttcgcattcaatgctggaggtcggatgcttgatagcaatcaaagttcaccgctcctgatactcaacaggctttgatatgcacacgag

SEQ ID NO: 2838 - DNA, 676 bp, Gossypium hirsutum
  Clone ID: GOSHI-09MAY01-C79722_1
gccacgcgtccgcccacgcgtccgcccacgcgtccgcaaaactctcccctgtttcgtcctaagaatctttctccaagggcaacttcgaacttgaagcaaacactaggcgatctaaacaaggaatccttcatctgcgcgtgcgggccggaattataggtgaatccaagttcttacaaaacaacccaccagaactaatcccggaagaagacagggtaatcaaacatgtactagattgtctgcttccttacagcaccacaaccggtggtcctttgatcgttaaccatgtcacttatttccctggtagaggcaatctcattgtggaatatcctgggactcaacctggaaagatcttgtcggttgttggtatgcatatggatgttgtcaccgcttacccaaatgattgggattttgatcctttctcgttgagcattgatggcgataagcttcgtggccgtggaaccacttgattgtttgggacatgttgcacttgtgactgaactaatgaagagacttgctgagacaaaaccgaagctagaatcgactgttgttgcagtttttatagctaatgaagagaactcggctatatctggagttggtgttgatgctttactgaacgatggtctgcttgataaactgaaaggaggccccttttctggattgatacgggtgataaacc

SEQ ID NO: 2839 - DNA, 514 bp, Gossypium hirsutum
  Clone ID: GOSHI-09MAY01-C79642_1
cccacgcgtccgcatcagccaagttgtcctgctggaagtatgccagtgagtgctgcagaagcagagaaagacatgcaacatgtgaaggataaagtagatggtgcattagaaaatactacaactgcaaacataccaactgatgttcatttaaatatccgattacctgacagtagtagcctacaggagaagtttcctgtgacatacacactgagtatgattaaagactatgtggatagaaaccaatcaaatggcatgggctcctatgatcttgccattccttatcctcgcaggttatttggtgatcaagatctgattaaatctttattggacttgggtctgtttaacagacaagcattgatagtagttccacgtcggagaaccgctggtttccaagggcaaagaccatctgatgacaatagaaatttgacacctatagaagattctgcaggaagcagtgggggatatttttcatacatcaaaagctttttgtcttatgtaaatccttttgcttatc

SEQ ID NO: 2840 - DNA, 649 bp, Gossypium hirsutum
  Clone ID: GOSHI-09MAY01-C79632_1
gcaaaaaagcgaattagagcaaccccatttctctttaacccaccaaaacccataattgattccagaaaagccccagagttccagtgataaaaaggaacaaagattcttcttcatcgtcgtcatcatcatcatccatgggttgttctgcatcaagacccaacactaatatcatcaccaaaccccagaattcttcacagtcttccacttctttagaatccatggcctcttcccactcttccccaccgcccgtttctcgtgctttgtctctcccgacgccgcttgttcaccatccgccgttgagaaaaggcgacaccaaccacttggtttcgttaacatccactacttatggttccctttcactcatcgacgtccaaaagcctgttatcgacgatacccaaagtttatccgaccaagattcgccggttcatggtggtcaaactgactcgttgtcacctgactcggttatcaacacttgggaactcatggatggactcgatgatgatgatgatgtggggcatgatttcgatctgggtaagcctaaatccaaaccttcgtttaatactattattaaacaatcattaacaaaaccgttatggaaacatttatctgaagaatcactgctttcaaaacttgacccaaatgtggtttc

SEQ ID NO: 2841 - DNA, 742 bp, Gossypium hirsutum
  Clone ID: GOSHI-09MAY01-C79302_1
attctttctttctggtgtgttggtttcagttttcattttgagaggggaaaaaatggtgtggagatggaggtactgttacaaggatgttctgccattttcagctatggtgacaatggagtgtataaacgtgggtttaaacacacttttcaaagcggctactttgatgggcatgagttaccatgtttttgttgtctatgcttatgctatagctgctcttgttctccttcctgctcctttcttctcttacagatcaagagtgcttcctccactgaccttccctatactatgcaagattggtctgcttgggcttatagggagttcatcgcagatcatggggtatacaggcatcaattacagttctccaactcttgcttctgcaatcagtaacctcacaccggctttcaccttcatcttggctatcattttcagaatggagaagctagcttggaaaagaacaagcagtcaagctaaagtcataggcaccataatatcaatcactggtgcatttgtggtgactctttacaagggtccagccatagtcattgcttcaacgccttcatcgtctcttcaacaacaccttaatccatcgaatcggcttttcgttggacgtaactcttcaaacactaattgggtcattggtggcattttcctcactgctgagtacattctagttcctctctggtaccttggtcagacgccaatcaatgaagaatacccggatgagatgactggtgttgctttt

SEQ ID NO: 2842 - DNA, 506 bp, Gossypium hirsutum
  Clone ID: GOSHI-09MAY01-C74972_1
cccacgcgtccgcttggctcaggggattcgagttacagttgttcttgccagcaggaatgatgtcgaacatgtacggatgccatctgcagttagatttcgcacttccagatcctatgatcacaggtggaatcggatgaggcaaatggagaacattgctgtgccttctgtagctaaactatacaattcgaagtcttaccagacaaaaaggaatgatgggaaattcgagctctgtgcctgcactatgctctggaaccaggcaccagcactgcgggagtggattatgtaccatacctggctcggagttgaacgttggttcatttatgacaataatagtgatgatggaatccaagatgttatcgaagaacttgattttcaagactataatgttagcagacatacctggccatggattaaaactcaagaggcaaggattttcacattgtgctctgagagcagaaatgagtgtcaatggtaggattcttggtgtcgatgagttctactacttc

SEQ ID NO: 2843 - DNA, 348 bp, Gossypium hirsutum
  Clone ID: GOSHI-09MAY01-C74912_1
gacgagatatcttatatatagagctaaataaattcaattgactggccgtcgacatacaacggactgactgaaaaatccctggagttacctaacttaattggcttgaaatacatctttctttagctagctggcgaaataacaaggaggcacggaccgatcgtcctaacaaacagtcacgcagaatgaatggtgaatggcacgctctatgtagccattcatcaagcgcggtgggtgtggtgcttacacgcagagtgatcgatacactagcgagctagctagcgctcgtttctttcgctttctttcctttcttgctaggcacgttcgctggctttgccaagcaagatataa

SEQ ID NO: 2844 - DNA, 689 bp, Gossypium hirsutum
  unsure (1)..(689): unsure at all n locations
  Clone ID: AI055044.1
cttgctgttcacaatgcaatcaaggcatctcccatacagtttgctggaagacaagtttacatagaggaacgcagaccaaatagcactggtactcgaggaggaagaagggggagaggcaggggcagctatcaacctgatgcctcaagaggtcgcattggttctcgaagtttgggtagggggaacaaccaagaatctggtgactacagatcacgaagcaatggtttctatcacngggttctcgataagatggcttcttagtaaaactgaccgtacacaagtcggcataacttttcaacttttttgaaaatctctgggtgattgagggnttggtagcaatggttgaacatttccatcagtgagttaagaaaatatgctnttactttcgntgagtgtgttggttcagtaaaggaagtttgggtgcaatnnttctttattgctttatgggttacatatgnttctnccttgaatgcttnttatatgcagttcaggtggagaaatttttctaatggttctgaactgtttttgactatgaggcatctgatgttgatgtttctttatgccttggagtcgnttgacataatcgttaaagaataaaacccccctcaatgacaccgatatttcacatttttccggatgatccagaggcctttattaatatccttttataattgctttacttgatcataaac

SEQ ID NO: 2845 - DNA, 535 bp, Gossypium hirsutum
  unsure (1)..(535): unsure at all n locations
  Clone ID: LIB3583-038-P1-K1-G2
cccacgcgtccgggtgaatataaatctgtatatgtgagaaacttgcttctactgttactgctactgaaattgagcaggagtttaggaattttggaagaatcaagcctgacggtgtgtttatccggaaccgcaaggtagtttctttttcttcnccctcttgaatatntggtatatgatatttaagaaactaaattagtgttagctgcatgcaggatgttgttggtgtttgctatgcttttgttgagttcgaagacattcttgctgttcacaatgcaatcaaggcatctcccatacagtttgctggaaggcaagtttacatagaggaacgcagaccaaatagcactggtactcgaggaggaagtatgtgcctttatacacacccctgttgtcttttatacatgctagaatttgttttgcattttattaaatgatttgattattgctcattttggtgatctttggaaaagtctatgaaagcactcttacaaactcttttagttgctaaaagttttatgcttcagtttgcaattgcatg

SEQ ID NO: 2846 - DNA, 1879 bp, Gossypium hirsutum
  Clone ID: GOSHI-09MAY01-C74782_1
aacctaaacccccaatcctaccctgagaaggggcccgcgcgctcgagtatttactgataaagcagagctaagaaacgaagaaatgttgaggtccattgcaaaacgagccacgctcttaaagccacgagctgattcacctataatccctcccctcatctcttcccaatccaagctctattcttccaagaacgcaaaggcctcccacgggaaatccaagaaaggcgatcccaagtccaagaccaagtccaagaccggcggttcctcttcctccgttgcctcctccactggtgatgacctcgattctgccggcgccgacgacttcgaggctgctcgagcccgccgcctggtcgaggacgagaatgacccttctctagatgtgggtcccaatggacgtcccttgttcacttccactccctcactttccctgctcactcggaaagactgttgctcgtacatgaagttcagtgagaagggattgaaccaagtgttgccggagggtttgccgacggggatggtgacggagttcaaggagtcgatgaggccggcactccttgttcgacagagtttcttggatcttcgtgataattttagacgcattgtagatcctccaatgtggtcttctaatgctaaagctcctaaagcgagaaagcaaatagttttggacggtccggttagctgcgggaagagtattgcgcttgcaatgcttgtgcattgggctcgtgatgagggttggcttgttctctatgctcctagaggtcgtgaatggacgcatggaggatgtttctataaaaattccgaaacaggtttttgggacacacctgtacaggctgaaaatatcctcaaggattttctgaaatacaatgaatcacgcctgcaacaattgccatgccaaatttttgatcctattcgattgggagaaggtgctggtgttggatttatgaaaggagttgaatccatggccctccctgaagagtcaacattgtatgacctggttcaaatgggaatcaagtacacacatgcagctgttggagttgtagttcggttgaggaaagaattatcactcgttaaagatgtccctgtgcttatagcaattgaccaggttggcacctcgtttcccttcttatagtccctagctacatgattgaacttattctaactttttgttgttgtaaataagtggcatatttttactgatgtatctgttatgtcttcagtataataattggtttaccttcagtgagtatgaggagccagtgactgtccgttcttgtcgaccaatacacgccagagaacttgcaatggtgaatgcctttaggtccatgatgcatgaggacatgatggttggtgcattctctcattcaactgctgtgggaaaacttcgtttagatttgccagatatacctgttggtgcccgtgttaacatgcctcgttacagtcctgatgaggcagcaactgtttgccattactacgtcaggcaaaggcttgtaagaagggaagcattctcggaggaaagctggaaaaaagtgtactacttatccaacggaaatggagcagagatgagatggttacttcctttgatgcggtaaaataagaaagatagagaacataaaattgcctctacaagttttaaagacctgcattgatagactagcttgttcggtcatggtgtcttttctcaaaaaaatctggtgagatatttggttgaagctgtcattttatattcccagataatgtagtggactagtgctctcatctttaagaaattattgattatttttctcttgcaagttgataattttttccttttgagaaaatggattgattgcattgcttagatgctcaaaacattttgagaatctaaaggaaataaattgttacc

SEQ ID NO: 2847 - DNA, 595 bp, Gossypium hirsutum
  Clone ID: LIB3828-028-Q6-K6-H10
atcaggctgaaaagtcctcagggttttctgaatacaatgaatcacgcttgcaacaattgccatgccaaatttttgatcctattcgattgggagaaggtgctggtgttggatttatgaaaggagttgagtccatggccctccctgaaggggcaacattgtatgacctggttcaaatgggaatcaagtacacacatgcagctgttggagttgtagttcggttgaggaaagaattatcactcgttaaagatgtccctgtgcttatagcaattgaccagtataataattggtttaccttcagtgagtatgaggagccagtgactgtccgttcttgtcgaccaatacacgccagagaacttgcaatggtgaatgcctttaggtccatgatgcatgaggacatgatggttggtgcattctctcattcaactgctgtgggaaaacttcgtttagatttgccagatatacctgttggtgcccgtgttaacatgcctcgttacagtcctgatgaggcagcaactgtttgccattactacgtcaggcaaaggcttgtaagaagggaagcattctcggaggaaagctggaaaaaatgtactactta

SEQ ID NO: 2848 - DNA, 613 bp, Gossypium hirsutum
  Clone ID: GOSHI-09MAY01-C74182_1
ctctcctcgctgaggcgattgaaagagtggtggagttcatgtcaacactcccaacagaaaatgggtggaattctttccagcctcttcgcttatacgaaggcttttggaccttccctcatttcctcgaaagcatcatattagctcaacaccgcttcaagcctaaaccaggcgatatcttcctctgtagcgctccgaaaagtggaactacatggctcaaagcactgagtttcgccatcgtcactcgaaacctttacgacacctccaatagtccattacttaccaagggtcctcatcattgtgtcccaaatatggtcgggtttgaatataaaccagacgtccgtcaaccaggtatcccactcatacccacccatgcaccttaccattgtttgcccaaatctgttttgggttccgatgatgttaaagttgtttacatttgtcgggacccgaaagatgcgttcgtttccatgtttcactttgcagccaaccgaaggcctaaggaaaacgaacacattgcgatagaggaggcttttgagcttttctgtctagggaggtctgtttttggaccggcttgggatcatattctgggttattggaaagctagtcaagaacgacc

SEQ ID NO: 2849 - DNA, 483 bp, Gossypium hirsutum
  unsure (1)..(483): unsure at all n locations
  Clone ID: LIB3829-022-Q6-K6-B3
cactcgaaacctttacnacacctccagtggtggggtgacttaccaatgntcctcatcattntntcccaatatntcnntttaaaatattttttttttcaaccancatcccacttttctggggggcgccttaccatnngcngcccaaatctgttttgggttccgatgataataaacttgtttacatttgtcgggacccgaaatatgctttcgtttccatgtttcactttgcatccaaccgtaagcctaaggaaaacgaacacattgcgatatgagacgcttttgagcttttctgtctagggatgtctgtttttggaccttcttgcgatcatattctgccttatcggatcgctagtcaacaaccacccgattaagttatgttttctcaatctctaacaattgttcaatgatagcgatttctatcttataaaaatcctttgccctttatacgctacccttcttaactttttctccatcacatccctt

SEQ ID NO: 2850 - DNA, 760 bp, Gossypium hirsutum
  Clone ID: GOSHI-09MAY01-C74232_1
agaaatttgcttccattcagtatgaatcagaattttcaaaacgcaaatgaggactcttcggatgatagtgaagtagatttttctattcacctggagaatgaccaattggactcatcacacagtgcacctcctgggtggaacagagaaatcaatctaccgagtgaggctacttctgctgctttgtcaaatcaaaatggagaagagtcttctgaaggtgccatctcagggcatgttgcagatgtttcattcaagtacatttctgaacatgcttcaccaatatgctgggagcaacattatagggagttcatgatagcttcaataccccagttgagagttttggataacttacctatcagaaatattgatagagaaatggctaatctgactttctttaaacattttgagcgcctaccttatagaagaagcgacaaagaaagcgttgttagtatattgcagaagcgagaaattagagcaatcccttctagcttccggacacaaaagcaaatgccaatggatcctgttgggaagtcgcaacattcttatgcccgatctctctgtgctgcaaaaatgggatcttcagcttggccatatatgaattcactttctatttcaggcaatgatttgggagatgaaaacggtagctttcgtccaaggcagtttgaatatcatccaactaactctagcctaatggtctttggaactttagatggtgaagtagttgttgtcaaccatgaaaagcagaaaatgttagttacatccc

SEQ ID NO: 2851 - DNA, 602 bp, Gossypium hirsutum
  Clone ID: GOSHI-09MAY01-C75962_1
cttctatcagtatgttgatagaaggttaagttatcactgcgatctgcttactcgtggcgtgggtggtgttgaaatggagtcaagaaaagctgaagaatgggctagtcagcttcaatgttggtcccttcaactcattaattgcttcgcattcaaacctgagtttcttcccactcttatgcaaacctgaatttcttgtaaaactaccgggaatgtggggtggacttgttaatgaaaactcacctgctggtattgtgtttgttaagaaccatccgtcatcataagattggtaggggatctgttgccagctgtcctggcattatcgaagcattggttaatattgcttgctcgtctgatgattggcagtatatggcaattgattgtcttctttggttgcttcaagatccaagcacattgtcataaggtgatcgataaggcagtacctgctcttgtagaccttgcagagattacgactcttggtgatcacaaaaagcttggagataccattgttaatgttcttcaggaatgtattcaatcccaagggacgggacggagctctgtcagtaaccggacaaaagagctaattgaagaactattgagttcaa

SEQ ID NO: 2852 - DNA, 524 bp, Gossypium hirsutum
  Clone ID: GOSHI-09MAY01-C75412_1
caaagataggaacattgagcaaagagagtgggaaaggctggcaatttttccttgttttcgtagctaaaaactaaatccaaaagcaaatcatcggtggacgcttaccggaccgggaacatgccaccggaagacaaccaggttccactattgtccgacgaggaatcggaccgagatgtagcttacgagtcaggcgaaaaggttcacatcgtcggaatcgacgaaccggacgatgaaggcttgttgggtaccccacctttttcttggaaaaagctatggcttttcaccggacccggttttttaatgtcgatagcgtttttggatcctgggaatttggaaggggatcttcaagccggagctatagccggttactctttgctgtgggtggtgatgtgggctacggttattgggttgtgggttcagttgttgtcggctagacttggtgtagcgaccgggagacacttggctgagctttgtaggggagagtatccgacttgggctaggatggttttgtgggtaatggcgga

SEQ ID NO: 2853 - DNA, 808 bp, Gossypium hirsutum
  Clone ID: GOSHI-09MAY01-C75772_1
cacagaagactcatgcaccaactccacaacatggagctggacggtttagacctgcacctgggttgatggcatcgcctgtttatcatggttcctcatcaacattcatccaacaacctaatagtcaatattcaattccttactccgcttatgggtatacgggatactcccaagacagtatttatcctttgaactattatagtttgtttcgtggtcaacagttctcaccttactacactgccggggcatcgatgacacccggagtgtttcataatttttatccattttatgctcaatatgcacaaaatagccaagctcatggttctggtgtccaatatccccaaatgctacagtatccttatctgcctcagcaggggatcctatcacttccgtcttcaatgccttcggcaacaactcccacagcacctacaactacagcaactgtgacaacagcgacaacgactacagcaactacgacagcagcaagaacagctgtgtcgtcatcggagacggcaaaaacaacatcaccgactacagaatcactaccccctgcaactatagcaacaactggggtggtgggatcggagtcaggtccttcacaaatttctgggacacctactgaaaagaaaacatcaagttaatttctgttgagggatgcagcgtctttcacaatacaatcaatgatgttttgaaagggaagcaaaggtagagagtaaacggaaacaattgaataacaacgaatacaacaaagtttatttgagtcaaaaaaaggatgcttcatgcccgaccacctagcataacaagacatgga

SEQ ID NO: 2854 - DNA, 375 bp, Gossypium hirsutum
  Clone ID: LIB3493-010-P1-M1-A5
cggacgcgtgggttcagtaccaaaaaaaaaaaaaaaaaaaggcgtcatcggtcggtccgttgccatgtctccctcaaagatcattgctgttaaatggagaattcaccagaaaagaacaaaaaaaaaaaaaaagtggtgttattgccaatatatatttatacagagtcaggtccttcacaaatttctgggacacctaccgaaaagaaaacatcaagttaatttctgttgtgggatgcagcgtctttcacaatacaatcaaagatgttttgaaagggaagcaaaggtagagagtaaacggaaacaattgaataacaaagaatacaacaaagtttatttgagtcaaaagaaggatgcttcatgcctgaccacctagca

SEQ ID NO: 2855 - DNA, 580 bp, Gossypium hirsutum
  Clone ID: GOSHI-09MAY01-C75682_1
catattattttttaaatgaaaaatactctcttccttagtaacactctcgttttcttttcttttcctttcctttttttcttttccttttctcaatgcagggaatcaaacaagatcgatcttttaatttcgatctatctttataaagcaaaaacccatttttctttgttcattaaaattttgtttctcaaagcctttgaaggaaaaaacaatgcgggctttgaggcttctattggtcttgggatttttaacagtcttgtcggtggcttcttgtgttgttatcccacttgaaagagcttttcctttgaacggtcgtgttgagctgagccaactcgtagctcgtgatcaactcaggcactctcgtatgttgcaaggtctcgttggtggagtcgtcgatttctctgttcaaggcacctctgatccctatctcgttgggctttattttacaaaggttaaactcggatcacctcctagagaattcaatgtgcagatagatactggaagtgatatactatgggtgacttgcagttcctgtgctgattgtcctcaatccagtggacttgggaattcagctcagtttatt

SEQ ID NO: 2856 - DNA, 661 bp, Gossypium hirsutum
  Clone ID: GOSHI-09MAY01-C75082_1
ccttccacaaatgtaatctcatctcttctcttctctttatttagcattttacaacgaacaaaataacagtttcattttcgaaaagaatggaggttgggatgtcactaaatgcacttgtgaggcttcctttatcgagtacttcaagagcccatcacgaacctgtcgacgggttggtgaaacactcgctattcagctccagaacaacgccgttgcggttgccgcagcagacccggagacagcaacatggaggagggatgttggtggttgaagctaaagggaagaaaggaatggcggctcgtcaattccaaaggcctccacctcctcctttgcctaagattgaagacgatggcaaccctcggtttgttatcttcatacgcatggcaaatgttaatctttggtacccacttagtcttataactggtggcaccactgctaaaatcatggttgcagcaaaggacaatttcctcggaaaatacatctacaaagatacaattgctagaaatctcgcagcagttatttacagagatgagaaggagatacaaaagacagcatttaaacaattccgagttttgcaatctgctactgagttcagatatggctacaaacttgttgaaaacggtaatgtgaaagctgcactttctaccaatgatgttattgagct

SEQ ID NO: 2857 - DNA, 622 bp, Gossypium hirsutum
  Clone ID: GOSHI-09MAY01-C75052_1
cttccttccttttgacacacacacacacacaaaaaaaaatggggaactgccaagctactgatgcagccactctggttcttcaacacccgtgtgggaaagtcgagaggttttattggccgatgagtgctcgtgaggttatgaaaacgaaccccggtcattatgttgctctgcttatctctaccaccttatatcattcacatcgaaataacaacgataaagctccacaaggaaccagcagcaagaccaacgtcaaccctgttcgtttaaccaggattaagcttctccgccccactgatactcttcttcttggccatgtttacaggctcatcaccactcaagaggttatgaagggattgtacgcaaagaaacatgcaaagatgaagaaaagccaacaagaatcagatccaaatgagaaagatggtcagagatctgagccagataagcaaaataaggtgagcaaacatgacaggcagagagcaaggtcaacaacatcaagcaacaccggttctagatcgaagacatggcagccttcattacaaagcatctctgaggcagcaagctaaaaggatgattgatatttcggcacatcaatggctgcataagagacccaagcttttttttt

SEQ ID NO: 2858 - DNA, 488 bp, Gossypium hirsutum
  Clone ID: GOSHI-09MAY01-C75342_1
gaccgactcgtccgaatctctctcttcttctttttttttttttcgaattttggagcgaaagggggtggtaaatgcaagaaatccacttgatcgaaggtggccgtttgtttaacggcggcggcggcggcggcggcgacggagggggaggagacagaaagttacgagcacaccaccaagcacttaagtgtccccgctgcgactcttccaacacgaagttttgttactacaataactacaacctctctcagccacgttatttctgcaagaactgccgtcgttactggacaaaaggaggcgtcctccgtaacgtccccgttggcggtggttgccgcaaagccaaacgctccaaaaccaaacctttttccgaaaccaccgttcgcgccaccgccgtatttggactgtcacattcggagcaacaacaacgggaacaccaaaacagcgatcaacggaaagcagattcttattttatgtctgagagcttgagcctt

SEQ ID NO: 2859 - DNA, 920 bp, Gossypium hirsutum
  Clone ID: GOSHI-09MAY01-C76932_1
cttgagaagccagttgctgttgatgtagatcaattgaagaaagagacgttttctagccgcatccatcttcgtgtgtgtttagatggaggatatcatgtacttgatgaatctactcactacagcagggatctccgcccaacggcaaagcaactctggaggccaccaattggtgtcctggaacttggcatcttaaatgctgtaggtctccatcctatgaaaacacgagacgggaggggaacatcagatacctactgtgtggcaaaatatggtcacaaatgggtccgcactcgcacccttgttgacaatttatctccgaaatacgatgagcagtacacttgggaagtatttgatccagcaaccgttctcaccgttggtgtattcgacaacagccagcttggagaaaagggttcaaatggaaacaaggacctgaagattgggaaggttaggattcgtatttccacattggaagcaggtcgtgtctacacacattcttatcctttgttggttcttcatcctactggagttaagaagatgggggaattgcatttggcaataaggtttacgtgtatatcttttgtaaacatgctttaccaatattctcgaccactactacctaaaatgcactatgtaagaaccttcagtgtgatgcaacttgacatgctacggcagcaagctgtcaatatagtggcagcacgtgtaggtcgagcagaacctcctcttcggaaagaaataatcgaatatatgtctgatgtggactcacactttggagcatgcgtaaaaccaagcaaatgtcttcaggctaatgacagttttctctggattgtttggctatgggaaatggtttggagatatctgcatgtgggaaaatccaatcacacagttctagttcatgtgctctttctaatgcttggtggctcccc

SEQ ID NO: 2860 - DNA, 1036 bp, Gossypium hirsutum
  Clone ID: GOSHI-09MAY01-C76532_1
cctgcgacccaatttgctcccaaattgtaactcaaatcatcaactaaaaaaaaatcaaattcaacatttttttaattaaaaaaaatggaggtaactgccagagctccagggaagatcattctcgccggtgaacatgctgtggttcatgggtatactgccgttgcttcctccattgatctctacactgttttctctattcgtcttcgttctgaagacgacgatacagtaaaacttaagctcaatgacatcggattagacttttcatggtcagtcagaagaatcaaggaagtgctatctcacttaggttctccattttcttcgacacccacatcatgctcattggagaccattaaatctctcgccactcttgttgatgagcaaagtttccccgagacaaagattggacttgcttctggggtttatgcgtttctttggttgtacacctctattttagggtttaagccggctacagtcaccgtttcttctgagcttcctgtgggtgcgggtctgggttcatcggctgcatattgtgtttcactctcagcagctctattagctctttcagattccgtgaaattggacgtaagccaaaaaggatggtctacgtttaaggagtccgaggctgaattggtgaataagtgggctttcgaaggggagaagataattcacggaaaaccctctggagttgacaactcagttagcacatttggaaatgtgataaaattcaaatccggtgttatgacccgcgtcaattccaatatgccgctgagaatgctcattaccaacacaaaagtcgggagggatacaaaggctttggttgctaatgtttcggcaaggaaatcaaggcatcctgatgccatgtgttccgtgttaaatgccattgaagccatcagtgatgaatggtctaccatcttccagtcgcatgctgtggatgatcctatatttatctgccaatgaagagaagccccgagaagtgatggaaatgaatcatggtttgcttctctttataggtgttagccatgcatcgattgaaaat

SEQ ID NO: 2861 - DNA, 416 bp, Gossypium hirsutum
  Clone ID: uC-gsronu33B143f09b1
tccacgcgtacgcccacgcgaacgcccacgggtgcgcttatatccagggttgggcattctcaccggtgaacatgctgaggatcatggatatactgcctgagcttcctgcatcgatctctacactggtgactctctgcgtcttcgtcctgaagacgaagatacagtaaaacttaagctcaatgacattggattagacttttcatggacagtcggaagaatcaaggaagtgctatcccacttaggttctccattttcttcgacacccacataatgctctttggagaccattaaatctctcgccactattgttgatgagcaaagttgccccgagacaaagattggactcgctactggggattatgcgtttctttggttgtacacctctatattaggggttaagccggctacagtcaccg

SEQ ID NO: 2862 - DNA, 508 bp, Gossypium hirsutum
  Clone ID: GOSHI-09MAY01-C76522_1
gttacttccagccttacttctgaatttccagaagattgcaagttttatcctgcagatacgaaggacgacttgcacaagttcatgtggctttttaaggagcaaagactcacaacaccgcattggagaaatcaacggccttatcttattgctcaaaaagttgatatggtaccagatgactccagtccagagaagtgtacacttctcctcactggttatacgcctgctcacagcctctcagtgaaccagctggttcatgtgtctggtgcgggggattttcaattgagtagaattgaaattatgaaggatcctatccctttaaatgctaggaaagatcataatgctttggattctgatgacattcaagatgctgagatcattcgttccgtagctcctgatccatcaagccaggagccttttcttgtagagaatgttccagatccacttgctggagaacagacatggcccactgaagtagaaatggctgaggctgaaagaaatcaaaagcaga

SEQ ID NO: 2863 - DNA, 466 bp, Gossypium hirsutum
  Clone ID: LIB3493-021-P1-M1-H2
attgaattcaaacagcaagttaccatttggtgggccggtcttatgcgaggtgctgtctcaatggcacttgcttataatcagtttactagtttaggtcatactcaagtgcgagggaatgcgatgatgataaccagcacaatcacggttgttcttttcagcacagtggttttcggattgatgactaaaccattagttaggatcttgcttccttctccaaaacatctctcgagaatgctttcgtccgagccaactactcctaaatcattcttcctaccacttctcgacaatgggcaaggatctgaggctgagcaaggcaaccgaagcgtggtccgcccatccagcttaagaatgctcttgaccactccttcccacaccgtgcactattattggagaaaattcgatgatgcctttatgcgacctgtattcggtgggaaggggttcgtaccatttgttcccggatcaccca

SEQ ID NO: 2864 - DNA, 434 bp, Gossypium hirsutum
  unsure (1)..(434): unsure at all n locations
  Clone ID: uC-gsronu33B029b11b1
cttcattccacatctcttttatgtttccttttactcgaggaggtaaaataaatatagtagaaatttggaactcaattaagtttatgtttgttaaaactatgcaggttttcggattgatgactaaaccattagttaggatcttgcttccttctccaaaacatctctcgagaatgctttcgtccgagccaactactcctaaatcattcttcctaccacttctcaacaatgggcaagaatctgaggctgaacaaggcaaccgaagcngtgatccgngccgtccagcttaagaatgctcttgaccactccttccccaccgtgcactattattggagaaaattcgatgatgccttcatgcgacctgtattcgtgaagggggtttcgtaccatttgtccccggatcacccactgaacaaaacggccttcagtggcaatga

SEQ ID NO: 2865 - DNA, 1347 bp, Gossypium hirsutum
  Clone ID: GOSHI-09MAY01-C76612_1
cggccgcgtcgaccaaaaaatccatggcaacgcgatccctttggcgtacgcgcgccaagctagcggttgccgccactgccctttgtacgggaggtgcagccgctactatcgctacctctgacgaccccgccgcagctctcaagctctgcaccgccgtccctctccgccttctccgtgactccgcaactgctgcatctatcgtcttcgattaccagtattcattatggggactacccgaaggaagtaatgagagagctaagattaaacatgaagttcatttaagatcggcacgaaagcttcaagaactttgttttagaaatggaggaatttatatcaagcttggccaacatattgggcaattggagtacctaattcctcaggagtatgttcttacaatgagggagtcgatgttgaataagtgtccggtttcttcgtatgatcaagtatgtgaagtcttcaagaaggaacttggagagacacctgataaagttttcgatgaatttgatccaaaaccaatagcaagtgcttctcttgcgcaagtccatattgctcgtacgcatgatggtcaaaaagttgctgtgaaggtccagcacactcacatgacagatactgcagctgcagaccaagccactgtggaattccttgtcaacactctacatcggttattcccatcttttgattatagatggttggtcgctgaaattcgagaaagtttacccaaggagctagactttttgatagaggcaaagaacagcgtcaaatgtttggaaaattttcggaagctgtctcctcatattgcagattatgtttatgcaccagaggtgcattggtctttgagtacctcaaagcttttaataatggaattcatggacggtgcatatgtgaatgatgttattaccgtcccgtggcttggaatccatcctagtgatgttgcaagattggttagtcaaacttttgctgagatgatgtttaaacatggatttgttcattgtgatccacatgctgctaatttattagttcggccgttaccgtctggcaaaaggagaattttcggcaagaaaaagccacagttgatattgttagaccatggtctttataaagaactcgacttctctactagattcagctatgcttctctttggacggcacgggggccctctcccgcaaaatttggatatatttcttggatgcatttatagtttttatttacattactttgactttacattttcttaaagtacctttgctggaaatgtaacaccccttacccgagaccgtttccggagtcgagcacgaggcattacttagcttatcttaccaattcggagcataaaaactaggtttgaa

SEQ ID NO: 2866 - DNA, 798 bp, Gossypium hirsutum
  Clone ID: GOSHI-09MAY01-C76182_1
ccctcctctctttagaagccactacatttttatatcacccagaaggacaaaagaaaaaaatggaacaggcagccaaatctattgtttttcttgcatttgttctacttttcttcccttcatctggggtagctgatccattgacttataacgttcttaactatggagccaaacccgatgacaattttgactcaacccaagccttggttgctgcatggactttggcctgtggctccatcaatcccgcaactatttacgtcccgcctgggaggtttttggtgcgcaatgttgtttttcgtggacagtgcaagaacaatggtattgtttttcgtatcgatggcacgcttgttgctccatcggattataaggttattggaagtaccggaaactggcttctctttgagcatgtaaacggtgtttcgatttacggtgggataattgatggtcagggcactggcttatggacttgcaagaggtcaggcaaaggctgtcccagcggggcaacgtccttaggcttcagcaattcgcggaacattgtaataagaggattaacatcgctaaacagccaaatgtatcatattgtcatcaatggttgtaacaacgtaaaagtggaaggtgtaagagtgtcagcctctgggaatagcccaaacaccgatggcattcatgtgcaatcatcgagcggcgtcaccattctgaacaccagaatcggaacaggcgatgattggtgtctcggtgggcccggcaccaaccaattatggatgagaaggtggcatgtggacctggccatgggatcagcattgg

SEQ ID NO: 2867 - DNA, 642 bp, Gossypium hirsutum
  Clone ID: GOSHI-09MAY01-C76052_1
ccccgcgtccgggaaatgaacaatgtccaaaaagtggtgaaaacaacaaagttggggaagccattgccattgctaaccctaaaaccatgccaccaacgagtgtaatgacaaggctgatattgattatggtttggagaaaacttattagaaaccccaatacttattcaagcttaattggtctcacttggtcattaatctcattcaggtggaatgtggaaatgcctgcaataatagcaaagtcgatatctatactgtcagatgcaggtctcggcatggctatgttcagtcttggtctgtttatggcatggcatccaaagatcatagcatgtgggaattcggttgcagcttttgcaatggccgggtgattccttacaggaccagctgtcatggctgctgcttccattgctgttggtcttaaaggcgttctcttacacgttgccattgtccaggcagctctcccacaaggaattgtcccctttgtctttgccaaggaatacaacgtacaccctgatattctcagcacagctgttatttttgggatgctaatagctttgcccataacgctagtgtactacattttattgggtatatgaagtgggggcatgaccggtatcaaagaatttatggcatcacctcaaaaat

SEQ ID NO: 2868 - DNA, 701 bp, Gossypium hirsutum
  Clone ID: GOSHI-09MAY01-C77802_1
gcgcccacgcgtccgcccacgcgtccgataacctgatttttctcccccccattgctgccaaaaaatacaaggctaaaatgagtctcaacaagctggtagccttcatttacaccattgttggtgtaagaagatcagtaagtgatgaagggaaaagaacaaaagaagcaacaccaccaccacccacggcggctggctatgtggtggtgatggagggaacagcaatgggcagcagcagcagcagctacttgcagggatcaacagaaggagaaacatgttgtgtatgtttatcaagcatggaagaaggggaagaaacaagggtgttgccatgtttccatgaatttcatagggtttgtgtggataagtgggtgaatacatgtcagaagaattgtccaatatgcaggttttcaatgggggaagaagataggtttatgtttcatagaagggaagctttcactgaagagatgatgatatggttttcatcttttcatatagccggattctagccggaaattgccaggaattaaacccggctcttctgaaagccaaatatgcaccagacgacaatgaagttatcgtgatgttgaaatgtttttattgttttgtataaaatttcgtttcaatgcatatttgctcaaccttttttttttattctttcatcgtattttatttttctcaataatatcgttactcgagtttgaatt

SEQ ID NO: 2869 - DNA, 778 bp, Gossypium hirsutum
  Clone ID: GOSHI-09MAY01-C77762_1
cccacgcgtccgcccacgcgtccgcggacgcgtgggtagttatggacttgttcgttcctacttgttacattatggctatgaagatacactcaattcatttgatctggctagtaaaagcactatccctcctatctgtatagctcaagaaaatggctttgatgagcaggatgttgtttatgcactaaatcagagaaagactatacggcagctaatcaggaatggtgagattgatgcagctatgaacaaactccgtgattggtatccccagattgttcaggacgacaaatcagctgcatgctttctgctgcactgccaaaaatttattgaattgattcgggttggagcactggaagaggctgtcaagcatggaaggattgaattatataaattttttgggtcggctgaagctgatgatccatttgacgatttagtgcagaaatgcgttgctctgctggcatatgaacgtccacaggaatcccctgttggatatcttctcgaagagtcccatcgagatgttgtggcggacacactttattgcaatgatattgtcccacaatccccaaaatgagagacgtgcacggctgcatacaatcttatcttgagagactactccggcagctaacagcatgctgtttggagaggtcagccaatggcggtcagggtgaaactttccatttgcatcggcttcttaatagcagtagagagatataagtggtagctgacatatgtgtaaatttgcatccctcgactgtgctttaaatctcttttatgtccacct

SEQ ID NO: 2870 - DNA, 521 bp, Gossypium hirsutum
  unsure (1)..(521): unsure at all n locations
  Clone ID: LIB3585-032-P1-K1-D3
tggaccaagccgtccgggctncctctctttttttccttttttttaatattttcccagctataccaagttccaaaactatgttttaggttccaataaatcatattttatcctattgaattacgttttatataatagtgaattgtgttctagtttgcattactcgtaccagatcgacctgccttggagcgtggtccttcaagtgcctttaattccccattctggaccaccaattctggtgcaccagtttggaacaataactcatcgctcactgtcggagcaagaggtccagttcttctggaagattaccatttggtgtaaaagcttgctaattttgatagagaacgcattccagaacgtgtagttcatgctagaggagcaagtgcaaaagggttctttgaggtcactcgtgacatctcatctcacacgtgctgatttccttcgtggccctggagtctagacaccacccattgttagattttccactgttatccatgaacgtggtagtcccgaaactctgcgag

SEQ ID NO: 2871 - DNA, 256 bp, Gossypium hirsutum
  unsure (1)..(256): unsure at all n locations
  Clone ID: LIB3585-005-P1-K1-E1
cccacgcgtccggtngcatttttcacaaaacctggaggtgctaaaccagagactaagcaacactttggtggcaggtccagttcttctggaagattaccatttggtgtaaaagcttgctaattttgatagagaacgcattccagaacgtgtagttcatgctagaagagcaagtgcaaaagggttctttgaggtcactcgtgacatctcatctcacacgtgctgatttccttcgtgggcctggagtctagacaccacc

SEQ ID NO: 2872 - DNA, 1102 bp, Gossypium hirsutum
  Clone ID: GOSHI-09MAY01-C77632_1
aaactttcaacatattacctgagatcctaactccatggtggtaggagcttcatttcatgaaaagaacacaattttaatgacgcacgcgtggcttcagagggagaagaaactagggaatttccctgcagtgtggattcggtggaaggagatgctaacctctctgttcttccatctcatgttgctgataatttggacatcaaggatcatgtgagcttagatgatctagctactggaaatgctcttgcagaaagtgtcgtcgtctctactgctgcttgtggttctgctgactttgatgatgctgttgataatactacttttcagacttcaaatttgattggttcggcatctggaaatctaatgtatttggaagagtctccttctggtgatggagatctatgtcaggaagaattggaatctaatgaggttatttctcaaggatgtcttacaggcttagagacacgagaagaaacaaatccagtggaaggtgctccagcagatatagtttccacttcatgcaaatcagtctctcacaactgttccaatttagaagacgatagtcagcatttatcaccggttcaaccaaccaaaaatcgtttgacttccattgatttaactgcaacaccaacttctttagaattgagtaatcaagagtctgaatcaaaaatttgagtaagctgatggaaaaaagagcagatatggtgtcttcaccaagccattgcttatcagaaaaagaaacttctttcgagcagtccttagacttccctacccatcagcttgatatcgggaagcctggctatagttgaagatggttcaaatatttcacatctcctgtccaatcagatacaaaattcttttactcattccgaccaaggcttttcaagtaaaccttcattggagttttcacagcaatcagattggcaaagtaagcaagaaagatatccatcaggttctattcatcctgcctttggcctgcttccagaggcaaccaaagttagcatggaggaaatgcctccattgccgcctcttcctccaatgcagtggaggttagggagaattcaacatgtttctccagcttcacaaagagaattggtcgaacagggtc

SEQ ID NO: 2873 - DNA, 910 bp, Gossypium hirsutum
  Clone ID: GOSHI-09MAY01-C77142_1
gtgcgacgaaaatgcaaacaaggaaaccatctctatgtgtagagtttttcttgttccgagtgacgaaatgcaggagaaagtgtctagggctcgtattggcactgaaaatcatttaccacaacctcctattctggaggctaactgcggtacgggaataggttcctcgagcaaccatcaggtgaacaagcatgatgagaaagaaggattggctgttgcagggaccattcccgttccagagcatcaagatgaaaatgatgttggaatggattgtttcacagatgcttatattgattctttttcacgtggtgactttctggaaatgaacgatctcgtcaaccatgtatcttcttcgagttccggtaattcaagcgctccaagcatgtcgtcagatgaatgtttcgactcaatggctttcttacaagatctagatcaagacctagttttggaacagaatgacatgggtaaaaagcttaatgtctctgcatccaacaggttggacgaggtggttttggttccggctgctttaggatctgttgttagtattggaggcaacgattcgctagtaatgaattgttaaaaaccactagctctgtacctaattcagctaataacaatgagatctcaaagcatgcttcggggaaccaaagggatgaaggtccatcatcatcatcatcatcatcatctgttaaaccgaaatctagtagaaggaagagagatgcttgggtagaatgaaagagcttcgaagaagtactatgcttatgccattttagatctcagaggtatgtgctttttttgtaagatatccaaatatgagtatacaagtgtagattaaattataactctcacctagctcttaacaagcttagcggattattgactattatcatattcatgtgtagattttactgtt

SEQ ID NO: 2874 - DNA, 357 bp, Gossypium hirsutum
  Clone ID: GOSHI-09MAY01-C77362_1
cccacgcgtccgcccacgcgtccgaaacaagcatgcttgagggtgttgaagcagcccttggactaccaaaaggatcacttccgagacctatttacagtagagttcagctatggggtgcagctcttccgactaacactccaggtatcccatgtattttcgatcctcatggaagggccggtttctgcggcgatgggttattgggatctaatttagagtcggctgctttaagtggcatggctcttgccaatcatatggcagactatttacaaagtgatggagcatgtcctgaagagtttgctgctggcttatagaaggaatttggggcaattgaaggacatgatattggacaatttgaac

SEQ ID NO: 2875 - DNA, 800 bp, Gossypium hirsutum
  Clone ID: GOSHI-09MAY01-C77252_1
caatgggaaccaaggggtcccactcaaagggcttcagctttagctgccttatcttctgcattcaatccatcttccaaatcaacctcttcggcccaggctcgatccaatggaaataatggcggacctacacaaagagcttcagctttagctgctttgtcatctgcattcaatccatcatcagcaagcaaaacgtcagctccaaagccttcaagcagtggtcagggttctcaaagggcagcagctgtagctgctctttcgtcggttcttactgctgaaaagaagaagcaatcgcacgatggatctcctacaaaatccactagcagcactcctgctgtatccagcccactttctgaagcacagagtgaggcagacccttctgaagctgaggattctcaattggttgctgaagccaaggagactggtgtagcatcccaaaccaatggggatgattcagaaccaaagcaaaagataccgcaggacgagaatgggagtggaagcactcaaagtgcatatagttatgagcaactgaaagccataactggtaatgctgcaaccggaattgatctcaaacggagagaggcttatttggcggataatgagttccagacagtattcggtatggaaaaggaagcattctataaattcccaaagtggaagcaagacctgaagaagaagacagttggtctattctaagtgttaggggatttaaacaagttattatgtgcttcatctccattcaactagcaatccgtcattcattttgatcttggtcctgccaaaaatattgttcgttggatatg

SEQ ID NO: 2876 - DNA, 658 bp, Gossypium hirsutum
  Clone ID: GOSHI-09MAY01-C77272_1
cccacgccgtccgatggaagctttattgtgtaagaaattgggtgatccagcatcagcctcagtcggaaatgaatcggaatcgtcttcgtcgcccattgaggtcatcagaaactatcccatcccgcaattaaactctccaactgccgtgagagtcaaagtgaaagccaccagcttgaactatgccaattaccttcagattttgggcaagtaccaagagaagcctcccctccctttcattcctggctccgattatgctggcactgttgacgccgtcggccccgccgtcaccaagttcaaggtgggcgaccacgtctgctccttcgccgccctaggctccttcgcctccttcatcgtccaagaccaatccctcctgtttgggttgcccaaagggtgtgatctggtggcagctgctgcactccctgtcgcctttgggacctcgcacgtagctcttgttcacagggctagcttgtcctcttcccaggtattgctagttcttggtgccgctggaggcgttggtttttctgctgttcaaattggcaaggtttgcggtgcagttgtcattgctgctgccaggggagctgaaaaggtgcaatttttgaagtccttgggtgctgatcatgtggtggacttgactagtcaaaatctaactgcaagtgtc

SEQ ID NO: 2877 - DNA, 424 bp, Gossypium hirsutum
  unsure (1)..(424): unsure at all n locations
  Clone ID: LIB3825-023-Q6-K6-H6
ccccgcgtccggaaacaggnaactttattgtgtaagaaatgggtgatccagcatcagcctcagtcggaaatgaatcggaaccatcttcgtcgcccattgaggtcatcagaaactatcccatcccacaattgaactctccaactgctgtgagagtcaaagtgaaagccaccagcttgaactatgccaattaccttcagattttgggcaagtatcaagagaagcctcccctccctttcattcctggctccgattatgctggcactgttgacgccgtcggccccgccgtcaccaagttcaaggtgggcgaccacgtctgctccttcgctgccctaggctccttcgcctccttcatcgtccaagaccaatccctnctgtccgtcccctgcttaattaaatttattcaattcaattcaaaagtactgat

SEQ ID NO: 2878 - DNA, 541 bp, Gossypium hirsutum
  unsure (1)..(541): unsure at all n locations
  Clone ID: LIB3583-012-P1-K1-D8
tgggatctgagattggcatgccttctcttgtatgcatttgataaggaggataacttttggcaactatatggagacttcttacctagtgctgatgagtgcactagctngcttcttgctgctgaggacgacctctcacagctgcaggatcctgatcttgtttcaactatgaaaaatcaacaattaagagccttagaattttgggaaaagaactggcattccggtgtccctctgaaaataaagcgccttgctcgtgatcctgagagattcatttgggctgttagcattgcacagtcacgatgcattaacatgcaagttaggatcggtgcactagttcaagatgcaaatatgctaattccctatgctggtctggtgatcttgctgcacgggactcctctatttttcatttctatgccttcttgtctatgatggctggtcaaaaagttaaaagaaatgcaggccctgataagattttttgtttttcttatagaccattcctttcaactggttctcttcatttatgggctttttcgaccaaatcttt

SEQ ID NO: 2879 - DNA, 511 bp, Gossypium hirsutum
  unsure (1)..(511): unsure at all n locations
  Clone ID: LIB3583-012-P1-K1-B2
tggcaactatatggagacttcttacctagtgctgatgagtgcactagcttgcttcttgctactgaggacgacctctcagagctgcaggatcctgatcttgcttcaactatgaaaaatcaacaattaagagccttagaattttgggaaaagaactggcattccggtgttcctctgaaaataaagcgccttgctcgtgatcctgagagattcatttgggctgttagcattgcacagtcacgatgcattaacatgcaagttaggatcggtgcactagttcaagatgcaaatatgctaattccctatgctgacatgctaaatcattcatttcaaccaaactgttttctccattggcgttttaaggatcgcatggttgaggtgatgataaatgctggacagaggataagaaaaggagaggagatgaccatcaattacatgaatggacagcaaaatcagatgctcatgcaacgatatggattctcatcatctgtgaatccttggngttcaataccat

SEQ ID NO: 2880 - DNA, 515 bp, Gossypium hirsutum
  Clone ID: LIB3585-063-P1-K2-C8
ggcgcgagcttggatgcaaactatataatggatgcacctattcgaaataacaatgcaagcgtggatgcaaacttcggaatgggacatatgataggtctcggattccccagacatcaaattgttagcaacggctatgccgcagggtactcgatttttgcacaaactgttatgggggaatcttctaatggtaccgaaaatggaaaccggactaacagtttgttacagccagctgtggctcctcagaacaagaagaggatcgtagacggtccaccggaggtggtggtggaaaggaggcagcgccgcatgattaagaaccgagagtctgccgcaagatctcgagcaaggagacaggcatacacagtggagcttgaattagagttgaatcaactcaaacgggagaatgcaaagctgaagcaacttgtggtaaacaaatattttccttgtaaaagtgaaaattgaatttttacaataaaggaaccatggtcaataaataacacaatttttttggcgatttt

SEQ ID NO: 2881 - DNA, 484 bp, Gossypium hirsutum
  unsure (1)..(484): unsure at all n locations
  Clone ID: LIB3582-015-P1-K1-F9
gcaagatctcgagcaaggagacaggcatacacagtggagcttgaattagagttgaatcaactcaaacaggagaatgcaaagctgaagcaacttgtggaggaaaacgataaaaggcgaaaggaagaggttttgaagaggaagaaggaattgacatgtgcaaaaaagaaggttgataagatgatgacattaaggaggacagtgagcttgggatggtgaactaagaatattaattgaaaatcataaattaatgttatatacatatgcatatgtatatgtatacatctaaataataatatgtccaaatcaattataattttagtatgctgaagggtgtatttgagcaagttatagagtgtgtaataatcacttataataatgttaaacttctccaataataaaaataatttttaattcttgtattttaccnnnnnnaaaaatnnnntntnantacaaaaaatttttnntaataaaaaaaaatacaaaa

SEQ ID NO: 2882 - DNA, 536 bp, Gossypium hirsutum
  Clone ID: GOSHI-09MAY01-C71982_1
ggcaaaaaccaccaataggatatgaagatcactgccggaattcccccggtaagacgagtttatttatacatgggagtgctgaggtagaagtatgtacgacattatcccaatagaaaatactgttctattattgagcctaaatgacccaaacccaagtgcatttttcctgtaaaaatcccattactgtgttttcacaggaattgaattacgatgcttaaaatttggaataaaattttggtgttgacagccaactgtttgcgactgacttgactagttgcaagtgtgaggatatcagatatgacaccggcaatttaatgtcagtgtcagcaggatgtagatgtccactacagtcttcaaattcaagggatctgctttattatatttcaatctcgtcccaatccacggatctgtcttcaaattccagctctaattgtagaagcctgttattttgagctagcctgctcattgcagcaagacctgaaacaagaaccaattattgatgatgaacaatgaaaatacaatgaaacaactttatt

SEQ ID NO: 2883 - DNA, 615 bp, Gossypium hirsutum
  Clone ID: GOSHI-09MAY01-C71662_1
ctgtttttttttctcttgatgggtgcgtatgggggtgttttattcattaaccaagggggtttatcatctgtttcatcatcgtcacccagtttgggagatttaccagagagctgtgtggcatcaattattgggtatttggatcctccggagatatgtaaattgggaaagttgaacagagcgtttggaggtgcttcttgggctgattttgtttgggaatcgaagttgccatctaattatcaagtttttgttgataaaattctaacttttgtgcctgaaaatttgggtaaaccagaaatatattcattgctctgtacaacaaatactcttgatggtggtaccaagaaagtatggctagataagagcagtggtggtttatgcatgtcaatatcttcaaagggattacatataacagggattgatgatcgaagatattggaatcatattccaactgatgaatctagtgtaatccatggatctccatttctagatgcatggtgatgattatgatgattgtctaaatggttccattcgatcgcatatctgcagcaaacctggtggtttgaagtcgacggagaggtggaatttccctttccagcaggaagctatagcgttttc

SEQ ID NO: 2884 - DNA, 554 bp, Gossypium hirsutum
  Clone ID: LIB3582-032-P1-K1-B5
taataacagacaaaacacattaaaaaaggagagaaaaaaaaaaagcaaagatcctcaaaaaccaagcacgcgtccatcttcgccacctctctgtttttctagctctatctctttacctccttcttttatgatttataaagcaatactctgccttaagaactctctagttctctgttttgtttctcttgatgggtgcctatttctctgctttgttcattaaccaagggggtttatcatctgtttcatcatcgtcacccagtttgggagatttaccagagagctgtgtggcatcaattattgggtatttggatcctccggagatatgtaaattgggaaagttgaacagagcatttagaggtgcttcttgggctgattttgtttgggaatcgaaattgccatctaattatcaagtccttgttgataaaattctaacttttgtgcctgaaaatttgggtaaacgagaaatatattcattgctctgtacaacaaatactcttgatggtggtaccaaggtgtggtcttttacttccctttctttcattgtttttgtttgg

SEQ ID NO: 2885 - DNA, 578 bp, Gossypium hirsutum
  Clone ID: GOSHI-09MAY01-C71102_1
caatcttgaagtagcccatcatcatatcatacggtggaaaacaaaagtaaggcatccagttactgcagctttggtcatctaccggttagtctaataatacactactctaagatacgatacatatgcctttggttctgctgtaatggatctcttgtagtactgcaacaagttgtttcaagagtgcaaatgtagacacccgaggttgggtttgtactcaccctcagggaggctacatgattgatacaaataggataggggagccctgaaagttagaactgggatttgatgcgagtttcaacaggttttaatcttatataaatcttttgcaaaaaaatcgtttctcatcatttttaacaggcttcaacttgagcaatcaggaatttgctagtttaaacccaatcatgatggcagtactccaagtgaatgcatctctgttctgtttctgaatatatgtatgtaaagcttatggtaattaataatgcatgggacttgcatgcttaagataaaattgggatcaaattttgttattattatattacttattttcatccattattaaaagggagtgtttatatttt

SEQ ID NO: 2886 - DNA, 1379 bp, Gossypium hirsutum
  Clone ID: GOSHI-09MAY01-C71352_1
ggaaggataaataaataaataaataaaagaaaatccagattttaacatcacagatttttgtctcaaacgaaaaatcgacagatggagttgccggtgatagatctagcgccgtatttggcgattgccgatgccggaaatcgtggaagtgagtctacaaagcgagtgagtggactcaccgagttgtgccacgaggtgagtcgactcctcaaagaaaccggggctttactggttaaggatccacgctgtacggctgaagataacgataggttcattgatatgatggagaagtacttcgagaagccagctgaattcaagcgcttgcaggagcgtccctttttacattaccaggttggagtaacgccagagggagtggaagtgccaagaagcttggttgataaagaaatgcaagagaagttaagggcaatgcccaaagaacaccaaccattaactcccaagggccctgatccgaagtggcgatatatgtggagagtgggccctcgcccttcaaagacccgctttcaggaacttaattcagaacctgtcatacctgaaggtttccctgaatggaaagagaccatggactcatggggatacaaaatgatatcggcaatagaggctgttgctgaaatggcagcaattggatttgggttgcctaaagatgcattcacttcccttatgaaacaggggccacatcttctagctccaacagggagtgacctcaaacgttatgggcaggagggcactgtttttgcaggctaccactatgaccttaactttctaactattcacggcagaagcaggttccctggtctaaacatctggctaaggactggggaaaagattgaggtgaaagttccaataggatgtcttctaattcagactgggaagcagatagaatggttgactgctggtgagtgtactgctggtatgcatgaagttgttgtcacaaagaggacaatcgatgctataaagttagcatcagagcaaaatcgtagcctatggagagtatcctcaacgttgtttgcgcacatagcttcggatgctgtgttaaagcctctcggacactttgcagaatcaccccttgctagcaaatatccatccatatgtacgggagagtttgttgaacaagagctttcagtaattaatctgaaaggaaataaaggggaatcatgacaaaccggttcgtgtcttgtaacaaatcatacattatcctttgttcaagggggtttaaataatttatttgcaagaagggtgattgacattatggcatatcaaaatgtcaaatggtacgatattcttttattcattcttgcaaattcaatttaaaatataatacgctcttatgattttatcattagtgcataaattggatttcctcc

SEQ ID NO: 2887 - DNA, 1310 bp, Gossypium hirsutum
  Clone ID: GOSHI-09MAY01-C71322_1
tcgcgatctattgtggttcaaccttgtgttggtatttggagtgataaatgcacttccaaatatggtagaaggcggccttttatccttgctggagcgctcatgatctctcttgctgtgataataatcgggttttctgcagacattggatacttattaggtgatacgaaggagcagtgcagtacatttaaaggtacacgaacaagggcggcttttgtctttgttatcggcttttggatgttggatcttgctaacaatacagtgcagggaccagctcgtgcccttttggctgatctatctggtcctgatcaacataattcttcaaatgctatattttgctcgtggatggctgttggaaacatcttgggattttcagctggtgctagtgggagttggcacagatggtttccattcttggaaaacagagcttgctgtgaagcctgtgccaatttgaaagcagcatttcttgttgctgtagtctttctcttgttttgtgctggtgtgactgtatgttttgctaaggaggttccgcttccactgccagcagatcagccaactcgtttatcagattctgctcctctgttggatggttccactcaaaaggctttcaacactcaaaatcaaaagctgatgcatccattgttcccaatgaggatgggaacattgcctgaaaatggctatgaatgggtgtcaaattccaagcttgccaactcaaacgataacaatgctcaaaatgaagtttttagtgatgggcctggagccgtactggtcaacttattgaccagcttaaggcatttaccacctgcaatgcactcggtgcttattgtcatggctcttagttggctttcctggttccctttctatttgatacggactggatgggaagagaagtatatcacggagatcccaaagggaatgctgctgaaataaagttgtatgatcaaggtgtcagagaaggtgcatttggtttgctattaaattctgttgttctgggggttagttcgttccttattcgacctatgtgtcgacggatggggtcaagacttgtttgggccacgagcaactatactgtttttgcctgtatggccgtcacagctatcattagtttggtatctgtcacagaatatactcaagggatcgaacatgtaattggtgggagtgcagcaatcaggattgctgccttgggtgttttcacccttcttggctttcctctggctattacctatagtgttccattttctgttacagcagagttgactgcagattctggtggtggccaaggattggcaattggagttttgaaccttgcaatt

SEQ ID NO: 2888 - DNA, 478 bp, Gossypium hirsutum
  Clone ID: GOSHI-09MAY01-C71252_1
cccacgcgtccggcgtggatagcagggctcttcatttcattttctaccttgccttgcctccctactctcacctcatttcacataaatatggttgttccaaccaaaaaagctatgaaccaaaggcttgcgtcgtggacgttgggtgttgggttgtttgtagtatcgcgtgtggcagagcttgagcggtttgaacacgcaggcaaaccagatgggtctctgagcttcttggtggtcggagattggggaaggagaggacactataaccaatctcaagtggcttttcagatggggaaaatcggagagcaattagatatcgacttcataatctcaaccggcgataatttttacgacaatggtctgaccggcgttgacgatccattgttccatcagtccttcactgatatttatacagctctccagcttgcaaaaacaatggttcaatgtgttgggtaatcatgtttttcaggttcaagctgag

SEQ ID NO: 2889 - DNA, 639 bp, Gossypium hirsutum
  Clone ID: GOSHI-09MAY01-C72992_1
cgtcgatattggatcatcttgcttttgcgttatctgtttcgggggaactaagagccttagctcgtcaggttgaagaattgcagcccgagatcatggaaagaaaagaacaatatcgtacgttggctctctgctattatggggaaggtgaggagataattgctttgaatcttttgcggaatcttttgaatagccgagacaatccggactgtgtcctggaattgtggctagcctcgaaaatgggtggggagaatatgaattatatcgaggaagggacaacttgggcacggaaagctcttgtcggattgaatggtgggtgttggcagatggtgagcaaagcaaactgcttactgggagttctattatcggctcagtcaaggatggtttcttccgattctcagagaaatttgcagcagtccgaaacaattgaggtactcgaaaccgcagaaaagctgatgaaagaaagtgacccatacatcgtattccatatttgcctagaaaatgccgagcagaggaagttggatgttgcacttcactatgcaaagcagctcttgaaactcgaagcagggtcctatgttagggatatgtccttttggctcgatatgtcagctcaaaacggtttgtgatgcgagacggtattac

SEQ ID NO: 2890 - DNA, 914 bp, Gossypium hirsutum
  Clone ID: GOSHI-09MAY01-C72502_1
aaataacaactcatttatgccgggtgttttgtttggtgacttggtcgttgtcgtcgtcttttcttcttcaatagagtcagaatgtcttacgcttacctcttcaagtacataatcatcggtgatactggagtggggaaatcatgcctcctccttcagttcaccgacaaacggtttcagccggtacatgatcttaccatcggggttgaatacggggccaggatgatcaccatcgataacaaacccattaagctgcacatctgggacaccgcaggtcaagaatccttcagatccatcacaagatcctactacagaggtgctgctggtgccctgcttgtctacgatatcaccaggagggaaacttttaatcacttggctagctggttggaggatgccagacagcacgctaatgctaacatgactattatgctgattggtaataagtgtgaccttgctcatagaagggctgtaaccaccgaggaaggccagcaattcgccaaggaccatggtttgatcttcatggaggcctctgctaaaactgctcagaatggttgaagaggcatttataaaaactgcttcaaccatatacaccaggattcaggagggggtttttgatgtctcaaatgaggctcttgcctcttcaacccgtgctcacatctcctacatagattcttgaatttaatcacatttgcgcatactgcgctctaaaagagttgttgtgttagaggttatgaccttgtagaatctcttgaaacctgagggttgaactatagcgcttctattttaaatttttaacctaattaattttaaaggaggtcaaaactttttttaagctacatctactagatactactttatccttgttgggatagagagattatttgagggtaaacctgataaaatcgcttttttttgag

SEQ ID NO: 2891 - DNA, 622 bp, Gossypium hirsutum
  Clone ID: LIB3543-044-Q6-K6-A9
cccagcgtccgcttttcttcttcaataagtcagaatgtcttacgcttacctcttcaagtacataatcatcggtgatactggagtggggaaatcatgcctcctccttcagttcaccgacaaacggtttcagccggtacatgatcttaccatcggggttgaattcggggccaggatgatcaccatcgataacaaacccattaagctgcaaatctgggacaccgcaggtcaagaatcctttagatccatcacaagatcctactacagaggagctgctggtgccctgcttgtctatgatatcaccaggagggaaacttttaatcacttggctagctggttggaggatgccagacagcacgctaatgctaacatgactattatgctgattggtaataagtgtgaccttgctcatagaagggctgtaaccaccgaggaaggccagcaattcgccaaggaccatggtttgatcttcatggaggcctctgctaaaactgctcagaatgttgaagaggcatttataaaaactgcttcaaccatatacaccaagattcaggatggggtttttgatgtctcaaatgagtcttatggcataaaagttggatacggtggaattccggggccatct

SEQ ID NO: 2892 - DNA, 342 bp, Gossypium hirsutum
  Clone ID: GOSHI-09MAY01-C72432_1
attaactgatataccaatacgggggtggcactgagcagagattaactaacgacatgagaacatgagacaaagcctgctcaataatagcacacgtcaagactattctactatgaatcttcaaaagaaaatctatgctattcgatgtttcttttgatgtctagggcatgaaacaagtggtaatttgatactctttggtgactcaaacgggaacctaactggattagctgctgattcaatacctcaaatcctgttaaaatacataactttgtttcttggagcttattttcactacttcgaaggagaaaactttctagaaaaggagttggatggtgcaagggattt

SEQ ID NO: 2893 - DNA, 637 bp, Gossypium hirsutum
  Clone ID: GOSHI-09MAY01-C72672_1
cccacgcgtccggtttaagaagcttttgacatccatggatgacatcaaggtgccacacaattctcaatcggggttctaatactgaaactagttctgatcatggattgaccaatgatgatcttgaggatgataatctacaaaatgtggcttatgtggtttcgaggatgaagagtcatatttccgtccagctactcattttagaggtcgtgactgatatgtacagaacacacctacaattcttgtcagctgccaacataaatatcattgttgagatattttcttccagttcggcacatgctctgcaactgaactctgagacaacaatgcaaaagaaaatacaggtagcatgctcaatcttggagctctcagaacctcccatgcttcactttgagaaggaggcttatcaaaatttcctcgacttcctcgcaatattttgtcataaaagaatcttgtccatttccaaggagatgaacctagaattactgcttgtagcagtgtgtgaaaaaataatgaaaatatacctcaactgtactactgtgaaccataatgtgcaacggaaatcgggggacaaggtggtagtggtgactcattggactcttccattaagttcagccaagaaggaagaattggcagctag

SEQ ID NO: 2894 - DNA, 761 bp, Gossypium hirsutum
  Clone ID: GOSHI-09MAY01-C72602_1
cttttctctctttccaaaaaccctttcttttatatcttcagctacaaattcagagatttttttgaccccacttttcctcttcttctaccttatataacacccacatagatatctatgtatgttttatggtaagaattttttttcttttattacaaaggaaggaatatatatttttgttatttttttgttgttgccattgtggctaccacaagagggcagctaccgtcagatacaggaggagcctttgcagattgggcgacatcatcgtccacagcaattcgagctggccccgatgatttattatcactcggtttcaatcccaacgccgcttctacggcggcgactgcggcggctccggctcaatggcctccttctgctcgtccgatcaactatggacttgctggtcctgagatggggatgggtggtctacgggactttgtcctccttgctcctgctgcttcttttaaccatcatcatcatcatcaccatcatcatcatactcaagatcccatcatggtgaatgaacaaatcaacggtccgagttccgccgccgccgctgccaccgcactaggtgtcggtgttatcccactcctaacagcgtctccttggttacctccacaaaatgtggaagacactggtaagttcagtgggatgcaactatggcagaacccaagttcttcgcattatcttaaaaaaccagcttcccttcttgataataatccctccatgatggctggggaccgccggggaaatggtggagg

SEQ ID NO: 2895 - DNA, 503 bp, Gossypium hirsutum
  Clone ID: GOSHI-09MAY01-C72182_1
cggacgcgtgggccttgatccaaatgaactatctcaaggcagtaatgcctatgtcgggaagttgagttcggattttctaggtaccaactttaaaatctatgatagtcagccaccgcacagtggtgctaagccctcgagcagcagagcatgtcgcagatttgcatgtaagcaaatctgcccccaagttccagctggcaattttgaggttggacaagtgtcttacaagttcaatctgttgaaatcgagaggtcctaggaggatggtttgttcaatacagcgccctttgccggaagatatggctgatgagaagtatttagatgacatccagatgaaaatgcccgagcatgcctcatccggtcatacaattttgtggaacaaagctccaagatggcacgtacattttcagtgctggtgcttaaatttccacggtcgggtaactgtagcatccgtgaaaaactttcagctggctgcaactgttgaagagagccaactgggagggaaag

SEQ ID NO: 2896 - DNA, 679 bp, Gossypium hirsutum
  Clone ID: GOSHI-09MAY01-C72062_1
cttttgagccctaatgaaatcaatggatagcagaggagttttggtggggaggaacatcatgttcttcttcctcatctgcgtgcttggttggagttcgaagctgtcggaagctcaaatggtgccggcgttatttgttttcggggactcccaagttgatgttggaaacaacaaccaccttttcttttccattgccaaggctaattttcctcacaacggcgttgattttccgacccagaaagcgaccggaggattttctaatggcaagaatgcagcagattttctggctgaaaaattagggttgtcaagttcaccagcatatctttctttgtcaagtaacacgcatgcatcatacatgaacggtgttagcttcgcctccggtggttccgcaatcttgaatacctccagtcaagttctcgggcaatccatacctctttcggatcaagtgaacaacttcttatcagtgcataaagtcatgctgcagaagatgggaactgatggtttagaaaaacatttttccaagtctcttttcgccattgttattggtagcaatgatatcttgaattactttgaatccgaagatgaaaaggacaccccggaacatcttgtgaattcaatggttaacaacctgaaagcagaaatcaagaaattatacggattcggagcgcataaaattttggtg

SEQ ID NO: 2897 - DNA, 876 bp, Gossypium hirsutum
  Clone ID: GOSHI-09MAY01-C73882_1
tgcagcatttgtgtgaaatactactcctacaccactttcagctttgattgtcttccatcctttcccgtgaccaacaccgtggcagccgcaaacgccgaaatatctcgctgcgttgcggcctcttccagacccatcttcgatgaacccacaattgctactcaacctcctttggtaatacgaccctaccgcttgttctcccaaaggtttccgcttctttctttatccctgctagaaaggaatagcatctctagtacccgcttgcgttccttgccaaacgactctgatgcgtctggtggcctaacttataaggatgctggtgtcgacattgatgcggggtctgagctcgttagaagaatcgctaagatggcacctggtattggcggttttggcggcctctaccccctcggcgattctttccttgttgctggtactgatggtgtgggaacaaagctcaagctagcatctgagactgcaatccacgaaactattgcgattgatcttgttgcaatgagtgtcaatgacattgttacttctggagcaaagccattgttcttccttgattattttgcaacgagtcaccttgatgttgaccttgctgaaaaggttataaagggcatcgtagatggttgtcaacaatctgactgtgctctgttgggtggagagactgcagagatgcctgatttttatgccaacggtgagtacgatcttagtggctttgcagtaggcattgttaaaaaggattcagttattgatgggaaaaacattgtggctgaagatgtactgattggcctaccttcaagtggagtccattcaaatggtttctcttttgttagaagggttttggctaatatgggcctttctttaaaggatcaactc

SEQ ID NO: 2898 - DNA, 856 bp, Gossypium hirsutum
  Clone ID: GOSHI-09MAY01-C73802_1
ctcagacacctctccttccctctcttttgtttctgcgcaacaatattacaaaccatcttcttcttccttctataaccaacatgcccatgtaccctcttctctcttttgtttctttccctttctctctcattcaaccctttcttttcctaaaactatgggctcctctccttggattctgatactatctctactgggatttcctgcaaaaaacctttcatcttttttctgggttttcaatctccagctttatctccattctttttctaagctgtgatgtttttaatccataagaaagttgctgtctttagctccaacctcactgcttcttcgtctaaaatttgagatttggagccaaaattgaagggaaaacgtaatgtgggttctaatcagcaagtgattgtatttgttgttgaattttcatttgataaaaagataaagctcatataatggcatatttgtacttgtcatttttgcttgtttggtttctatcgaaatcatttcttggggaggctcagctcaatgaccaagctacattgttagccattaaggaagagcttgggggtgtagcaggttggggtgataacgaaacagattactgccgctgggaaggtattcgttgtggcttggaccattcccttgttgaaagactggatctttctaggcgtatgcttagaggtaatgttactctcatctctaatcttaaagcattgaaggagctcgacctttcttttaataacttccatggacggattccttcagcttttgggaatttatctgagcttgaatatctggatctgtcatcgaataagtttgaaggttctattccagtggagttgggtggccttagaaaccttag

SEQ ID NO: 2899 - DNA, 491 bp, Gossypium hirsutum
  Clone ID: GOSHI-09MAY01-C73432_1
cggccgcgtcgacctcgcttttttacttccttcatttctctctgctatctctctccttccctcctaacccttttttttttcttctctgaggtcggttctttcttcttcatcctttctctccctctgcaaatggctcccctcgctgtgatttccttgtccctttgttttctccttccacttctttcccctgccatttcaaccaactctgaaggaaatgctctgcatgctttaaggaggaggctttctgaccctaccaatgtgttgcagagttgggaccctacgcttgtcaatccctgcacttggtttcatgtcacctgtgattcccacaatcatgtgattcgcttggacttggggaactctaatatctctggaactttggggcctgagctagctcaactccaacatctccagtacttggagctgtacaaaaatgacataagtggggaaattccaaaggagttggggaatctgaagaaccttgttggcttgga

SEQ ID NO: 2900 - DNA, 632 bp, Gossypium hirsutum
  Clone ID: GOSHI-09MAY01-C73682_1
cgcgcgtgcgacgaattatccaattactagaggaccaactcgttctcacaatcaaattaatacaaactgtttacattccaggatggaggtttttgccaacaaagacaaacagggagatgaagatgaaacacagagacataaaagagtcgcttagggaaatgataaagagaagagagcaggcaattaaagcaggggaagagagcaatgaggacttgttggacatacttgtggaatccaatatcagagaaatggaagcaaagaatatggggatgagcattgaggatgtgattgaggaatgcaagctgttttactttgctggccaggagaccacttcggtcttactggtgtggactatggttttattagcaaggtatcccgattggcaaagtaaagcaagagaggaggttttgcacgttttgggtgacagtaaacctgatgccgatggccttaatcgcctcaaagttgtaacaatgatattgtacgaggttctaaggctgtacccatcagcgactgagctaggacgttccgttccaaaagaaataaaactgggaaatttgttgttaccagcaggaacagaaatttcggttccgatcctgctgatccaccatgacaaagatctttggggcgatgac

SEQ ID NO: 2901 - DNA, 536 bp, Gossypium hirsutum
  unsure (1)..(536): unsure at all n locations
  Clone ID: uC-gsflmaxxa092a04b1
cccacgcgtccgcccacgcgttcgcccacgcgtccgcccacgcgtccgcgagcctcgaacggaacccctcgggtcggacttttccgtcattcgaaccctaaattaggggaacagcttncttacttcatnctctcttctcttcgtggccccgctcaatccgccagagatttcgatagagtttggccgatttttgactcagcgcaatctcgtgattttcgaaaggttgtgcaagggataattactgagctggaagcacaaggagctctaccgaggagtaattcgagggtttcttcgcttgctacttgctgtggaccgagatttgttgagcttttgtggcaactttcattgcatgcattgagagagtttcatagaaggaattttgcggcagatgttgcttctaacccattgcctgcaccattgactgatgttgcattttcacatgcggccacactacttnctgtaacataggctagaatagcacttgaaaggaggagatttttgataaattcttgaacagcagtgcagagacaggctat

SEQ ID NO: 2902 - DNA, 493 bp, Gossypium hirsutum
  Clone ID: LIB3582-021-P1-K1-D5
cggacgcgtggacggacgcgtgggggatagagaaaaggagagagagatagagctcgaaagcgcagtggatacgaattgcttgcttttaggtttggatccatccataatcggactccgagcctcgaacggaacccctcgggtcggacttttccgtcattcgaaccctaaattaggggaacagcttctttacttcatcctctcttctcttcgtggccccgctcaatccgccagagatttcgatagagtttggccgatttttgactcagcgcaatctcgtgattttcgaaaggttgtgcaagggataattactgagctggaagcacaaggagctctaccgaggagtaattcgagggtttcttcgcttgctacttgctgtggaccgagatttgttgagcttttgtggcaactttcattgcatgcattgagagagtttcatagaaggaattttgcggcagatgttgcttctaacccattgcctgcaccattgactgat

SEQ ID NO: 2903 - DNA, 510 bp, Gossypium hirsutum
  unsure (1)..(510): unsure at all n locations
  Clone ID: uC-gsflnu33B101a07b1
ttctttttttcttcttcctcttcctctcttttcttcatagccgccacaccttccaccatctttggaccataatatttttcatctttcttgccaaatcttcaacgttcgaattaattcccctgtcactgttgcatcttacatcatcctcgagtcactgatttcactctccttgtcgatttacctctattcatttgaatcaccattgacgttgagattgtcgaccttagatctatatatattcgctgtagatcgtttgaagcaccagatctaggagaatcttatcaaaattgatccgaaagagtgtgccgaaatagtgacagggtcgtacgggcgtgtagggtgacaggtgtgggccataattatgtagtgtgtgtgtatgtgngtcgtgtgcttcagtcgattgtgtgggcgttacaatgcttattcagttttttttaatgaatactgaataaaatcgatctgtgaatctaattacaatgagaattatcagatctaaaaaggataacatct

SEQ ID NO: 2904 - DNA, 298 bp, Gossypium hirsutum
  Clone ID: LIB3493-047-P1-M1-A7
tgtagatcgtttgaagcaccagatctaggagaatcttatcaaaattgatccgagggagtgtgcctaaatagtaaagggtcgtacgggcgtgtagggtgaaggtaatccacgagctagatgttggactcagtgaatcggaggtctcgagagatacaataatttcttggtttggttttataagtttttcttaaattcaataaattattttcaatagatttgtaagtaaactgtggaatgatctttgattttggactttttgaaaaattatggattttttcgtttgaactataattgtgat

SEQ ID NO: 2905 - DNA, 419 bp, Gossypium hirsutum
  Clone ID: LIB3493-046-P1-M1-E10
cacagattttggggaaattaattaaaatgaattttattttttaatttaccaaagagaggaacggaaacttctacttctcacccttctttttctcgatcaaacaccgacagtgtggccagaaaaagtcttttgctcgattcgattctatctgtatctcgccgatctttcatcaatggcttcttgctcaggaacattggttgagagatactgaccgggaaccttgtcagttatcagaacatatgaagtgctcactctgtttgagacgttgtcttgaagttgtttcacttgcactcttactaaacaaacttcgccgaggattaattgaggtgggtgaagggagactgaattctgagactaaaactgtttggttgctatcacattcgacctgtgtgctggaaaatagagaacaaagactacta

SEQ ID NO: 2906 - DNA, 486 bp, Gossypium hirsutum
  unsure (1)..(486): unsure at all n locations
  Clone ID: uC-gsflmaxxa076f07b1
ttaggaacggagacttctacttctcacccttctttttctcgatcaaacaccgaccgtgtggccagaaaaagtcttttgctcgattcgattctctctctatctcgccgatctttcatcaatggcttcttgctcaggtattttttttcctatttcctctcttgattactttttttttctatttttatgtactatttccgattaatttccttgattctatcattttttttggtaagtgagaaaatttgaaaaaataaaaataaagcggaaagattagaaaggaaaaagaaaaaaaaggaaaagtgatgttggtcgtagtttcagttttgtgtattgataaaacgaaaaagaaaaggaaatcttacccgaattaatttttttaggttttaattactcttttcttggtaggctattagatatttactagaagcctggtttgntgatttcgattttcttttcaatcagaagatagcagaattttagatttta

SEQ ID NO: 2907 - DNA, 241 bp, Gossypium hirsutum
  Clone ID: LIB3585-011-P1-K1-E2
aaagctgctgcggctactgtaatatctgtatatttttatgaggctgttgatgaaggactgctaggggaggaacattgattgagagatattgaccgtgaaccttgtcagttatcagaacatatgaagtgctcactctgtttgagacgttgtcttgaagttgattcacttgcactcttactaaacaaactttcccgtggattaattgaagtgtgtgaaggaagtcttttttctgaaactaaaa

SEQ ID NO: 2908 - DNA, 1150 bp, Gossypium hirsutum
  Clone ID: GOSHI-09MAY01-C73382_1
cccagcgtccgcctgaggccgctgatcccattaatctggaatcactgctattgctgtacaattatttgaacaatgaaggtattctgaaaccgggaaacaaaggactcttgttgggcgaggactatgatgatagaatccattcagggaaattccttcctaaccaagactgatatggaattcagttctacaaatgactttgatcgactaatgttaatccctgacgagtccttcgatttcatttcttcactgaaaacattcaatccgccctcgaattcatcgaccggagtctcaaagttggcggtactgttgctgttcagcagctggactcatcgctttcattcaacaagccgtctaattacaagattgtttacttcaggaaattcaattccaacctttttgtgatgaaaaaggttgagaatgctcgaccgatcccaagttcccaaaggcggcttttggggtataatacatcagaagcgaaacgggcagcattgaagaaattggaagacgttcttcttgaaccaccaagagcatcctcagggacgtccagaacttaccttaaacgaacgaaatatttgccagatctattgggggactcactcgaaagctacccccgtcgggttttcattgatgtaggcttgcctaagaaagatggcggcagtgccaccacctggtttgtcaagaattatcccacaaggaatctgaagttcgagatgtacaagatcgagacactgaccaaggactctaccaagaaagaggtgccgcagactgcggcggagactgggatgtcgggttggctgaggaagaacgtgcaggaggaagagtatgtagtgatgaaggctgaggctgaagtggttgaagatatggtgaagagcaaggctattagattggttgatgagctgttcttggaatgcaaacctaaaggacttggtggaagaaagaacatgagcagaagggcttactgggaatgcttggctttgtatgggaagttaagggatgaaggtgtcgcagtgcatcaatggtggggttgaagggaagtttgtttaagcagagtgaaacatgtttaaggtgtgagagagagatcgatatgtatatataatattattatgttccaatacgatttcatgaacaaaaatccaatttttaatttctt

SEQ ID NO: 2909 - DNA, 723 bp, Gossypium hirsutum
  Clone ID: GOSHI-09MAY01-C73232_2
tgctccaacactaacccatgctagccaacacctcttgttcctcaattcccgcttgagagccaatcccatgctttgaaaatggtgataataacaacaataagagaaaaagaagactctgctaggaacactctagatcctagatgctgaagtggtttcactttcaccgaaaacactactagaatcagatcgttacgtttgtgagatctgtaaccaagggttccaacgagatcaaaacctacagatgcaccggcgacgacataaggttccatggaagttgctgaaaagagaaacaccggcggtgaagaaaagggtgttcgtttgtcccgagccgagctgtctccaccatcaaccttgccatgctttaggcgatctggttgggatcaagaaacactttaggaggaaacacagtaaccataaacaatgggtgtgtgagaaatgttcaaaggggtttgcggttaattttgatattagggttatcttaaaacttgtggtacccctggccattcttgtgactgcggcagagttttttcaagagttgagagtttcatagaacattaagatgcatgccgtatggggcaattacaaaaagtgcagcagccacctatcttgtctccaacagctttaaacccaagtacttcatctagtgataccatgttcttcaaccctacaaaagataattccaccaacacaaacccgggcgaccaccacaatttggagctttaa

SEQ ID NO: 2910 - DNA, 584 bp, Gossypium hirsutum
  unsure (1)..(584): unsure at all n locations
  Clone ID: LIB3583-047-P1-K1-H9
gntcatcagacccaaanaaacgaacaaaaaaaaagggcttttcttttttacttgatctaccttcctctatctcatgtcatgctgtactagcttttctttgtttccttttttcaatttcttttcaaatacaaacttttgatcagctttacagagtgagaagaaataggcaagaccaggaggggaggcatttagccaaggaaaaatattttgctttgccctctttggctctatattaactaaaatagttaatcgtgcccaaagagaggttgtgcagtgcagtgcaggagctattttatctatgttgcccgataactcttgctcttcacagccattatatttagagaatggtagtactaacaataagaggaaaagaagaccggctggaacgccagatccagatgcagaagtggtttctctatcccccaaaacactgctggagtcggatcgttacgtttgtgagatctgtaaccaagggtttcagagagaccaaaacctacagatgcataggcggcgacataaggttccattggaagctactcaagagagaaactccggnggtgaggaagcgggtgtttgtttgcccg

SEQ ID NO: 2911 - DNA, 787 bp, Gossypium hirsutum
  Clone ID: GOSHI-09MAY01-C68952_1
ctgagactcaggctcaaacccaaccgcctggtgttcagcaacaattgcagcagcagaattcatttaataaccatcaacaccaacagcagttacagcatccgctgtcacagcaacaccagcaactggtcgatcatcagcatatttctactggagtggctgccatgtcacagtatgctccggcctcacagtcccggtcgtcacctttccaagccataccttcactatgccaacaacagagtttttctgactcaaatgggcacaccgtgaccagccccattgtatctcccttgcacagtcttttgggatcctttccccaagatgaaccgtccggtctgctcaacttgcctagatccaacccagtaataacatctgcagcatggccatctaagcgggctgctgttgaagttctgtcatctggatctccacaatgtgttctgccccaggtggaaacagttggggcccacccaaacaaacatttctcataattctatttcgttgccaccctttcctggcaggggagtgctcgatagaccaagcagcgggttctgatccacagagccatctcttatttggtgttaatatagagccctcatctcttctattgcaaaacgggaatgtcaagccttagggggagtttggcagcgagagtgactccactaccatacccttctcttctaattatgccagtactgcaggcactgattttctggttatccccgcgacgcttacagttgattgatgattggtatctgcatctcaaagatgtgggcatgaaaccaatccagat

SEQ ID NO: 2912 - DNA, 438 bp, Gossypium hirsutum
  Clone ID: LIB3189-039-P1-K1-A3
ctgagagaagaaaatccaaatgcatgtagtaataataacactgctgtttggttcttttagcttgtatcctttgcatcattttatctttgctttgtgagtgttcagaaagatctgagttaaaaaaaaaaaacttattggcgaggggctgagtaaatcgttatctttcaagttgagatctgttggctgttttcgcttgctggtgttattggttacaagctttgagggacttaaaagagtttttctgactcaaatgggcacaccgtgaccagccccattgtatctcccttgcacagtcttttgggatcctttccccaagatgaaccgtccggtctgctcaacttgcctagatccaacccagtaataacatctgcagcatggccatctaagcgggctgctgttgaagttctggcatctggatctccacaatgtgttctgccc

SEQ ID NO: 2913 - DNA, 443 bp, Gossypium hirsutum
  Clone ID: GOSHI-09MAY01-C68492_2
tctctatttacaaatacgccgccgtctatcggagctcagagaggaacggttcgattgccggcggggttgatttatcttggtccgatggtaattgaaggtgtttggagccgcttgttttccttatgcagtaacacctatgctaattttgatcgagttcatttgccgggcaatgtgaatggtggttgtttgaatacttttagagaattagtttgtgttggggtggatcatgggggctgcatgttgttgttcctgctagagacaaaactatcgtaaatggatcaggtagtgaggttttacataggaatataaggtattctccaacttggagttttcgttgggataaccgagggcgtgtagctggtgaagacacttctataagttggttttcggatgcagttagtcggaatgatggatcagagatcaaatatgaatctgcatgtgca

SEQ ID NO: 2914 - DNA, 1277 bp, Gossypium hirsutum
  Clone ID: GOSHI-09MAY01-C68492_1
cggccgcgtgggcggccgcgtggggttaaaacgaaaacaaagcagccttattttaaaacactctgctctctatttacaaatacgccgccgtctatcggagctcagagagtatttgaaggtgtgtgaagccggttgttttccttatgcagtaacacctatgctaattttgatcgaattcattttccgggcaatgtgaatggtggttgtttgaatacttctagagaattagtttgtgttggggtggatcatgggggctgcatgttgtgttgctgctagagacaaaactatcgtaaatggatcaggtagtgaggttttacataggaatatgaggtattctccaacttggagttttcgttgggataaccgaggacgtgtagctggtgaagacacttctataagttggttttcggatgcagttagtcggaatgatggatcagagatcaaatatgaatctgcatgtgcatcagaggatggaaattcatccgagagttttcagtctcgtacgtggcaaaagtccccaacttctgaaggaactgctggacatgcaagaactcctgcttcagatcaatctatttctagaaatatctctgttgatgtgaacttagagcaggtgaaggagttggtagaatcccctgtggcttcttatccgtctccctcaaagttatcacattctttgccatcagcttcctcgttggcaacatcccctttgtcttcccaaagtcatgtgcatcctactggttcaacaataacgaggtggcctctcagatctcctggacatcatctattgcgacaagtatctgataaccgaattctaggactgaaggcacctaatggatactcagttggtgaggaaaggcttgtaatgccttcatggagcaatgaatcaactgggggctctcggggtggttcttctgatggttggtctatgcaggccttttctgaatttatgcctccatctcgtagggaaaggtggtcttttgataatgacacatggggtttccaacgtgagaaaataagcaaacccagtggccgaatctctgcaccgccgtctgttgatctgcaaacatgtggtgtttgctccaagctgttatcagaaaaaattttgtggagcactcagaagattattattagcaatgatctttctgttgttgcagtactaacttgtggccatgtttaccatgctgaatgtttggaaaatatgacccctgaaattgacaagtacgaccctgcttgtccaatatgcacgttgggggagaagaagacacataaattatttg

SEQ ID NO: 2915 - DNA, 221 bp, Gossypium hirsutum
  Clone ID: GOSHI-09MAY01-C68442_1
gcgtccgctcacttttcttattcagatcgatcatggccttatggcctagcctgataaacacaacagaatgggggtttccttctctcagtaacctccacccaaaataaatccacttcattcgaacccgaattttcctttcaagaacccagattttctttctccgtacgggattaccggccggttgcccgggtcacccagatttgtttattccatatcgggga

SEQ ID NO: 2916 - DNA, 619 bp, Gossypium hirsutum
  Clone ID: GOSHI-09MAY01-C68462_1
gtcagctgttatagaaaggagaagagagcgagaggaagagagacaaatggggtctagagacaaggaccaaacgacatcgcatcatcagccgctccttagcagccttgttgtaggaccttcggcaagcgacggagctgacggtggtgcaagcggaggacgaggccgtggtggtggtggtagcgattatgagcccggggaggtccggcgtgaaccgcatccttattctcgttctgatcgatacaaagatgaacctggatatagaattcgtgcaggttcaagttctcctatacgtcgtagggacgcagatcaccgtaatggttcccattttgatcgctcaggtggtccgtcacggggccgtgattttggtaatgggagggatcctggtagataccgagactcttcacctccttatagtcgagggccaggtggtggcaggcaacacagcagccggggttttgatggaactggttatggtcctggacctatcggaggtgaaggcatgactcgaaataatcctaatgtacgccctagggaaggtgactggatatgtccagatcctttgtgcgcgaacttaaactttgcaaggagggtatactgcaacaattgcaagagatttcgc

SEQ ID NO: 2917 - DNA, 571 bp, Gossypium hirsutum
  unsure (1)..(571): unsure at all n locations
  Clone ID: uC-gsronu33B012h10b1
ttcacgcgtccgcccacgcgtccgcccacgcgtccgcccacgcgtccgcccacgcgtgcggagggatcctggaagataccgagactattcacctccttataatcgagggccaggtggtgagcggcaacacagcaaccggcgttttgatggaactggttatggtcctggacctatcggaggtgaaggcatgactcgaaataatcctaatgtacgccctagggaaggtgactggatatgtccagatcctttgtgcgcgaacttaaactttgcaaggagagaatactgcaacaattgcaagagatttcgctatgcgcccactggaagtccccgtggaggctaccctggtcccccacctccacatgcccctcccaggcgctttcccggctcacccgtggatctatcaccacctggcaggaacataaacagcaacttcaggtctcctnctcgtagttgggctagggaaggtacacgagactgtagagctgctggtccaccaccttcaaggcatgaaggcaggttttttgatcatagcatgcgtagagaccgacttgatatctagacgatgactaca

SEQ ID NO: 2918 - DNA, 591 bp, Gossypium hirsutum
  Clone ID: GOSHI-09MAY01-C68432_1
ccccgcgtccgttccttttcgcttaactctttcaaatccaaatactaattcgccctgaatcttcttccttttagggtttcaaacgatcctttatgctttgaatctcctcctcctttttgggtttcaaacgatcctttatttgggcgattaacagcagtttaccatggctgttatctcactgaattcactgccaatcggaatcagattccgaccaacggacgaggagttaatcgatttttacttgcgagctaaagtgaacgggaaaaggaaagatgagatcggggttatacgggaagttgatttttgtaaatgtgaaccgtgggatttgcctcatttgtctgctgtaaaggctcgtgacccggaatggtttttcttttgcccactggaccggaagtatccgaatggaaaccggcttaatagggctaccgaggcgggttattggaaggctacgggtaaggatagaaagataaagtctgggtcttgcttgattggcatgaagaaaactttggtgttttatacgggtcgggctcctaaagggaagcgaactaattgggttatgcatgagtaccgtactactcttgatgaacttga

SEQ ID NO: 2919 - DNA, 581 bp, Gossypium hirsutum
  Clone ID: GOSHI-09MAY01-C68722_1
ggaaacgagctgcctttactcaacttcgcacttctcctttatcgttttctcgactcaacgtcctggtcgttcgcccctaattgttaggggcgagttgatttcataacttcacgatcagttcataagctttgccaggttcgtactacacatgttagacggaattaatgaaaaaaaaaactggtcctttcagcgaaagattatgagtgattgtattcttgctatgttggtaagggattaattttaaaagtttcttgcttttttaattgcatgtggcttttactggcagaaggttaatgagtcgagagtctttatttttcgattttcattctctgtttttatttgtggtttaagctttggggtgcttttttttttaaaatggttttattcattgacatacttggataagtagatcatatcatcttctaggtaacatgaatagggttagtcaaaactcgtcgttgtttcggagattgttgcatacattatcccgcgatgatggtccttctgaaaccttgaagaaaaaggttcctgaaatcgagaggacgaggaaaaggaggaaccccaagaaggctcagttgttt

SEQ ID NO: 2920 - DNA, 444 bp, Gossypium hirsutum
  Clone ID: GOSHI-09MAY01-C68152_1
cccacgcgtccgcccacgcgtccgtgcagcttcttaatttgtgggggttttttgttcttattggcttgcggctgaagccatggcttcttccatgctgaatgcacctgaaaccttcactctcatccgaggtgttaccccaaaaagtattggttttttggggtcacgtttacatgggaaacagttttccagtgcgggtttaatctacagtccgaggatgtccaggctaggaaccacgatagccccgaggtgcagcttatcagcgtcaaggccagcttcacaaccaagattcatacaccacaaaaaaggaggcccttttggttctacaggttcctctcaattgtctatgaccatgtcataaacccaggtcactggactgaagacatgagggatgatgcacttgagccggctgatctcaatgacagggacatggtagttgtagatgtt

SEQ ID NO: 2921 - DNA, 482 bp, Gossypium hirsutum
  Clone ID: GOSHI-09MAY01-C69592_1
gcgcactgtttctcttacacaggccagaattgatatgagtgagcttgatgaggattcagatggtttccttcaacctcatgaaatggaggcctacattcgtggtcttattcctaacctggcacaacgacgggatatgcctgcagcctttgttcaaatgtactgtcgcatagctgcacacaaattctctttcttttgtgatcctcatagacgaggaaaggcctgcataaaaaaggtgctgcttagtaactgtctccaggaattaatggaactacatcaggaaagtgaggaagaagtcactgacactgagcaagctgaaaattggttttccttgacttctgcacaacgtatatgtgatatgtttcttgccctcgataaggatatgaatggaacactgagcaagcaggagcttaaagaatatgcggatggaactctaactgaaattttcatcgaaagagtttttgatgatcatgtccgacgttgca

SEQ ID NO: 2922 - DNA, 537 bp, Gossypium hirsutum
  Clone ID: GOSHI-09MAY01-C69582_1
ctgctaatgcgtgctcgtctcggaaccatacccttcatcgcgtccctcctcgatgaatgctcatccaccaaatccctccacaaactcaaacagattcatgccaaaacgattttgcttaatatttcaagccactctttcgtccgaaacaagcttctctcagcctacgcctcctgttcccaaatgcgcgaagcccatatcctctgcggcttcacttctcgccaacccattttcctctacaactccctcatcagagcctactcttctcttcaccaattctctcaatccctcgccatttttcaccacatgatcattgcccaaaggccctttgacattttcacattgcctcccgttctcaaatcttgcggacacttatctcatgtaacacttggaagacagctccatggatctgttgtggctaatgggtattcattcgatttggcaaataacaattctttgatcagtatgtatggaaaatgtggcgaattggaagtgtgcgaagaaactggttgatgaaatgtctgtaagaagctacgtatc

SEQ ID NO: 2923 - DNA, 678 bp, Gossypium hirsutum
  Clone ID: GOSHI-09MAY01-C69622_1
acgcagcggtggtttatgcgcttgttgaagatgaaccaaaagcaactggcaatttacaacttactcaaaacgttaaaaactgttgaagaagccaaagctgtgaaggcatcgaaacctgtggaagaatcagaacctttggactgctaaactatctttatcacagaatctgttattgaggagctaccctaactcagcctgctgttttaaggcctacaacttacacagaatgtataagtccatgaccttggagtttcggtatccaggagctgaaacaatcgccattcaaaaaggctttttctttcacgtgcagtacagctgattatccatctgataattagtcaaatttcagttggtcacttgcaaatgtttatcggtttgttatctgaattatgctcagagtcctgtttagcatgtcctgaaacaacttatgtgcttatttttctcgcaaacttaattttcaaggaaccattattgtagtcagtttggttcaataaaagtaaaaaacagagttcagcaaaaaaaaaaaaaaaaaaaaaaaaaaaaaaaaaaaaaaaaaaaaaaaaaaaaaaaaaaaaaaaaaaaaaaaaaaaaaaaaaaaaaaaaaaggggcgcccttacaggagaaaaaaactaatctatcctgtttataaagaaactcaaaatttcttttaggggtcc

SEQ ID NO: 2924 - DNA, 855 bp, Gossypium hirsutum
  Clone ID: GOSHI-09MAY01-C69082_1
gaaaaacccggccgccccacccgtccgcaagaaccgtcgccttcattgcttctccaccacctatatgtagctctcttccttgcaagatggggcgccagattgtgggaattctcagtgggtttatatatgatcagtgtttggcctgattccttactccttgttgcaatttatgggtgttgtggaatcatcctttactggcattatttggtccaatcattggacgatggctggataggctaacatatgtaaaggtgcttcaactatggttggtaacccagaatctctccttcatacttgctggaggtgcagtagtggccttactggtatttccaagcctgaagttcacaaatatagttgcattcatcgccctggtgatattgacaaacatctctggagctgttggtgtgctttcaacattaaccggtaccatcctgattgaaagagaatggttggtggtaatatctgaaggccattctcccaatttactggctggatttaattccgttattatactaattgatttacttgtaggtatttgccacggtataatggcttattttagcttgttttctgtagctcggcatgatgggccttgtgactctattttttatggttgatattatcttgcatagggacaaagtacccgtttagtatatcttatggtagagatctgtgttcttctatatgtgatactttctttcctgtgaatattactgcacttggatctccactaccttttttttctatctagtttcattatgttctctattattttgttttgtcattatctatttcatttatctttctctttcaatttaatataactgtctctttgtatattctctgctattttcc

SEQ ID NO: 2925 - DNA, 490 bp, Gossypium hirsutum
  Clone ID: GOSHI-09MAY01-C69392_1
cccacgcgtccggttgagaactaagaaggagaagcaaatggcttcctcaatgatctctgccccagctgttaccactgtcaaccgtgccggtgccggcatggttgctccattcactggcctcaagtccatggctggcttccccaccaggaagaccaacaatgacattacctccattgctagcaacggtggaagagtgcaatgcatgcaggtgtggccaccagttggcaagaagaagtttgagactctttcctacctgccagaccttgatgatgcacaattggcaaaggaagtagaataccttcttaggaagggatggattccttgcttggaattcgagttggagcacggtttcgtgtaccgtgagcacaacaggtcaccaggatactacgatggacgctactggaccatgtggaagctgcctatgtttggttgcactgatgcttctcaagtgttgaaggagcttcaagaggctaagactgcataccccaac

SEQ ID NO: 2926 - DNA, 357 bp, Gossypium hirsutum
  Clone ID: LIB3189-002-P1-K1-B1
cccacgcgtccgaaaatcacttcatcatggcttcctcgtgtgcttcctctgccattgcagctgttgccatctccacaccaagttcccagaagaatggatcactcttgggaagcacaaaagcttcttttcttagtgggaggaaactgaaggtgaacaactttacagcaccagttggagcacgatccagcactacagtttgcgcagttgctgagcctgataggcctctgtggttcccaggcagcacccctcctccatggctagatggcagtttgccaggagattttggctttgatcctctaggtcttgcatctgatcctgagagcctgagatggaatgtccaagcagagcttgtgcact

SEQ ID NO: 2927 - DNA, 349 bp, Gossypium hirsutum
  Clone ID: LIB3189-002-P1-K1-B7
atcatattttcaaaacgcataaccattattgtctttcccctttaaccactctcaccggggggaccacgacgacggggacgaaccaccccccctttacccttcttcgggttataccttcaacaacccttcaccacccttatacgggatccttcatgcataatacttactttaccttttttagcaagatccaacacttccgtttgcgcaactgctgagcctgataagactctgtggtttccaagcagcacccctcctccatggttagatggcagtttgccaggagattattgctttgatcctctaggtcttggatttgatcctgatagcctgtgatggaatgtccaatcat

SEQ ID NO: 2928 - DNA, 506 bp, Gossypium hirsutum
  Clone ID: uC-gsflnu33B140h07b1
gagcgtactcttcattcgcacgcatgcactataattgaggggatgggtttattttatactgcattaatagtaatgagatttttattgctatgttgaagatatgtggtctttgtattcattgggaaattttaacatcgtgcaatggttgtgacagatcgaggaggatttggaagcctaatgtacaagagaagcgtgtatttagttatatcttagatcgccatattcgagtcaaagtaaccactcatgccctccgttgcattgacaaggcaggcgggatcgatgagtacctgctgaaaactccctaccacaagatggatacagaaatgggtctgttctggaaagctaaaatcgagaaaatgtatgaagagcttgggcaaatggaggtagtcttcttttcgccggaggatgaagcaaagtttgagcaaggattcacagaactgaagctagcggagagagcaactcgaagggatgctagaagacagatgtatggatggtcagggaaactg

SEQ ID NO: 2929 - DNA, 395 bp, Gossypium hirsutum
  Clone ID: LIB3189-001-P1-K1-E9
cggacgcgtgggcaaaaatggctttcagagggaaggagatgatgaagctgttgaagaaggtgggggagaaaaacctagcgcatggagttaaggaacagcttcaaaaatccattccagacagcaaggtcgtcatgaaccgcgccaaacgcggcctttacgctggccgtcacatccagttcggcaaccgtataagcgaagacggtggaaacaaatcgaggaggatttggaagcctaatgtacaagagaagcgtctatttagttatatcttagatcgccatattcgagtcaaagtaaccactcatgccctccgttgcattgacaaggcaggcgggatcgatgagtacctgctgaaaactccctaccacaagatggatacagaaatgggtctgttctgg

SEQ ID NO: 2930 - DNA, 722 bp, Gossypium hirsutum
  Clone ID: GOSHI-09MAY01-C69302_1
tttaaaaattcactcttttatctttcaaaatacagaactttgatctttaaaaagatagttcatcttttttaatttctgggttttgggtttttagtctccgccatggattcaacttcaagtgcagcagcaccaacgccaccaccgccgccgccgagcttttacttcgacgacaaatggaagctatcaaagaaagaaactacatcatcatcatcatcgaagggacgttctttatcatcatcttcaacttcaaattcgtcatcattcatgatcaaaaccaccccgtcatcatcatcaacatcaccaccctcatcatcaaaaacaaaaagatgtgctttcactaggaaatgtgctaggctattcaaagaacaaagggctcggttttacatcatgaggcgttgtgttatcatgctcatttgctggcgtgaatacactgattcttaagtatttttaatggaggatttaatggcatccaaccaaccaagcaagaagaagaggaggatgctatcaagctctatatatatatacatgtatataaagatttggtttttttagggttttagaactaattagaacttagaccattaggattgttttttcgaattttgtaagaggaattccattctccatttaagtagctatggggtggttcttaatgtaactcttacttttttttcttaatcaaatggctaatattaatataatcatagaaaaatccaagtttt

SEQ ID NO: 2931 - DNA, 569 bp, Gossypium hirsutum
  Clone ID: GOSHI-09MAY01-C69322_1
cggacgcgtgggctatttttttctcaggcaaggaaaaatcgcttgaattaaataaatatatattcaaacctatcgatctctaaagggctgataatccgataaggaaaccggttttcccaatacacggatttaagcaaaaacatgggacatggtgaaagaggtcggcccaacaaaagttcaaatttgccaaggatgatcacaggggctcagctatggaagatgattattctttttatcctgatgaagccgatgatgaacctcgtgatggtgagaatgaaggaaagaaaagagattttaccaaattagaactaaaactcgatcatggtaatcgcccattatgggcttgtgctgatgggcgtatatttttggagacattctcccctttatacaagcaagcttatgattttctcattgctatagctgaacccgtttgcaggccggagtcaatgcacgagtataatctcacaccacattccttgtatgctgcggtatctgtggggttggagacagaaacaattatatcggtcttgaataaattatccaagacttagcttcctaatgaatgattg

SEQ ID NO: 2932 - DNA, 451 bp, Gossypium hirsutum
  Clone ID: GOSHI-09MAY01-C69212_1
aataaaaatagaagatctgttttgacatgaaatggttatatccatatatctctgacttatctttatgaaatgataaaatatggcaaaacctataccaaaagttggttcacgtaggaatgggcgcagtagtgcacggaaaagtgcacgtagaataccaaagggagttattcatgttcaagcaagtttcaacaataccattgttactgttacagatgtacggggtcgggtaatctcttggtcctccgccggcacttgtggattcaagggtacaagaagggggacccctttcgctgctcaaaccgcagcgggaaatgctattcgagcagttgttgaccatggtatgcaacgagcggaagttatgataaagggtcctggtctcggaagagatgcagcattacgagctattcgtagaaagggtatactattaagtttcgtacgggatgtaacccct

SEQ ID NO: 2933 - DNA, 975 bp, Gossypium hirsutum
  Clone ID: GOSHI-09MAY01-C69232_1
gccatttccaatggagaactcgttcacattggttacgattttcggtctgctgtttactttaggcaatgtaggtcctcaagctgaggccgcgagggcgtttttcgtgttcggagattcattagtcgataacggtaacaacaactatctagctaccacggctcgtgctgatgcttacccttacggtatcgactatcctactcatagagctactggccggttctctaatggccttaacatcccagatcttataagtgagcaaattggctctgaaccaacattgccatatctgagcccggagctaaacggacaaaggcttcttattggtgccaactttgcttcagctggaatcggcattctcaacgacaccggagtccaattcgtcaatataattagaatcggcgagcaattacagtacttcaggcaatatcagcaacgagtgagtgcacttattggatctgaacaaacacaacgcctagtgaatgaagcacttgttctaatgaccctaggtggcaacgacttcgtaaacaactactacttggtgccgttctcggcacggtcacggcaattcgcactccctgattacgtcgtctatataatttccgagtaccggaaaattcttttgaggctgtatgagttaggggcaaggagggtattggtgactggaaccggaccattaggttgcgtcccggcggaactagctcaacacagcagagccggtgaatgcgcgatcgagctgcaacgagcctcagctttgttcaacccacaacttgctgaaatgctcagcggactcaacaatgagcttggagcagatattttcgttgcagtaaatacaaatgaaatgcacatggattggatcaataacccccaacaattcggttttgttacgtccaagatagcttgttgtggtcaaggaccttacaatggtattgggttatgcacgattgcatcaaacttatgtccgaatcgagacattgg

SEQ ID NO: 2934 - DNA, 448 bp, Gossypium hirsutum
  Clone ID: GOSHI-09MAY01-C64982_1
tgatttctcccttccttctttgctagggcgcaaatggatcagccccgccgctaatccatctcgaacgtgaataacagtggctggagaagcgcataatgtgcctccaccaccgtcgcggtttcaaccagacccacaaggatctgtcaaccttcgaccggaggagccaacgtcgaccaaatcgacaccaaaacagtacgtggtggtgtacagaggtggtacggttgtgtcgacgtggaggcgtgagcgatggtagtgctggaggatgctggaggctgctgcggcgccaaacaaatgaggctagggttagggttcccaagaactgtcaaaggattgggcctatcgggctctattagttgtggggccattgagtattgggctaggattaatttggtttttaggtttcatatttgggtttgggtttgaaattgggttatgtaatttggacttg

SEQ ID NO: 2935 - DNA, 429 bp, Gossypium hirsutum
  Clone ID: GOSHI-09MAY01-C64842_1
aaaaaaatatacacttttcgtaaggcaaagacgggccatggaggtggaagagctagagaagagaaagtccagaaagattacgtcttcttctccttcttcagctcttataaataaccttgatgatggctgccttatgcatattttcagcttcttgtctcccattccagatcggtataacaccgccctcgtttgccacagatggtgttatttggcgtgtcaccctcgactgtggctgcgagtcgatagatccgctcaggatttttctgaacctggtgttttccccaatattgaagaagctgtgtctgcagccagacctggcgacactattctaattgcagctggcggcagtcatcttgcctctaatattcagattaaaaaacctctctgcctgatcggcagaggtgagcttctgatgaaacaaatgtcatc

SEQ ID NO: 2936 - DNA, 420 bp, Gossypium hirsutum
  Clone ID: GOSHI-09MAY01-C64822_1
ttttcccatcctggctgttaagctcttccccacagaatttctcttttcaagtttcctttgtcatttcgatgatgaagaaagcggagctagtgttcctcccagcgcctggaatcggccatttggtatccgcagttgaagcggctaagcttttagtggatctcaatgccaacctctccatctctggtctcaccatcaagcaaccccttaactataaagccaccgcctacatcgactatctcaacgccgccactatcaccaccaccaccacccgcatcaaattcatcgacctccatcaatctgatgcagacatggataggcttaagtttgtggggagtttagttcaaacccacggaccacttgtgaaagaggccgtcgccaaaatagttgagcactccaactcagttcccggctcacctcgac

SEQ ID NO: 2937 - DNA, 717 bp, Gossypium hirsutum
  Clone ID: GOSHI-09MAY01-C64612_1
tctggattcaacccgccaccgttttcgacatctattatttttacttcaacggatacgaatccgccattaaagctcaagctgatgaaacaaaccccaagtgttcgataaaattaccaggtctaccgccactcttcccccgcgaccttccatcgttcgttatcgcttcgaacgtttaccaatcggcactgtcgttgttccaagaacaaatggacgtcctcgcagaagaacccaacgctaaaatccttattaacaccttcgatgctttggaacacgaagcattaaacgccattgaaaagttcaagacagttggtattggacctttagtcccatcttcattccttaacccaaaagacgcattagataattccctaagagtcgatctttttcaattcgattcaaaagattacattccaagggtagactccaaacccaaatctggccgcggttacacgttccttggagtatctcggcgtttaagaaacccaagtggaggagaaaactctagcgcttaattccgccggcgaccacctttttggggatgaggagcccccatatagatgcgcacaaagaaaaagaagattattcctgctgggggaataaggcaacttaaaaggtgcctgtggttccaaaaaaaagggtcatcatcccgggggttttagcacctggggagaaccctttaaaagttgcggctgcccggggtatttttgaggaagagag

SEQ ID NO: 2938 - DNA, 516 bp, Gossypium hirsutum
  Clone ID: GOSHI-09MAY01-C64162_1
cccacgcgtccgcccacgcttccgccaacgcttccgcccacgcgtccggaaatctcaacagcgacgatgaccatgaagcggggggaatccgctggcgttagggttcctcctagtgcaccggcatcgtttttctcctctaaaggtacgtgtaaacgcggcggcagcgtccgatctggtttctgcaaacgagatttctcacagaacaacgcaaatttcggatggagcgcggttccgttgcggttcatgtactttcgtaatgattcatgggttaatttctcggccgatgtagtagaaacgctccgagccggtttcttggagcggaaaccgattatcgagacgtcgattgacggttcgaagtatatatttgatttcaagaggatgctgcagatcgagtactcgacaggtaattgccggtcaatttcttggatagacgaaagtggcaagtgttttttccctagcgatttttttagcgaagaagaatttattcaatcagaatgtagtgagtgggatgattat

SEQ ID NO: 2939 - DNA, 528 bp, Gossypium hirsutum
  Clone ID: GOSHI-09MAY01-C64062_1
cagatttaaaaaaaaaaaaaccagtggaggagattttctccttagtctttgggctttctacactcagatttattcttggaaatataaggttagaccaatggattcccagaccaaaacagagaattgccttggatgggctgctacagatccaactggtgttctatcaccatacaaattcagtcgcaggcctctaggaagtgatgatgtttccataaaaattactcattgtggagtttgttatgctgatgttatttggtcgaggaatatgttaggagattcaatatatcctttggtgcctggtcatgagattgctggtattgtgaaggaggtcggttccaatgttcaaggcatcaaggtcggcgatcatgtcggagtgggaacttatgtcaactcatgtagaaattgcgagtattgcaatgatggcgttgaagtgcaatgtgtaaaagggccggttttcacttttaatcatattgatgttgatggaacagtcacaaaaggcggatattctagccatattgttgtccacac

SEQ ID NO: 2940 - DNA, 606 bp, Gossypium hirsutum
  Clone ID: GOSHI-09MAY01-C64292_1
tggagaagcaagcaaccattagtttgtttgtttcattcctttttcttttcttcctttaatggctccttctatttcttctattttcatttcccacactttcaatgctttcgcttccttcactaactgctctaaaaacaacaaaaaccacactactccaccttcacaacataaaaatcatcaacttttttcttcttctccaggaaaagtgtctttcgccgctgcaacaggggagcttttcttgggaattgcgtcaagatttattaaaagcagttccaattatgaagattcaggctctacaatccctgttttcagcagacccagaaagagaatcaatgggagtgaggctggaaacaatgataaggacagaattgggttagtgatggaggatgaaattgagccagaggtgatatgggaacaacgagtcaaggatattgaagctgaaaaagaaagaagagtggttactagccctggttttagcttctctgctgctggcctcttgtttccttatcatcttggagtagcccagttcctcattgaaaagggttacataaaggaaaccacacctttggctggttcatctgctggtgccataatatgtgcagtgat

SEQ ID NO: 2941 - DNA, 542 bp, Gossypium hirsutum
  Clone ID: GOSHI-09MAY01-C64212_1
aggaaaaaagttataattataacatttcacgcggtttttgggatctgaaagggtcaccaaacaacgcgtcttctgaaaaaattccctttcctttacaaacaaatccacacagttaatgaaaaaattcattgttcttcatgttcctcaaaaacccagattataactttttttgaatcttcttgttgttcatcttgtctttttgtttctgtttcattcatcattttgaagctatggtgacaactttgctattattagctattcttttcatactgggtttcattcatatttacttttcttttttgcccaataaattttattattggatccaatcattaagctgcaatacccgtccttcttcttcttcttcatcatcatcatcttcagctgtgaattacaaaacggcccacaaaatatcagtaacggaacggggagatccaaataacttggagttaaaacgggtattttccaccttcgacaaaaacggggaaggattcataaccaagcaagaattgcgcgaatcgttaaagaacatacggatgttt

SEQ ID NO: 2942 - DNA, 416 bp, Gossypium hirsutum
  Clone ID: GOSHI-09MAY01-C65942_1
cttcacttcattaggaacatcaataccttgatcctttgaaccaccaaatggctcttcatctcttccacctcctcctcttcctccttctcagcccattatcttatgtctctagcgttggcattaactatggcactctaggaaacaacctcccttctccaaagaaagttgctcagctcctccaatctacgctcattgataaagttaaaatctacgacaccaaccctgatatccttgaagccttttccaacaccggagttgaccttattgttgccgttgaaaactaccacgtcgccaacattagcaaggacgcagccgcagccgacgactggtttgccactcgtgtgcagcccttcatccccgccacttccatcgttgccgtttgtgtaggcaacgaatatttgacctccgatgataat

SEQ ID NO: 2943 - DNA, 354 bp, Gossypium hirsutum
  Clone ID: GOSHI-09MAY01-C65712_1
tcgtaatctccatttgcctgctctgcacccatttttttctgtaagggaaaaacaacgcttgctttgggaattcaagcatggcggggatggaaggaggagggacattatcggatgtgtatcaaagcgctagaaagctacttcttcgagcaagggatgggatcgaacgcttagagagattcgtgagctccgtctccggtaccgattctcctgaactctccttcgccgtgaagaaagatatctctcagatccactctctatgcgctgatatggatcgcctcttggcgttctatccccgccaaatctcaacgcgatctctggaaaagaaaagttgaacaagtggctgaagaggctgac

SEQ ID NO: 2944 - DNA, 437 bp, Gossypium hirsutum
  Clone ID: GOSHI-09MAY01-C65642_1
caacaacctcctctccccccttcatttctctctctctgcattttcatctcttggttctttctcttttacaatctcatacatggctgaggagactcaaaagcctgaagctgctgcaccccctgctcctgctgaggaagtggtggtggagaaggagagtgaacaggaggctgcttccgagaagcctactgatgctgttgttgaagacaaacctgctgaggctgttgaggaggagcctaaggttgaagctaaggacactaaggtaactgagtctgcttctttcaaagaagaaaccaatatagccggtgaacttcctgacccacaaaagaaggctcttgatgagcttaagcaacttattcaagaagcccttaacaagcacgaattcacaccccctcctgccaaagataaagataaaccagctcccgaggaaaagaaagagg

SEQ ID NO: 2945 - DNA, 732 bp, Gossypium hirsutum
  unsure (1)..(732): unsure at all n locations
  Clone ID: AI055072.1
gcacactttattttgaaggaaagaattcagaaaatggggattttaggatgtattacctgcattgcaggttcagtggtgattgtaattcatgcaccacaagagcataccccaagttctgtacaagaaatttggactctagcgacacaaccagcctttctaatttatgttgcagctacactttcgatagttttagctttgattttgcattttgaacctcgttatgggcagacaaacatattggtttatttgggaatatgttccttaatgggttctttacggttgtaagcatcaaagccattggaattgctataaagcttacattggatgggataaatcagatggcttatcctcaacttggttttttcttacagttgccgaatctgtgtcattacacaattaaattacctcaacaggccttggatacattcaatgcccgattgtttcttcgtatattatgtcatgttcacaactttgaccattattgctagcgtaatcatgttcaaggattggtcanngtcaaacgtgagtagtattgcctctgagattgtggattcatactgtgctctctgaactatatactcatgcacgagagacaggaccacctctcgtnngacagnacatcgntgtntgggatcnttaaacctggatgacttatantctccgctcggttcgccctagattttttacaggctgattctctactgatgaatttacctganattcgtgcgcccn

SEQ ID NO: 2946 - DNA, 411 bp, Gossypium hirsutum
  Clone ID: LIB3272-014-P1-K1-E9
gcttacattggatgggataaatcagatggcttatcctcaaacttggttttttcttacagttgccgcaatctgtgtcattacacaattaaattacctcaacaaggccttggatacattcaatgccgagattgtttctcgggtatattatgtcatgttcacaactttgaccattattgctagcgtaatcatgttcaaggattggtcaggtcaaaacgtgagtagtattgcctctgagatttgtggattcatcactgtgctctctggaactatcatactttatgccacgagagaacaggaaccacctactgcgaggggaacagttacatggtatgttagtggggattcgatgaagagtgctgaggatgaacatttaatcactctacgcagttcggagtattacaagccatgaat

SEQ ID NO: 2947 - DNA, 602 bp, Gossypium hirsutum
  unsure (1)..(602): unsure at all n locations
  Clone ID: LIB3543-044-Q6-K6-E11
cccagcgtccgcggacgcgtgggtgcattttctctgtttgcttttttccaatggatgttttctagcttcttttcttttggagtacggtggaagtgagtgaggcccttacaattgatttacagaatggaactgtgcttcggttggttcttacttgtggcttcgattcctgcgatttttgctcaagatattagtcatggatcgattgtagttgatggaactatgactgttgctcaaactgatgataacttcgtctgtgctacgatcgactggtggcctcatgataagtgtaattacgaccagtgtccatggcactatacatctgtaatgaatctgaacttgtctcatcctttccttgccaaagctatccaagctttcaaccgtttgaggataagagttggaggctctttgcaagatcaagtgttgtatgatgtcggcaatttaaagcccccttgtcatccattccaaaagatgaaagacggattgtttggattttcaaagggatgcttacacatggaaaggtgggatgagctgaaccgtttcttcaaagaaacaggagcaatggtgacattcggcctgaatgctctncatgggagacataaaat

SEQ ID NO: 2948 - DNA, 393 bp, Gossypium hirsutum
  Clone ID: LIB3272-013-P1-K1-C3
cgagctttctgttttggctaaaccaagactatagcttgttccatactgttggtgggtctgtttgtttccaaagataacctcactgcattttctctgtttgcttttttccaatggatgttttctagcttcttttcttttggagttaacataatagttaatacagtacggtggaagtgagtgaggcccttacaattgatttacagaatggaactgtgcttcggttggttcttacttgtggcttcgattcctgcgatttttgctcaagatattagtcatggatcgattgtagttgatggaactatgactgttgctcaaactgatgataacttcgtctgtgctacgatcgactggtggcctcatgataagtgtaattacgaccagtgtccatggcac

SEQ ID NO: 2949 - DNA, 801 bp, Gossypium hirsutum
  Clone ID: GOSHI-09MAY01-C65362_1
tttcagtaaagaagcaataatggaacttaaagctaaagctaacaactttcaagtgagacgccggcgattttaacgccgccggtgaacttatggggaaacaaagtaacgacaaatataaacccataccggagatttcatcttttcagtcactttccgctctactctggcgagccgtcacgcgtgggaggaagttaccggcttcccaaacgacgacgtttcgcatggcggtgaattgtcgtcaccgattaaacccaaagcttaatccattatactttggtaacgctattcaaagcatcccaacatacgcgtcagcaggtgacgtcacgtcacgtgatctacgctggtgtgcgcaacgattgaatgagaacgtgaatgcccaccatgatgaaacggtgcgtcgttttattaaagaatgggaaaaggatccacggtgttttccgttcgggaatttcgacggagcgtcgatgacgatggggagttcaccgaggtttccgatgtatgacaatgattttgggtggggacggccgttggcagttaggagtggcggagctaataaatttgatgggaagatctccgcctttccagggcgggaagggaacggtagcgttgatttagaggtggttttggcgccggaaactatggcagctattgaatcggacggtgaatttaccccccatgtgtcgaattaaatttgggtttttgggtttgtgtgtgtgggtttgtaattttgtaaatttttcagttctgtttgtgggaaagtttgtgtttgaagttgacttttaatcagtaaatttatttttt

SEQ ID NO: 2950 - DNA, 507 bp, Gossypium hirsutum
  Clone ID: LIB3829-027-Q6-N6-E2
aatattaaaaagctttgatatattactgcttccatcaaaaagaaacatgaggggttcaaggctaaagccataaataaaaaaattagtactaaacgttgcatatcatacaaccgtttaaaacaaactcaaggaagcaaaaaagcgagagagagtttaaaactcctgagaagctgatccgatatcccccttactttttccccctttactgggaagaagagtctggtgaatattaggcaaaacacctccatttgcaatggtgactgaacccaaaagcttacttagctcttcatcgttccttacagctagttgaatgtgccttggaactattcgattctttttattgtctctcgctgcgtttccagcgagctctaaaacctcagcagcaagatactctaatacggcggagagatagacgggagctccagcaccaacacgctcagcatattttccggctttcaagaacctagcgatcctccccactggaaactgaagcccagccttatgcga

SEQ ID NO: 2951 - DNA, 407 bp, Gossypium hirsutum
  Clone ID: LIB3272-017-P1-K1-B11
aaaattttaaaccgacactttcgccattccccaattttcatcatttacaacaagaagttttagggttagggattatttttgaaggatgagtcccaccgaaggatcaacgaaaggcgggagagggaagcccaagtcaaccaaggcggtatcgagatcgcataaggctgggcttcagtttccggtggggaggatcgctaggttcttgaaagccggaaaatatgctgagcgtgttggtcccgaacttccgtttattttttcggcctattaaaatattttgcttgtgagggtttagagcttgcttgaaaccccacgagagacaattaaaagaattgaatagttccaaggcatatccaactagctgtaaggaacgatgaagagctaagtaagctttgggttcagtcaccatt

SEQ ID NO: 2952 - DNA, 616 bp, Gossypium hirsutum
  Clone ID: GOSHI-09MAY01-C65262_1
gccatttgaaaagaaaacaaaacagatcctaaagccccttttcttcccctctcattcggctgaatcaagaggcgcccttggactgccgtttggcctccatgtttagccgccggtcatcacgctaaagcctaatcaggctccgtccaatcacgaatccaaggctacgctcaaagatctcagaatcaacacccaaactccgattgcaacggagccagtgaggattcgagggaaccaaaaacgaaggtaagccccttttttttctttcgaatatatgaacacaaaacccaggcgaacgaaactaaaagaaatccgagattttaatcggaaaatcaccttgatcgattttatatatttgattgttctttttttgttgaatctattcgtagtctcaatacaatgatttttttaggcctttataggcgaaaaaggaagaaaataagagaaaaataatacaatattccctatttgctactgccccgctgttttttttgttcgtattttttgttttgccttgtctgtttgcaagtacggagtgcgtgcgtggcgtacgagggctgtgctggcgtacgggagccagggttggcgtatacggaagcgcttgggggctcggactgct

SEQ ID NO: 2953 - DNA, 517 bp, Gossypium hirsutum
  Clone ID: GOSHI-09MAY01-C66492_1
cgcgtccgaagaaaccctaacattttgagagatctgaaagccttattgttgtcaggtgaggcaggggaatcttgctcaagttcaaagccactagttttccatctcaagttaaggattttaattcagctgctagatgtggtttttttgggatattttaagtgcttgagttgaatgggcactgttgattatggtttaggaatttatagggtttatgtcgtagctactggctactctgttataattggggctttccttacctaattctgaactgtaataaagaaatgggtgaaatgttttgggcaaatgaggaagataaggctaaggtggaatctgttttgggcactgaagcctgcgactacttgatattgttggcttctaagaacatgttgtcagatttcatctctccaccacccagttatttgggtctgcaacaaaagctttgcgaggtcgtaaaaaggtcaaattggaactatgcaagttactggcaagtgtcaagcttgaaatctggtggatcgat

SEQ ID NO: 2954 - DNA, 533 bp, Gossypium hirsutum
  Clone ID: GOSHI-09MAY01-C66052_1
gtgatttgctctttttatttccgaaattttcgttttccaatttttcatcaccaaatcgtcagcaaccccccattagccttctattttctcaaatcaaatttggtttcccaattctctttttaccttaaagtcctcaccttttgtttttgttctgctgaactcagtaagccgccatggctacgacgactcagtccccttctcctcccaattccaacgacgataagccccaaccaagctcagaggtggtagaacaagctaatggggttcaacaagatgttaggccagaagctactaaacagaacgttccagcatctgtgtttgtgaactctgaaccaataagagaagaccaagtttccaatgctgttaaattcctttcacatcccaaagttaggggttcacctgttatttatagaagatcctttcttgaaaggaaaggccttacaaaggaggagattgatgaagcttttcggcgtgtgcctgatccacctctagttcacagccagctagttcgaatcagattgacagtcattact

SEQ ID NO: 2955 - DNA, 841 bp, Gossypium hirsutum
  Clone ID: GOSHI-09MAY01-C66322_1
cgttgttcttcctaatcttcctgcaccgttatgcatgcatctaaaccactcaatctcttttgtattttaacggtcatgatccgtgtctgctgcgacgatctgccttatttttgggaggcaccggcatttcgaatcgggagagaatgtccacaaacaacatgggccttcctcgacaaagagatccacaatgcctccattatccatattgctatgacattagacactgcttacccacggggctccgtcgctggagtcttctccgttctccaccacgccacttgtccgagaaaacatcgtgttccattttgtcaccacgcaccgacacggagctaaactcacgcgcgccattacctccactgtccctgacctcaacttcgatctctactacttcaacactaacctcgtcaaaggaaagatctcgtcttccatccgacgcgccttggatcaaccattgaattacgcgcgtatgtacctagctgatctgttgccagctggggtccggcgtataatctactttgactctgatcttatcgtcgttgatgacgtcatcaatctatggagcatcaacttgagaagccacgtgttgggcgctcccgagtactgtcatgccaacttcaccaactacttcacttctaaattctggtccaacccggcttttgcggcgtcgtttaaaggaagaccaaggaatccgtgctatttcaacactggcgttatggtaatcgatttatggaaatggagagaaggtaaatacacggagaaattagaaaactggatgaggattcagaaaaggtatcgtatctacgagcttggctctttgcctccattttgttagtcttcgccg

SEQ ID NO: 2956 - DNA, 742 bp, Gossypium hirsutum
  Clone ID: GOSHI-09MAY01-C67422_1
gtccttaaatgcttcaacctccttttgcttgctcatctacaatttccttaaggtttccttttcttacactgtaacagccatggaagctgtgaacatgaagaaaaaagacccaaaaatagtggtggccgtggacgagagtgatgagagcatgtatgcactttcatggtgcttagcaaatttgatttcccagacctcaaccagcaacctcgtccttctttatgtaaaaccttcaccccctgtctactcttccctcgacgctgcaaggtatatgttttccaccgatgtgatcgtagccttggaaaaatacggcagtgacatggtgaatacagtgatgagaagagctgaagctatttgcagaaaatccaccaccaaaataaatgtggagagaatcgtggggagtggagatgccaaggatgaaatatgtaacatagtgggcaaaatcaaagctgatacgttggtgatgggatgccatgattatggtttcttcaaaagggcaattctgggaagtgtgagtgatcactgtgctaagcatgttaaatgtccggtggtgatcgttaagcacccaaagcagatttgaagttatcttctccatttttcttcgcgtaatatcatctgatgcttcctacaagaagcatggtgtaggtgttaaaagttgggcactgtatattgtacttgtcaattccaggagtaaaatcatgttgtgcagtaaaactagtaggaaatagatatatatatatcttgc

SEQ ID NO: 2957 - DNA, 597 bp, Gossypium hirsutum
  unsure (1)..(597): unsure at all n locations
  Clone ID: LIB3825-028-Q6-N6-B10
agaaaataaagacacatatattttacgtggaaaccctttcgggaaaaaaaccctcgggcagaggagaagaaaattcactatgttgaatttgaattaattacaagaggagtagactatgcctatttataggcttgtaaacctgattctaataggagtgaaactccttattctaataatatcaaatagatggagtttaatgaggtttaaaaaatcttattctaaaataaaataaaagaagtataattctatggggattttacttttattttattttaccacagtattttatttaaataaggatttgggtcacttaattctaacaatctccaccttgacacgaattcttaatgaacaagttcttcatcgcgaactctcaacgaacaagtttctccacctcttccataaagccccttaagagtttatcttcaacaatgaacaccaaccaagtctaagcagtgctcaaacttggttataggaaatgacttagtcttcatatctgcagaattttcatgagtactaattntactcacaacaatatcaccactagcaataatatcacgaacaaaatgataccgaancatcaatgtgttttgttct

SEQ ID NO: 2958 - DNA, 379 bp, Gossypium hirsutum
  Clone ID: LIB3196-020-P1-M1-F3
gaccttcaaatcagtacagtattttgtgacagtcagagtgccatcttctttacaaagatcaaatgcttcatgagagaacaaaaacacattgatgttcggtatcatttggttcgtgatattattgctcgtggtgatattgttctaagcaaaattagtactaatgaaaatcctacaaatatgatgactaagtcacatttcataaccaagtttgagcattgcttagacttggttggtgttcattgttgaagttaacccttaaggggttttctggaagaggtggagaacttgttcgttgagagttcgagataaagaacttgttcattgagagttcacgatgaagaacttgttcattgagaattcgcgatgaagaaattgttca

SEQ ID NO: 2959 - DNA, 382 bp, Gossypium hirsutum
  Clone ID: GOSHI-09MAY01-C60582_1
atcacccgggccgagatgtctcgctcagtggccttagccgtgctggcgctactctctctttctggcctggaggctatccagcgtactccaaagattcaggtttactcacgccatccaccagagaatggaaagccaaatttcctgaattgctatgtgtctggatttcatccatctgatattgaagttgacttactgaagaatggagagaaaatgggaaaagtggagcattcagacttgtctttcagcaaagactggtctttctatctcttgtactacactgaattcacccccaatgaaaaagatgagtatgcctgccgtgtgaaccatgtgactttgtcagggcccaggacagttaagtgggatcgagacatgtaagcagcat

SEQ ID NO: 2960 - DNA, 405 bp, Gossypium hirsutum
  Clone ID: GOSHI-09MAY01-C60442_1
atcgccgaggatggcggtcatggcgccccgaaccctcctcctggtgctctcaggggtcctggccctgaccgagacctgggccggctcccactccttgaggtatttccacaccgccgtgtcccggcccggccgcgggcagccccgcttcatctccgtgggctacgtggacgacacgcagttcgtgcggttcgacagcgacgccgagagtccgagaaaggagccgcgggcgccgtgggtggagcaggaggggccggagtattgggaccgggagacacggatcgccaaggcccacgcacagaccgaccgagggggcctgcggatcctgcgccgctactacaaccagagcgaggcggggtctcacaccctccagtggatgtacggctgcgacctggggcccgacgggcg

SEQ ID NO: 2961 - DNA, 416 bp, Gossypium hirsutum
  Clone ID: GOSHI-09MAY01-C60432_1
atgtccagcagcggtccagagcgcgcgaggttcggggagctcggcgaggctgctggtacctgcgtccgcccggcggacggctgctctggtttgtgacttccggacacgacggccatcctctccagaatgaagatcttcttgccggtgctgctggctgcgcttctgggtgtggagcgagccagctcgctgatgtgcttctcctgcctgaaccagaagagcaatctgtactgcctgaagccgaccatctgctccgaccaggacaactactgcgtgaccgtgtctactagtgccggcattgggaatctcgtgacatttggccacagcctgagcaagacctgttccccggcctgccccctcccagaaagcatcaatgttggtgtagcttccatgggcattagctgctgccagagctttct

SEQ ID NO: 2962 - DNA, 730 bp, Gossypium hirsutum
  Clone ID: GOSHI-09MAY01-C60672_1
tagccctttactgcaattgaaattcacaatcttttcccaaagcaaccaaaaacacaatttctgtttattgtttaaaattttttttatcgtttttccatggctaaacttgatgacactggaggtgatattagttgggacattgaagttagtgagttaaggcgtgacaatatgggtgaggaagatgttagcgatgaagagatcagagcggatgaattggagagacgaatgtggaaagattctgttagactcagaaggattaaggagagggaaagggttgcggctcaacaggctgcggaactgaatcaaacctcggtaactggctcggaggaagaagatttcccgagcgcaagatgggattcttaagatcatgttgatgttaatggaaagtttattatgcgcgtggatttgtgtacggtattggtcctcgatatggtttggctgggtgtggtgcctcgatatatcctattatcttggagtatatataagttaacatatttatatactgtattacatcttatattaattattagtccattaatattctatctatatattttacgatattgtaattattatatctttattaaattctttattaatatatgttatatatgatatttcgtatacatatctaagcttttattatacatcactaatacatttactatattaattctaccttgttatatatatgatcaattagactttaactatataattcattatattt

SEQ ID NO: 2963 - DNA, 817 bp, Gossypium hirsutum
  Clone ID: GOSHI-09MAY01-C60072_1
cccacgcgtccgcccacgcgtccggcatcatctattgaccatgttggttctgagtactctgatgcaactctagctgctggacgatatacttccagcctttccaacacttacaattcccacaagctacggcctgctgatacattcatcaggtcctcctggggttctcctagcaaagaaaatcatgccatttgttcgtctgaatgggagaatgaatttccagcttctgttgtgagggctgtgatgaagtttgggatgaaacgttttgcagtagatgaggacgggcggtgacacctacaaccactcatcgacttctggacatgagcaacgttcccttttctcctgggttgggttatgctacaagcttggcacgttttgctgcaattattggaccagtttggaaaattgctacaaggaaaattgaaagtgttttgcctagtggactcacgtttagtcctggatgggttggagaaaacaggacagttgagcagccacaatgttccttttctgataagcagagatctccgaattctctatctgataaccctccttttgcaggtatagaagacatggtagctgttagaggcctaaattctcaaaatgactcgactttggaaccttcttatcagttacagcaaagtcttgtactgcactcaagtatcaatggttctattggtgggtttgggtttggttatttctctcaacggagttgtaaccaatgtgtaattactgtctgaaagacttagtgccacttcacgcttgtatggttggggctttgatttcttcaagaggcaattgccgatgttaacgttacttttga

SEQ ID NO: 2964 - DNA, 535 bp, Gossypium hirsutum
  Clone ID: GOSHI-09MAY01-C60252_1
cgaaattgtgtatcatccgattgtttttggattgatccaactagacagccaccataactacaagttaatagaatcagttatgttttcataacaaccaatctttaaccgccacatagcaggcggaggagataccaaacacaatataaatacggaaatggagacccaacaaacattttcaggttcggaaaataaaaacagcgctttcgttctaggttttggactctggaaacctcaattccttccaactttactggtctaattacaattcttacctctcttgctttctgctcaagcgctttgaggatttgggcatgcgagtgccggacgctgatctttttaatccacaatcgattatggactccgacttctctcccggcggagcttccgcctctgcttccgtcgacccggactttggttttgcttttgacgacagtaatttcttcgatcggaccctgaggatcgagatcatgcctgatttgcccgagactaaattcgacggtggcggatgctgctctatcgctgattgggcccggaa

SEQ ID NO: 2965 - DNA, 492 bp, Gossypium hirsutum
  Clone ID: GOSHI-09MAY01-C61922_1
atgaggcctacaagaagggcctaattgattatgaaaccttcaaagaactgtgtgagcaggaatgtgaatgggaagaaataaccatcacgggatcagatggctccaccagggtggtcctggtagacagaaagacaggcagtcagtatgatattcaagatgctattgacaagggccttgttgacaggaagttctttgatcagtaccgatccggcagcctcagcctcactcaatttgctgacatgatctccttgaaaaatggtgttggcaccagcagcagcatgggcagtggtgtcagcgatgatgtttttagcagcacccgccatgattcagtaagtaagatttccaccatatccagcgtcaggaatttaaccataaggagcagctctttttccgacaccctggaagaatcgagccccattgcagccatctttgacacaaaaaacctggagaaaatctccattacagaaggtatagagcggggcatcgtcgaca

SEQ ID NO: 2966 - DNA, 456 bp, Gossypium hirsutum
  Clone ID: GOSHI-09MAY01-C61592_1
gcggggatgagtcttctgatctttgagagctcagcagcaggatatttagagactgcacgcctgcgtaagcattttaaggagcaagggagggatagggatgcttgggattgttcacgggttccattctgtccaggtggcaagcgccaactctatggctacattgccatgaaagaagatctggatttatttaaccagcactctcaaggaaagtccaggctgaaatttgagacgaggtcatatcaagagatggttgagagtcagataaagaagataaatgatgatagtcagcagcttaacctacttaaaaagaaggttgctcaagagcagcagccctcacaagtccttgcagagtctctaggacgattgagtgagaagctgcgccagacgacggaggaatatggtatcatgaggcagcaatctagattgcagcatgagcagaacaaagaagagttgggc

SEQ ID NO: 2967 - DNA, 619 bp, Gossypium hirsutum
  Clone ID: GOSHI-09MAY01-C61682_1
tggatactgaaggtagcgagattcacatgggagatctcggtggcgctgcctccgtcaaagctgaggatggagaaatctggacattcagcgttagagctttcggtacaccgcgaccagagcgaacaattaatgtgaattatgatggttttgccgaagatgtgaaagttggagatgaacttttggttgatggtggaatggtgaggtttgaggtgattgagaagattggtcctgatgttaagtgtaggtgcactgatccgggattgttgcttcctcgagccaatttgactttttggagggatgggagtcttgttcgtgagcgtaatgcaatgcttcctaccatttcttccaaggattggttagacatcgactttggggttgcagaaggtgttgattttattgcaatatcctttgtcaaatcagctgaagtgattaaccatctcaaaagctatattgctgctaggtcacgtggtagtgacatagctgtgattgcaaagattgagagtattgactcattaaagaacttggaagaaattattcaagcatcagatggagctatggttgcaagaggagacttgggtgctcagataccattggaacaggttccatcagctcagcaaaa

SEQ ID NO: 2968 - DNA, 793 bp, Gossypium hirsutum
  Clone ID: GOSHI-09MAY01-C61132_1
tagaaaacaagcagaccaaaggtctccggggtcccccaaaagtctcattcggtccgccgctcaaccattgtttcaccaccttatcaatgggtgaaggcgcacaaaggcgccttaatgctctccggttggagcctagcctcaaaggccgttgattttagccccaaaatcccatcttcgactttgatgtcaacgaaggagatgaggatccctacggctcgtatgccaaggtacgggtgcgtgtacggggatcgtgctggcgcttggcgtgaggagcaccgaggctggggctgctgaaacgttggggcgtacggaggcacgaagctgctgtccgattgttgttgcggcgcaggaaggaggagtgacctaaggttactgaagctgcttcaacctttgagctgttttgggcctcgaactttggactattttgtaaatgggctagggtattaattttagtgggctgtttgggcttgtaataagacactaactaaatggactttgttttattcatttatttatttgtacatgttttatatgtatatatgtgtttggggttttagcgggcccgggcaaaaattggtcactacatcggccatggatctcggttcgctccgttaaaatcgaagccgaaaggggatgtaaaggcatcgtggtgttggaagaaggttgagtggcggccgaatagagcaaacttctaggtttttggctttttcaatttgttctgccaaaatattggcttttaaaaagcgcacacaaagtgacgccgtttatggcttgtatttgtagccttgaaatc

SEQ ID NO: 2969 - DNA, 291 bp, Gossypium hirsutum
  Clone ID: LIB3196-023-P1-M1-E7
ggaggctggggctgctgaaacgttggggcgtacggaggcacgaagctgatgtccgattgttgttgctgcgcatgaaggaggagtgacctacggttactgaagttgtttcaacttttgagctgttttgggcctcgaagctttggactattttgtaaatgggctagggtattaattttagtgggctgtttgggcttgtaataagacactaactaaatggactttgttttatggggggcagacccagtcccagcccaagctcctggagagggacaagaaggtcttaccctgact

SEQ ID NO: 2970 - DNA, 403 bp, Gossypium hirsutum
  Clone ID: GOSHI-09MAY01-C61082_1
atgcagtttgggacttacgaagtagtctgttggatagtttagttctcaagattctcaaggctaagtagaaccagatccaagcattagtgatttgaggatgatccttggcgtttgtaaacaactttatgagattgctttcctagtttcctcccactccataatctctccactacttcctggttccctgggctccctttcttggttggtcctctggccagaaacttggggatctagttactctactctgttgctatttcatacctttatgactgggcctgcattctgacccatgtggagggggtacagagagaaaaaaaagcaacagggttgctgtacccttttaaaaccataactcgaccaaacagaaatattcccctccctcaaagttttagttcctgtgggc

SEQ ID NO: 2971 - DNA, 425 bp, Gossypium hirsutum
  Clone ID: GOSHI-09MAY01-C61232_1
atgcgcgccctaaggagtggcactttttaaaagtgcagccggagaccagcccacagccgcctgtatctgtgtccagcccgggtcccgcctgtcccagctgcgctcgcccctcagtcccgcacccgttcgacccaggctaggttagccctcaccatgccggtcaaaggaggcaccaagtgcatcaaatacctgctgttcggatttaacttcatcttctggcttgccgggattgctgtccttgccattggactatggctgcgattcgactctcagaccaagagcatcttcgagcaagaaactaataataataattccagcttctacacaggagtctatattctgatcggagccggcgccctcatgatgctggtgggcttcctgggctgctgtggggctgtgcaagagtcccagtgcatgctgggact

SEQ ID NO: 2972 - DNA, 966 bp, Gossypium hirsutum
  Clone ID: GOSHI-09MAY01-C62752_1
aaaaaaaaaaaaaaaaaaaaaaaaaaaaccccaaaaaaaaaaaaaaaaaaaaaaaaaaaaaaaaaaaaaaaagggcggccgccttttttttttttttttttttcaccaacaaccactcaattttgattaaaataacaaaaaatcactaacatttaaaaagttacaactcaattactaaactttataaaaatgacaaatcggacacttacagacatttttccgttacaatcgtaatggaaagctgaggtgactcgttaactaccccgttgaacgttagctagcaatggtggaaccccaatttaagaaacctaattgttggaagaagaagcagaagagaagaaatggagatgcctactgttgatttgagttttctctcccccccctctctattgatttttctcgacatccaaacaatggagagattatacctctgcgctgccgcttccttcagcttcaacccccttcttttttcctgatctcttctctcatccccttctcatttttggtagctagctttttctggtccctacgatccattccagccctaaaccttcaaccaaacaaaaattgtgcctcgtgagggttttggtacaaagaattcatgtctctggaagtatctttggtgctctcccaatcgaaagaaaacctaaatttctcgctaggtttaataaccctcattttaggctttttggatccgaggtactgctcattaattgcagctagcttatccaattccttttccctttccctctcagctagcttatccaactacgcccgctctcgagctttggcttcctcctccctctcacgttcacggttcctccggtcagattcacaatccctctctcactatcgttcgtattcacggcggtcgtagagtcaaggaaggcttacatataggaatcaaaggtattgttgggggtggtgttaaacacgaggtctttgagcggcacttctgcagggtgc

SEQ ID NO: 2973 - DNA, 504 bp, Gossypium hirsutum
  Clone ID: GOSHI-09MAY01-C62692_1
gtgaggcagcggggagagatgggagagatgggagagaggagaagaaagcagtgacgccattgagggaaatgacaccagagaggatttttgggaagatgggtcacttgcagaggttgttagatcggttcttgtcatgtcggcctacaggattggcaaagaattgtaggatgatcttgattgctttatatcctgttgtgaaagagagttttcaattatatgcagatatttgcgaggttttggctgtgctgcttgataagtttttcgatatggagtacccagattgtgtcaaggcatttgatgcatatgcaagtgcagcgaagcagatagatgagttgtttgcattttataattggtgtaaggatacgggtgtggctagatcgtcggagtatcccgaggtgcaaaggatcactagtaagttgttggagacattggaggagtttgtgagggatagagctaagaggccaaagagtccagaaaggaaagagctcccttcttcacctaaag

SEQ ID NO: 2974 - DNA, 634 bp, Gossypium hirsutum
  Clone ID: GOSHI-09MAY01-C62682_1
gcagttggagaggccaatcttccgacagggggcaatcttccactccagggtcaagaactgggcgaaacgattacagaaatagcagtagtcgagatgggcatccaagtggtgtaccacggccctatggtggacggggacgtggtaggggttcatataatagcagcaggggacataatgaggggcaggattcatcatacaatggaactccgaaacgggattcaggtaacaaaagaggggaagatggtttggggtaatttccccggtgctaaagttcaaaactctccaggtagggaagctttccctggtggttggggtggcagtgccggaacccaaagtggcagtggcagtggcagtggttggcaatgacaatggtgatttggactgctgactggtccccaaaggttgtaatattattatctacttggaggatagctgtagtgttaggtgtagggggtttagttttagaattcccaattgaaattattgctttgcctgctgcccgaataataaactgaaacatgtagttgtagttatagtgtgtttgtacatgtataaattggatcaaagagatacttctgatacgaccaatgtttctttctagtttgttctttggcatgaacattcatttttctgt

SEQ ID NO: 2975 - DNA, 561 bp, Gossypium hirsutum
  unsure (1)..(561): unsure at all n locations
  Clone ID: LIB3829-023-Q6-K6-F6
cataatgnnaggggcagggatgggggagtagcagtgggaactccgaaaacgggnnattcagggaacccaaaaaaggggaagatggtgtgggggtgaatttcccaggtgccctaaagttcaaaactctttccaggtagggnnaagctttcccttggtgtgttgggtgtgtgctagtgccggnaaccccaaagtggctaggggcgagtgggcaggtggttggcaatngacaaaggtgatttgngactgcnntgactggtccccaaaggtagtaatattattatctacttggaggatagctgtagtgttaggtgtagggggtttagttttgaattcacaattgaaattattgctttgcttgctgaccgaataataaactgaaacatgtagttgtagttatagtgtatttgtacatgtataaattggatcaaaaagatacatctgatacgaccaatgtatctttttagtttgttctttggcatgaacattcatttttctgtattttgatcttcttgtaacaatagtactcatgttctcacgaatggaaacctgaaatttgtctct

SEQ ID NO: 2976 - DNA, 1067 bp, Gossypium hirsutum
  Clone ID: GOSHI-09MAY01-C62092_1
agcaattgttgtcagatattctttgtggttataatacttgaggccatgcctgctacaaagaagagttctgattgcagtcacattggttatgcattcaacaagttgatgaagcaaattggacatccggttgagtttgaactgccagattgctttaataagtggaaagacacgccatacaccgttataaggcgcaaggattaaaaggcgcctggaggatgatggaattttctgttcttgcacaccatcatcacctggttcttctgtgtgtggcagagattgccactgtgggatgctactgtctagttgctcttctggctgcagctgtgggagttcatgcctcaataaaccattccaacacagacctgtcaaaaaactgaaattgattaagaccgagaaatgtggagagggcattgtggctgatgaagatatcaagcatggagagtttgtaatagaatatgtcggggaagttattgatgacaaaacatgtgaggagaggctttggaacatgaagcatcgtggagaaaccaatttctacttatgtgaaatcaatcgtgatatggtaattgatgccacatacaaggggaacaaatccagatatataaaccatagttgctgccccaatactgagatgcagaaatggataattgatggtgaaacaaggattggcatatttgcaatgcgagatataaaaaagggggagcatctgacctatgattatcagtttgttcaatttggtgcagatcaagattgtcactgtggtgccgctggctgcaggcaaaaacttggggtcaaacctagcaagtcgaagatgtcatcagatgctacattaaagctagtagcatgccaagtggcagtgtcctctccaacattgaaagctgtgctatttggaaaagaaaatggaggtttgcctgtcgggacttctcagcatgattataatcaacgacagttacgttttcggtgttgcattggtgaagtgataaaaatatctcgtccaataaatgatagttactttggaattattaaacgatttgacaagtattcaaaaaagcacctggtcatgtttgaag

SEQ ID NO: 2977 - DNA, 500 bp, Gossypium hirsutum
  Clone ID: GOSHI-09MAY01-C62252_1
atgtggaatggagattcagttttcatttggttcattaattctataaggtcataaaacaggtaatataaaaagcttccatgattctatttatatgtacattagaaggaacttccaggtgttactgtaattcctcaatgtattgtttcgacagcactaatttaatgctgatatactctagatgaagttttacattgttgagctatcgctgttctcttgggaactgaactcactttcctcttgaggctttggatttgacattgcatttgactttttacatagtaattgacatgtgccagggcaatgatgaatgagaatctacccccaggtccaagcattctgagcaactcttgattatccataaagagtcaaatggtaggcatttcctatcacctatttcattcaacaagagcactacattcatttagctaaacagattccaaagagtagaattccagtgaccgtaattaatttcaaaaaacttttaataataataataattt

SEQ ID NO: 2978 - DNA, 384 bp, Gossypium hirsutum
  Clone ID: GOSHI-09MAY01-C62222_1
atgtttctccaggctggaccagtagtcaacacccgcgtgccaaaggatagagtcactggccagcaccaaggctatggctttgtggaattcttgagtgaggaagatgctgactatgccattaagatcatgaacatgatcaaactctatgggaagccaatacgggtgaacaaagcatcagcccacaacaaaaacctggatgtaggggccaacattttcattgggaacctggaccctgagattgatgagaagttgctttatgatactttcagcgcttttggggtcatcttacaaacccccaagattatgcgggaccctgacacaggcaactccaaaggttatgcctttattaatttgcttcatttgatgcttcggatgcagcaattg

SEQ ID NO: 2979 - DNA, 1146 bp, Gossypium hirsutum
  Clone ID: GOSHI-09MAY01-C63992_1
gtttttattttttttattttctctctctgtgttatcaagaatggcggaaatatcgccatctcccatgtgcacttcaccagatattattattaatacccactgggtttaagttcccttgcttttctctgcccttttcatctccctaaacgatgtcgcttgtctatgataggaataatgaaaatagtagttcaatgagacgctcggggtttatccacgggatgcagtgtatctccgtctatgattcgccggaggagaaaagagatgataggttgcggttgctttcgacggaggaagaggaggaagagagagacgatgatgagtcggggtcttgcagttcgtcgtcgataggaaggaacagcgatgattccggtggatcaccatcggatgatgatgactcaccggaacctgaagtacaaagccagcttaaaggacctttggatacaatggatgctctacaggagattttgcctttgagaaaaggcatatccaagttttataatggcaaatcaaagtcctttacaagtttagccgatgcggctgctgtttcctctgttaaagattttgcaaagcctgaagatccctacaataggaaacgcaagaacttattagctcgcagttcttcattggacaagaaacccaacaatcttttgggaaacattggaactaaaatatcaatggcatcatcgccgtctaactgccttccacctctgcatccacagtgtaaaaaatcaactaccatcatcaaaccatcatcatcatcattaactgctcgaccaaagcctccttgccggtcttattccttgtctgatctacagtttgttgctgctacaactcctaacatggccggtttggctgttcacagtggtaataaaggcaacaaactgcgttgaaattaactacaatttcgcttttagaattacagaactggaaatttataatttccaaaaggcttgtagttttagtcattgagatgatcacttgtgttctgctttgatctaatgcttgtggtttgaagtggtaggtataccatggacatgccatttagaagtaattactgatgtactcctcttctcgtctctttgtttgctttgaaacaatggtgagaatgctttattgtaaaatactattaactaaaatactttcttt

SEQ ID NO: 2980 - DNA, 342 bp, Gossypium hirsutum
  Clone ID: GOSHI-09MAY01-C63842_1
cccacgcgtccgaatcctcccggactacatcccacctgggactgaccttatttttagtttctccgattgacttgaattttcaccatgagagctgatcatccattaaaagccgtgactttagcccatgtcaggtatcaaagaggtgatcaactcggccatttcttagactgggtttcgttagtccctgttttcatttcccttggtggctttgtttctcatttctacttccgtagagagcttcaaggaatgttctttggattagggcttttaatatctcacttcattaatgaactgatcaagaaatccggtcaacaagccaagcctgaagcctgtgcgctatta

SEQ ID NO: 2981 - DNA, 523 bp, Gossypium hirsutum
  Clone ID: GOSHI-09MAY01-C63582_1
ctaaacctccaagcaaaatcccatcaaagacccatttttgaagaatgagcagtggagcagtttcagcaagcaaagcctggattgtggcagccacaatcggagcagttgaggcattgaaagaccaaggcatttgcaggtggaattacaccattaggtcactgcatcaacatgccaagaacaatatcagatcttcttctttcttttcttcttcttcttcttcatcttcttctgctgctgctgctgtttcaaataagttgagggaggaaaagatgaggaaagctgagcagactatgaagaaagttatggatttgaactgttggggtcctaatactgttagattttaatgttctttccatgtgcttcattctttttactacagcttttatcctttttgttagagaaaaaaaatttatggagagagatgatctgaattggtgtaaatcagccttttcaaatttttttcatattatgttggatcttgttgtattggggattatcatatgaaaaaaatttatgaaataca

SEQ ID NO: 2982 - DNA, 615 bp, Gossypium hirsutum
  Clone ID: GOSHI-09MAY01-C63532_1
gaaagggcattagttctcatgacttcagtgaattgttaatgtcatctgggattgttttgaatgataatgtgcattgggtgacttttcatagcggctacgattttgggtatttgcttaagttgctcacttgcaagaatcttcctgaaacacagacagggttctttagtttgattaagatttatttcccgactctatatgatatcaagcatctgatgaagttttgcaatagcctacatggtgggttgaacaagcttgcagagctgttagaagtggagaggattggtatttgtcaccaagctggttcagatagtttgcttacttgttgtacattcatgaaactgaaagaaaatttctttagtggttcggccgagaaatatgctggtgtgttatatggtcttggtgttgagaatggacagaatactctctaataaatcaaagaaaacttctttagttggtcgactgagagatatgctggtttgttatatggtcttggtcgttcagaattgacagaatacttcttaaatatcaaagaattatgaaataaaagctgtttgttagacttgtgttccatttgcaatctacttataatatctcgtatcttatcatcagcctgtt

SEQ ID NO: 2983 - DNA, 542 bp, Gossypium hirsutum
  Clone ID: GOSHI-09MAY01-C63142_1
cgctaacacccttccctgaaagccgtggtgttcgtccacagaaattccctgcagctggagcagcgccttatgttcccatcagacaattaaggacaccttgctgtggcattgctccaccagtgacaataagaactgcagtgcctgttttctctgcacctccgcgtccagcaccagctgcagtatctcctcagccaccgacatcagcggttcctactcatccccctcaaccagcacaatctgttcttcctcctcatcaactgccagcgacactcccctctcaagtgctgcgagctcctccagtacgaattgcccaagcagtcaccattaggcaggtggttcctgtatttgctgctccaccggtacgggaagaagataaacaattccgttcctctcagaaatgaagatatcacaaccgctactgctgctcccccgcctaaccattcacctactcaagcagaggaagcagcatgcacaatatcgaagaacctgcaagaatctgagacggtccaagagtttagaacaactcaaaatctgatggcaag

SEQ ID NO: 2984 - DNA, 543 bp, Gossypium hirsutum
  Clone ID: GOSHI-09MAY01-C63072_1
tcggtgggctgcctgcgccacaaggctgagatggtgatttttgaagctgcaagagcaatcacagagctcaatggtgtgacaagccgagaattgacaccggcaatcactgttcttcagcttttcttaagctcttctaagccagtgctgagatttgctgcagttcgtacgctgaacaaggttgcaatgtctcatccgcgggcggttactaactgcaacattgacatggagagtttaatttctgaccaaaatagaagcattgccacacttgcaatcactacccttctcaagactggaaatgagtctagtgtggatcgcctgatgaagcagattaccgtattttaatgtctgatattgcatgatgaattcaaaattgttagtgggggacgccataaagatctctatgcttaaagtttccattgaagcacagatactttgatgaattttttaagcaatattttaagggagggaaggtggttttagtacaaaaaggccattgtagattaaatgtgattctatcagagatatccctgagcaaaggaaagt

SEQ ID NO: 2985 - DNA, 369 bp, Gossypium hirsutum
  Clone ID: GOSHI-09MAY01-C63002_1
cccacgcgtgcgctcatcttggagaaactggcaatcgctgatctggtacattttgattttatggacccacctgctccggagacattgatgcgtgcattgcaagtgctgaattacttgggagcattggctgatgagggtaacttaacagagactgggtgagagcatgagtgaattccccttggatcctcaaatgtcaaagatgctcgtagctagttctgagttcaactggtcaaatgagattctttcagttgccggcatgcttatcagtacccaattgctttgtacggcctacggaggcacaaaaagctgcagatgaagcaaaagctcggtttgggcatatcgatggtgatcatctcacacttttgaacg

SEQ ID NO: 2986 - DNA, 651 bp, Gossypium hirsutum
  Clone ID: GOSHI-09MAY01-C18982_1
ggtaaaattgcaggtataggtcttaattccacctgaatttaattaggtcttaattccacctgaatttaatttaagtgttgaatatgagtttgaatgaaccaaaacatttcagtaacccgggattagatcctgttttctaacaaagaagacatctcaaacctggtttgtaacatcaaacagaataaaaaacatatcattagatggatccgccattaacaactgtctcagaagagcaaaagcttgtagaattcgattgatggacaggtattctaaaaacccagagtttccctctagcagagaccaagttttgttcgcagaagaattcccaagaaaaccatttttcaatcgtccgatgaacatcgtgaactacaacgtcagtcgtcgtcttcttcccaatcccaccagttcttgccaacatgccggcagtgtagatagttggcatcctccctggtgcttccggcgtgtccccgatcggcccgtccacaaccacaacatcccatttaagcttataaacgtcttctggtaagtttctcaatgccaatttgcaactcgattgattcaacagatttgtggtgggagaacaagcaggccatttttccttgcatgtttgagcaaattgtatgctcgtttagctggtatctgatactagac

SEQ ID NO: 2987 - DNA, 365 bp, Gossypium hirsutum
  Clone ID: LIB3083-020-Q1-L1-F3
agaaaaaaagaagattatatttggtaaaattgcagggataggtcttaaggccacctgaatttaatttaagtataagcgttgaatatgagtttgaattaaccgaaaacatttcagtaaaccgagattagatcctgttttctaacaaagaagacatctcaaaaacagacaataaaaaaacatatcattagatggatccgccattaacaactgtctcagaagagcaaaagcttgtagaattcgattgatggacaggtattctaaaaacccagagtttccctttagcagagacaaagttttgttcgcagaagaattcccaagaaaaccatttttcaatcgtccgatgaacatcgtgaactacaacgtca

SEQ ID NO: 2988 - DNA, 535 bp, Gossypium hirsutum
  Clone ID: GOSHI-09MAY01-C18942_1
tgataatttatcagaaggttgcaataaaaagggagattgtttggatgaagtaataggagacattgggaaagaagcatttttgacgaaggaattcgtgccttaccttctgtttgggctactccttgctactgtcgagacgatttcacccactgtcactttggccaccatgtatctactggacaacccatcggctttgcaacgattaacagaggagcatgaggaaattctaaagaacagagaagatgccaattctggacttgtatgggaggaatacaaatccatgacgttcactcgttacgtgattaatgaaacacttaggttagaaaatgttcttcctgggatgttgaggaaagttatagctgacattcacgtcgatgaatatacaataccaaaagggtggatcctattgcttatgcccacagctcttcatctgaaccctaatatatatgaagatcctcttaccttcaacccatcaagatggaagaacattgggagcaatggaatgggcaagaactttatgccttttgaaggaggg

SEQ ID NO: 2989 - DNA, 1794 bp, Gossypium hirsutum
  Clone ID: GOSHI-09MAY01-C18922_1
cccaattaaaccttccgaaacctattacaattcacacattggtgagccatccatggcattggcacgtcttcaaatcctcgtagcactttccttggtgcctttttttctttttccggttgctttaggatatagggctaatgatgtgagatcatggtgcaggaaaactcctaacccacagccgtgcgagtattttttgagccatgatcccaaaaacaccccaatcaaagatgagttccaatttttcaaaatctccatgcacctcgctctagagcgtgccgcacgagcagaaagtaacacgcattcattgggccctaagtgccggaatggacgtgaaatggctgcatggtccgattgcgtaaacctgtatgagttaaccatccttcgtctcaacaaaactgttgattccggcaccaatctcaataaggatgatgctcaaacatggctcagcacggctttaaccaatctcgaaacatgccagaccgggtttatggaactcggggtcccggattatcttcttcccatgatgtctaacaacgtttcccagttaattagtaacaccctggctctcaacaaggcaccttacaaggaaccaacctacaaagatgggttcccgacatgggtgaaacccggtgacaggaagctgttgcagtcgtcgtcgccagcttctacggcgaatatcgtcgtggcccaagatggttcagggaattataagacgataaaagacgctatatccgctgcttcgaagcggtccggaagtggaaggtatgtgatatacgttaaggcaggcacatacaaggaaaacgttgagataggaagcaagctgaaaaacatcatgatggtgggcgatggtatagggaaaactataatcacagggagcaaaagcgtcggaggaggatccacaacgttcaattcagccaccgttgccgttgttggagatgggttcattgctcgtggcattacgttcagaaacaccgctggtcctactaaccatcaggcagtggctctacgttcaggctccgatctctcggtgttctacaaatgcagcttcgaagggtaccaagacactctttacgtccattccgaaaggcaattttacagagaatgtgacatctacgggaccgttgattggatattcggcaacgcagccgttgtgtttcaaaactgcaacatatacgcacgcaatccccctaataagaccaacacggtgacggctcaaggccggaccgacccaaaccagaacactggaattataatccacaactccagagttacagcagcttccgatttgaagccagtgcaaagctcggtgaaaacatatctagggaggccatggaaacaatattcgaggacggttttcatgaaaacgtatctggatagcttgattaacccggccggctggatggaatgggatggtaattttgcacttaagacgctgtattatgcggagtatatgaacactggccccggttcatccacttctaatagagtcaaatggggaggctaccatgttcttaagagcgcaagcgaggtgtcaaagttcaccgtcggtaactttctggctgggaattcttggttgccgagcaccggtgtgcctttcacttcagggctttaatttgttgcgatttcatagttaatttaattgcttgtaaaataagtaacagggtttaatagggttaaggctgtataaaccctcaatattgtactaaaaatgctactttcatacagggttgccatcaattctttgtgtaacgttctaaaatctttgttaatgaataataaagttgaatttcatcc

SEQ ID NO: 2990 - DNA, 380 bp, Gossypium hirsutum
  Clone ID: LIB3083-078-Q1-L1-C4
gctatatccgctgcttcgaagcggtccggaagtggaaggtatgtgatatacgttaaggcaggcacatacaaggaaaacgttgagataggaagcaagctgaaaaacatcatgatggtgggcgatggtatagggaaaactataatcacagggagcaaaagcgtcggaggaggatccacaacgttcaattcagccaccgttgccgttgttggagatgggttcattgctcgtggcattacgttctacaaatgcagcttcgaagggtaccaagacactctttacgtccattccgaaaggcaattttacagagaatgtgacatctacgggaccgttgattggatattcggcaacgcagccgttgtgtttcaaaactgcaacatata

SEQ ID NO: 2991 - DNA, 1063 bp, Gossypium hirsutum
  Clone ID: GOSHI-09MAY01-C18542_1
cccacgcgtccgcccacgcgtccgcccactcgtccgcccaaatagaagaaatctcaagctgcgggggtgtggccatccaccacaccttccacttcttcttcccaacttttatggcccaaccaacattgattgccgctatttgtgttcttactctgtcccatgtagttcaagcaacaacctttaccatagtaaacaaatgcgattatgtggtatgccctggaattctctcaaacgctggtgttccaacacttgctacaacaggtttcaccctccaaagaggtgaaaccaaaaccattaccgcccccacatcatggggcggtcgcttttggggtagaacccattgttcgcaagattccgacggaaaattctcatgtctcaccggtgattgtggctccgggaagcttgaatgttctgggaatggggctgctccgcctgccactttggctgaatttactttggacggtgctggtgggcttgatttctttgatgtgagtttggtggacgggtacaacattcctatgttagtggttcctcagggtggcaaaggtcaaaattgtagcagcaccggctgcgttgaggatctcaatggcttgtgtccttcggagcttagataatgagcagtaacggcaggggtggcatcgcatgcaagagtgcttgcgaggccttcccccagcctcagtactgttgcagcggcccgtatgccacacccgatacttgcaagccttcttcctactcccaagtctttaagacagcttgcccacgcgcctacagctatgcctatgatgataaaacctgcaccttcacatgtgccaatgctgcccattactccattactttctgtccttcacctaacaccagccagaaatcatcgcaagaggcgacaacgccagggcagaacacagaaacaacaacaacggcgatgccaacgtcacctcttgtcgacaacactatcatgtcaggtgtgggatgtgctgggtctcatggtgacatggaatccagtcatgacattgaaagctcacctgtcaattgaattgtattgagcccccccccctccccgcgccct

SEQ ID NO: 2992 - DNA, 527 bp, Gossypium hirsutum
  Clone ID: GOSHI-09MAY01-C18572_1
ccataacccaataattttctctctttttttcctccaaaaacttgggttttctttcatttacatccaagtcctaaaataccccaaaaatttcataaaaaaagtgttcctaaaagctcaaaagaattcataaaaatagaaatggaaactgggttttattcagcatgggagaatggttctttattagaagaagatggtgatgatgaactgatccctcagccattaacaccaacggagccaatggagtttttatcaagatcatggagtttatctacatcagaaatctctaaagctcttgcccagaaacacaatcactttgaatttgatcatcataataatgataataagaatcaaagttcattgttttcagaatcctttgatgcaccacaaattgcagggaaagtgatgaactccattaatggtcgaagaacaggcacaatcagcaaatggtttaatcatcacaaagaaataggaaccaacacagtgaagaagaaagacaaaatacgtgcagaaaacgctcggcttcactc

SEQ ID NO: 2993 - DNA, 764 bp, Gossypium hirsutum
  Clone ID: GOSHI-09MAY01-C18512_1
gtttagggctttgaaagctgaagcaataccccctttggattgtaaaaggaaatcagatttcatttctcaaaaagaaaaatgctacctcgatggagcagggctgtaacccatctctcaaagctacgatcattcaattccattgaattaggcaaagatttcagtttgattcatcgccaaagctatgcagctgtggcacctgcacctgctccttctgctgattccttcccacctaccagatcatcggtaaatttggataaaatgttttggtctaagccttgttcattggctttggccccagattctccccttagagtggaagacccaaagtatgaaggcattaggcgtattgttctcaagatgatgcttttctatagtaaacaaagcaagtcaattcgaggggctaatgttatatataggcgtgtcctttcccaagttgataaacctgctatttatgaagtatttagcttggagaagacattcaggatgacgttttcactgcttgtacttcatatgtggctctgcttacgccggttgaaagctgaaggaaaagatggtgttgaattaggacaatacgtctatgagatttataatcatgatgtcgagctcagagtatctaaagctggggttgacttacttttgacgaaatggatgaaagaattggagaagatattctcgggaaatattggtgcttatgatgctgcttgcttccggaggctacacacgaggagctaacagaggttatatggaggaatatcttttctgat

SEQ ID NO: 2994 - DNA, 691 bp, Gossypium hirsutum
  Clone ID: GOSHI-09MAY01-C18442_1
aaaaatccaaattcatcgcatcgggggggtttttatacgaaattgggtaattaaaaaaaataaaattttgatggaaaagggaaaatctgctcgacaagccgtagaaatctcgttgaagaagctcaatctgaacgctgatcgaaactttaaatcctctcgtttgatatcttctcttcactcatcaaagttacgcattgagaagacgaaacctcctagtttagtgagcttgtgccttggagttattggtcggcatctggaggaaattatcgaggatttaagtgaaattgctgttaattttcccgcggatattaagataccattggcagcaatagcaaggagaagaaaattactgaatgatgatgtcatcatctccttggccgatagttcttgggaaattcttgacctttctggttcagatgtttccgattttggcttagctaaagtagctgaaatgtgcaaatctcttcgggctgtggatataagccaatgcaaaaaaattactgccaatggtgtttctgaacttgtacggcactgtcattcattggagacgatgagatgcggagggtgcccttcaagcgagtctacagcccggcgatgcttaggcatactgaagccaaagctgaatgatgtggagggagattcttgggaggagcttgataccatggagattggtcatggtgcacagtctttg

SEQ ID NO: 2995 - DNA, 892 bp, Gossypium hirsutum
  Clone ID: GOSHI-09MAY01-C18412_1
ggttaacttaactcgtgccgtgttaggctaccgctaggtgtcgctgggtgacgattatttgttgcagaggaggccccgcggccggtaggaggtgcgtgcggggtgtgcaaacaccaaatctgaaacagttgactgttggttttgaggtttttgcaaatgtcgactttaagccttccgccggttcttacctctcctagagacgatgctattcagctttaccgtgctttcaaggggctgggatgcgatactgcagcagtagtcaatattcttgcccatcgagatgcaactcagcgttctttaattcaacatgagtatagagcaatgtattctgaagaccttctcaaacgacttgtttcggagcttcgtggaaaattggagacggctgtcttgctatggatgcatgatcctgcaggacgtgatgcaatagtcattaggcaggcacttttaccagatttgacaaatcttgatgctgcaactgaagttatttgttctcgcacaccatcacagattcaattaattaaacaaaattaccaagcgaagtttggggtttttcttgagcaagatattgaaagacacacctcaggtgatcacaaaaagcttttgcttgcatatgtaagcacctcccgttacgaaggtcttgaagttgatagggagatggctatgaaggatgcaaaggccctctataaagcaggggagaaggagattgggaactgatgagaaaacctttatccgcatatttagtgaagaagtcaggcacagctagcagctattagcgctgcttatcatgacatatatggaggttcccttgaaaggcagtgaaaagcgaacatctgggaagtttgagcgtggtctcttgactatttacaatgctcagagaatcctgcaagtacgg

SEQ ID NO: 2996 - DNA, 326 bp, Gossypium hirsutum
  Clone ID: LIB3272-042-P1-K1-B11
atttattgaaacggttttgttgagaattgagagagcatcaaagcaaagcaaagcggggcaatgtctactttgagcgttccgcctgttcttacctctcctagagacgatgctattcagctttaccgtgcttttaaggggctgggatgtgatactgcagcagtggtcaatattgtttcccatcgtgatgtgacacagcgtactttcatccaacatgagtataaaacaatggatgctgatgacctactcaaaccactgaagtccgagctcagaggaaaactagagactgctgtcttgctatggatgctcgatcctgcgcaacgtggtgc

SEQ ID NO: 2997 - DNA, 617 bp, Gossypium hirsutum
  Clone ID: GOSHI-09MAY01-C18612_1
cccacgcgtccggacaacccaaatcttgtcttgtttgtttccgctgtttagctgtttctttcaccaaaaagatgtctgaattttcattggcttgcaagaagaaaaatgatgaagatcatgaattgtcaaggcttttggtgtccgattttatcctcttttgctcttccattttctctcaccctctctatttctcttatttcatcttcttctctccttatttcgtcaagcttctctcttttctttcgcctctcttctttaccactacccttttggttcttaccttgttcacccttgaccaatcagatgcctccatttgccacctcgaatccaagctactaacttccctacttactgcataccaaacactagttgaaacattaaggtgtgaagttgaggatgaaagtgatgggtttgggtgcttggaaccgctcgaagcttataagatagtgtttgaaacgtcaaaccctcttcaagtttgtctggatatggagtccaaagaagctcccattgacaagggtttagattcaaaaccagcgcccgaaactaatcaggtaaaggctgtagtgaaaatctttgaaaatttcttgcaagaaaaggaaagggttgaaattgttgtc

SEQ ID NO: 2998 - DNA, 695 bp, Gossypium hirsutum
  Clone ID: GOSHI-09MAY01-C18632_1
agctcaccgaaatttctgtgatcttcaattccgtccgcaaaccccaaaaaggtcaaccaaaaacctttgtcttctgtgccgatgaatccacaacaacccagtccatcggaacccgaccttcaggttccatccctcgcttccctccgaatccagccctcttccccacgtttccctttctccacccccatcgccggttctcagcgtcgcatcgccatcgccgttgacttaagcgacgagagtgcttatgccgtccgctgggctgtccagaattaccttcgtccgggagacgccgtcgtcctcctccacgtccgtccgacttccgtcctttacggagccgactggggctctatcaaactccaaatcacccccaactccacgaataatcgcgaaaacgccaccgccatcagcggcgatcactccgacgaggagtcgcagcagaaactcgagaacgacttcgacgttttcacgacaaccaaagcgaacacgctggcccagccgttagtggatgctcagattccgtttaaaatccacttagtaaaagaccatgacatgaaggagagattgtgtttggaagtggagagattagggctgagtgcagtgatcatggggagcagaagattccgagctctaaaaaactgcagggaaggctagaaccttatgattattgcgtccaccacggctttggtctgtggtat

SEQ ID NO: 2999 - DNA, 592 bp, Gossypium hirsutum
  Clone ID: GOSHI-09MAY01-C18162_1
gccaactccaaagcggagagaattctgaggataaaactcttgttgaaatcgtagatgagaataaacagattgagcttgctaagtatataaactatgtcagtgcccctcaagctggagccatagcaacattttcgggcacaacgcgcgacacttttgaaggcaaaactgtagtggagctaagatacgaagcatacgtaccgatggcgattcgagaacctcaagtctatctgttccgctgctagaccctcctgggatctccactctattgcggttgcccaccgtgtaggcttggttccggtaggagaaacgagtgtgttcgttgccgtatcggctactcaccgtgctgatgccctggacgcctgtaagtttttgatcgatgagttataggcatctgttccaatatggaagaaggaggtttattctgatggagaggtttggaaggagaatccggagtttctggagcggaggttcgaactcggcaaggatggcggctgctgccgaaggaagatcgagaccgcggcacgttgatataaagggatgttgcaaacccaaggttaaggaggaggatgcagcagatattagcaccagctaa

SEQ ID NO: 3000 - DNA, 604 bp, Gossypium hirsutum
  Clone ID: GOSHI-09MAY01-C18112_1
aataatctccctaaaaggagattgtgggatcaaacatggcacaagtatctgttgacaaagtagctgaagtagaccaatcatttttgcttgataaggaaaatgggaaactggacaaggatccagttcataatgagaccattccagtcattccccgcagcgaggagccgagtaagggagacgggaataatgcatccaatgacaacttcccgacggatgcagttgacgagtggcctgcagctaagcaagtccactctttttattttgtcagatatcgcctttacgaagatcccaagatcaaagccaaaatcgacgaggctgataaagagttacaaaagtggagtaaaactaggttcaagatcactgatgagttgaaagctaagaggtcagatcgtgctgagttacttgctcaagtgagagccctgaatgttgattttgaacaatataaggagattttagacgagaaaaagaaggaaatagaaccactgcagcaggccttaggcaagcttcgcactaatagctataccggtcgtggcagtatgtgttcatctgaggaagagctcaacgatgttatccattgcttgcaatatcgcattcagcatgaaag

SEQ ID NO: 3001 - DNA, 507 bp, Gossypium hirsutum
  Clone ID: GOSHI-09MAY01-C18122_1
tatttaaaccctaactttcccttaactttgaaaccctgattttcgtctcctctttcaaaatggaaattgaaagagaaaccaatgaaggcaactcaaggaggattcaagtccgatttataacgaaattaaaagcaccatataaagttccgacaacagccattgccatcccttctgacctctctcgtttaggcctttcctccattgttaacaagcttcttcaagctgcagtggattctgagtggaaaaccgagccctttgatttcctgatcgatggggagctggttcggatgtcacttgagcagtttcttcttgtcaagggcatctctgcggagaaaattttggaaattgaatacataagagctgttgcccctcgaaaagaggaagagccttctccgcatgatgattgggtcagtgctggtgacggttctagtcctaggttcattttgactggttgctatgatagtttgggaaagatatggaaacaagcttgatggtgtacgcatatac

SEQ ID NO: 3002 - DNA, 546 bp, Gossypium hirsutum
  Clone ID: GOSHI-09MAY01-C18092_1
cccacgcgtccgcaatcctcgctttgtttaaaagcaatctgaagaaaaactcgaaaactttcctacaattttcaaccaaaaaaaagccactctctcgttcggtctttgatggcggaaatactttctgctttgaggtctttaatggcctctcactctcctcctctccatgccttaatcgtcccttctgaagattatcatcaaagcgaatatgtttctgatcgtgataaaaggcgcgaatttgtttctggattcactggaagtgcaggtttggcacttattacaaaagatgaagcaaggctatggacggacggccgatatttcttgcaagcgatgcagcagcttagtgatcaatggcaactgatgcgtatcggagaagatccttcagttgattcctggatatctgataatttgccgagagaggcagctattggggtcgatccttggtgtgtatcagtggatacggctcaagatgggaacgtgcttttgcgaaaaaccagcagaaattaattcaaacctcaagcaatttggttgatgaggtgtggaaaa

SEQ ID NO: 3003 - DNA, 499 bp, Gossypium hirsutum
  unsure (1)..(499): unsure at all n locations
  Clone ID: LIB3582-016-P1-K1-D2
gccaagccgtccgcccacgcgtccgcccacgcgtccgcccacgcgtccgggagactcgtgattgtggaggctggcagcaagcgagttgaagggattatttcattaagtgatgtctttaggttcttgcttggtgtttagctcataaagtttgagccttaagtaattccatttgagcactntaatgtggcggcattgaggaagatccattaatttcatctgagtcctgtttctatcagctcctccacgcgacccctcgtcccctggtgaatgatcttatntgtgactcttggttgttttgattgacggngcttcataactgcaacccccaacccgtttttaggatagaaaatttcaatgagcaagaaaagaatttgtaaattgtgaattcaattttccccactttcatttcaataatcaactcaaccttactgctgttgtagcatccatgtctgtgactatgctaacagggaaaaggaaagggtgtaagtgtaactgtcgc

SEQ ID NO: 3004 - DNA, 407 bp, Gossypium hirsutum
  Clone ID: LIB3197-052-Q1-M1-E12
ctcgggtaccaaaaatcggggaatcaaatcatcggccattggcaatgctgcgaccaaatgcctctcttggtgctgccctgtcattgttagtgcaagccgaggtaagttcaataccaatagtggatgagaatgacgcgttgattgatatatatgcaagaagcgatataaccactttggcaaaggataaagcttacgcacagattcgtctcgatgacatgagtattcatcaggccttgcagttggagcaatatgcaaactctttcaatggacaaagatgtcaaatgtgtctacaatcggatactttgcacaaagtgatggagcggttggcaaatccagggactaggagacttgtgattgtggaggctggcagcaagcgagttgaagggattatttcattaagtgatgtc

SEQ ID NO: 3005 - DNA, 594 bp, Gossypium hirsutum
  Clone ID: GOSHI-09MAY01-C18252_2
aacacactgtaaaagaaaaaagccccccccgggaaacagcgccaatggctacttgtaccaccaccacaccgccgatcaacttcaacaatacataaatctggttcacgctgaacccaccaacactagcccacgcgagacaatcataaaacagataaaaatgcggttgaagaacgtggattttgcagtgatcgattgtaagttcgacgatgagtacttgaaattaatgtttaaaacaatggtggaggaggaggatggtattaaaacagggtcgactgtgatagttcataatgttcatcataaaaaagatgggtcgatatttggtcaacttttgaggaaaaagagagtggaagctgtgactttgcctattggtgaaggaactgagatgactcgaattttgggatgtaggtttaagagacgaaataggtttctcgtcaccttccataattgattttatgtaaatatatcagttttttttctgcattggaaggtggtctacgtaaaaaatcacttctttctgtgtttgtattatatgttagtattttcgaactgtaattgtattccaaatttttaattttaggatttatattttttttt

SEQ ID NO: 3006 - DNA, 685 bp, Gossypium hirsutum
  Clone ID: GOSHI-09MAY01-C18252_1
cccacgcgtccgcgagaaacttcactggaccttaaaaacatctcttatcctcttctgtttggaatatggagggatagatagatagcccaacacactgtaaaagaaaaaagctctcacaggaaacagcgccaatggctacttgtaccaccacaccttcatcatcgttgatgataacatacgccgccgcatccactgtacacgcccaagccctcactccttccgttctatccttcaagtccaacaagcctaccttttctattaacccacttgctctcaagacttctatagacggaaaatccggcatcaaatgggctaatctatacccccagagtgattccaagcaccatgtcatggctgccgtggctgcggaggctgaggtggctgaggctacggacgaaaatgatggagtggcagctgagggtggcaccgctaccgctattgctactgctccacccaagcccaagaaaggaaaggctgcgttgcctcttaagagagacagaacgagatcaaagagattcttggagattcaaaaattaagggaaaccacataggagtatgatctaaagacagcaatatctttgttaaaggaaatgtccagtacaaagtttgtacagacagctgaagcccatttccgccttaacatcgatcccaagtataatgatcaacagctgatagcaactgtgat

SEQ ID NO: 3007 - DNA, 604 bp, Gossypium hirsutum
  unsure (1)..(604): unsure at all n locations
  Clone ID: LIB3825-009-Q1-K6-E1
ngataatttctataacaaaaaaaagaaggatggtctcctcaagaatgccatgaaagcttatttggacacacttcatcttgtaagttcatcttttcctaccgcatggaacccaactgcaaagagcccagttgaagaagatgacaagcaaggactaatagaacccaactgcatggaactgatatcagccatggcagccggcaaaggagccaaacacatcgtcgaaatcacaacccaaggcattaccccattaaccatcgcacttgctgtcgcagcaaaacacaccggcggtcaactcacttgcatcctcccatcccaccaccaccaccaccaccacaccgccgatcaacttcaacaatacataaatctggttcacgctgaacccaccaacactagcccacgcgagacaatcataaaacagataaaaatgcggttgaagaacgtggattttgcagtgatcgattgtaagttcgacgatgagtacttgaaattaatgtttaaaacaatggtggaggaggaggatggtattaaaacagggtcgactgtgatagttcataatgttcatcataaaaaagagggtcgatatttggtcaacttttgaggaaaa

SEQ ID NO: 3008 - DNA, 332 bp, Gossypium hirsutum
  Clone ID: LIB3197-054-Q1-M1-F5
tcggcccaacatactgttaaagaaaaaagctctcacaggatacagctccaatggctacttgtaccaccacaccttcatcatcgttgatgataacatacgccgccgcatctactgtacacgcccaagcccttacttgttccgttctatccttcaagtctaacatgcctaccttttgtattagcctacttgcttctcaagatttctatagacagttaatctcacatcaattgttctaatttatgtccctatagagatttcatgcaccttgtgtaggctgtcttttcttgtttaagctgaggtggctgttgttactctactataatgatggtgtg

SEQ ID NO: 3009 - DNA, 817 bp, Gossypium hirsutum
  Clone ID: GOSHI-09MAY01-C18212_1
aaaaaaactgagagctccttttaggccctctctcgttctcctttcctcctacctgggcaccagcgagctcgcgcggtggctctgccgtagctccgccgtggctccgccgtgccggagagcaataaaagtttttaaaagatacctttttaaaagcttccaaaaaaaggttttgtttcaaaaaaaaaagagcaaaagaaaaaggcaaatcgcaagtaaaacgaccttcctattcgtcgcactcccctaaccctcgtcgaaacccgaatgggttttgtgacatttgggttactagaggttcccaatcgcgtcggtggatgaaccgaaggtgaggtttttattactgttaatgcacttcatttcgaatcaaaacagaaaagaaaaaaaaataaaaataaaagaggcacctttgagagtatttgatttctctgtttttttgtgaatctgttttcttttttttctttgtattgattttttgttcttgatctctgtgtgtacattacattttttttctttggcttttgtagccgaaagcaaaataaagaaaaaaagaaaaaatacaaaaatctgctccttttttttgtctctgttttgctgttgtttttgcatttgtttgcaggtacggagtttgctggcatcgtacggaggcgctggtggtcgtatggcgcttggaggctgaacgtgggggggagcggcgcgagagaaaccctaggcttctgtttgaccgatcctaggtctaggttttgggccattgggccatgtatttttgggttagggatttgttcatttgggctgtaattttaattggacattttaattt

SEQ ID NO: 3010 - DNA, 1354 bp, Gossypium hirsutum
  Clone ID: GOSHI-09MAY01-C19952_1
ccagacttgaactgtaaaagtttataccaaaaccaataggccacccgccataggctggcgtattcaaattcaaagcaacttatattattattcttttataagtttatgaaagagctactcttagccgcacgccaatgtattccaagtcagtcgttgtaaatttattaaaatccaccgtataacccacaaggttcaatggatctccgcatataccaaacataacaaaaaaggtccagaaaaccttcttaacatggggacaaactacagatgaagctgtagtgcaaggcataccgcaataaggccgacagcaccaagacagttatatccgaggtagaagagtgagtggctcagctggaatatcagaacttgcctgtagatatcttgttaacaacgtagtagtactaaaattaaagccttcaacaggttcactttttgtacgtgatccattaagctgttttcggacttgagtagctagtgacttacccaactcaactccccactggtcaaaagaattgatgccccaaacaaaaccttcaacagcaactctatgttcatagcttgccaagagctgcccaatattgtaagcgttaagagatggtagcaaaagactgagagaaggccgattcccagagaacgtcttatgaggaataagatgctgcgaaacattctccttcagcaactgctctgctgtctttccatatgctagggcatccggctgtgcgaaaaagttggacataagctcatcatggttgctcacaacttcacctttaaggttcacaggttgctggctcttcacaataccaatgaaatcacaaggaattacacgtccctggtggattagttgataaaagctgtgctggccattcgttccaggttcaccaaaatcaatttcaccagcctcataaggaagtggcacaccatcaattgacacccccttgccattactctccatgctgacctgttgaatgtgtggagcaaatttctcgagggcctgggagtatggtaaaatagctcttgcaggatatccaagaaatgaaacgttccatacgcttagcaaacccaaaagtacaggtatattcttctcaaaaggagctgaacggaaatgctcatcaatacttgaagccccctttaagaacttttctactattgaaaaaccatactgcagagacaaaggcaacactccaactgcactgcaaacactgtatcgaccaccaacccaatcccagaatgcaaatgcattattagggtcaattccaaacttttcaacaagcgtaagattagtactgactgccaccatgtgttttgcaactgcagaaggcccaagagcagatgaaatccactcccttaatgttcg

SEQ ID NO: 3011 - DNA, 692 bp, Gossypium hirsutum
  Clone ID: uC-gsronu33B029c12b1
tgcataaagtgaacctgttgaaggctttaattttagtactactacgttgttaacaagatatctacaggcaagttctgatattccagcttagccactcacttttctaccttggatttaactgtcttgttgcttgtctaccttttattcaatcttttcttgttattcatctttctccttttgcttatcatctttcttttcttatattcttcttaacatttatttcttttttatattttattccttattatctttaattttttttctaatttcttacttaatatcatcttatctcttctttttatatcttctttcttttatatttttatcattccatcatctcatatcttttttctctactttttttttctttttttaatatttttctcttcacttataacttctaattactatcttccttttttctttaatactcttccttactctctctctctcattctctccttcttaatcttcttttatattttatccattcctcatctctttttttatctaatccttattctattatatcattttcatacttttctcattattcatttcatttttcatttatttctcttactttatttcattcttcattcatttaatatctttcttattatatacttttaatattatcttttatcattttttaaaattcatttttttattaactcatctttcttctatct

SEQ ID NO: 3012 - DNA, 514 bp, Gossypium hirsutum
  unsure (1)..(514): unsure at all n locations
  Clone ID: LIB3048-031-Q1-L1-G3
aactagtggggnntcccgccgggccctgcaggannnattcggcaccgaggccagttngnngagtgtgtgcnnctttgtgctnnctgcagtatgnnngtttttcgagatagtgggggaaaagtgtgcttagagaggggggctnnntcaagtattgggatgagccatttccnnngttcagctttcctttttgagaangnnaatatanncctgtacctnntttggnngtttgcttannagcgtnnatggaacccgtttcaaatttcttgggggatatcncnntgcaagaagccctattttnnaccatacntnncccaggccnnnctcgagannaatttgctttccacacccattcaacagnngtcagcnnatggagaggtannatgtgcaaaggggnngtgtcaattggaaatggtgtgcccanncttccttaaatgagggctgnngtgaaattgggaattttgggtgaaacccctggaaccgatnatggcccaagcacaagctttttaattcaact

SEQ ID NO: 3013 - DNA, 250 bp, Gossypium hirsutum
  Clone ID: LIB3149-001-P1-K1-E11
agccagcaacctatgaaccgtaaacatgaacaacttagctcgcttaataagcttacgtgcaactttatcgcacattcggataccatagcataatcaaagacagcagagcaattgctgaacgagaatgcttcgcagcatcttattcctcataagacgttctctggtaatcgaccttctctcagtcttttgctaccatctcttaacgcttacaatattggtcaactctaggcaagctatgaacataaagttg

SEQ ID NO: 3014 - DNA, 539 bp, Gossypium hirsutum
  Clone ID: GOSHI-09MAY01-C19552_1
gaattcccaccagagaagaagcagaagaacacgaagtatttgcatgattcgtttctcatctaaaagtttagtgagattttgattaacatagaaaaaagctctctcctttttgtttcttcttttgttctctctctcatactttctgttttctttttctttttttctgtccttttcctacatttgcatgctaatttttcagcactgatgatggagaagctgagtttttagtggggtttcaaaaataaaaaagaatacatagaaagaagagaacccactagaaaaaaagagagggcaaaagaaaaaaaaaactgatcaccaccccacatttcataattcactagtctttttggtttcttgggtgggtttcctttcccattttgggggttttatgtgaaaggtctttttccttttctttttttccctttccctggttttgttgctaaaaaatgaattcacagagttgtaacatactacatagggacaaagtggttttcattttgcctttggcttttatttttctggtttttttttgtaaagat

SEQ ID NO: 3015 - DNA, 371 bp, Gossypium hirsutum
  Clone ID: GOSHI-09MAY01-C19542_1
aggagacttttctgtgtcaatggctgaccaggggttaacggcaaggcgcttgtgccaaagaggagtctcctgaaattctgaacaagcatctggagttttacatcggcggggatgactgccatttgattccagttgaattgatggattctactgctatgagaagccaaaaaatatacaagttcacagaggaagatgaagatgttgctggtacaggagatgttattctggacttcgatttgcagcaacctgggacaccagtggagttgggtgtggagaatggttgcagttcagccgagaaagtgacacccctttcaccccatgtgagttaagaagaaaccattgatgtaacgtatgaaccaatggagcctaat

SEQ ID NO: 3016 - DNA, 469 bp, Gossypium hirsutum
  Clone ID: GOSHI-09MAY01-C19492_1
attccgatcaaatcacgatcccaccggcgccgactattagagttaaagtcaaatacggctctatttaccatcaaatcaacatcaattctcaagctacattcggggaattaaagaaaatgttaacgggaccaacgggattacaccataaagatcaaaagctaatatacaaagataaagagagggattcgaatgtgtttttggatatggtgggtgttaaagataaatcgaaaatggttttaagtggaagacccaattagtcaagaaaagagattaatggagatgaggaaaaatgctaaaatggagaaagcctctaaatccatatctgaaattagctttgaagttgataggcttgctggccaggtttcagcatatgaatcgattatttcaaaaggtgggaaaagtaatgagaaagatgtggttaatttgattgagcttgtgatgaaccagttgcttaaattagatgggatta

SEQ ID NO: 3017 - DNA, 696 bp, Gossypium hirsutum
  Clone ID: GOSHI-09MAY01-C19742_1
ctgtatatcacattagaaaatcggataaactaagggtgggtataagattattccaataaaaacttgtagggtttaaattgatccgaccggaaataggattaggttctgtattctgatgtgcagagagagaaagagagagtcaaaatcgagaaataagaagaaattagatgtttactttattacaagaaaaatgatgagtgagggaagatcacaatgatgataggaggaagatcatcgtcgtcttcatcaacagcgacagcagcaggtggaacttgggtttcaacaacctcggtgtcggcttcagggaggaggatacaaagggagatgtctgagctcaacgccgaccctcctcctcattgctctgctgcccccaagggtgacaatctcttccattgggtcgccaccatcattggtcctcctggaacaccataccaaggtggcatatttttccttgacataacatttccaagtgattatccctttcaacctcccaaggtagtattcaaaacccgcatatatcactgcaacgttgatgctgctggcaatcttagtttggacatcttaaaggacagctggagcccagccctaacgatctcaaaggttctaacttgcaatcagatcaattttctcaaaccctgacccttatagtcctctcacttctggtgttgctcgcttgtacttagctgataaagcaaa

SEQ ID NO: 3018 - DNA, 1711 bp, Gossypium hirsutum
  Clone ID: GOSHI-09MAY01-C19772_1
gaggtacacactgttgaaacagcaagtgttgatatggcaccttgtgattcaatagacacaaatgcagaaaatgcttccagttcagggaagagtctaactcttgaaacactttttggaagtgctttcattgaaagaactacaatcagttggagcaccagcttctattcagagggcctcaacggattctgcaagagttgatatatccgaatctaactggcttcccccacatgttacagatgacagtcttcttccttctgcaggtcacattgggtcaaacaggacttatggtgggaagagatatttcaccatttacccagagagagcgaatgaaatccgatggcattgaagagcatttgttaggctataatgatgctccatccgcagcagattcatcacatatccgagctggattaggatctaaacttggtggttttgatggatctgctaaaattgggcttcctgaagaggatagtttgcttggtgtcagtagtcctgtgaaactccagaatttcatggctggtggtgcaaaatcagagctatcgccctcccaagagacaccaattgatgttgctgagaagctagcagctttgaaggccgttttccaggatgaaagacctgttgtaggagggaaagaagttcccgtttttcttcccggtccctatgacttgagggagccagatattccattacataaccaaaacgtccaaccatcttctcctcagcttaatcctcaattgaatcatggaggtcctttgcttcattcgttagattctcatcattctagcatcggttctcaggtgaagttcatgggtccagaaggcttggtctatcatgatgccccaccaaatcatcaattatctgcaaatatgcttcgtcctctccatcatcctagcagtggactaactggatttgattctccaattcatcatcctatggtacaaccaaatgcattatgcctggtatacttttccttcaccccacttgcaacgacggattcctggtgttgcaccgccagcacctcattcaaataatcagatgactgggttacaggaaatgaatccaatgcatggttttcaattggggcatggtcaacggcagcctcaacccaactttgctggtcttggaatgcctccaggtcatgacgttggcagtgggagccatcatccagaggcattgcagaggcttattgagatggagctcaggtcaaagtcgaagcagctgagccctttcggtgcacccagccatggtcaaagccaatggatgtatggccacgagctagacatgggttttcagtatagataatggcatttggttgtagtttcgccctatccctactagattggtacttctctcagaattgacgaaaaggatgatagttctaattcacgaaggattattgggggctacttgtaactaaatcgatcattatcatactagctatatgactgaaggatgtcatatggccttttgtgcatgtgatgatgggttatactttcattgatgttaaatgccatatatggcgttattcatatcttatagatataggtctgatgtcatttagtactgttaggacttctatgcagtaacatacatgtatcgtttactaagattattgtacttctgcatatatgaatgagaattatgtcttgtacatagagatctcttattaacttaattatgaagtagtcatcatacatatatcactcaaaag

SEQ ID NO: 3019 - DNA, 598 bp, Gossypium hirsutum
  Clone ID: GOSHI-09MAY01-C19622_1
tctttccacgcgtccgcagggatccaaatcatggggtctggtgatgatggtggaaagcttagttcaaaggcttcggctttataaaccaacaccagtttctgatgaaacagagttttacgttaaaagagcagctgttcttgtctgtatttttcaaggcaacaatggtgatcttcgtgtcatcctcaccgggcgtgcctcttctctgtcctctcactcaggtgaagttgcattgcctggtgggaaacaagaggaaactgatattgatgatatacagactgcattgagagaagccaaagaagagattggcttagaaccttcacttgtcaatgttgtcactgtccttgaaccggttttcaccaagcatcgtatgatcgtcgtccctgtagtgggtatattatcagatacaaaggcattcgatccttgtccatgtgcagacgaagttgaagcgatatttgacgctcctttgaaaatgtttctcaaggatgaaaaccgctgggcggaagagaaagatggaagggagaaaagttttacttcattacttcgattacgaagcggaaacgggaagtttttggtttggggcttcactgcaggagtcttg

SEQ ID NO: 3020 - DNA, 895 bp, Gossypium hirsutum
  Clone ID: GOSHI-09MAY01-C19112_1
attgatggtaacgttgaaggaatgggtgagaggaaatcggaaggggaagtaatggatgatttgttttcggcatatatgaatttggataacatcgatgcattgaattcttccgaggataagaacaacaataacgagaatcacgaagatttagatagccgagcgagtggaacaaagaccaacggtggcgatagtagtgacaatgaagcggaaagcagtgcgaacgagagcgggaatagtgtgacacagggcggagtttattcaactgagaaaagagaagggaacaaaaggagtgcagggggtgacattgctcctacttcgagacttatcgaagtgtttcgatggatagtttgggggggaagttgaactttggtgacgaatcaccaaaactacctccttcacccggatctcgtcctggacaactctcaccaagcaattcaattgatgggaattctgctgcctttagtttggagctcggaaacggtgagttcagtgaagctgaactgaagaaaattatggcaaacgagaagctcgcagaaatcgcaatgactgatccaaagcgtgcaaagaggattttggctaatcgtcaatcagctgctcgttccaaagaaaggaagatgcggtacatttccgagttggagcacaaggttcagaccctgcaaactgaagctaccacattatcggctcaattaacacttctacagagagattccgttgggcttagcaatcagaacaacgagttgaagtttcgtattcaatccatggaacaacaggcacaactccgtgacgctctaaacgaaacattaaccgcggaagtccgtcgattaaagcttgctactcaagaactaggtggcgattctgatccatccaaaggcatggtctcgcagcagcttcccat

SEQ ID NO: 3021 - DNA, 471 bp, Gossypium hirsutum
  Clone ID: GOSHI-09MAY01-C19062_1
atcagacgtcattttagtctttcgggacgatgcaaattttgatgataagcacacgccaaattgagcagaacacttactgaagtgattcatgaacaacagtgcgaaaaatctacttactatgacaatgactgaatgttttctgaggggataagatttttaattgatatgtaaaatatacgaagatatgttagaaatttatatttttacattgagtacatttgtcatgagtccttcacttgggggctgatatcaaatacaaaaaagggtcgcctttaggagaagcataatagtaacttatcatgttgaattatgttacttctgtcaatcaacttgaactcatgacagctatttctcgaatcttagtgaatggctgaacttaatatctcactttttatatttcatgaaaaaaaacaccatttggaagtggagggtttctccaaacaaggagtctggtcaagtatccaataaaat

SEQ ID NO: 3022 - DNA, 615 bp, Gossypium hirsutum
  Clone ID: GOSHI-09MAY01-C19012_1
tgctgagtgggctgcacattgtcacaagaaaggcatccttgatcagatcatggatccttatctcaaaggaaagatagcaccagaatgcttcaaaaagtttgccgagaccgcaatgaagtgcgtggccgaccagggtatcgacaggccatcgatgggtgatgtgctgtggaacttggaatttgctttacagctgcaagagagtgcagaagagagtggcaagggaatcgatgcaatagatatcgaggaaggaacctacgacataacctgtaaaggcaagaggggggtatcccctggttttgatggtactgtaacagattcaaggagtagtgggatgagtacaagtatgagcatgagcatcggtggtcgcagcctcgctagtgaagactccgacgggttaacacccagtgctgttttctcacagataatgaaccctaaggggcgttaaagcgacggcaaatggccagaactgagtagccaacagatcaaaaccagtaagccaataacgcttgctgttattattttgtgacatcattggaatcaaaatttgtttcactttggttgtattcatttttcttttatctaatatagcgtacatttattaccccttttcactgg

SEQ ID NO: 3023 - DNA, 865 bp, Gossypium hirsutum
  Clone ID: GOSHI-09MAY01-C19002_1
cgtcgtccgcaattactacgaacgaacgaatttattgttttgttgaagaggttgagaaaaaaaaaaaaaaaaagagcaaagttttcggttatggcgtttgttgcaggaatggcaactacgtcgtcgtttgctatggtgaagcttcacagcatcccttcggtttctgccaaagggaaaactggtttgaaacttatgagcgtgaaagtgagagctggttcttttaagaccggtggtgctggtgtattggaacgacctagtttcgatcaatctcagtttgacccttcttcccaagctcttgaaggtggtgatattgggcgatcgtgggataagaatggtactggcagtggagacagttataaagttttgctggttgatgatgctcgtcattctgaaaaattagttgcaaagggtttgcctcaagttgttccatctgttacacccaatgatgcaagaaaactcttccatgtatcgcgagaacacggattggcggttgtgattgtcacagttaaggagcatgctgaattctattcccaaatgatggtacgaggtggactgcgatcaacaatcgtgcctgattcagatgtggtgtaaagtggttgcaatttttgtggaaggtgcaacaagcaaagattttgcagtgtggcaattttgaattttgaagttaggataggcagatattagatgggaatgtgagattacagattttgcatcctttaggagtatgataaaaataaaaataaaaagagacattccattttccttgttccagctaactaagaaatgagagtttgaagtttgttttgctttggttttataaattttctcatttatggttttatgaattttacctgaattttggaacgtc

SEQ ID NO: 3024 - DNA, 425 bp, Gossypium hirsutum
  Clone ID: GOSHI-09MAY01-C19382_1
cataattcgaatcatgcgcgacggataccatcaacgcactcccagctacggtcacagctacccagcagctcagccttacactgccggtacatacacagctggagcaccgtcgacacctcaaccgtacggtactgcatacgccgctggaccatacggctcaccggctgctgcctactctgcccgatacgagcgagaaaccaccccaggacaagcgccaagcgcatggcgtcggtggcgctcctgcagatcacagccgaagctatgctgccacaggacgctatgcgggcccgttcgcatctctgacgccgtcggcattgtcaccggggacagatcctaacgtccctccctgctttcaaatggcctgaccaagatgcaagtggccttatcgatgatcaagagttgaaaagggcgctgttgccgaataa

SEQ ID NO: 3025 - DNA, 787 bp, Gossypium hirsutum
  Clone ID: GOSHI-09MAY01-C19312_1
cccacgcgtccgtaaaagcaaaaatatcacttagtgtgtgagaaactgtaagggaaagaacacaagctgaagaacagagaagcgagggacaagagggtttcaagatcttatcagatcaaagctagaagataacatttgatggggagggaactcactgatgtgcatatggatgataagcccaacggtgttgtgaaatcgaacggtgtggtgaattcaaatggtgctctgagagttttggaagacactgagtcaaagaactacgaggtcaaggaatgcactgaagagaactcgattgtccataatggtactgtgaatgaagatgtgttgggtgtcaaaagctcaaattttggtaccgatatccctgatgagaaaaacgaaacgatcggagatcagaagttcaccgaccatgtgaaattaagccctgtcgcatctaaatctggtggtgccggagatattcgtgtgcaccataactcaaaagctggtgctaacggcatagcaagtgttcaatctacaccttctcctattgctacaaagaattttgagcgaagctctcctctgactccttcgatgtcaaggaagctatttcagccttttcgacaggaggcattcccgatgatgaggataattggtctgttgcatccactacggttgcatcttttcctacttcttgatccagggtaactattggaactgctccaactttcaaaagtgccgaacgtgctgagagacggaagcagttttacctgaagttagaggaaaaacatcaagctttggaggccgaaagaag

SEQ ID NO: 3026 - DNA, 458 bp, Gossypium hirsutum
  Clone ID: LIB3543-021-Q1-K1-H4
ataaaagcaaaaatatcacttagtgtgtgagaaactgtaagggaaagaacacaagctgaagaacagagaagcgagggacaagagggtttcaagatcttatcagatcaaagctagaagataacaggtcttgttcggtttctttgttcccttgtgctgagtttggcttttccgagctaaaagatcatcttatttctaatgcagtttgatggggagggaactcactgatgtgcatatggatgataagcccaacggtgttgtgaaatcgaacggtgtggtgaattcaaatggtgctctgagagttttggaagacactgagtcaaagaactacgaggtcaaggaatgcactgaagagaactcgattgtccataatggtactgtgaatgaagatgtgttgggtgtcaaaagctcaaattttggtaccgatatccctgatgagaaaaaccaaacgatcggagatc

SEQ ID NO: 3027 - DNA, 893 bp, Gossypium hirsutum
  Clone ID: GOSHI-09MAY01-C19322_1
gttttgttttgatggggcatttgaggtttctaagatgtagtattagctttttcaaattccaaattcattttcagaattcatcattttttaggtgatagaatcaagaggatacagggctcagtgactcagtcctgcagaaatgatgactgaagaagatgatctatatccatctagtgttaagatgagataccccattttcattttcttcaaggatgtcagacatgttttcaaactggacgaactgggatcagagatagcacaaattgctttgcctgcggcactggctttgacagccgaccctattgcttctcttgttgacacagcattcattggccaaataggtgctgtggaactggctgctgtaggagtctctattgccttattcaatcaagtctcaagaattgcgatattcccccttgttagcgtcacgacctccttcgtggcccaggaagatacaattggaagagtgagctctgaagcacaaggaagtgattacgtggaaacaggttcctgtgtagatactgaaagcaatgagttaataccacaaaaagaatgtatcgagggtacatatcggccaaaaacacttggaagcagttttgatgtcgttaaaattgagccggaaagaaggcatatcccatcagcttcatcagcactggttattggtggcatccttggtctccttcaagccttattcctgatttctggagcaaaacctctattgaacttcatgggaatcagttcagattctcccattgctaaaccctgcacaacagtacttgactttaaggtcactaggggcctcctgcccgtcttctctccttagccattgcaaggtgtctttcgaggatttaaagacacaaaaactcctttatatgccactgtggcaggagatg

SEQ ID NO: 3028 - DNA, 616 bp, Gossypium hirsutum
  Clone ID: GOSHI-09MAY01-C19242_4
gttttcctcgtaatgaagaaaaccgtgcagcattcgaagctgttacaaaaatcgagccagaatttgtcctgtttttcaattgccctgaagaagagatggagaagcgtcttctgagtaggaaccagggaagagaagatgataacatcgaaacaataaggaaacgattcaaggtgtttctcgattccagccttcctgtaatcgagtactataaggtcaagggaaaagttcgagagattgaagctgcaaagcccataggagaggtgtttgaggccgttaaagttgtcttcaccccaaaagctgaaaaggttgttgcctaggccgggtttgcaaactctaccagtgataaattagcatattcatttgaggttaaatatgtcaacagtttggtgcacatcattactggattcttaataatttggaaggggtttttttttttttttttgtatcacatagtatttggtttattattgttattattatcacatgatatgtcatgatgaaaattcatacatttaaattcttcctatcgtattttttgatattcccaataaaaaaaaaaaaaaaaaaaaaaaaaaaacaaaaaaaaaaaaaccaacagaacagaaaaataactcga

SEQ ID NO: 3029 - DNA, 844 bp, Gossypium hirsutum
  Clone ID: GOSHI-09MAY01-C19242_3
ccgcccacgcgtccttgcaaaggctttggtttttcacatcaccacacctattttgggtggtttaacaccggcggggctggttccttcattcttcattataatattttacatttaaacggactcgatccctaagctagttttgtactaatgggaacagttattgttgcaaacaaggatatcaatgttatctttacctgaaaaaaacacctagagttgtttttgttttgggtggccctggcagtgggaaaggtacccaatgcccaaatatagtcgaacactttcattacacccatctcactgctggagatcttctccgagcagaaattaagtctggttcggaaaatggaaccatgattcagaacatgatcaaagaaggaaagattgttccttccgaggtcacaattaagcttctcgagaaagcaatgctggaaagtggtaatgacaagttccttatcgatggttttcctcgttatgaagaaaaccgtgcagcattcgaagctgttacaaaaatcgagccagaatttgacctgtttttcaattgtcctgaaaaagaaattgagaaaccgtttttgggatacgaaccccgggaaaacattttgtttacttcgaaaccattataggaaaccaattcaaaggagttttttcgattccaacctttcctgttaatcgagtactataacgaccaatgtaaaagttcgagagatttgagcttggaaacccataagaaaagtgttctgagcctgtataagttcttatcccctatatcttgatttgagtttgtcaatgtctattttgtatactttacattgtatcaaactcattcttagtgggcattatatatcaa

SEQ ID NO: 3030 - DNA, 1003 bp, Gossypium hirsutum
  Clone ID: GOSHI-09MAY01-C19242_1
gcccggaccggaccggacatggccgggccgagcgacgcgtgcgccctcgcgtccgggcaaaggcagtggccattcacatcaccacaccaattttaattactttaacacctcctttccctccttcctccgttcttcattagaatattttagatttaaacggactcgatccctaagctagttttgtactaatgggaacagttagtgttgcaaacaaggatatcaatgttagcttagctgaaaaaaagcctagagttgtttttgttttgggtggccctggcagtgggaaaggtacccaatgcgcaaatatagtcgaacactttcattacacccatctcagtgctggagatcttctccgagcagaaattaagtctggttcggaaaatggaaccatgattcagaacatgatcaaagaaggaaagattgttccttccgaggtcacaattaagcttctccagaaagcaatgctggaaagtggtaatgacaagttccttatcgatggttttcctcgtaatgaagaaaaccgtgcagcatttgaagctgttacaaaaatcgagccagaatttgtcctgtttttcaattgccctgaagaagagatggagaagcgtcttctgagtaggaaccagggaagagaagatgataacattgaaacaataaggaagcgatttaaggtgtttctagagtctagtcttcctgtaattgagtactataaaggaaagggcaaggttcgagagattgatgctgcaaagccggttgaagaggtatttaaggaggttaaagatattttcaacccaaaagtcccaaaagtccccaaagacgaaaatgttgaggggagatgcatgtgttgtgctattctgtaggtgcccctttagctggaaatcaaaactagtattgagatttcagtgcatttatagaaataataatgtagactatgaggtgtatgtataattatcttgagtaactgtattgaccgatttgtgctattcaatgaatcgccattgtattt

SEQ ID NO: 3031 - DNA, 651 bp, Gossypium hirsutum
  unsure (1)..(651): unsure at all n locations
  Clone ID: AI055571.1
taggggcagaagtgggtgcttgctcatgtactaatctagttgtctgcaattttgttttagaatagttgtttcaatttgaacctttcagatacagagtatgtaattcgtcatttggaccattttcgacatgttgcctttttctgcacatncatgtttaacacgtgttatcgtctgttccacagaaccatgattcagaacatgatcaaagaaggaaagattgttccttccgaggtcacaattaagcttctcgagaaagcaatgctgnaaagtggtaatgacaagttcctatcnatggtttcnctcgtaatgaagaaaaccgtgcaatatacacacttgtagattnggtgggttctgtattcatagtctttcagcgtatttattaggtttacatggtgaaatgnggtggttctgcagaaaaaatcgagccaaatttgcctgtttntcaattgcctgagaagagatggagaacgtctctgagtaggaccanngtatctatatgaattacatagaagattctttggttctttntggctgggtattnaatgtnngttaaacatttatccttgcttcttatgaaggaaagagatgatacatcgaaacataagaacgatttaagtgttctgaatcaggcttcctgaatgagaccatagg

SEQ ID NO: 3032 - DNA, 422 bp, Gossypium hirsutum
  unsure (1)..(422): unsure at all n locations
  Clone ID: LIB3148-007-Q1-K1-A6
ccgcccacccgtccggtaatcgaccactataagggccaaggaaaaaagttccagagattgaacctgcaaaaccccatagaaaagtgtttgaagcccttaaaagttgtcttcaccccaaaaactgaaaaagttgttgcctaagccgggtttgcaaactctaccagtgattaatttagcatattcatttgaagttaaatatgtcacagtttggtgcacatcattactgtattcttaataatttggaagttttttttttttgtatcacatagtatttggtttattattgntattattattacatgatatgtcatgatgaaaattcatacatttatattcttgntatggnattttctgatattcacaataaacccccaaagtcttctattttgtgtgacatgatattcttattcttntgttaaccc

SEQ ID NO: 3033 - DNA, 521 bp, Gossypium hirsutum
  Clone ID: GOSHI-09MAY01-C19212_1
gctcaacatgccataagcgcgtaggtcagacaggattgggctgcaggtgtggaaacctcttctgcgcggctcatcgatactcagacaaacacgagtgcactttcgattaccaggctgctgctcgtagcgctatttctaaagccaaccctgttgacagagctgcgaaactggatgaaatttaagagtcctggatgaaggtgaagatgcgcgtactcaaatatgatgattctccctctattccttgggtatggggcccattgtagtgaaggtttataagttgggtgcttgtctccccatgatagggaagacatggttgcagtgtaagtcttatattccatgtcaatcggttggcattacaatggctcatgtttgtaagactttgtatgttctggtttgatggacaacgatacgattgaacaccatggtaatgattctttgtggtatacacatttctttataatagtacctcgcctatatcatgtgaagtgtgttttgttacaaaaaaaaaaaaaaagaaaact

SEQ ID NO: 3034 - DNA, 460 bp, Gossypium hirsutum
  Clone ID: GOSHI-09MAY01-C19232_1
gttgccaaggagccacaaaatcctgaggcagacgaggatgatggatatgtggttgcgtatgtccacaatgaaaacacaggagagtcaaggttcctggtgatggacgcacaatcacccaatcttgacattgtggcagccgtgaagctgccccgtagggttccctacggttttcatggactatttgtgagggaaagtgatctaaataagctgtagaagtagattcacttcctctcggtcgggttcaggtggatgatcattcattaaacacatataatagcagtgaataccatagcagatgaaagttacaaggcgtttacaacatattgtataaacatatagtattttgttacagatgattgaagtcccaatatcataatcattgcatgtaatccttgtatctacattttacctttataaaataaccaattatataatccagtgaattatttatcggtcaaaa

SEQ ID NO: 3035 - DNA, 1116 bp, Gossypium hirsutum
  Clone ID: GOSHI-09MAY01-C14972_1
gtcgaccccgcgtccccctttttcagcctctaagatttgcgtcattcatttcatctgcttctttgtactcccttccggtcattttcctttagtcgctcggcataatccagaactgtgccaatcaggtaaatttcttcctttttctttaatgcctcccttgctagcatatgagccagactatttgcctctctaggtgtgtgctcaaaatagtgtcttttttattttattagtaactgatgaatatctcgaatatatgctccaacccttgatctgtcatttgcttgtgttttgcatttcttaatgattgaaagtgcatcaccttcgataataatatttggccattgcatgttcataccgatgcgagttgctgtcctgcaagctattgcttctgcggcaaaggctgatgctacttggtgatgaagctctgtactagataaaagggcatttccttgactgtctctggccacaattcccactgccgattgtcgaacattctcatcaaaggctacgtcaaagttaatctttacaaactgaccagattgcccaaagagcacaacaaaataccctacgcatattgggactattctgttcgaaagcccaggacactcacgaaagatgtgatttgtggctcctgctgctctaccacacccagaacatgttgctcgacttaggagtcttctgtagtgcagattcacccacgttggaatataattccaggctattcgccaaattgcaatttttatcttcgaaggtagatttaggagccagatatttttgtaaaaattcctagtttcagtttgtcaggcataagccctacgattattttcattgccctgtaatagtttataggctcttctcagggtaaactctcccgaggactcccccctctaggctggaaaatctttgtgaggctctctagcacgcagaatgcagaggattctctcagctatctccattggaaaggtagactcagtcaagtctttccccttcctctgactttcatcaattagatctgcaactttacagtcacgtaattataccttaacgtacattttagctgaagaaatacgagaagttagggtaagactcactgatgtggcaagatgtctgaatcat

SEQ ID NO: 3036 - DNA, 442 bp, Gossypium hirsutum
  unsure (1)..(442): unsure at all n locations
  Clone ID: LIB3189-048-P1-K1-H5
ccgaaaaaaaaaangggaggccgcacgccgtaaactacancaaaatgaatctttgttctatttattaatgtctattaccttgactgtctactaacgacaattgggtactaatctattgagggacattgggcatcnaaaagctacttacaaaattatatctttacaatactgactcagattgncccataagagcaccaacataaatactcctacggcatatatggtatctattcttattcgaaaaccccaggacacttcactgaaagaatgtgattttgtggttttctgcttgctctaccacancccagaacatgtttgtttgacttaatgagtcttctgtagtgcaaattcacccacgttggaatataattctaggctatttgccaaattgtaattttatcttcaaaggtagatttaggaaccagatatttttgtaaaaatt

SEQ ID NO: 3037 - DNA, 707 bp, Gossypium hirsutum
  Clone ID: GOSHI-09MAY01-C14852_3
tcctcacgcgtccgcccacgcgtccgcccacgcgtgcgcccacgcgtccgtgttcatccaaatacccaaaagtcaagagtagattaaactaatggccggaatcggacccttttgacccaagactgggagcccgtcgttattcgtaaaaaagcccctaccgccgccgccaagaaggatgagaaagtcgttaacgccgcccgccgtgccggtgccgagatcgagtccgtcaaaaaatcaaatgctgggacgaacagggccgcttcaagttggacttctctgaacacaaggaagctcgatgaagacactgagaatcttgctcatgatcgagtgccaaccgaactgaagaaagcgatcatgcatgctcgagttgaaaagaaacttacccatgcacaacttgctcagttgatcaatgagaaacctcagatcatacaagagtacgaatctggaaaagccattcctaaccaacagataatcggtaaactcgagagggctcttggtgcaaagctgcgaggtaagaagtaaggcgagttgggtcttttttccttttgtggtgtaaatgaatgttctctaccattatggttttgcttgtaagaacagtgttttggactttgtggtgaccatgaaatgaagtgtgttcttcaaaaattttatattatatataataattgtatctattatttttgttttatgatattttgttatttttt

SEQ ID NO: 3038 - DNA, 687 bp, Gossypium hirsutum
  Clone ID: GOSHI-09MAY01-C14852_1
ccctcttcgtccgcccacgcgtccgcaacttctcaaaaatatcttttctctctttcatccaaaatacccaaaagtcaagagtagattaaactaatggccggaatcggacctttgactcaagattgggagcccgtcgttattcgtaaaaaagcccctaccgccgccgccaagaaggatgagaaagtcgttaacgccgcccgccgtgccggtgccgagatcgagtccatcaaaaaatcaaatgctgggacgaatagggcggcatcaagtagtacttctttgaacacaaggaagctcgatgaagacactgagaatcttgctcatgaccgagtgccaactgagctaaagaaagccatcatgcaagctcgaatggataagaaacttacccaggctcaacttgctcagatgatcaatgagaagcctcagattatacaggagtatgaatccggaaaagccatccctaaccaacaaataattggtaaactggagagggctcttggtgcgaagctgcgagggaagaagtgagtgagtaagagtctcgtagaaagaacaaacagaacttgaatatcgcccagaatcttgagtcctaaaacttggtgatgtaaatgaatgttttatgccgttatgggtcgcttgtaagaacactgtttttgactttgtgtgatgacttatgtctgcgactgcttatga

SEQ ID NO: 3039 - DNA, 651 bp, Gossypium hirsutum
  unsure (1)..(651): unsure at all n locations
  Clone ID: LIB3543-063-Q6-K6-H7
atctcaaaaattctgttctctggggcggggggggcgccaaaatcaagagtagattaaactaatggccggaatcggacctttgactcaagattgggagcccgtcgttattcgtaaaaaagcccctaccgccgccgccaagaaggatgagaaagtcgttaacgccgcccgccgtgccgggggcgagatcgagtccatcaaaaaatcaaatgctgggacgaatagggcggcttcaagtagtacttctttgaacacaaggaagctcgatgaagacactgagaatcttgctcatgaccgagtgccaactgagctaaagaaagccatcatgcaagctcgaatggataagaaacttacccaggctcaacttgctcagatgatcaatgagaagccccagattatacaggagtatgaatccggaaaagccatccctaatcaacaaataattggtaaactggagagggctcttggtgcaaagctgcgagggaagaagtgagtgagcgagagtctcgtagaaagagcaaacagaacttgaatatcgnccagaatcttgagtcctaaaacttggtgatgtaaatgaatgttttatgccgttattatgggtcgtttgtaaagacactgtttttgactttgtgtgatgactttgtctgccactgc

SEQ ID NO: 3040 - DNA, 1183 bp, Gossypium hirsutum
  Clone ID: GOSHI-09MAY01-C14832_1
gtttattcattacccaaacctccctttcccccccttttttggtttatcataaacaatcgtcatagcattaacatacagctaggatctttcttttgtttttttttgggggaaaaggttgtgtttttaacgaaaatgggttccatttctttcgttaattctcaaaccctgaagctattcccttctttcaattcctttcttcattctaagcaaccctgcattgtctccatataccattattcccataaagtggcactggcaccctccttgtctctccccaaacccaaagatggctcttttcgtcttgctgctgaacttatcaccaactctgttccctcaagaaatggaaattatactgtgggtgattttatgaccaggaaagaggatttacatgttgtcaaaactacaacaagtgtggatgaagcattggaggcacttgtggagaagagagttactggtttcccagtgattgatgatgactggaatttggttggcgttgtttccgattatgatttgttggcactcgactcgatttcaggtagcagtcaaaatgacacaaccttgtttcctaatgttgatagttcttggaaaacattcaatgaaatacagaaattgatgaacaaaaataacggaaacgtggtcggagacttgatgacaccttcaccgctcgttgttcgtgaaacaacaaacctggaagatgctgctaggctattgctcgagaccaaatatcgccgactacccgtggtagatattgatggcaaactagtcgggatcattacaaggggaaacgttgttcgagctgccctgcagataaaacattcgattgaaagttgacatgatgccaatatccagagatgatcacgatctcggggcatcaaattgatggcatgattctttctttgatatacagatgaaacaagtattctcggtctcccttttggtcatttgccattgccatgtacaacttatacacgaaaccgtgagcctgttaaaacagggcaccagtagcttagttagaatcagtaatgccattgcagtaaaccatattacctgtagttttgtatctaaatattaatgtttacagtgcttttttacattactattatagaatagtttagtttggacaacaatggctacactttttcaaaaaaaaaaaaagaaaaaaaaaaaaaaaaaaaacgaacgc

SEQ ID NO: 3041 - DNA, 288 bp, Gossypium hirsutum
  Clone ID: GOSHI-09MAY01-C14822_1
ttcgagcgagtcttatcaagggggcgttgagatgataagaagggatttactcactggccattggaaaccctatcttgaacgtgcaatcacgttgaaaccatgttatgagggaggaattaatggtggtgaggtggcagcttacatcttgcaagagaccgctattggcaagaattatgcttcacacaagttgagtggggttcgaaggttacctgatgctatatctcttgggtatcaactgcaaagggtcctaggcggagatgaaactatccctgaatggtacacacatgc

SEQ ID NO: 3042 - DNA, 418 bp, Gossypium hirsutum
  Clone ID: GOSHI-09MAY01-C14422_1
ttatccaataaattcaaacaatgattatagaagcagaagcaagttttaagagttcagcatatcaaatacaaactgaaacaagaccaaaaatatgagtctccaactccctcttcatttcatacacaatttacaaatctacatctctcacaaacacccaatttatagattactcaaatcttcaactaaaaccacacatgtttttaatgtaaaacaaactcacatttaaatcataactggaactgccatcaccacttcactagtacaactgctagcaccggacacccggttctcctccctatacgacttttttttgatgaactcgatgcaatctgccacagcttcgctatggtgagtgtcagctggctggtaatatcttcgaggggcgccactggcagcaggggttgtgtgcggatgtgtg

SEQ ID NO: 3043 - DNA, 438 bp, Gossypium hirsutum
  Clone ID: GOSHI-09MAY01-C14762_1
aaaaacagtagtaatacgtaaacgagtcgatctcaaaccaaaatgaatttgtgcttcgctcatacatgcaaagcctagacactgtccgtaataagccggagtgtcgacgaacaatatttgtttagacacagaatcagaccatgttcgcaataatacgacgtcatgaaaccatacatcaaacgatcccatcactatacacacctcaacatcaaaaactttccacttacacgccatcgaaaaagcattgaagcgtagaaacggaacatagaagaagttacctttccaggagaaagcaagagtcacgcttgtgacaccatgagtggctcattggattcttccatggacttcgctttatatcggaagtacaacgcgagttgtagaatccccaaaatagttccaattccatttggaacgtaaataaaggcatcaaagttaaag

SEQ ID NO: 3044 - DNA, 998 bp, Gossypium hirsutum
  Clone ID: GOSHI-09MAY01-C14712_1
ccacgcgtcggatccagatggggtgaacggcgagggaagtttaggaacattgaacagctgaaagtcatttgtttcataaacatagattggttatgtgcagcctgtgtttggagggtcgaaaggtgtttatttgtgaacaaaagctatatactagagcacagttacatcaacatataaacacaggtgactctgaggtggacggaactgagagtgagagaggtggcttcatggggcatccaatgtgtgaattctgcaagaccccgttttatggggataatgaattatattcgcacatgtccacagagcactatacatgtcatatatgccaaaggcagcatccaggacaatatgaatattacaagaattatgatgaccttgagattcattttcgccgagatcattacctatgtgaggatgaggcttgccttgccaaaaagttcatcgtcttccagtctgaagctgaactaaagagacataataccattgaacatggaggtcgcatgtctcgagcacaacgtagtgctgctttacaaattccaacaagctttcggtatcgtcgaagtaatgaagaaaatcgccatggaaggggacgaacatttcggcgtgaggcttctgataatgactatcaactttcaatggccattgaggcaagtttgggaatggccagtgatcctccagcatcatctacagcacaggcagtctctaatcatagagacacaaatgatatcgatccgcttgttcagccttttgagtcattatctacaacagatgccgaatcatcttctagatatcttcaagctttggggacagggtcaagggggggacctttgcaagaatcttcttttcctcctctccctgtggctcccagcacctgtcaacagaagtccccacatagctcaggtttacccaataacaccatggcagcgcatctacggagacagaagaatgggaataaaaatgctttgagttcagctcaagcttggccagcaacaagtcat

SEQ ID NO: 3045 - DNA, 1859 bp, Gossypium hirsutum
  Clone ID: GOSHI-09MAY01-C14722_1
cttcacttcacaatactggagcagaaatggcaattccgatccccagtcggcaactgttcatcaacggcgattgggctgagcctttgctcaagaaacgcatccctattattaaccctactactgaagaaatcatcggtgatattccggcggcgactgctgaagatgtggatgttgcggtgcaggctgctcggagcgcacttactcggaacaaaggtaaagattgggcctttgcttcgggtgctgtccgtgctaagtatttgcgtgccattgctgctaagataaaggagagaaaaccagtacttgcgaaacttgaaacagttgattgtgggaaaccacttagtgaatctgaagcagatatggatgatgtcatcggatgctttgagtactatgcagaccttgctgaaggtttggatgccaagcaaaaggctcctatctctcttccgatgaagacatttaagagctatgtgatcagggaacccattggggttgttgcgttgattgtcccatggaattacccgcttttgatggctacatggaaagttgctccagccttggctgctggttgtgctgcaatactaaagccttctgagttggcatctgtaacctgtttggagctgggagaagtgtgtagggaggttgatcttcctgctggtgtcctcaacattctgcccggactaggccctgaagctggtgcatctttggcatctcatccccatgttgacaagatttcatttactggaagcacagtcacagcggttaagataatgacagctgctgctcaaagggtcaagcctgttaccttggagcttggtggcaaaggtccaatagttgtgtttgaggatgttgacattgataaggctgttgagtggaccatattcggttgcttttatacaaatggccagatctgcagtgcaacatcacgccttattgtgcatgaaagtattgcggcagaatttttggacaggcttgtgaaatggagtgagaacattaaaatttcagatcccttggaagaaggttgcaagcttggccccattgttagtagagggcagtatgagaaagtaatgaatttcatttcgaatgctaagagtgagggagcaactattttgtatggtgggaatcgtcctaagcatttaaagaaaggattctttgttgaaccaaccatcatcactgacgtaacaacctccatgcaaatatggagagaagaagtttttggacctgttctttgtgtcaaaacatttaccaccaaagaagaagccattgaattggcaaatgatacccattatggtttgggaggtgctgtggtatccaaggatcgagaaagatgtgatcgtgtaagcaagcttttgcagaatggtgctgtgtgggtcaattgttcacagccatgcttctgccaagccccattcggaggcaccaaatggagtggctttgggcgtgaactaggggaatggggacttgaaagttacttgagtgtaaaacaggtaacagagtatgtctcagatgaacaatggggttggtaccagcctccaaagcaatgaagttcaacatggaaatacaaataatatttactgctctaccaaaaataacggtaataaagtgtgctgagagccaatttgtttttgagtatgtatgtttgtacgtatgtaatcccgtcccgttgcaggtatgtctatggttttcagtttcacgtttatatgtatgtttgcatgtacgtaatccctttgggggctatgtcaatggcattgagtctcgtttatatgtatattctatattacattttggctgacctgtttggaatgtaagttgcgaatgcatgttacctaaaaaaaaaaaaacaacggcacattgcgtgggccaatttt

SEQ ID NO: 3046 - DNA, 799 bp, Gossypium hirsutum
  Clone ID: GOSHI-09MAY01-C14652_1
cacgcatgaggaaaaatcctctgaacgagagcctggggtgagttctcggagtgccatcgtgcctccgtccaatgggctgcacgcgcttacgcgccactgtcaatgccgtcacatatggcggccggaagccaaaaaacctcatcgtttaccccgcatcaaaaggtattccattttttatctatttttaatatttttatatgtataaaatgcaaatattttgaaaaagaaaaataaaaaacaaatcacctttgctttctttgtgaaatctttctgatgtcttattgcaaaaaaatatttggtgtacaatcatccttttctgtgtgtgtgtatctctttatagatcaaagaaaaaggctttataacctcagtctattacatattttggaaagaaatccttgatttctttccatatttgtttaatctgtatattgtgttctttctttccatatttgttctttgtctgtcgcgatttctttcctttgtttgaaggtgagcgcgaggatctcggtggcgagacaagactgaggcgtggtgtgctgatgatggtgacgatctcggcgttgtttgcgcgccggtggtggcgcgacatccagtagctgaggtcaaggagaaagtcgtggcgctggtagagccttgacatgaggccaacagacgctccccgaaagttctggagtttcgtgaaacgaaagggcgcttattggacatgacgtttgaggcgcctgaagcttccagaatcctttgcggcttgaggagaaagagagctagggtttctaaccctatctgaaagtcatttgggccc

SEQ ID NO: 3047 - DNA, 495 bp, Gossypium hirsutum
  Clone ID: GOSHI-09MAY01-C14612_1
gggaacttgaagatgtatttcgatgcaaccatcgagatagtgacttctaaagatgtaagggtctgtggagccctcggaccttgcatctctcttcggaaaacaaataatttggtgagcgtgaatgagatcggggatggtggtacatatatatggaagctgcgtacacttactagtaaaacatgtattgctttcttcttccaaggaaactatgagcataaacctcaacccggcgctgcgttcttggtacaggtcataacacgctatagagatggcaacatgggaattcgaagacgggtgacaaccgctgcaagaagatgggttgcaaagcagtcaccagatatatcgcgccgggtttgatcaggaagcagcaacttcagttatggcccgactcgctattcatcgagctgaaacatgtcaagctagagatgttatcagatggttggacgataaccttatttgttgtgcttccaagtttggagactatatacaggaaga

SEQ ID NO: 3048 - DNA, 1860 bp, Gossypium hirsutum
  Clone ID: GOSHI-09MAY01-C14622_1
cccacccgtccccccggcggcccttcatatttggtccttccggtacttcaccatgccatcattcgatactatcctccttcgggatttggtagccgcagcctgcctcttctttatcacacgttatttcatccgtcgtcttctcagtaaccccaaacgaacacttcctccgggtccgaaagggtggccggttgtgggtgctcttccactcttaggttccatgccccatgtcgaactagccaagttagccaagaagtatggacctgtaatgtacctcaaaatgggaacctgcaacatggtggtggcttcaaccccggataccgctcgagctttccttaagacccttgacttgaatttctctaatcgaccatccaatgctggtgccacccacatagcctataactctcaagacatggtgtttgctgagtatggtccgaggtggaaattgcttcgtaaactgagtaacctccacatgcttggtggcaaagcccttgaggattggtcccaagtccgggctgttgagctaggccacatgcttcgggccatgtgggagtctagccgaaagggtgagccagtggtggtgccggaaatgttgacgtatgccatggccaacatgatcgggcaagtgatactgagtcggcgagtattcgtgaccaaagggtcggagtcgaacgagttcaaggacatggtggtggagctcatgacgtccgcgggcctcttcaatattggtgactttataccttccattgcgtggatggatttacaagggattgaaggcgagatgaagaaattacacaaaagatgggatgtacttttgacaaagatgatgaaagagcatgaggaaacagcttatgaacgcaaggggaagccggattttcttgatataattatggagaacagagaaaactctgcaggggaaaggcttagtttgaccaatgtcaaggcgcttctgttgaatctattcacagctggcaccgacacatcctcaagcataatcgaatgggcattagctgaaatcctgaagaacccaaaaatactgaacaaagctcacgaggagatggataaggtgattggcagaaaccgaaggcttgaagaatccgacatacccaagcttccctatcttcaagccatttgcaaagagaccttccgaaagcatccatctactcccttgaacttgcctagagtgtccacccagccttgcgagatcaatggctactacatccccaaaaacaccaggctgagtgtcaacatttgggccattggccgagaccctgacgtgtggggcaacccactggatttcacccctgaaaggtttctgagtgggagatttgccaaaatcgacccaagagggaacgactttgagttgattccatttggtgctgggcgaagaatctgtgctggaaccaggatggggatcgtgctggttgagtacatcttaggcactttgttgcactctttcgactggatgcttcctcccggtactggggaattaaacatggatgagtcctttgggcttgctttgcaaaagaccgtgcctctttctgccatggttcgtccacgcctcgcaccaactgcttatgtttcctaagcacatcccctgccttatcactgctcatttttcctacttctgccgcttgcgttatctgatattcaagcttgatgtgatgtgtgcgtatcaattgatgcatcttttagtttcaattctactttaaaaaacaatcttgcatgcctttccattcgatcttatccatacctacctatactatcatactaacctttatttagggtggtgagtattcgattgagttgagttgaatcaaagtaaaaaaatttcgaattaatcaagttgatgaatcttatttt

SEQ ID NO: 3049 - DNA, 508 bp, Gossypium hirsutum
  Clone ID: LIB3585-033-P1-K1-H5
acgcccacgcgtccgtccacgcgtccgtttatgaacgcagggggaagcctgtttttctggatttaattatggataccagaaaaaaactttgcaggggaaaggcttagtttgaccaatgtcaaggcccttctgttgaatctattcactgctggcaccgacacatcctcaagcataatcgaatgggctttagctgaaatcctgaagaacctaaaaatactgaacaaagctcacgaggagatggataaggtgattggcagaaaccgaaggcttgaagaatccgacatacccaagcttccctatcttcaagccatttgcaaagagaccttccgaaagcatccatctactcccttgaacttgcctcgagtgtccacccaggcttgcgagatcaatggctactacatccccaaaaacaccaggctgagtgtcaacatttgggccattggccgagaccctgacgtgtggggcaacccactggatttcacccctgaaaggtttctgagtgggagat

SEQ ID NO: 3050 - DNA, 574 bp, Gossypium hirsutum
  unsure (1)..(574): unsure at all n locations
  Clone ID: LIB3829-032-Q6-K6-A10
anaaactctgcagnggaaagcttagtttgaccaatgtcaaggcgcttctgttggtaatgcgagtttgagtttttttgaccaatgtcaaggcgcttctgttggtaagtcgagtttgagtttttactttccaagttgcatattcgtaaattaatgacaaatattcttgaattttgcattggcagaatctattcactgctggcaccgacacatcctcaagcataatcgaatgggctttagctgaaatcctgaagaacccaaaaatactgaacaaagctcacgaggagatggataaggtgattggcagaaaccgaaggcttgaagaatccgacatacccaagcttccctatcttcaagccatttgcaaagagaccttccgaaagcatccatctactcccttgaacttgcctcgagtgtccacccaggcttgcgagatcaatggctactacatccccaaaaacaccaggctgagtgtcaacatttgggccattggccgagaccctgacgtgtggggcaacccactggatttcacccctgaaaggtttctgagtgggagatttgccaaaatcgacccacg

SEQ ID NO: 3051 - DNA, 333 bp, Gossypium hirsutum
  Clone ID: uC-gsflnu33B099c04b1
tttactcgtgggctgtttggtccttttccaagggtgagtgtcatctgttaacattcactctattaccctacccaatgatatttataactttagtacttgaatttctttaaccgaccatccaatgcttgtgccatacaaatattcttttaacttctaagacatactacctcgctgagtatggtccgaggtggaaaactgctttcttaacctgcaaaacctccccatccttggtggcaaagccctttaggaatggctccaagtccgggctgttgagctaggccacatgctcttggccatgtgggagtctagccgaaagggcgagccagtggtggt

SEQ ID NO: 3052 - DNA, 328 bp, Gossypium hirsutum
  Clone ID: LIB3145-022-Q1-K1-H2
cccacgcgtccggcacattggacgcaatcagagagaggatgaagagtatgcaactagcagctgccggtgggaacatggatgattatggaacccggcccttgatgtctgtcaatgacaacttaaatcttggactctcaactcagactcgtacattagatcctcatcctggtatggagaacccagccttgcgagatcaatggctactacatccccaaaaacaccaggctgagtgtcaatatttgggccattggccgagaccctgacgtgtggggcaacccactggatttcacccctgaaaggtttctgagtgggagatttgccaaaatcg

SEQ ID NO: 3053 - DNA, 784 bp, Gossypium hirsutum
  Clone ID: GOSHI-09MAY01-C14052_1
ggtacaaccaaagattagtgcttatatcgggactactttctaatccaaccattgcattggactccatttcaatttgcatgaattatttgaactgggacatgcaatttatgctaggcctgagtgcagctgccagtgttcgagtgagtaatgagctaggggcaggccatccaagggtagcaaaattttcagtgtttgtggtgaatgggacaagcatattgataagtattgtattcagtgcaattgttttgatattccgagttggattgagcaaagcatttacaagtgattctgaggttatagaagcagtttcagacttgactccactgcttgccatctctgttttcctaaatggcattcagcctatactctcaggtgtggcaatagggagtggatggcaagcaattgtggcttatgtaaacctggcaacatattacattattggtctcccaattggatgtgttcttggcttcaaaactagtttaggagtaccaggaatttggtggggtatgattattggagtcctcctacaaacagcaactcttgttgttctcactgccacaaccaattggaacaaagaagtcgaaaaggcagctgatcggttgaaaaaatctgccaatgaggagcaaacttagtgagaggagcagcatgagagaattcccaacatctcccgcctcttcctactattttcaatttgtatccttcttctttaaaaagaaatccaaaatattgggattagaggccgaaatcagtaggtttagattaaaaaaaaaaaaaaaaaactcga

SEQ ID NO: 3054 - DNA, 885 bp, Gossypium hirsutum
  Clone ID: GOSHI-09MAY01-C14012_1
cataaaatgccatcaaagtatgatgcttgaagaaactcgtcaactcaatccgacggtcctcgttccgccttggccttatctaggcgatgatctagcggcggaggacaacttcagtgataacggcaaccccttttacctccaggaagcgttagcagcgctgcaatgttacttgccgtccgacgagccgggtttcgagtcggattccgagattttgggcctttacaatccgggttctccagtcgatgcttactcgtgcgatcattttcggatgtttgagttcaaagtccggcggtgcgggcgtggccggtcgcatgattggaccgagtgtccatacgctcatcccggcgagaaagctcgccggagggacccgaggaagtttcattattccggtatggcttgctccgatttcaagaaagggaattgtcggaaaggagactcttgcgagttcgctcatggagtttttgagtgctggctacaccctgctcgttaccgaaccctgccgtgtaaagacgggtcgggttgtcggcgtcgggtctgtttcttcgctcatactccggaccagcttagggttgtcaactttgctgattctttcgatagttcaccgccttgtacgaaagcaatgccgttttccggttctccacgggccgagtcttcgccgacggtttcacctatgtgtcaattccctactatgaacactatggtggcttctttgaggcacttgcaactcggtaaagtcaagtctttgccttcttctggttgcgggttctccaagagggtcactgatccgacccattttatctagcctacctaggactccgacccgaaacctgacccgtcctgggatcgggtacttggatttccggggcggagaaaaacctgtgatgg

SEQ ID NO: 3055 - DNA, 721 bp, Gossypium hirsutum
  Clone ID: GOSHI-09MAY01-C14002_7
taataataaaagcctctgcccctaccgatccccttgcatatcttctaaaaatacatttactccgttggcttttgaggaaagaggcaaccaaaggctgttgcttaacacttaacttctttcacttcatccacttcttccagaacacaaaagcaactatggcctacgctgcaatgaagccgaccaagcctggtttggaggagccccaagaacagatacacaagatcagaatcactctctcctccaagaatgtgaaaaaccttgagaaagtttgtgctgatctggttcgtggtgccaaggataagagactgagagttaagggacctgtgaggatgcctaccaaggttcttcacattacaacaaggaagtctccatgtggtgaaggaacaaacacatgggatcggtttgagcttcgtgttcataagcgagttattgacctcttcagttctcctgatgtggtgaagcagataacatctattaccattgaacctggtgtggaggtggaggtcaccattgcagattcttaaatatggagtcacttctgctctgcttagaatgatttgtagggttccttagcttgtatttttcccatactagtgttgaagtgagtcttcatctgttttatggctccaggttttgtttcctttttgttatccgaagattatgtttggattttttaaatttatttgaaatcaaaagtcaagaaacgagttgtgtagtattt

SEQ ID NO: 3056 - DNA, 546 bp, Gossypium hirsutum
  Clone ID: GOSHI-09MAY01-C14002_6
actatggggagcggtggcacgcgtgcgggccccggcgcggttttcggggggagccaccacgcgcgcgaactgtcctgtgttggctagttaagaatcaccgatggtaacgctctagatctagtcaatctgaagacttccatcggatagagccctcgatgtcctaaacaatcttttaagcttgagtggttgggtgcagggcttttgtagtttgtgattttcccatgctagtattaaagttaaggttctattttgccctgcggctctggattctctttcctttttgttacctaaaaagatcatgtctggatgattttgtttattgcattatttgacattaaatatcacgagactagctgcttcattttaaaaaaaaaaaaaaaaaaaaaaaaaaaaaaaaaaaaaaaaaaaaaaaaaaaaaaaaaaaaaaaaaaaaaaaaaaaaaaaaaaaaaaaaaaaaaaaaaaaaaaaaaaaaaaaaaaaaaggggggggcctttttaaaaaaacaaattttacttccccgggtttgcaaaaaaaaaatttttttt

SEQ ID NO: 3057 - DNA, 596 bp, Gossypium hirsutum
  Clone ID: GOSHI-09MAY01-C14002_5
tcttccacgcgtccgcgcctccacgtatataaatcttttacagagctttctttctcgtttcgccattcgattttttgagccgtccggcagcacagaacatagcttgaaactcgccatctctcacttctctagaaactaagagtcgaaaacagatggcgtatgctgcaatgaaaccgaccaagcctggtttggaggagtcccaagagcagattcacaaaatcaggatcactctctcctccaagaatgtgaaaaacctcgagaaagtttgtgctgacttggttcgtggtgccaaggataagagactgagggttaagggaccagtgagaatgcccaccaaggttcttcacatcaccacaaggaagtctccctgtggtgaaggaactaacacatgggatcggtttgaactccgtgttcacaagcgagttattgaccttttcagctctcccgacgtggtcaaacaaattacttccatcaccatcgaaccccgagttgaggtcgaggtcaccattgcagattcttaaatgtgtgcctcacttttgcctttttcagaccttactagttttagttgattcaaagggctttcgtgtcacaactgc

SEQ ID NO: 3058 - DNA, 724 bp, Gossypium hirsutum
  Clone ID: GOSHI-09MAY01-C14002_4
cccagcgtccggcagtggccgcggctttacacttcccttctctcacctcttccagaagccagaagtcagtttagtagcaatggcgtatgctgcgatgaagcctaccaagccgggtttggaggagccccaagagcagattcacaagatccggatcactctctcctctaagaatgtgaaaaacctagaaaaagtttgtgctgatttggttcgcggggcaaaggataagagactgagggttaagggaccagtaagaatgcccaccaaggttcttcacatcactaccaggaagtctccctgtggtgaaggaacaaacacatgggatcggtttgagctccgtgttcacaagcgagttattgacctattcagctcccctgacgtggtgaagcagatcacatctatcaccattgaacccggtgttgaggtagaagtcaccattgcagattcttaaatgtgccttacttttgctttttggcctcacatggtttttagtttatttgaaagagacttttgattgatgtgaccttctttgcttggatcaatctcaagcttggatgaatgttgtagggtttctatagttggtgtttttcccataatggaattaaaattctaatctgttgggtggctttatagtttctttcctttttgtaacctaaagattatgttgcgatattttgattttatgcattatttggcattaaggaatgaaatgagttgctttatgttc

SEQ ID NO: 3059 - DNA, 822 bp, Gossypium hirsutum
  Clone ID: GOSHI-09MAY01-C14002_3
cttttatctcattcctccgtcgcttttgagaatagaggcagcagtggcttgacgttcccctttgctcccttcttccagaagccaaaagtttgagttaagaacaatggcttatgctgcaatgaagccgaccaaacctggtttggaggagtcccaggagcagattcacaagatcaggatcactctctcctccaagaatgtgaaaaaccttgagaaagtttgtgctgatttggttcgtggtgccaaggataagagactgagggttaaggggccagtgagaatgcccaccaaggttcttcacatcacaacaaggaagtctccctgtggtgaaggaacaaacacatgggatagatttgagctccgtgttcacaagcgagttattgatcttttcagctcccctgatgtggtcaagcagatcacatctatcaccattgaacctggtgttgaggtggaggttactattgcagattcttaaatatgcctcacttatatgctttttggcaacctctagttttagtcaattagaagacttccatctgatatagccctcgatgtcctaaacaatcttttaagcttgagtggttggttacagggcttttgtagtttttgattttcccatgctagtattaaagttaaggttctattttgccctgtggctctggattctctttcctttttgttacctaaaaagatcatgtctggatgattttgtttattgcattatttgacattaaatatcacgaagctagctgcttcattttcattttgcttaatgggagggtcgatcttgggaaattataaaaaaaaaaaaaataaatttaaaaa

SEQ ID NO: 3060 - DNA, 1102 bp, Gossypium hirsutum
  Clone ID: GOSHI-09MAY01-C14002_2
cctgtagtgatggcccattcatctgtagccatgaaatggaggagcttttgaaactgcattggaggatcaaagcaagaagattcagacagtcttctaacaaagcaaaatcccataaaaagccgacaaaagtgggaaaaaggaagggaatgtggatgatgctgattatcagggtgccactactactactacggcagccagcaatgatgctggaatggctgctgctgtagcagtgggtgccactacagcagcatcaacgccgtcagaaccaccaccaacaaccgcagcagcaggaggcaaaagatccgaaatcaatgccatggaaaaccgaggaccatcttcactcattgcaatcaatagacaagacatgccagctcaagatacgtcaagaaaccctacaccaacgtcaacgaaaccctcgaatgcaccatcgaacgagacgtgccgacggcgacgttctttatccgagcctacgctttggactccgacgaccacgaggtggcgtacggtcaaaacaccgacgccgagaagaaaaccaatctgtttgaaatccaagccatcaccggtcgtcatgtttcgctcgatatagtgtcggtttgtttatagtctctttctttcccttgttctctttctgtcctatttctcttatttcttttataatctttgatctttttttttatctattgttttttttttttttttatgttttctttcttctttctcctactgtcttttttctttttttttttttttttttttttctttttttcccttttctcacttttttttttttttttttttcttcttcttttcttctattttctatttatcttcttctttcttttctattctttacttttcttttttatttttctttttctctattttttttttttctctttacttatttttctattctttctttttcttctttctattcttctttttttatattttttctattttttttttacctctttttttttttcttctttcttaccttttgtctttttctctttcttcttttttcatttttcttttctcttcttcttactttctttttcttcttcattattttttttttttttttgtttttcattttttt

SEQ ID NO: 3061 - DNA, 1048 bp, Gossypium hirsutum
  Clone ID: GOSHI-09MAY01-C14002_1
catagaggaggaaaaaaaaatcaaatccccactattttgtctatataaatgtctcgaatttcaactcggctcgtccccccacccgttcgggaactcataactcctcaaaagtcttcttcaatggcagctcgagttcttgttttggcttcaattcttattttctcttgttttgcagagacatgctatggggcgatctctttctcatcccttcaaagaacacttgttgttactgcttctcatagacaaggacttttgaaagccggggaagacaagatcacagtgagatggggattgaaccagagtttcccggccgggaccgactcgtcttataagaccatcaaggtccagctttgctatgcacccatcagccaagtcgaccgtgcatggcggaaaaccgaggaccatcttaacaaagacaagacatgccagttcaagatcgtcaagaaaccctacaccaacgtcaacgaaacccttgaatggaccatcgaacgagacgtgccgacggcgacgttctttatccgagcctacgctttggactccgacgaccacgaggtggcgtacggtcaaaacaccgacgccgagaagaaaaccaatctgtttgaaatccaagccatcaccggccgccatgtttcgctcgatatagcgtcggtttgtttcagtgctttctccgttgtgtcgttgatggggttcttctttatggagaaaagaaaggcaaggaaatctcagcagtagtgtgatatattatggttttaagaaccctaattaaacctttgaaaggatttttatagtaatgggtttgatttgcatgtcttatttactttctttgggtttttaatcctagatgatgggagataaagagttaagttgaatggttgtgttttagtgggaatggggtgaataaaagagttggaattatctgtgatcatctccttgttatatattaaagttgaaaattgtctttttgttaaaaaaaaaaaaaaaataaaaaattaaaaaaaaaaaaataaaaaatataatataaaaataaaaaaatataaaaaaggggcgg

SEQ ID NO: 3062 - DNA, 414 bp, Gossypium hirsutum
  Clone ID: uC-gsronu33B032b04b1
caaaaagtcttaagtgaggcatatttaagaatctgcgatggtaacctctagttttagtcaattagaagacttccatctgatatagccctcgatgtcctaaataatcttaagcttgagtggctggttacagggcttttgtcggttgtgattttcccatgctagtattaaagctaaggttctattttgtcctgtggctctggattgtctctcctttttgctacctaaaaagatcatgtctggatgattctgctggtccagctttgctatgcacccatcagccaaagtcgaccgtgcatggcggaaaaccgaggaccatcttaacaaagacaagacatgccagttcaagattcgtcaaaggggccctacaccttacgtgaaccaaaacccttgaatgggcccattgaacgagacatg

SEQ ID NO: 3063 - DNA, 533 bp, Gossypium hirsutum
  unsure (1)..(533): unsure at all n locations
  Clone ID: LIB3582-037-P1-K1-A5
cccacgcgtccgtagaggcagcagtggctggacgttcccctttgctcccttcttccagggattgacttactgtcctagcagaagccaaaagtttgagttaagaacaatggcttatgctacaatgaagccgaccaaacctggtttggaggagtcccaggagcagattcacaagatcaggatcactctctcctccaagaatgtgaaaaaccttgagaaagtttgtgctgatttggttcgtggtgccaaggataagagactgagggttaaggggccagtgagaatgcccaccaaggttcttcacatcacaacgaggaagtctccctgtggtgaaggaacaaacacatgggatagatttgagctccgtgttcacaagcgagttattgatcttttcagctcccctgatgtggtcaagcagatcacctctatcaccattgaacctggtgttgaggtggaggttaccatcgcagattcttaaatatgcctcacttatgctntttggcaaccactagttntagtcaattagaagacttcca

SEQ ID NO: 3064 - DNA, 444 bp, Gossypium hirsutum
  Clone ID: LIB3120-018-Q1-K1-B4
cccacgcgtccgcccacgcgtccgagaacatagcttgaaacttcccatctctcacttcttcagaaactaagagtcgaaaacgatggcgtatgctgctatgaaaccgaccaagcctggtttggaggaatcccaagagcaggttcacaaaatcaggatcactctctcctccaagaatgtgaaaaacctcgagaaagtttgtgctgacttggtccgtggtgccaaggataagagactgagggttaagggaccagtgagaatgcccaccaaggttcttcacatcaccacaaggaagtctccctgcggtgaaggtatttaattaacctggctggtgggggattttggaccctacctttatggaaaccttggttcttattttggaagcattccttgggaacctattatggttatgaatcccctggtttatactggaaatctgaattattc

SEQ ID NO: 3065 - DNA, 386 bp, Gossypium hirsutum
  unsure (1)..(386): unsure at all n locations
  Clone ID: uC-gsronu33B129h09b1
gccattaccncccgccatgtttcgctctatatagcggcggtttgtttaagtgctttctccgttgtgtcgctgatggggttcttctttatggataaaataaaggcaaggaaatctcagcagtaatgtcatatattatggttttaagaaccctaattaaacctttgaaaaggatttttttagtaatgggttttatttgcaagtcttatttactttcttttgtgtttttaatcctatatgacttaagttgaatggttgtgttttattggcaatggggtgaataaaagagttgggattatctatgatcatatccttgttatatattaaagttgaaaattgcctatttgatattagtgttttcttcttgttgttaaaaacaatttgtgatc

SEQ ID NO: 3066 - DNA, 359 bp, Gossypium hirsutum
  Clone ID: LIB3146-053-Q1-K1-F9
cccacgcgtccgcccatttccttttgagttctagtcagactgttatctcttatgacatgtggcaactcagaaatcggtaaagaagaatgaggacaaagcagaaagaaaataagggagaactgaaactgaaaatagaattttaacacaaaagcaactatggcctacgctgcaatgaagccgaccaagcctggtttggaggagccccaagaacagatacacaagatcagaatcactctctcctccaagaatgtgaaaaaccttgagaaagtttgtgctgatctggttcgtggtgccaaagataagagactgagagttaagggacctgtgaggatgcctaccaaagttcttcacattacaac

SEQ ID NO: 3067 - DNA, 407 bp, Gossypium hirsutum
  Clone ID: GOSHI-09MAY01-C14372_2
aaaaaacccccaaaattattttcagattggagagagagagggctcaaacctgctctctccctcctcggtttattctaaattcgaaagcgaaagaataaataaaccctaagtttttcttccttctttttccattatatccctttctttttcttccatttcgtttaaaatttcatttttttcataaaaaggaacaaattctgtgcagtgttgacaatcgtatgccccttccccaacaaagttcgatcttttgatgcgacgatcgcatgctcgaaatcgggttgaatccaaatccaaatcgactaccaacccacaaaagatggacccaattaagctccaaatccgatccaattcccgatctaccgctctcttttcgcgaaactctcgtcaaaccaagccgatcccttctt

SEQ ID NO: 3068 - DNA, 483 bp, Gossypium hirsutum
  Clone ID: LIB3582-011-P1-K1-E3
gggctcaaacctggtctatccctccgcggcttatgccaaattggaaagctatcgagttgatccaccctaagctctgatgccttcgttcaccacttgatgccttactgttactgccatgttcgtggaacaactcatgtatttcatgaaacggaacacatactgtgcagtgtagacaatcgtatgccccttgacccaacagagttcgatcttgagatgcgacgatcgcatgctcgaaatcgggttgaatccaaatctcaaagagcctaccaacccacaaaagaggcacccagattagctccaaatccgactcaaatcccgacctaccgatctatactcgcgaaactagtcgaaaaccaagccggtcccttgtttaatcgcggttacaatcgacatatctctagccttgcttgctttgatggacatactctgtttctcctccaaaggttcagatcaagtactggatcataatcgatgggggaagca

SEQ ID NO: 3069 - DNA, 541 bp, Gossypium hirsutum
  Clone ID: GOSHI-09MAY01-C14282_1
ctcaatcccagctgaaaaggatgcagcaccaaattccaactcatcaaagtcatcaaatttcccattttacagtccaagtccattgccccccctcttcaagacatcccctgctgtacccagtgtgaatgcgactcctcttcgcttcttcaaacggccattccctcccccctctcctgcaaagcatatcaagtcattgctggcaagaaggcatggctcaattaagcctaacgaggcctcaatccctgaaggaaatgagtgtgaggttggtttgaataagagttttgggttttcgaagcattttacgtctcattatgagcttggtgaggaagtggggcgtggacattttggatatacttgctcccctaaggccaagaaaggaagcctcaaaggcaatgacccccctgccaaagttattccttagtccaagatgaccaccgcatttgccctagaggatgtaagactagaggtgaagatactacgagctttaactggtcataagaacttggtttagttctacgatgcctattaagatgatgaaaat

SEQ ID NO: 3070 - DNA, 727 bp, Gossypium hirsutum
  Clone ID: GOSHI-09MAY01-C14202_1
cacgcgtccgtcatccctggctgaatcccagtattacatataaaacccagactaaacaaaaacagagattgaaccatcatgtcacggcgatcatcagggacatggttgaggttatgcctcgtaatatttgcggtagtttcagcactggcagtatgtggacctgctctttattggagattcaagaaaactctcagattcgtcgattccaaatcctcttgtcctccttgtatctgtgattgtcctcctcctctttccctcctcaagattgcccctgggttggccaatctctcagtcacagattgtggaagcaacgaccccgatctcaagaaagagatggagaagcaatttgtggaccttttaaccgaagagttgaagttgcaagaagctgtcgccgaagagcacactcaccatatgaacattacctttggtgaagccaaaagggtggcttcccaatatcaaagggaggcagaaaagtgtattgcagccatagaaacctgcgagggagccagagaacgggctgaggcgttgctaataaggagaggaaagtaccacgatatggaacaaaagctcgacaaatgggtggaagggaaaacttctaacagtcaatgatatatagtctagattgaattatgaaaggagctagtgctgcctgacaggtgtaggcaaggccattattgtactaaatctgcagtgaacatttacttatttcaacatgctgatatctatt

SEQ ID NO: 3071 - DNA, 679 bp, Gossypium hirsutum
  Clone ID: GOSHI-09MAY01-C15972_1
gcagttgctggaagtgagtttgacccacaacggtctcgtacaaccgaagctagccctgggcacaaacatttaaatcaacagcgaggtcctgttgaatcttcttctgaccctaagcacactggaagaaacaccaagaactacgaagttgccctcaaggggattgagggccttcaatttgagagcgatgagagaaatcagtattaaaattgtgagctatatgaattgttgtaaagcatgaaatgatttgtgtttgtccttgttggtgggttgagttgaaggaatttgtaaaaagttggagctctggagttgggactctcgtgttgtgcacccaaagcataaatttctgcactgatggaagagcttgtgaagtgaaaattgactgacactgctatcgaaaaaggtggttgcctgtgaagggctacaactgtggtgtggctattttcccaacactttttaacttgctgtttttacggtgcccctttcatcttaagatcattgctttactcgtctgggacttgttgaggtgtgaaacttacggcactgtaaatttgccgcattcatgtcactcctgtttctcacgttttcatttagatattagtttatttttgtttcgttttgtatcagtgttccaaaggcaattctatatattcttttctccctctagagttatgataataag

SEQ ID NO: 3072 - DNA, 1567 bp, Gossypium hirsutum
  Clone ID: GOSHI-09MAY01-C15872_1
cccacgcgtccgaaaaaagaaggggaaaaaattcaatcttcttttttactcactcaaggttggaaaatttacagtaagaaaagtagaaaaaaggaaaaggaaaaggaaatgagtagaacaagctcagggacgaaacccacaatggttcttccctaccagaccccaagcttgacagagcattacagcatagggaagaaacttgggcaaggtcagtttgggactacatacctctgtacccacaaaccaacggggcagcacttcgcctgcaagtcaatcccaaagcggaagctgatttgtcaagaggactacgatgatgtttggagagaaatccagataatgcaccacttatccgagcacccacatgtggtgaggatcaggggtacctacgaggatcagctatctgtgcacttggtgatggagctttgcgagggcggtgagctttttgataggatagtccagaaaggtcattacagtgagagggaagctgctaagttgatcaaaaccattgttggagttgttgaggcttgtcattctcttggggtcatgcacagagatcttaagcctgagaacttcttgtttgatacggttgaggaagatgctaccctcaaggccactgattttgggttgtctgttttctacaagccaggtgaatctttctctgatgttgtcgggagtccatactatgttgcaccagaggttttacggaagcattatggacctgaagcagatgtgtggagtgctggtgttatcctatacatattattgagtggggtgccaccattttgggcagaaactgaaatgggaattttccggcagattttacaagagaaaatagattttgattcagaaccttggcctgctatttctgataagtgcaaaggatctcataagatatatgcttgaccgccatccaaagagaaggctaactgctcatcaagtcttgtgccacccatggattgtagatgacaccattgcacccgataaacctcttgattctgcagtattgtcacgcctgaagcagttctcagcaatgaacaaacttaaaaagatggctttacgagttatagcagaaaggctttcggaagaagaaatcggtggtctgaaagagttatttaaaatgatagataccgacaatagtggaacaattacatatgaagaattaaaagacggcctcaaacgagtgggttctgaacttatggaatcggagatcaaagatcttatggatgcagcagacattgacaacaatgggacaatcgattacggtgaattccttgctgccacggtgcacttgaataaactggaaagggaagagaatctggtgggtgccttctcctttttcgacaaagatgggagtggatacataaccattgatgagcttcaaccaggccctgcaaggagttgggattaagcgacgtccatctcgacgagatgatcaaagaaatcgatcaagataacgatggacaaatagactatggggagtttgcagcaatgatgaagaagggcaatggaagtattgggaggagaactatgagaaggacgatcaatttgggagacgcgttcggagtga

SEQ ID NO: 3073 - DNA, 733 bp, Gossypium hirsutum
  Clone ID: GOSHI-09MAY01-C15802_1
gcatgtctcactgactgtctgggttttgctggtgtgatggtataattttgaggtggaattattggttttgtatgaaatattatacatattcagtgagatttattggtgaattgacaattgtgttcccccaatttcttagttttgaactgctcttgtagcagcagacctcttcactctctctttcaaaattcagcaaattaatgtgagcaattaacaacaattaatactatttttgtcgatggttgattattttaattgatataataacaaatttagcccttgatgtttacatatgttgttaattcagtcttgattttaaaaaatttaacaactttactctcaacatttacgtatttacaaaaatattatgcaataagtttgttaatatcatgaccacattgataggatgtgtaaattatggaagctaaaattgttattataacaatcgaatttatgtaaaattgacagaaaaacatttatattatcattaattgttcttagttgctcaattttgaaattgtcaaattgctccaaattttttagagggaccaacttgctcaatatagacattgagagggatcggagagatctttttactgaaaaattttatctctttcatcctttttttttaatttattaggaattgctactcatattttacaaaaacgatgaagttagtctagtgattggtaaacacttgaacggttgatttttactaatcttttacatataa

SEQ ID NO: 3074 - DNA, 626 bp, Gossypium hirsutum
  Clone ID: GOSHI-09MAY01-C15502_2
cccacgcgtccgcttcaatctggttccctgtgccaaattcctaccgaggcaagagcatgaccttccagttcttctcccctcaggcatgcatatgcttctgctgcaaaaggagaggggatatctctatggataaccgtcttcaacgccattaagtttcccctcagatcccatcctactaagcctgtcgctgatctgaaggttctactgtcaaacgctgcatcaaaataaattcttgttctcgccataaagcgtaacagaagagcagacactgaccactattacttctcttgaaaacccaggccattctcggaagacatggttacttccttcaaccgccgagcaacatcgggggcgtcgagtcattggatatgaccctcctgtacctaagattagcaaaatttggtataaagtcccatgatatccggcagactgtaaatgtaatttttgagggcaattgtaggctccaaagtttcttgtaaatttcttttaattcggactgtattaaataatcattaggaacccgattagcctcttgtaatgatttataggcaccgctgaccgaaaacttaccagatagttcttctttgcacacctgtttcttgataataatcatttttatctgaaaa

SEQ ID NO: 3075 - DNA, 1095 bp, Gossypium hirsutum
  Clone ID: GOSHI-09MAY01-C15502_1
accgattaggtaatccttcttttgaaagggattataaatcggcactgcataagggaaaatggggaatcggtgtgttgcgtaataggcccgtattagggcaatacaaccaaccaaacagggtaatcagtggggccatggattaggggtgtagtggctaatccaatacactcaaccaaacatgctctaagtgagctacctaattttgcaccttctaggcatgcatatgcttctgctgcaaaaggagaggggatatttctatggataaccgtctttaacgccattaagtttcccctcagatcccatcctactaaacttgtcgctgatatgaaggttctactgtcaaacactgcatcaaaataaattctcgttctcggtatgactttctgtgttctttggcttctgtttatacttttattctttttcaagtttttgaaaccttcaaatcctgcccagtgtctttgaatattttgtgctaactcccttcctgttgtgttttttctctcgtgtaccaactgggttctggagtaccataacagccataaggcgtaacagaagagcagacactgaccactcttacttctcttgaaaacccaggacatcctcggacgacatggatacttccttcaaccgccgagcagcatcgaggacatctatcattggatataaccctcctgtatctaagattagcaaaattgggtataaagtcccatgatatcctccagactgtaaatgtaatttttgagggcatctgtaagctccagagttttttgtagaattcttttacctcggtctgtattaaataatcattacggtctcgactagcatcttgtaatagtttataggcactacggaccgaaaattctcccgagaggtcccctttccacacttgaaaatcttcatgctcaaactctgctaggggaatctgcaatattttcctagcaacttcctcttgaaagtttatcgaccccctgaatccagtcatcattccaaatggagatactatgccctgtacccaccctgcagctcattcctttttggagaagaccttttgcagcccatatactcttccaggtaaaagaagggaaatattacctg

SEQ ID NO: 3076 - DNA, 492 bp, Gossypium hirsutum
  Clone ID: GOSHI-09MAY01-C15462_1
attttgggtttaaaatatctgtcctttttttttatgaacaaagaaaactcatccaccacaaggcttaggcctgtaccaacatatttggatttttgagttgctgaaagtctcagggaagaacaagtttaccttcttcagcttgtgatgagataatcgcctttgatcctgatggccaaagagtacagtggatcaccaaagcatcatcatcgactcgaagcgcagaggaaccccctcacttggattctaggggttagtttcctctgcatattgttttatgtgttgggagcttggcagcgttcttctacccccaccactactcaatttagtgcatacaatagaggtggctgtgatagtcatgttactacatccgacaacggcaatgctgcagttggtcatccatcatcaaccaacttggactttgcaagccatcatcaagttgtgcttaacagttctaaaacagtcagtcagttcccatcatgtgatatgtcattc

SEQ ID NO: 3077 - DNA, 540 bp, Gossypium hirsutum
  Clone ID: GOSHI-09MAY01-C15762_1
tttttaccctgctatatatatccttcatatgtagagatattttccattttctcttcatatttagcgatcaaaatttgcttacttttccatatccaatcatttacaccacattagcaaacttatggctaaaatttcaaaccctactttgcatcccttcttaagaaaataaaaaagcaaaatgttttaattttgtttttaagtacataatccctgacaattgtgctatagtttagctacgtaatataacataattaaataattgctttcccttttaaagaacttgattcaaagggatcaaattaggattttttttctattttctttttttaaatttctattgctattgttgttaatttggagaaatggagaagaaaaaggtggctttaccgttagtgtgccatgggcattcaaggccggtagttgatttgttctacagccccattacccctgatgggtattttcttatcagtgccaagtaagactccactccaatggttagaaatggcgagacttgagaatgaatggcacatttgagggcat

SEQ ID NO: 3078 - DNA, 557 bp, Gossypium hirsutum
  Clone ID: GOSHI-09MAY01-C15702_1
ggagaaggtttttttcctgcaaggaaattttgtgtaaaatcgacatctggaatatgggtttcttggtaacaaccctgatttttgctgtaattgggataattgcatcgctttgtaccagaatctgctgtaacagaggtccctctgctaatctgctccacctaacactggtcattacagcaacggtctgttgttggatgatgtgggcaattgtatatcttgcacaaatgaaaccactcattgtccccattttgagtgaaggagagtgaaattcttcgcacgagatcgtttgcgaggttatcggtaaacaagctgtagtcatatttgattgtggattagcctctgaatttagttgtcatgtaatatgtctttctcatgtcgcttctgtaagtaaatccttgttcaaagcttgaactttgaatttggtattatgttagcagtacttcattatttggttctcatttggtcaggttctcataaaaaatagtgttgtttccattagacattatgcagtttttgatgaaataatatcgaagaaaagattacatttattaataatc

SEQ ID NO: 3079 - DNA, 335 bp, Gossypium hirsutum
  Clone ID: LIB3149-040-Q1-K1-F2
aattactgttattttcttggatttcttttttttttttcagaaaccaaggagaaggaattagtgtgtaaaaccgagatctgagatatgggtttcttggtaacaaccctaatttttgctgcgattgggataattgcatctctttgtaccagaatctgctgcaaccgaggtccctctgcttatctgctccatctaacattggttatcacagcaactgtatgttgttggatgatgtcgtcaattgtatatcctgcacaaatgaaacctttctttgtccccatttagagagatgggttttgtagttcaatacgcgttctgtggcaccattattattgtgc

SEQ ID NO: 3080 - DNA, 808 bp, Gossypium hirsutum
  Clone ID: GOSHI-09MAY01-C15692_1
cgattttcgaattgaattttggcgttgcgtggtaatagctgaggggttaagggatgtctgataatttctcgccgactctcagaatcggagatctcagtgatttcatagcaccgtctcaagcctgcgtcgtttctctcaaaggactcaaagcgacccctaagaaacctgaacctcatgttttagctggtaagagtcagcaaactgaaccagtaaaaatttcactcaaggattgcttggcatgtagtgggtgcataacctcagcggagactgtgatgcttgagaagcaaagcttaaatgaattcctttccaatattaataaagggaaagctgtaattgtatccctgtctccgcagtcaagggcctcccttgctgctcactgtggcattcctccactaatggttttcaagaaactcacaacttttttaaagtctttgggagtaaaggctgttttagatacttgctgtattagagacttaacgttgattgaaacttgtcttgaattcattgctcgatataaacaaggccaagcaactgacgacgagaaaagcaaatcctcactcccaatgctgtcctcgtcatgtccagggtggatatgctatgcggaaaaacaactaggatcctatattttaccatacatatcctcagtcaagagtcctcagcaatcaatgggagctgctattaagcatcatatatgtcaaacaatgggtttcaggccggaggagatttaccatgtaactgtgatgccatgttatgataagaagcttgaggctgccagggaggactttgtttttcaagcagaatctaatga

SEQ ID NO: 3081 - DNA, 406 bp, Gossypium hirsutum
  unsure (1)..(406): unsure at all n locations
  Clone ID: uC-gsronu33B021h06b1
ttcttatcaacgtaaatttgtagctntagggtgggttttataattgagggggtggcttaccaccataggagctgagaatttaaaacgatgtcggagaagttctcgccgactctcagaatcggagatctcagtgatttcatagcaccgtctcaagcctgcgtcgattctctcaaaggactcaaagcaacccctaagaaacctgaacctcaggctttagctggtaagagtcagcaaactgaaccagtaaaaatttcactcaaggattgcttggcatgtagtgggtgcataacctcagcggagactgtgatgcttgagaagcaaagcttagatgaatccctttcaaatattaataaagggaaagcgganattgattccctggctcccgcagcaaggggcctcccttggt

SEQ ID NO: 3082 - DNA, 1096 bp, Gossypium hirsutum
  Clone ID: GOSHI-09MAY01-C15622_1
agtgcttcctcttctcttttgttcctttgcttcccttctcttccattcctttttttttcctgctccaagaagctaagcattgtcttttttaagagaaaattttccgttcgatttttgtttttatttttggtagattttaaatattttaagcccttttcttttggagattatggagagagattttctcggtttgaggtccaaaaatgctgcaattacaatcaaagtagagccgaaaaatcatattttggtttctgcagtttggttgaggggttcagggatgcagttgtctttcacaaacaaggtatctacagttcctcagttcttgtcgttcgatggtgctcgagacgataaaccaagaaaagccacgcatgacacgctgttgtcatccggttttatgactattccaactactgattctaacaagaaaccgcatcctggcttgactcagaaacaagggggaaaccactatgcggctaccacctatggtctccaacaactcgatgtacaccaatcccgcctttcccacgaagcaaggatatttccaagttcaagtcagctgaatcacacgattacggtttctatgaacactcctcttctccaaccccatcttgcttcccccggacagaacataatcggtcatactataaacccgcaaccttttaccggagttccaatcatggctgcacctgtatctgttgttcctccatcaagtcctatcatcggtaccaccgatcttaggaatgctgccaaatcttctaaggcaccagctcagttgactatcttctatgctggatctgtatgtgtgtacgatgatgtatctcccgacaaggcccaagctattatgttacttgctggaaacggtccttctacgactcaaagtaaaacggcacctgtgactcaaccgcagacacatattccacgaccttgtaccttgtcccctttctcgggtcttccaaatcacctttctgtaacctcccatgtcagtttacagcctgttgcaggatctagtggcaccaatgaactaacagctgcaacaaggataggagctttagcatctactaataaccaaccagatcctccaaaattggttaatcct

SEQ ID NO: 3083 - DNA, 655 bp, Gossypium hirsutum
  Clone ID: GOSHI-09MAY01-C15182_1
gtagaatgaaaagagagggtattctggatatagaaatttcatttatctccgccaagttctaacagttctatatttttctacaacttcccttttctttgtatttctatcgacttagccaatgcttgctcactttcactcattcccctaatcactgcaaacaggatcgcttcttcttctccgatcaccggtgtctgctcagcgccttattttgatcggataagttacggttccaacgttatatctctgtctgaattgcttttttcctctccttttttttaaattttattccccaaaaaatggcgtctgaggatgtgaaaagaagcgagtcggcggtctcgacgatcgtgaatcttgcggaagaagcgaagatagctagcgaaggagttaaagcgccgagccatgcgttgcttagtatttgcaagtctcttgttgctggtggtgtcgccggtggagtgtcacgtagtgctgttgctcccctagaaagattaaaaattttacttcaggtgcagaatccgcatggtataaaatacaatggaacaatccagggtttaaaatatatatggaaaactgagggttttagaggaatgtttaaaggcaatggtactaattgagctcgcatcatgccaaactcagccgtgaagttttttagctatgt

SEQ ID NO: 3084 - DNA, 527 bp, Gossypium hirsutum
  Clone ID: GOSHI-09MAY01-C15152_3
atttccttcactcagcagcggctccccccctcccccccgccttttccccttaaccctcaaccgcaaaaaagaaaaaaaaagagtagcagtaccggtttcaccagctatgggtatcgacttggtcgccggcggcaagagcaagaagacgaagagaactgctcccaagtctgatgatatatatctcaagctccttgtcaagctttaccgttttctggtaagaaggactggcagcaaattcaatgcggtgatcttgaagcggctatttatgagcaaaaccaacaagcctcctttatctctttctaggttgattcaattcatgaagggcaaggaggataagattgctgtggtagtcggggctgtcaccgatgacattcgtgtgtatgaagttcctgcgctgaaggttactgcgttaaggttcactgaaacggccagggcaaggattgagaaagctggtggggaatgtttaacatttgaccaacttgctcttcgagcacctctttggacagaacacggtctcctccgaggtc

SEQ ID NO: 3085 - DNA, 741 bp, Gossypium hirsutum
  Clone ID: GOSHI-09MAY01-C15152_2
cttaaggccatttgttctttcagcagcgccgcccacccccttcccccgaagcagcagtgatcaccggcaatgggtatcgatttggtcgccggcggcaagagcaagaagacaaagcgaactgctccgaagtccgatgacatctacctcaagctcctcgtcaagctttacaggtttctagtaaggaggactgggagcaaattcaatgccgtgattttgaagcggcttttcatgagcaaagtcaacaaaccgccgttgtctctctccagattgattcaatacatgaagggcaaggaggataaaatcgctgtggtagttgggaccgtcaccgatgacattcgagtgtatgaagttccggcactgaaggttactgcattaaggttcactgagaccgcgagggcaaggatcgaaaggccgatggggaatgtttaacctttgaccagcttgctcttccagcacctcttgggcagaacacggttctcctccgaggttccaaaaaatgctcgtgaagctggtgaagcacttcggaccagctcctggttgtgccacacagcccacaccaagccctacgtgccgtccaatggaaaggaattccagagagctacaaggagagagagcgccccggcaggcttcagggtttgagtttcacactatcaacctatcatcaccgaatgggtattttccctcttttttttattgtgattgagcatgtttttcttttggatatcccccccctcccccccg

SEQ ID NO: 3086 - DNA, 952 bp, Gossypium hirsutum
  Clone ID: GOSHI-09MAY01-C15152_1
cggtccgctaaaaccctaggtctctcacactaagttgctattaaggccattttccctcgccgcccacccccttccccctcggatcagctatcaccggccatgggtatcgacttggtcgccggcggcaagagcaagaagacgaagagaactgctcccaagtccgatgatatctacctcaagctcctcgtcaagctttaccgatttctggtaagaaggactggcagcaaattcaatgctgtgattttgaagcggctttttatgagcaaagtcaacaagcctcctctgtctctatccagattgattgaattcatgaagggcaaggaggataagattgcagtggtagttggaactgtcaccgatgacattcgtgtatatgaagttcccgctctgaaggttactgcactaaggttcactgagacagcgagggcgagaattgacaaggctggtggggaatgtttaacatttgaccaacttgctcttcgagcacctcttggacagaacacggttctccttcgaggtccaaagaatgctcgtgaggctgtgaagcacttcggacctgctcctggtgtgccacacagccacaccaagccctatgtgcggtcaaaagcaaggaaatttgagagggctagaggaagaaggaacagcaaaggcttcagggtttgagattccaactgcactggaaaaaaaaaaaacttatcaacccatcatgataatgggaatgctcagttttgttttttttgctttccacctttcctgttctttttcttttccatgattgtaatttggaatcttttataatttgtttaacggaaaggattttagagtgactgaagaacggtgttggatgtctgtttttcttatgtatagatcagaacagcattgagttccataagctgataaacacaaaaaaatttaatactggatactgggttatgggcggccgttctagatt

SEQ ID NO: 3087 - DNA, 698 bp, Gossypium hirsutum
  Clone ID: GOSHI-09MAY01-C15092_1
gtggaatgtatggcggtggccttggtggtggctttgggggtcctatgggtggttatgggatgggcatgggtccatatggcgagcaagatccaaataatcctttcggagctcccccatcccctccaggcttttggatgtccttcctccgtgtgatgcaaggtgttgttaactgctttggcaggatatctattctgatagaccagaatacacaagcattccacatgtttatgactgctcttcttcagcttttcgatcgcacgggattattgtatggagagttagctagatttgtgttaagactgctgggaatcaaatcaaaaccccgaaagatcaatcaaccaggaccaggtggactcccaggaccccataaccctcatgggaatcaaaactacattgaagggccaaaggctgctcccagtggtgtatgggacaatgtatggggagaaaatggcagcgcctagtttgattatcgacggtggcctagccaaagcacacgctccaatttgagtaccctgcttgaataagaccaggaggacctcatttgaagaatgtgaccgaagtttttctacaattgtctgaatataccacccactctcaatagtgttaaaaaagaaagattgaaacttaataatagcccttaaatgtgtgcttataggtatcttgacactaaggcaataataattattatatttttgatg

SEQ ID NO: 3088 - DNA, 632 bp, Gossypium hirsutum
  Clone ID: GOSHI-09MAY01-C15082_1
cgctttgcttcactaaagtatacaaaccttgttcttctattttagcttctcttcacattgagaagctagctttttggtgcgtttgcttagcttcaacccacattgtctttgttgcgaagatggttgcacacaaatttaccgttgatttgaataaaccccttgtcttccaggttggtcaccttggagaaagttatcaggagtgggttcatcagcctattgtgagcaaggaaggtcctaggttctttgatagtgatttttgggagttcttgactcgcactgcctggtgggcaattccaaccatatggctgcctgttgtttgctggtgcatttcaatgtccgtacgtatggggcatacactttcccaaaccgctttaatggttgcttttggcatttttctgtggacatttgtggaatatgttttacaccgattccttttccacattgaaactaagagttattggggaaacaccatacactatcttcttcatggctgccaccacaagcaccctatggacggcctgaggcttgtttttccacctgctgcagctgctatattatgcataccgttctggaatctgattaagttttgtgccactccgtccactactcctgctttgtttggaagaggttat

SEQ ID NO: 3089 - DNA, 492 bp, Gossypium hirsutum
  Clone ID: GOSHI-09MAY01-C15352_1
cccacgcgtccgagcaatgggacctactgttggccaaatgtatcctcctggcgctccacattttggacagcaactcttctatggtcaaggccctcctgctatgatttcaccccaacctggatttggatatcagcagcaactagttcctgggatgatgccaaactttttcatgccaatgcttcagcctgggcagcaaaatcagcgccaaggaggcagacgatccggagggggcccaatgcaacaaacacatcaaccacttcccttcatgcagccacagatgattcctaagggccatggctatcgttatcccccaggtcgcaacatgcccgatgttcctggacgtgtgcttcctgttccttacaatgtaggaggaatgccattccgagatgctgcattttcacaacccatggcaactggagctctcgcttctgcttttgcaaacgcaacaactgtacagcagaggacttcgttgtgcagatattctgtacccac

SEQ ID NO: 3090 - DNA, 696 bp, Gossypium hirsutum
  Clone ID: GOSHI-09MAY01-C15362_1
cggacgcgtgggcaaatttccaaacactagttttcttttactgcattttgctaagacaagccgagaaacaaagtgaaatattgctgagagtttgtggagatgagtgccttgagtgagggtcttacccaaattgtgatccctttagcttccttggtgggcattggttttgctttgcttcaatggtttttggtctctagggtgaagctattatcacaggattcaagcaatggatataaacaaaaactgattgaatctgatgaagaagaagagggtattaacaatcttgagatttccatcaagtgtactgagattcaacatgccatttctgttggtgcaacctctttcctctttactgaatacaagtatcttggtatcttcatgtgtgtatttggtgctatcatattcctcttccttgggtcagttgagggcttcagcaccaaaagcgaaccatgcacatacagccagggaaacacttgcaaaccagccctggcaaatgccatctttagcacaattgctttcttgctaggggctcttacttcagtcctctcaggttatctagggatgaagattgcaacttatgccaatgccagaacaacattagaagcaaggaaaggtgttggcaaggcatttataacagctttccgctctggagctgtcatgggtttcctgcttgcagccaatggccttttggtgctc

SEQ ID NO: 3091 - DNA, 353 bp, Gossypium hirsutum
  Clone ID: LIB3189-039-P1-K1-E12
ctgcattttgctaagacaagccgagaaacaaagtgaaatattgctgagagtttgtggaggggagtgccttgagtgagggtcttacccaaattgtgatccctttaacttccttggtggtcattggagtcgcctggctttagtgatggttgtttctatcctgcgagctgttacatctggcatccaaaatcctgattgggttaagcatccactgatgttggctgacgctgttgacaaattgacagtcctagattttcagctcaagaaagatgcgtaaatagtaacagttgagaaggctacttctttgtcaactgcatctattgttgattcatcatttatcaacaaacttatcttca

SEQ ID NO: 3092 - DNA, 929 bp, Gossypium hirsutum
  Clone ID: GOSHI-09MAY01-C15282_1
cagaaaatgaaaaacatcaaagtcccagaatttagtttctatttttgtagtgttttgttgattttgttggtgaataatggatgttgtgactggggctcctccattcatgttggtcacgagataagccttgcggtgccattggaatatagtgatgggttcattgggagagctttcttgatggatgatggtaatggtcaggtggaaccaaattttagagttgcattgagtgctgaagctaacaaagggggatattcatgctccttggaagtttttttaggggatgcgtgcttgagcttactgaagatggggatttactgttgaagggtgccgaagatcaagtcggatggcggaccggcacttctggccaaggggtggagagattaagaatcctgaagacaggtaatctcgtacttgtggatgttttcgaccaaataaaatggcagagtttcaatttcccaactgatgtaatgctttggggacaaagactagacctagccactcagttaacttcatatccaagaaactcaacttcattctacacatttgaaatccaacacacccacccggccctgcacctcggcgctgattccatcgtggtggagatcggttcagcccctgagcgtgaggtttttagcactgggaaatgagacagggaatttaggactatactcttactcacctaaaaaacaaagttttgaagcttcatttcaagttctcaactccaaatgtgactttcctttagcttgtaaaccttatgggatatgtacattctccaatgcttgctcttgcattcggctcgcaactaaggaaaaacacatggtttctaattgcagcgagggaacatcaagttcagcacagttttgcaatggtactcaagtggagatgctgaattaaatggtgtcaatactgtactaaaaaatgctttcaca

SEQ ID NO: 3093 - DNA, 411 bp, Gossypium hirsutum
  Clone ID: LIB3197-003-P1-M1-E4
gtcccagaatttagtttctatttttgtagtgttttgttgattttgttggtgaatgatggatgttgtgactggggctcctccattcatgttggtcacgagataagccttgcggtgccattggaatatagtgatgggttcactgggagagctttcttgatggatgatggtaatggtcaggtggaaccaaaatttagagttgcattgagtgctgaagctaacaaagggggatattcatgctccttggaagtttttttaggggatgtcaaagtatggaattctggacatcactcccagttttacaccatggatacatgcgtacttgagcttactgaagatggggatttactgttgaagggtgccgaagttcaagtcggatggcggaccggcacttctggccaaggtgtggagaga

SEQ ID NO: 3094 - DNA, 941 bp, Gossypium hirsutum
  Clone ID: GOSHI-09MAY01-C15262_1
gttctgttaatataagggaagtacctttgctcaactctttctctatccctgttcttgcgggtcaagctgaagaatctcttagtagggacgtagtactttttgggttcaatagaagataaagtccattccgggcgcgtgccatcaaaatcatccttgatcctgcaatcaacagggatgctacgttttggtggtgtggtgggatcactggactcatcgaaacctacgagaaggctatcgctggagggtccaattatggtgggcaagtagatctccgcagctcgaaacaattggttatcgccagcgtgccatcggttttcgattatgaaggtaaagtcggatgagaagtaagcagaagtaaagtcgtaaatcatagagaagatgtagtttgtcatcctttcagggagcatttcatttaagatggttcggattaacatagccatggctgaaatagaagcataagcggagagaatagtagacaaagaaggtaactctttcaacattgtacccaattttgtattcttcctttgttttgcttcttctgtgtggaaaacacagaaaaaaaacaaattcaatggagcagttgagtgaagggtgaggaacactcagtacatttgcattcccttatatacatatatatcataagatcagtgtgcgaaaccgtggaagtctcctggagataaacattaacagcgtgaactgcttgaaaggaacagggtaatggtcccaccccagtgcgcggtacaacattagcttctcagtataaccctgctttgattggcaaaaaattcacacccaatcccaaaaaaggggacggctagcactttatggtagtttagtagtggtagtgtgtagattgtccctcaataatatcaatatgtataagaggctaattttaggtacacaatttaaaaatatgataggatataaaaatataacataat

SEQ ID NO: 3095 - DNA, 489 bp, Gossypium hirsutum
  Clone ID: LIB3583-012-P1-K1-E2
gggctccattgccaaggtctcaaatgttgacgggtgcttgaaagcggtcggctcccacatagaacattctggatcataagtgtcaagctgaagaatctcttagtagggacgtagtactttttgggttcaatagaagataaagtccattccaagcgcatgccatcaaaatcatccttgatcctgcaatcaacagggatgctacgttttggtggtgtggtgggatcactggactcatcgaaacctacgagaaggctatcgctggagggtccaattatggtgggcaagtagatctccgcagctcgaaacaattggttatcgccagcgtgccatcggttttcgattatgaaggtaaagtcggatgagaagtaagcagaagtaaagtcgtaaatcatagagaagatgtagtttgtcatcctttcagggagcatttcatttaagatggttcggattaacatagccatggctgaaatagaagcataagcggagaga

SEQ ID NO: 3096 - DNA, 611 bp, Gossypium hirsutum
  Clone ID: GOSHI-09MAY01-C15212_2
agagagaagaacatggtgaagttgagaggagaattgtctctcagctgttgacattgatggatggtcttaaatcccgtgcacatgtcattgttattggggccacaaatcgtcccaatagcattgatcctgctctccgaaggtttggaaggtttgatagggagattgatattggcgtccctgatgaagttggccgtcttgaggtgctccgcatccacaccaagaacacgaagctggctgacgatgttgatttagaaagaattgccaaggacacacatggctatgttggtgctgatctcgcagctctctgtacggaggcagcgttacagtgcatcagggaaaagatggatgtgattgacttggaagatgagtcaatagatgcggagatactcaactctatggcagtctccaatgagcacttccagactgctcttggaacaagcaatccatcagccctgcgtgaaactgttgttgaagtacctaacgtcagttgggaagatattggaggcctcgagaatgttaaaagggagcttcaagagactgttcaatatcctgtggagcatcctgaaaaattgagaagttcgggatgtcaccctcaaagggagtactattct

SEQ ID NO: 3097 - DNA, 1521 bp, Gossypium hirsutum
  Clone ID: GOSHI-09MAY01-C15212_1
gaagaatgctccgtccattatatttatcgatgaaatcgattcgattgctcctaagcgagaaaaaacaaatggtgaagttgagaggaggattgtttctcagcttttgacactaatggatgggcttaaatcccgggctcatgttattgttatcggggccacaaaccgtcctaatagcatcgatccagctcttagaaggttcggaagatttgatcgggagattgatattggtgtccccgatgaagttggtcgccttgaggtgcttcgtatccacacaaagaacatgaagctggctgaagatgttgatttagaaaaaatttcgaaggaaacccacggttatgttggtgcagatcttgcagctctttgtaccgaggcagcattacaatgcatccgagaaaagatggatgtgatcggccgcgtgggcggtcccgtgggcgctgagatattaaactctatggcagtcacaaacgaacacttcgcgactgctcttggaacaagcaatccatcagctctgcgtgaaactgttgttgaagtgcccaatgtcagttgggaagatattggaggccttgagaatgttaagagagagcttcaagagacggttcaatatccagtggagcatcccgagaagtttgagaagtttgggatgtcaccgtcgaagggagtgctattctacggccctcctggatgtgggaaaacccttctggccaaagctatcgcaaacgaatgtcaggcaaatttcattagcgtcaagggtccggaattgctcacaatgtggttcggagaaagtgaggccaatgttcgtgaaattttcgataaggctcgccagtctgctccttgtgtccttttctttgatgaacttgactcaattgctactcagagaggaagcagtgtcggagatgcaggtggtgccgccgatagggttctgaaccaacttcttaccgagatggatggcatgtctgccaagaaaactgttttcatcatcggagccaccaaccgaccagacattatagatcccgcacttttgcggccaggtcgtctcgatcagttaatctatattcccctccccgacgaggactctcgtcatcaaatctttaaggcttgcttgaggaagtcaccacttgcaaaagaagtcgacctccgtgctcttgccaaatatactcaaggctttagcggtgctgatattaccgaaatttgccaacgtgcatgtaaatatgccatcagagaaaacattgagaaggacattgagagagaacggagaagaagggagaaccccgaagctatggaagaagatgttggatgaccaagtggcacagatccagccggcgcatttcgaggaatcgttgaaatttgctcggaggagtgtgagtgatgctgatattcgaaagtaccaagcattcgcgcaaacgttgaacaattcgaggggttctcgaagcgaattcaagttgcagaaacggttccaggctggacatctgatcctttgaactacagtggtggacctttaaaagatcttcaggtaattgcttt

SEQ ID NO: 3098 - DNA, 453 bp, Gossypium hirsutum
  Clone ID: GOSHI-09MAY01-C16952_1
gttgaatccccctggaaaagccaccattcatgttgaaaatgttgatgaattcaagtggcttaattcatcctattcccctgtcctccggcagcttgagactgctgcgatgaaggagtactacttcaaggcggatcagccaaccgtttctggatcttcgaacttgaagtatcgaaacccgaagtatctctcaatgcttaatcacttgcggttctatctgccacaggtctaccccaagttagataagatcctctttcttgatgatgacattgttgtccagaaagacttgactggattatggtctgtggagctccatggaaaagtgaatggtgctgtagaaacttgcggtcaaagctttcatcgttttgacaagtatcttaacttctcaaatcaccatattcacgaaacttgatcctaatgctgtggatgggcgtatggaatgaatatgtttgatct

SEQ ID NO: 3099 - DNA, 644 bp, Gossypium hirsutum
  Clone ID: GOSHI-09MAY01-C16972_1
aagaatttgcattggtcgttatcgctcaaaagtaattgaagctggaaccgccattggagctattggagcggagagtattggtgaacctggaacacagatgacattgaagacatttcactttgctggagttgcaagcatgaatattacacaaggagttcctcgtatcaaagaggggatgtaatgcagccaaaaaaattagcactcccataattactgcagaacttgagtttgatagtaatgtgaacgttgcacggatggtaaaaggtcgaattgagaaaactgttttaggacaggttgctaagagcatcaagattgtaatgacttcaagattagcatcagttgtaatctcccttgacatggaaagaatccaagacgcgcaattgcatatagatgcaaatgttgtgaaagaatcaattttgcaaacactcgaagctgaaactaaaggagcagcatgtgaaaggtttgggaggttaaaaagttgggagtagttcctccagctgatagaagttgaaattcattttgaacctctttctcttttaaatctgcttccaactggttgtggtaaagggcattaaaaaatgttgaaacgtgttgtattgctgagaagaaaaaagacaataaaagtcagaacaaagaagcgaaaa

SEQ ID NO: 3100 - DNA, 509 bp, Gossypium hirsutum
  Clone ID: uC-gsronu33B008h10b1
ctctggttaccgcggagatccatcatttggttatgctagccgatatggttcctatgctggtgggcttagtgggactggtataggtccgtatggacgtggaggtggaggctatggaagttacagtggttcaggccctagtggtaattatgattcaggcccgggtgctggttttggtggaccgggtggattatatggtagtagatcaggatacggaggcagtagtcgctatcatccttatgcaagatagaacgtgtttaagatctcccataaaagttgccccaggttttcaatctcatcacatggttcgataggcactgtgcacttttgcaagttgtcactatctagaagatcaaatctatttagatttgcatgcttagtgaaaacccaagttagatcaagcatcaaactagaactgcagctactcatggtagagcaagcaaactcgataatattagtagagcttctatctttcactttaagtttatttattggcggttttattgcagttt

SEQ ID NO: 3101 - DNA, 408 bp, Gossypium hirsutum
  unsure (1)..(408): unsure at all n locations
  Clone ID: LIB3197-033-Q1-M1-H6
ctactataggcgaaagctggtagcgcgtgcaggtaccggaatctgaagtttccgacccacgccgtaccggtctggaactcaaagaaatcgctcaaaacccaagcacctggcgcctgcatatttggtagtgaatctagggggacagtctcattacaatgatggttatgcgtggatnntggtgatttatggtggttttgggccctgggtccttatagggtcttttggagggtacacaatctattcatcatggatctataggcactgtgcacttttgcaagttgtcactatctagaagatcaaatctatntagatntgcatgcttagtgaaaacccaagttagatcaagcatcaaactagaactgcagctactcatggtagagcaaacaaactcgatcatattagtagagc

SEQ ID NO: 3102 - DNA, 502 bp, Gossypium hirsutum
  Clone ID: GOSHI-09MAY01-C16862_1
attccatatatacgtaatacttaatttttcattattttccatttttaacgaagttttattttattttatttatttaattttttttccttctctgccatgtcaatggcgggggagacggggatggagcaattaacgtcgggagcaagcaatcgtataatccccatcttaagaacgctaagaataccgctcattttccttcaatcaataatactgtatctcctcctcttcctcttccctcgccgacgccagacggcggtcggagctgccgatgaggcgccgcagttgcaggctaaaaccgcgaggcggaggtcggtatggaggcgggaagaggaggacacgttgagaaggagagctttagcggagggttgggacatggggttcgaaaccgccgacggagaggtccggtgtcgatggggcacgtccctgttttttggggtccgaagaaatgccttgttttgccgatcttggttgccggccgtcgatgaattgagggaattttgat

SEQ ID NO: 3103 - DNA, 591 bp, Gossypium hirsutum
  Clone ID: GOSHI-09MAY01-C16562_1
gagaaagacgaagacgaagaagaagaagaagaagagcaaagcaaaaagaaagaaacccttattcaacatctccatccatttctctcccattaaaaccctactctgttgattatagagatataagggagataatatataatgggtggtgggaagagatttgctgttcttctgtgtgctgaggattccgagtacgttaaaaagaggtacggcggctactacggcgtgttcgtggaaatgctggcggaggaaggcgagacttgggacgtgttcagggtggccaacggtgagttcccggacgacgaacaagttgaccgctttgatggcttcgttataacggggagttgcaatgacgcgcacggcaatgacgcttggatatgtcggctggtttcgcttttgaaaaagttggattctttgaataaaaaagtcctcgggatttgcttcggtcaccaggttctcagccgtgcactgggaggaaagacaggccgtgccatcacggttgggacattggtgtcacaaccattcatttctcatcatcttcatcaaagctcttttcgtctttgaaatcccaaccactctttccatcatcgagtg

SEQ ID NO: 3104 - DNA, 492 bp, Gossypium hirsutum
  Clone ID: GOSHI-09MAY01-C16452_1
cgccatttctccaaaatagtagacggtcgccgccctgcccctcagggcttccttgcagagtgttatttgtatcgagcctatgcttacaaggcctcaggtcgcatagctgagtcaatctcggattgcaacaaaacgcttgctcttgatccaactagcatccaggcccttgacaccagggcatcgcttttggaaaccatccgctgtttacccgactgtttgcacgactttgaacacttgaaactgctttacaattccatcttgcgagacaggaagctcccaggtccagcctggaagcgtcacaatgtgagatacagggagattccagggaaactctgtgcattaaccactaaaattcgacaattgaaacaaaggattgcttctggggagaccggaaacgttgattaccatgccttgattggtttaaggcgtggatgctcaatgtctgaattagagagggctcatttgctactctggttaagacacaaaccagat

SEQ ID NO: 3105 - DNA, 677 bp, Gossypium hirsutum
  Clone ID: GOSHI-09MAY01-C16402_1
gcgttcgtatttacctcttaaagacgtcgctgattctctcagggaacttgaacaataagttatctggtttgaccgttttacaaacaatacaagatgttttttgatgggtacggttatcatgggacatcgtttgagcagagttaccgatgttacccggcatctttcatcgagaagccgcaaatcgaaagtggtgataaaattataatgcctccatcggcccttgatcgcttagcatctctgcatattgattatccaatgttatttgagcttcggaatgatgctgccgagcgtgtctctcattgtggagtactggagtttattgcagaagaaggcatgatctatatgccatattggatgatggagaatttggtcctacaagagggagatatcgtgagggtgaaaaatgtaactcttccaaagggaacctatgttaaattacaaccccacacgaaggactttttggatatctcaaacccaaaagctatcttggagacaacactgaggaattattcctgtttaaccaccggggatagtattatggtggcatataataataaaaagtattacatagatatcattgagacgaagccatccaatgcaataagcatcatcgagacagattgtgaggtggattttgctcctcccctgtattacaaggagccaaaacggcctgctgt

SEQ ID NO: 3106 - DNA, 516 bp, Gossypium hirsutum
  Clone ID: uC-gsflnu33B013f12b1
ttccacgcgtccgcgcacctgaaattgaattttattttctctcagggaagtaagttatccggtttgactgtttataagcattacaaaatgtttttcgatagatatggttaccatgggacgtcatttgagcagagttatcgatgttaccctgcatctttcattgaaaagccacaaattgaaagcggtgataaaattatcatgcctccatctgcacttgatcgcttggcatctctgcatattgattatccaatgttatttgaacttcggaatgatgctgctgagcgtgcctctcattgtggagtgctagagtttatcgcagaagaaggcatgatctatatgccatattggatgatggagaatttgctcctacaggagggagatattgtgagggtgaaaaatgtaactcttccaagggtacctatgtgaaattgcagccccacacgaaggactttttggatatttcaaacccaaaagctatcttagagacgacactgaggaattattcctgttaactac

SEQ ID NO: 3107 - DNA, 479 bp, Gossypium hirsutum
  Clone ID: LIB3543-028-Q1-K6-H7
aataagttacttggtttgaccgttttacaaacaatacaagatgttttttgatgggtacggttatcatgggacatcgttgagcagagtccgtgttacccgctctttcatcaaacccaaatggggggggatattttttttgcctccgtcggcccttgatcgcttagcatctctgcatattgattatccaatgttatttgagcttcggaatgatgctgccgagcgtgtctctcattgtggagtactggagtttattgcagaagaaggcatgatctatatgccatattggatgatggagaatttggtcctacaagagggagatatcgtgagggtgaaaaatgtaactcttccaaagggaacctatgttaaattacaacctcacacgaaggactttttggatatctcaaacccaaaagctatcttggagacaacactgaggaattattcctgtttaaccaccggggattagtattatggggggc

SEQ ID NO: 3108 - DNA, 589 bp, Gossypium hirsutum
  Clone ID: GOSHI-09MAY01-C16732_1
gaaaaaagctctctcattaacactttttcttttcttcttgcaatgcctccaatctaggccgaaaagggagaaaagaaagctgtttcagatcagtatcccacccacattatcctattatattcctatccttgttctccttgtcttcgccatcacccaaaatgctcacccagttttttttcattgccattctttcttcactcctactgcaggtggccaaaccagatcttgtcaccgacagagcttctcttttgagccttcgttcctcagtcggaggcagaaccctcttatggaacgtctcgaaccagagtccatgctcgtgggctggggttacgtgcgagcggaaccgcgtcacagtgcttagactacctggtgttgctctctctggccaaattccgactggcattttcgggaacttgactcagctgcgcaccctcagtctacgtcttaactcgttaactggaccactcccttcggatcttgctctctgtcaaaacctccgaaacctttacttgcagggaaaccatttttcgggtgagataccggaattcctgtttggtcttcatgatttagtgaggctaagtctttctgg

SEQ ID NO: 3109 - DNA, 566 bp, Gossypium hirsutum
  Clone ID: GOSHI-09MAY01-C16652_3
ataaaaatcaatactaataaattttaactctaatacatactttttattgcttaattacttgatacttaatacagatagaaagtcccaccataacaaccccactctttcaaagttacaccctcttagcgtccgctcctcgggagattgaatctccaaagaaggtggcttgtcatccaatgccgtatctttatgcagttcatttctgccactttgatgccactgagaccaaagctttcagactccgtctagttggtgacattagtggagataaagtcgatgctcttgttgtttgccatatggatacttctggttggagcaccgatcatgctgcttttcgcatgcttggtattaagcaaggaaacgctgtttgccatgtcttttctcagggtaatcttgtttggattcagccaccggtcgtcactgtgagtgccatgtaaatgtttggctgttcgaaggagctctcatttgcttcaagtagtttcgttcatggtatgctagttccttctttctatctgtactaactatcaagtaattaagcaataaaattatgtatcttgggtctcagg

SEQ ID NO: 3110 - DNA, 1500 bp, Gossypium hirsutum
  Clone ID: GOSHI-09MAY01-C16652_1
caataggagtgctctcagaatttaaggaaatggtttttcaattcaattttctagttcttctattatgtcttatgtttttaatgtgtggcagaggcaatgcagtaagggatttggaagagaaatatgatcttgaaagccatggcagagacgacgaagtggagagtttagatgacaagtacgttaccgcttactttcatcaaacttttgattctgcaaatcactttgatggaggtgatgaagtgaagaatttagaagacaaatattcagcggcttacttccacaaatcgttagattctggaaaccatggcagagacgacaaagcaaagatattggaagacaattatgctactgcgtacttccacaagacttctgtttttgaaaaccatggtgaaggtgacaaattaaagagtttggaagacaaatattccacggcttactttcacaaaacaatatcttccaaaatgatgaaggatcacaacatggaacatcaccacctttaccataaccatgttgaaagtgcagagataggcttgttcaccattgatgaactacatacctttcacgtagggaagaaattacccatctttttccctgtaaaaaaccactctctttaccctcctctattgcctaaacaaattgctgacaccatccctttttcatcttcccaagcttctaatattctacgattcttctcagtttctccggactcccccaaaggcaaagctgttcaagatacactcgcaaaatgcgaactcggagcagcgcaaggggagaccaaaatctgtgctacctcttttgaatctttacacggttttctaagcaatgcatttggaccccatgttgatttcaagttcataagcacaaggcatcccaccataacaaccccactctttcaaagttacacaattttagaatcccctcaggagattgaatctccaaagaaagtagcttgtcatccaatgccatatctttatgcagtttatttctgtcactttgatgccactgagactaaagctttcaaactccgtttagttggtgatgttacaggagataaggtggatgctgttgttctttgccatatggatacttcaggttggagctctgatcatgtcgcttttcgcatgcttggtattaagcaaggaaacactgtttgccatgtattttctcaaggtaattttgtttggattaatcagccatcggatatcgctgccggtgccatataagtgttgaactgttcgatggagcactcatttgccactacgtatggagactctgatcccgatataagtatttaaaagctagtcttatgttcactaggtttcatggtgtttcgttaatggtgtgactttctatctgtattaagtatcaagtaattaagcaataaaaagtatgtattagagttaaaattatattattttagtcgtcattacattaatgccacgccatatttttttaaaaattattaaataatataacacttgtgtttttatttttcttaat

SEQ ID NO: 3111 - DNA, 458 bp, Gossypium hirsutum
  unsure (1)..(458): unsure at all n locations
  Clone ID: LIB3493-023-P1-M1-A9
gttgttctttgccatatggatacttcangttggagctctgagcatgtggcttttcgcatgcttggtattaagcaaggaaacactgtttgccatgtattttctcaaggtaattttgtttggattaatcaaccatctgatatacgtgccggtgccatataagtgttgaactgttctatggagcactcaattgccactacgtatgtagactctgatcctaatctaagtctntaagatctcccctaatgttcactaggttatatgggtgtncactgcatggtttatatatatactncctttaaatgtcatcaaatatattctttggagagggttctgtggggtataaatatttctttatttttgccataaaaatccaagacatcacttcatttctctgaaacaataaagcttaaatcatttttgtttgtattttatgccttggcattaattgactttttcta

SEQ ID NO: 3112 - DNA, 653 bp, Gossypium hirsutum
  Clone ID: GOSHI-09MAY01-C16612_1
ggaaaaaaaaggaacaaaacagaaaagcccttgcactcgcgagggagggaaacagtgagcatctgcttcttcttcggagtccctgcttgcttataaccaaattgccggttatggatcgaagggtgaagaaggaagctgaagagataccgcaaagaacgatgtcatttgctggtcggagacttaaatctgctggtgaagaagacttcatcctcgctctctcaactcacactcctacgctcaacccttcttcttcggaaaagaaggaaattagtaagaaggctaatgcgttaactgagagaaaacagaagcgaaagaagtgccaatccgagaccataattaaacctgcagtgtcagattgtggggagaagaaaagaggctctatgaaaaataaggacgtaggtgatggaagatgcatagctgagattaagtctccagctatgatttgtgcagaggaaattcaatctaacctagaacctgaattccccagctttgcaaaatctttggttagatcacatgttggaagctgtttttggatggggcttccggggatgttctggaaaacacatttacctaggaaagatactacattcactttggaagacgagagtgggaaccaatttcatgtaaaatactacgctgataaaacgggattg

SEQ ID NO: 3113 - DNA, 1303 bp, Gossypium hirsutum
  Clone ID: GOSHI-09MAY01-C16192_1
tttcaaattattccccccgtgttatggaatatccttgacagttgaaacaaataaagtcatggcaactgtgataattcaaagcattatgaagaacaaaactcgtatctctactgctgacagggttgaggcgttgtttgaactgataaaaggtcttattaaggacctggatgatgcttttcatgatgaggttgatgaagatgatttcaaggaggagcagaattctgtagcacgtcttattcagttgttgcatacggccgccccggcggccgcgtgggcggtcgcgtgcgcggtgaggaagcatatcttgggtggaggaccaaaacgcctacccttcactgtccctccccttgttttctcttcacttaagttggttcggcaactacaaggccaagaggaaaatccttttggagaggaggaatcaactacgcccaagaaaatattccaggttttgaatcagactgttgaaactctctctaacattccggcccctgagctggcactacagttgtttctgcagtgtgctgaggctgcgaatgactgtgatttagaacctgtggcatatgaatttttcacacaagcttacattttatacgaggaagagatttcagactcaagggcacaggttactgctatacatttaataattggaactctgcagaggatgcatgtctttggtgttgaaaatagggatactttaacacacaaggctacagggtattctgcgaaacttttgaagaagcctgatcagtgcagagctgtttatgcatgctcgcatctcttctgggttgatgatcaagacaatgtaaaagatggagagagggtcttgctttgccttaagcgggcactgagaattgcaaatgctgctcaacaaatgtcgaatgcagcacgaggtagcgctggatcagtcactctctttgttgagatactgaacatgtacctttatttctttgagaaggggaaccctcagatcactggtgctgcaatccagagtctgatttgattaataacaaccgagatgcataatgacttagcacaccagatccagcaacagacgctttcttaggcagcactctcagatatatggaagtttaaatacagaaggtggagcttaggtgaaaatttaacctattaagtgtgatctatagcccttgagtgtattcccttaataaaggtaactttgattgttgtcctcgagattaaccgatatatatagttcattgctttggtacgtctatttgttataatatgttcgtataaagtatttatcatttttatttaatttattgttaatacttttgttgtt

SEQ ID NO: 3114 - DNA, 618 bp, Gossypium hirsutum
  unsure (1)..(618): unsure at all n locations
  Clone ID: AI055393.1
ataatgccattggaaaggtgattgaagtacagcctgatatgcctatccttggtgtgataactctatattcgtctcttcttacatttactctccatgtccatcctgacaggcttgattatgccgatcaagttttgggagcatgtgttaaaaaactctctggcaaagaaaagctcgaagacaagaaagcaacaaaacagattgttgcactcttaagtgctccacttgacaaatacaatgacattgttacagccttgaagctttcaaattatccttcgtgttatggaataccttgacagtgaaacaaataaagtcatggcaactgtgataattcaagcattatgaagacaagactcgtatctctactgctgcagggttgaggcgttgtttgaactgtaaaaggtcttattaggacctggatgatgcttttatgatgagttgatgaagatgatttcaagagagcagattctgggcacgtctaatcantgtgcatantgatgacctgagagagtttaagaaattgcacgggagaagctatctggtngaggacanacgctacctnatgtcctccttgntcttttcttagtggtcggactacagcaaagaatccttgaagggatc

SEQ ID NO: 3115 - DNA, 404 bp, Gossypium hirsutum
  Clone ID: LIB3197-021-Q1-M1-F7
aaataaagtcatggcaactgtgataattcaaagcattatgaagaacaaaactcgtatctctactgcagacagggttgaggcgttgtttgaactgataaaaggtcttattaaggatctggatgatgcttttcatgatgaggttgatgaagatgatttcaaggaggagcagaattctgtagcacgtcttattcagttgttgcatagtgatgaccctgaagagatgtttaagataatatgcacggtgaggaagcatatcttgggtggaggaccaaaacgcctacccttcactgtccctccccttgttttctcttcacttaagttggttcggcaattacaaggccaagaggaaaatccttttggagaagaggaatcaactacacccaagaaaatattccaggttttga

SEQ ID NO: 3116 - DNA, 367 bp, Gossypium hirsutum
  Clone ID: LIB3584-028-P1-K1-A6
cccacgcgtccgcccacgcgtccgcccacgcgtccgggaggaatcaactacgcccaagagggtattggaggttttgaatcagactgttgaaactctctctaacattccggcccctgagctggcactacagttgtttctgcagtgtgctgaggctgcgaatgactgtgatttagaacctgtggcatatgaatttttcacacaagcttacattttatacgaggaagagatttcagactcaagggcacaggttactgctatacatttaataattggaactctgcagaggatgcatgttttttggtgttgaaaatagggatactttaacacacaaagctacaaggtatttctgccaaactttttgaaaaac

SEQ ID NO: 3117 - DNA, 528 bp, Gossypium hirsutum
  Clone ID: GOSHI-09MAY01-C16142_1
cagctttatcagcaaatttaaaaataataaaaataaagtatgaatttggattggaacgaacaaaataagattttcatttcatttcatttctgagatcgtattgtgttgaaacaaattgcgaacaagctttaaaaaatatctgttgaaacaggaaatcacgatcatcagctgattaaaactgtatcgaactttgaaagcagtatctagagattcggatatttgtttctctttcttttcttcgccgttatggaagctgatgtatctatttcctcctaaggccctcatcacaatcaaatctctttcgttccacagagagctagggttttctttttcaatcgaatttcttttgggtttttaatttttcagttttcggatgaagatgaatcgagttgtggttttattattgttatcatggtttctctgtttctcgagttcgtgaatttcatggaatgagccggcgtttagtaaaagcaatgcctagcttgatattcactgctgtcttggaagataattgtacttcaataacct

SEQ ID NO: 3118 - DNA, 424 bp, Gossypium hirsutum
  Clone ID: LIB3197-019-Q1-M1-E11
ctccagtgagtttctttgaaagaaaatcagtgaaaacagagagtgacttactttgatgttcgaactttgaagacaaaaaaaaaaaatgcttctccaaactacaatctcatctcggcctttatatcaacggcatgcgtgcttctcagcaacccaccagcttcctctttattactctttcctcgcatctgcctctctcaacttcacccgcaaaaacctcttcttccaggccattgttccgtgctatcgtgaaccagctttgaaaaacacaggggcaggcaatggagtgaatgacactaaatttctcaacctacagatgtttcaaaagggaatggcagcaaaatcttttacgtcatcacgctttgatgaatccttgaagaatcatcgagctatggctgatgacttaaatgtgaagaagccattgagt

SEQ ID NO: 3119 - DNA, 331 bp, Gossypium hirsutum
  Clone ID: LIB3197-024-Q1-M1-E10
gaaaagtgcatgtttaaatttttttatcaggctttattttagggaatggagattgataaataattctctactagccctaacaaagctttctgttaatttttcttttcccttttccaattgattgcggataaaggcagatgtttcaaaagggaatggcagcaaaatcttttacgtcatcacgctttgatgaatccttgaagaatcatctagctatggttgatgacttaaatgtgaagaagccattgagtgtggtgtctgctttcctctttggtcaagcattgcggttgatttctgcccaactagcaaacgcaagtgaaattactagcggaga

SEQ ID NO: 3120 - DNA, 348 bp, Gossypium hirsutum
  Clone ID: GOSHI-09MAY01-C16002_1
caaaaaaaaggaagaaagggctccttttttctctgctagggtttcgaaaccctagcttttgcgccgccatcgcctgcccaccgctcttccaccatggacagtggtcggagtttggcaaatcaaggcctttagcccttgtttcagccccacttgaaagctaagtatacttagcccacgattggaagaggaaagctttcccctcgtcccctttcgattttgtttttgaagacggagagaactccgacgacgtaacccgtgaggcgattcaggtaacgtcagagtaggtgagcaaaggcgatgggacgggcgtctgttcgggcgcaaaatgcgctgacaccatgtagggga

SEQ ID NO: 3121 - DNA, 603 bp, Gossypium hirsutum
  Clone ID: LIB3828-023-Q6-K6-A4
ttggccgcccttttttttttttttttgggtttctccttttatttattttgttgaaaataaatttaaaagagcagaaaaataaataaaaaagaaaaccaaaagaaaaaagagaacccaaaaatgagatttaaaatcaactttttatttttttgctttttacttctgaaaaaattgcctgtaatacaatttttttttgtataccgaaatcccctcttacattcggttcttccctcggcttatatagccgaatacatagaaaatattttctgctctcttctattgtttgttgtttttcgctctctttccttctgctttgtgtgcttctcctttgttttgcaggtaacgtcagagtaggtgagcagaggcgatgggacgggcgtctgttcgggcgcaaaatgcgctgacaccacgtgggggagggaggctgttgtatttactgatatcagttttgagaaaagccattgagtttaatgattatatctctttcatcaaggccatacaactatcatgcaaacgaggtttccacacgtgccaagcatgggcatcaattcaatatccaacgaaggggcaacaaacaggtaaaatataatagtatcaatttat

SEQ ID NO: 3122 - DNA, 880 bp, Gossypium hirsutum
  Clone ID: GOSHI-09MAY01-C16362_1
aacaatggcaatggcaacgatagaagaagagtaaggcaatacgtacggtcgaaattgcctcggcttagatggactcctgatctgcattactcattcgtgcgtgctgttgaaaggcttggtggtcaagagagagcaactccaaagttagttctgcaattgatgaatgtgaggggactcagcattgcccacgtaaaaagtcatttacagatgtatagaagtaagaagcttgacgaggctggacaagttttaagccaaagtaaaagagcaattcaaggaaggggtgaatttgggagcttgttgtgtcaggccatgactaccctcagtccccatcatcgtcatcaacaacaacatttcagaatggaaaatggtggaattgttttagccagtgaatctcttgatggtagcaacactactttcaaagctaacttcccaaggcaccaccaattcccaaattctttcataagcaaagcctttggacaagaaaatggcttctacattcaaaaccaaattcatggaactggacccattagagcaatggcaagcaggtttcttgaagagaagagatggcatccttttgaaaggattagtaacagatggaaggctaatggaaatatgtacaaggacatgcagtctcaatcacattgtttttggcaaagaccaagctcagatgaagacaagcatgaacccttgaccaaattcagtagctgtagaacagagtttgagtggaaccaagataaagtgctcaaggacggggaacggttgcctgatttgcagttaagactaagccaaagaaatggaaaatttgatgaagagaagaataaccattgtaaaggaacacatgaaattagcacacagctttcactttcttaatcatgttgct

SEQ ID NO: 3123 - DNA, 1233 bp, Gossypium hirsutum
  Clone ID: GOSHI-09MAY01-C16252_1
ccagttttgaattatattctctcaagcttaacatttcgtctttttgtgaacaatctttcttcttcttttgattttttcaccctaaaaaaaatttgaagccttctgttcaatgcaagctcgcttcgattctttaatggcgagttttctcttcattgggtcactgcttaatggcctttttttcttctctaaatctgttgtataagcattaatcggagtctggttttgtctctgaagaatatatggatttcgagaaaaagaagagatggaaactggtggtgccacgtattttgaaaatcaaatcagcatctcgttgttttttccaaaaggtgaaaccaactaatttcaatccgggctgtgcaccagtgtttctcaacgtctatgacttaacccctatgaatggctacttttattgggcaggcctcggtatctttcattccggtgtggaagttcacggtgtggagtacgcatttggagctcatgactacccaacaagtggtgttttcgaggtcgaaccacgacagtgcccgggtttccagttccgaaaatcgatattcattgggacaacatcgttggatcctatcaaagtacgggaattcatggagcgtaattcgacaaggtatcatggagatacatatcacttgatcatcaagaactgcaaccatttctgtaaggatatttgtcacaggttgacagggaaacacatcccgaaatgggtaaatcggcttgcaagaataggttcaatgtgcagttgcattcttcccgaagcccttaagacttcggtcgtgcggcacgatccgaattatcaacctttctatagtgagaaaaggaggctgagatgcgcatttagttgcctatcttcagtttccatgcggcaaaagtcctcattactcctacaatcacccttaagaggctgcttcccaccttgggattcgaagaaatcaaacaatgtatcatattgaaacggtaagacaaccaatcaggtttaaacattcatcggcaattagagatttttttttcggtgtttgtcgtcttagcttgtgggatgtatgttctcatgtaacactaatgtgttgttaaaatcttgtttcaaagtgtttcttttggtctctaagacaatgtaattgatttaattcgttgattcgagcggaagataaaaggggaaggacgatatgtatcagctcgaattggtggtcggaaacttgcagagccatagaatcaacaaaagtgttaagc

SEQ ID NO: 3124 - DNA, 334 bp, Gossypium hirsutum
  Clone ID: uC-gsflnu33B091b07b1
tcgaatcatcaacctctcgatagtgagaagaggaggctgtgacacgcattgagttgcctatcttcggtttccatgcggcaaaagtcctcgttactcctacaatcacccttaagaggctgctttccaccttgggattcgaagaaatcgaacaatgtgtcatgttgaaaaggtaagacaaccaatcgggttttaacattcatctgcaatttgagattttctttcggggtttgtcgccttaattgtgggactgttgttctcatgtattgtacactaatgtggtgttaactccttgccctcatagtgtgtctagtgctttctccggcattgttttgcc

SEQ ID NO: 3125 - DNA, 598 bp, Gossypium hirsutum
  Clone ID: GOSHI-09MAY01-C16272_1
gtaaaattagtcttcaaaagtgtttcacaaattcatgcaagctacagacgattccccttaaattgccgcatcttttgactaagcaataaaaccgccaccaccaatactgaaaatgttgccgttcgacacaatcgaggaggctgctacattcatgggacggaacctaacggcggccgagaccatgtggttcaagtactcggctaaaaaatcggattactatctttactgccacaacatcttgtttttgttcctcatattttctgttgttcctttgccgctcgtttttgttgagatgatgagatctttgggtttcgataaatacaagattcaacccaaagttagcctgtcgttgcccgagatgttcaaatgttataaggatgttatgcggatgtttgttcttgttgtgggtcctttgcagttagtctcttatccttcaattaagattatcgggattcgaacagggctgccattaccatcgttgtgggagattgtggcacagttgactgtatatttcatgatagaagattataccaattactggattcacaggttcctccatggtaaatggggctacgagaaaattcatcgggttcaccac

SEQ ID NO: 3126 - DNA, 371 bp, Gossypium hirsutum
  Clone ID: LIB3197-022-Q1-M1-F9
cggacgcgtggggacgattccccttaaatggccgcatcttttgactaagcaaaaaattcgccaccaccaatcgctggcgctgtccacaacactgaaaatgttgccgttcgacacaatcgaggaggctgctacattattgggacggaacctaacggtggccgagacgatgtggttcaagtactcggctaaaaagtcggattactatttttactgccacaacatcttgtttttgttcctcatattttctgtggttcctttgccgctcgtttttgttgagatgatgagatctttgggtttcgataaatacaagattcaacccaaagttagcctgtcgttgcctgagatgttcaaatgttacaaggatgttatgc

SEQ ID NO: 3127 - DNA, 719 bp, Gossypium hirsutum
  Clone ID: GOSHI-09MAY01-C16202_1
ctttgtttgtgaaagaaattctaattccatttccttttctttctagattttttgtgggttgtgtccattaaccttctccagcaattaccccaaaacagctagacaaagcttttatagtctttgacgcgaaagctaaagctaaactacataaagggtaagagtgtggtagtcctactccggcccccacgatgtccaattcagagactgctgctactaacggatcgttaatggacccaccgagacatcaggcgccggcagccaatggttcactcgccgttaaaaagcctcccaccaaagaccgtcacagcaaagttgatggtcgtgggagaaggatcaggatgcccatcatttgcgctgctcgtgttttccagttgacccgcgaattgggtcataaatccgatggtcagactatcgagtggctgttgcgtcaggctgagccttctattatagccgccactggtacagggacgactcctgctagtttttccaccgtgtcggtttccctccgcggagctaattctacttctttgtcgtcgaccacttcttcgtcgtctttggatcataagcctcttttgggtcctaccccgtttatacttgggaaacgcgtccggtccgacgacgataacgccggaaaggacgattccggagggctcactgttggaccaggagtgggttccattgtgggaccgaacgggacacatccgggtgggttctgggct

SEQ ID NO: 3128 - DNA, 1130 bp, Gossypium hirsutum
  Clone ID: GOSHI-09MAY01-C17822_1
gggaaaaagaagcgaaaagaaaggccaaaaaaacaactggctgacaatcacagatctaagatcccaaatccaaatgcccctttctcatttcttcatatcaaagtgtaaataacaggcaagatttagaacgatagtaagcaagcaaccatgtcaaggaggcaagctaatcccatgcgccgctttgtcgacagcggaagcttttctctcgctggtgccctacattccaaaccccgatcttctcccattttgccaatcggtcttgtccttgtgggcgctatccttcttattggctatgtctatagtggctcaggcaaattccgaggcgaagcagttagtcggatcggaggcgactattcatgttcagtagaagttcagagggtaataccttttttaaagaaggcatatggtgacagcatgcacaaggttttgcatgtaggccctgatacctgttcagtggtatataaacttttgaaagaggaggaaactgaagcctggggtgtggaaccatatgacatagaggatgctgaggcaacctgcaagagtcttgtgcacaaaggaattgtacgtgtggcagatatcaagtttcctcttccatataggccaaagtcattttcgcttgtaattgtatcagatgcccttgattacttgtctccaagatacctgaacaagactctacctgagttgacaagggtggcctctgatggtttagttgtttttacaggttaccctggtaatcagagagctaaagtggcagaattatccaaatttgggcgaccggctaaaatgcggggttcatcgtggtgggttcgatttttcctccagaatagtttagaagaaaacgaaggtgccattaagaagtttgagcaggctgcatcaaagggatcataccatccagcttgtcaagtgttccacctaaagccatataactgattcaagagaaatttcatcaggatcaaattttcattaatttcttctatctgcccctcatggaagataaagtagaaatatattctcatctcaaatgaaatatagcatgttgggtaaaaagagatatcactattgttgtggccttaacattacaaactttatatttattaatttaattgatggaaaattcacagataaaaacc

SEQ ID NO: 3129 - DNA, 855 bp, Gossypium hirsutum
  Clone ID: GOSHI-09MAY01-C17592_1
cccacgcgtccggagagagtgtatgtgtgtaagaaaaagaacagaaaaagaggcagccatagccaaaagagctcttgtcggcttcgaccgaacattgacgcaaacaaacttatttacactattgaacagagagcactcaaagcacagggtttccattgagtgatttcttttggagggcgtttctatggcttttccggcatcagatattccatctgctgaacaacaagcagatgatcctttatatcgtgaactatggcatgcctgtgctggacctcttgtcacacttcctcgtgtaggggagcgtgtttattacttcccacaaggtcacatggaacaacttgaggcgtcaatgcatcaagggttagaacaccaaatgccttcattcgatctgccatctaaaatactttgcaaagtggcttctgttcagcgtaaggctgaacctgatacagatgaagtttatgcccaaataactctggtacctgaagtagatcaaagtgaggttatgagcccagatgatccacttcaagaacctgaaaggtgcatagtccattcattttgcaagactcttactgcttctgacactagcacccatggtggattctcagttttgcgccggcatgcagatgattgtctgcccccgctggacatgacacagcagccaccatggcaggaactgattgcaactgatctgcatggaaatgagtggcattttcggcatatttttcgaggacaacctaggcgccacttgctcactactgggtggagtgtctttgttagttccaaaaagctagtagctggagatgctttcatattcctgaggggtgctaatggggatctgcgtgttggagtgaggag

SEQ ID NO: 3130 - DNA, 567 bp, Gossypium hirsutum
  Clone ID: AI728515.1
gaagtttatgcccaaataaccctggtacctgaagtagatcaaagtgaggttatgagcccagatgatccacttcaagaacctgaaaggtgcatagtccattcattttgcaagactcttactgcttccgacacaagcacccatggtggattctcagttttgcgccggcatgcagatgattgtctgcccccgctggacatgacacagcagccaccatggcaggaactgattgcaactgatctgcatggaaatgaatggcattttcggcatatttttcgaggacaacctaggcgccacttgctcactactgggtggagtgtctttgttagttccaaaaagctagtagctggagatgctttcatattcctgaggcaatatctttcttgacaaatccattaactgttcttttttgttacatttgtttatttcactgcctaatcactatccattcatatttgctgctctccaggggtgctaatggggagctgcgtgttggagtgaggaggcttatgagacaacaggcaaatatgccttcttctgttatatctagtcatagcatgcatcttgggc

SEQ ID NO: 3131 - DNA, 1125 bp, Gossypium hirsutum
  Clone ID: GOSHI-09MAY01-C17582_1
cttacttgtccgcccacgcgtccggttttccccatgtgaaaaactgggaattgcagctgagcacggttttttcatgaggtggtctctaatgatgagtgggaactttgtgggcagatagtgagtttgggtggaaacaaatagcagagcctgttatgaaattgtacacggagtccactgatggctcctctattgaaaccaaggagagtgctttggtctggcaccatcgagatgcagacccgggttttggatctagccaagcgaaggagatgttagaccatctcgagagtgtattagcaaatgaacctgtggctgcgaagagtggccagtttatcgttgaagtgaaaccgcagggagtgagtaaaggtatggctgccgaaacgatcttcacaaccatgtctgagaagggaaagcaagccgatttcgttctctgcattggtgatgacagatctgatgaggaaatgttcgagatcatcagcaatgcaatttctagtggtattctatcctcaagtacatctgtttttgcctgcactgtcggccaaaaacctagcaaagccaggtattatttagacgacccggcagaggtcttaaacatgctcgaagctcttgcagaagcttcagaccccgaatccttcacagatactgaatcagaaggctccctttgaaacaccctccatcacttaatatcgaatttcatcgagcctgctgtcgtggttgtcctcgtgggagaaaagaatgccatatgcctgacctatggtgaagggtatagatttcggtttctgctcggtctcgaagttcactattgaaaaggacattcatgaagggttgaggagaacatttttttacatgaactttgaaaaggggagggattcatggggacaaacatgggatcgaatgctatatgttactaaggttcgtgcagtcattgacaagggtttaacatagattgtgtgtattgaaatgcagtacagtcagagaagtatatcaattaatatcacaaaatgatgacagtttcacttctgctggtggtggtaacatgaaaaggtttctcagctgggttgaaaaatcatccttgtgaaatgaacaatttccaatggtcatttattatttttttttggaggtgttttt

SEQ ID NO: 3132 - DNA, 588 bp, Gossypium hirsutum
  Clone ID: GOSHI-09MAY01-C17552_1
cctgtcgtcccacgcctcctcataaaggttagcagctgagttgggagatgatgtccctcctgtggcagtggataaaaatccttccctattgatacctccaacccctgttatgtgtggtggtgattggccccttctgagagtcatgaaaggcatatttgatggtggatttgatggtggcaggggtgctgtggatgaagaggaggagggtgcagaaggtgactggggtgaagatcttgatgtggttgatggcttgcggattggggacgttagtgccattttggaggatggggaagtggccgcagaaaatgaagaggggtggatgggaccttgaagatttagaactccccgctgaggtagaaacccctaaggtttccggcaatgctcgttcttctatttttgtggcaccaactcctggtatgcctgtaagtcagatttggattcagaggtcatctcttgctgctgaacatgtagcagctggcaattttgacgcagcaatgcgtttgctgagcaggcaactcggcataaggaactttgctcctttgaaatccatgtttcttgatctttacactggcagtcatagctatcttc

SEQ ID NO: 3133 - DNA, 629 bp, Gossypium hirsutum
  Clone ID: GOSHI-09MAY01-C17542_1
cgaaagctaagcaaggaaatggcgatcccttccagttctgcttatctcttcttactctcctttttcaccctttctctattccttgccatttccactgctgaatctgaatctgaattagaactggtggccgatctccgcgcccttcagtccgaatccaaatcaggagtcatccacttagatgaccgaaccatcgccaaattcctaacctcccccaaaacccctcgcccttactctatcctcatcttcttcgacgccacccaactccacgataaaaccgaactccacctccgcgagctccgccaagagttcgccctcgtcgcctcttcgttcatcaccaaccacaacaactccaacaccaagctcttcttcgccgacatcgagttccgggaatctcaatcttctttccacctcttcggcgtcaactccctcccccacatccgcctcgtcggccccaccgcaaaatcggtgaaagatgagtcgcaacagatggaccagggcgattgctctcgattggctgagtcaatggccgaattcgttgagtccagaactaaactcaccgtgggtcgcatccatcgtcctcctattctctcgaaaactcaaatgggtctgatcgttgcccttttgttgcc

SEQ ID NO: 3134 - DNA, 617 bp, Gossypium hirsutum
  Clone ID: GOSHI-09MAY01-C17482_1
cggacgcacaatggcgaccaatttgatccgtcgagcgatgaacatgacgccacgtttgccgtcatcgacagtggctccagcgtcgcggctggtgttggaccgtccttacgccaccgaaacggaagctcaaaaggtggaaccgaaagcctcctccggcagcggcggcgccagcatgaaaaccttccaaatctatcgatggaacccagataatcctacgaaaccccaacttcaagacttcaaaatcgacttaaaagaatgcggacccatggtgcttgatgccttgatcaagatcaagaacgagatggatccatcgctcaccttccgtcgttcctgccgtgaagggatttgtggctcttgtgcaatgaacatcaacggttgtaacgggttagcatgtcttaccaagatcgaatctggaccatcggaaacgacgatcacgccgttgccgcatatgtttgtgataaaagatttggtggttgatatgactaatttttataatcagtataagagcattgagccttggttgaagcggaagaatccgccaccggcggcggggaaagagattccgcagtctaaaaggacagagccaagttagatgggatgtatgagtgtatcttgtc

SEQ ID NO: 3135 - DNA, 290 bp, Gossypium hirsutum
  Clone ID: LIB3272-043-P1-K1-H7
gaagagccaaattataaaaaaggggtgctcctataacaatgttgatgctgggtgcatcttggtgatggactggtcttactccaccggaacggaatcttaaaaggtggaactcgaagcctcctccggcagaggcggcgccaacatgaaaaccttccaaatctatcgatggaacccagataatcctacgaaaccccaacttcaagactttaaaatcaacttaaaagaatgcggacccatggtgcttgatgccttgatcaagatcaagaacgagatggatccatcggtcacct

SEQ ID NO: 3136 - DNA, 583 bp, Gossypium hirsutum
  Clone ID: GOSHI-09MAY01-C17402_1
gacccacgcgtccgtgaatttcacaaacccccaaaatggctaacctcatgatcatggcggttctcctggttgcggtgtcgacggcggcaaccgttacggacgcgcaagcaacttgtgcggcaaagctagtgtcttgttctcgttacatcctaaacaccaccatcaaacctcaagatgactgttgtaacccgatcaaggaagaggtaaccaacgatctttcctgcctttgtaacctctacaaagaccctaaagtttttgcttctttgaacatctccaccgcgcaagctctcaatgtcactcgtgaatgcggcgtcactactgatctaaccgcttgcaacagcaacagcacttctacaagctctgctacatccccaccaggaggacgatctgcagatcaaaatggaggtgctgacaggatatcattgactggagttaccatcgtattctttttttccatctctatggcactgtgatgaagcgttatatatcaactagttttgtcattatatctttagagattacgaattcaaaattatatttttagagattaaaatttgaaataaatttaaatctgatttaagtc

SEQ ID NO: 3137 - DNA, 932 bp, Gossypium hirsutum
  Clone ID: GOSHI-09MAY01-C17432_3
gttccttttctgggtgctttcgacctacagggactcaaagcacgtacaaagaaactcggtgaaaaacttgacaaagccctcgagacgatcattgacgaccatgaacaacataagcaggatgatttcgtcggtacactgcttaaagagttaaatcaaccaatgaacaatgatggtgatataatggatcggaatagcatcaaagccataacaatagatatgatggtgggtgccttggtcacttcagctgccacattggagtgggcattatcagagctcctaaggcatccaagggtaatgttaaaactccaacaagagttagaaagtattgtcgggaacaagagaatggtagaggaaaatgatttaccaaaattggagtacctagacatggttgtgaaagaaatttttaggcttcatcctgttgcacctttgctagttcctcgtgagtcagtggaagacataattattgatggctgttacataccaaaacaatcaagggtcttagtgaacatttgggcaatggggagagaccctaatacttggtccaataatgctgaagagttttttccagaaaggttcattgatagcaatatagaccttcatggacatgattttgaactcatcccatttggtgcaggccgtagattatgcccagggaagaaattaggattaatcacagttaaacttattctagctcaattagtgcattgtttcaattgggagctacctagtggaatatcgccgaatgaactggacatgactgagaactttggtgtctcgttgccaaggaagattaatctatgtgtcaagcccacttatcgcatgtaaaaatgcaaattttatgattttttttgtgttttaaaataacaggatgtatacgtataataaagggcatttcttgtgggcatgtatttctttttgaaaaaatattaatt

SEQ ID NO: 3138 - DNA, 1231 bp, Gossypium hirsutum
  Clone ID: GOSHI-09MAY01-C17432_2
cgaggttcaattaatcatcaagaatggctctttcagctgccactcttctcactgcccttgcggtactctgctctttctttttcattctattttacatctcatcaagcaaaaatggaaaaggaaaaggaaaagggaaagccattccgggtccgcgacccttgccaattattggaaacctccacatgttaggcatgcttccacaccaatccctttatcacttggccaaaaaatatggtcctatgatgtccataaggctaggcgttgtgccaactgttgtcgtttcatcccctcaagccgccgagatatttctcaagacacatgatgctgttttcgcaagcaggccaagacttcaagtcctagaattaatttacaatggcaaaaggggcatagcattcacggaacttggatcatattggcgtagtgtgaggaagatttgtaatatgacaatttttactgcatcgaaaattgaatcgtttgcatcaacgaggaaggaggtgctagcacatttcattgaatctttgaaagaagctgcatcagcaaaggaagtggtaaacattagtaagaagattggggcgcttaatgaagagatgactttgagaatggttttggggaatgtgaagaagtatgagggatttaacctcaaggagcttattgatgagcttactcacatagcaggagctttcaatcttgcagatgttgttccttttctgggtgctttcgacctacagggactcaaagcacgtacaaagaaactcggtgaaaaacttgacaaagccctcgagacgatcattgacgaccatgaacaacataagcaggatgatttcgtcggtacactgcttaaagagttaaatcaaccaatgaacaatgatggtgatataatggatcggaatagcatcaaagccataacaatagatatgatggtgggtgccttggacacttcagctgccacattggagtgggcattatcagagctcctaaggcatccaagggtaatgttaaaactccaacaggagttagaaagtattgtcgggaacaagagatggtagaggaaaatgatttaccaaaattgagtacctaacctttgtggaagaaattcttggcttcttctgttgacctttgctatcctgtgagtattggaaaatattattgatgtgttactccaacaattagggctaatgaactttggcatggggagaccatactggccaatagctaagatttctcaggttct

SEQ ID NO: 3139 - DNA, 989 bp, Gossypium hirsutum
  Clone ID: GOSHI-09MAY01-C17432_1
cccatctatcgcccgcgtcccctgcgttggcttggatttcccccaaactagaactcgccaactgaaggaacagacgatcgtcctcttcccgcaatggcggatgctcaaactgaaaaacccctttccctttccgagcaatatgcacttcaggagaaagaggaaaaatcagatgtgactacaaaaccagcagaagcaaaagaggttgaaaatcctgtaaatgcagccactggttctggggatgttgtaactgagaaattggaggagacttctgccgatccagttgagggaagcactgaggcccctcctcctgctgctgaagaaagcactgaagcaaatcctgctactgggaacagtggtgaagatgctgcagaggaaaactcgggtgactctgaggaaactccagagataaagcttgagactgccccagcggatttccgctttccaactacgaaccaaacaaggcattgcttcacacgatatattgagtaccaccgttgtgtagctgcaaaaggagaaggtgctccagagtgtgataagtttgcaaggtattatcgtgccttgtgtcctggagaatggatagatcgatggaatgagcaaagggagaatggtacttttccaggtcctctctagatgagatggtacccctattgttatccgaaaaatccctgttttgacttttttttccctctgttatatcaaaccgtaacagttgaaccacagatgaatttccaggatgaaagcagaatttctcaggaaatatccaatttgaaaaggatgagttaataataaaatttggcgtgtaccctagcttagactagatcaatggaccatacaattgtgttgctcataaatggaaattcattgctcatcggttcccatgttggaacccgttttatttctttttttttgtctggtgcagccagcattcagtttcaggttatagcgtaactcttactataataaaaaagaatgtaaacttgtgattagtt

SEQ ID NO: 3140 - DNA, 409 bp, Gossypium hirsutum
  unsure (1)..(409): unsure at all n locations
  Clone ID: LIB3048-038-Q1-L1-A1
gttgaatcaattaacaagaatggctctttcagctgccagtcttctcactgcccttgcgggactctgctctttctttttcattctattttacatcggatcaagcagacatggagaccgagaaaatggatggatccgacgaatgagcacagggagaatggtacttatccaggtcctctctagatgagatggtacccctattgttatccgaaaaatccctgttttgacttttttttccctctgttatatcaaaccgtaacagttgaaccacagatgaatttccaggatgaaagcagaattataantttctcaagacacatgatgctgttttcgcaagcaggccaagacttcaagtcctaganataatttacaatggcaaaaggggcatagcattcacggaacttgnatcata

SEQ ID NO: 3141 - DNA, 313 bp, Gossypium hirsutum
  Clone ID: LIB3272-054-P1-K1-B6
cggaacttggattattttgggcgaaggggggggaggatttgtaatatgacaatttgtactgcatcgaaaattgaatcgtttgcatcaacgaggaaggaggtgctcgcacatttcattgaatttttgaaagaagcttgattagcaaagggaggggcaaacattttttagaagatttgggcgcttaatgaaaagacttatagaatgggtgtatttgatgttaaaaagaatgagggatttaaccaacaggtggggcttgttttttttacactcacagcactggctttgaatatagcactttttgaattttttctgt

SEQ ID NO: 3142 - DNA, 526 bp, Gossypium hirsutum
  Clone ID: GOSHI-09MAY01-C17792_1
gttttaaggagggattggtccagatattaaaatccgaattatctcaaaaggaggctgatgcaagtagatttcatgaagtttctaaaatgtcgaggcaggtagagttcttaaggaagcctagaagttcatctcatacgcctgtaataaaacattgtacagctagggaaggaactgttttgggagacgagaatggcggcggcaacaaatgcagcgtaaacatgaagaaaggaagctccgctccacatgttcatgattctctgaaggacaatggaaggggaagcagaagttcgaagaggaaaaaggatgatgaaattcgtatttctgaaactccaaatctattcacttctacgtttaaagttcccagattgagagactcctctcccaagtcaagatgatctttcttctaaatctactcatccatttgtatcttttaccaatgattgaaatagtgtctgtgatcgtgaatttgtaaattagaaataattaactaggtggttttgaaagattatcataaaaattggtatcc

SEQ ID NO: 3143 - DNA, 1162 bp, Gossypium hirsutum
  Clone ID: GOSHI-09MAY01-C17672_1
gaaaaatgcatggcaagttcacattttgatgaaaaagatggaatcgattccgctacatgttatttttcagacaccaatctaattaagctctttaactttcctctgttctttagtttactgtctctttcctttgttttgtctctaaacaaaatgtcgaacctatcttctataactgcaactgcagctcttcttctctcgctcatctctactgtcacttcccattactcttcctcctccttctcttcttccccaccggcgccacagtccaccgtctggcactccgcacgcgccacttactatgccgcatcggatcctcgcgacgccgtcggcggtgcttgtgggtatggagacctagtcaaggctgggtacggtatggcgactgtgggtttaagtgaagctttgtttcagcgtggacagatctgcggtgcttgtttcgagttaaggtgtgtggacgacctgcggtggtgcatacctgggacatcttacattgtcaccgccactaatttctgtgctccaaattatgggttcacggcggaaggcggtgggcgttgtaatcctcctaacaaacactttgtacttcccattgaagcttttgaaaagattgctatttggaaagctggtaacatgcctgtccagtatcgaaggataaagtgcacaaaagatggaggtgtacgattcaccattgatggctcagggatcttcgtgtcagttctcatcagcaatgttggaggcgctggtgacatagctgcagttaagattaaaggctcaagaaccgggtggttaccgatgggtcggaattggggacaaaattggcatataaattctgatctaaggaatcaaccactttcatttgaggtcactaatagtgatggtcttacacttacatcttacaatgttgctcctaaaaattggaactttggccaaacttttgaaggaaagcaattcgaggtctaagatgaaagaaaagcatcatcatcaacacaatgtaatgttgggtattatttattttatatatatagaccagactgtcctattcttttctttctttttgtttatctgttgttttgtactgattggggatggaaatggaagggtagaattggcgacttttttattgtgtgtaaggacttaaaatagcaggatatatcaattttgcccaaaa

SEQ ID NO: 3144 - DNA, 881 bp, Gossypium hirsutum
  Clone ID: GOSHI-09MAY01-C17662_1
ggtgagcccaagactgcagcagaaaaagcttgaattggacaggcgatctcgtccacctactccaccatctgatccaggcgaacccagaaagcattccaaccggcattcatctgagtttgggtcccctggggggtaacatagaccaaaatctccagaaatgcagcaatgtgatgaccaactgagtcagataagtactgaatcacgggcttctagtcaccaaggtgatgacatttctctgcaatcagacagcagtatcatcctgccgtccaagttagatgtggaagtcaccagtcatgaacaaactgttgggatcattgatagtcaaagcccatccatgacggcagtgcagtgttcaatttccgacttaatgccgaagaaatcaacatcaagaatggttgaggactcaatggaagaacctgctgtggttggtccggagcatccaagtccagtttctgtccttgatacctcggtttatagagatgatgaaccatctccagtaaagcagatattgaatgcctctggaggtaatggtgctgaaggtttgagcgaagatcacaaggaagagcaatggaaccctgcagacaagtgcttggctaacaatgtggggtctggtcttacatccgagattaatcgcaagaaactacagaacatcgagcatttggtccaaaaactgagaagacttaactccggacatgatgaagccagtacggattacattgcatccctttgtgggaatacaaatcccgatcacagatacgtttctgaggtattattagcctcaggccttctactgaaagatcttggttctggcttgacaaccacttcagctccatccatcaggccatcccatcaacccggagctgttttttggtttggagcaa

SEQ ID NO: 3145 - DNA, 772 bp, Gossypium hirsutum
  Clone ID: GOSHI-09MAY01-C17192_1
ctttttccaagacacaaatggactgttgttcaaggcaattccagcttcccttggagtcagtgcaactaaagagtaccatgtcaattctcttgctgttccacggaaagcaaaagaagctattggaggaattactaaactcactcatagtgatgggagatcgatggtgatcaacgtggaatacaatcagcttgatcctctgcttagagccaccggacatccagatggagatgttaattgtgagaccggttattctccttttccaggaaatataaaccaattgattttggagcttggtccatacattaaggagctcaccaaaacaggaggtgctattaaggaatttgttaaccccaagtataaagatgctagtaaaacatcatttaagtcctcaactcgactagagtgtatgatgcaagactatcctaaaacattgcctccatcagcaagagtcggatttacggtaatggatacgtggcttgcttatgcaccagtgaaaaacaaccctgaagatgctgctaaggtaccaaaagggaacccatatcacagtgcaacttctggagaaatggccatatatcgtgcgaacagtctcatccttcaaaaggcgggggtccaagtggaggatcctgtgcaacaggttttcaacggccaagaggtggaagtgtggccacgggttacttggaagcctaaatgggggatcacttttgctgagatcaaaagcaaagttagtggaagttgctctatttctcaaaggtctaccatggcccttaagggt

SEQ ID NO: 3146 - DNA, 615 bp, Gossypium hirsutum
  Clone ID: GOSHI-09MAY01-C17162_2
gggagccatacattactgacgatgtccaagtccagttttacatgatgagcccccatattttgaaaactttgtcgaatgacaaaaagggtctctattctgcgtcatttaaggttccagatgtttatggtgttttccagttcaaggttgagtaccaaaagcttgggtatacaagcttatccctttcaaagcagattccagtcaggccatatagacgcaatgaatatgaaagattcataccacctgccggtcccgtcggcggagctgcattttctacgatggcaggattcttcatcttttcttttgttcatctatataacaagtaaagtgtggcatgtctagtatgctttgcctcggcacggtgggattacaatttctagccaacaatggtagtcataaatgtatcgtagaaattttagactttgagttctagtatcaatgatgaaaatcaaaccctaacagatctccaaaaaaggattttgatgcaccatgattttgagtggatacagaaggtgcattcgcaggtacatctactttattttaaccctggatgtatttgactttactaccggctcatgggcgaaagaaatatgaaattatgcaaaaatatgttgagcc

SEQ ID NO: 3147 - DNA, 1596 bp, Gossypium hirsutum
  Clone ID: GOSHI-09MAY01-C17162_1
gttaccttggcgctcccggctcctcgccccgtgccgccccgaaaaaaatccctaatcaaaaaatggggaaattgtggctgatttgcattgcttcgatctcgatccttctcccatttctctgcaatgctttctctcccgaaacgcctacggatcgccgagtccttgttctcctcgacgacttcgccatcaagtcgtcacactccctctacttcaatgccctcaaatcacgtggcttcgacctggaattcaaactcgccgatgatccaaagatcgccttgcaacgctacggccagtatctttacgatgccttgatcctcttctgcccctccgtcgaacgatttggaggatctattgatgttgccgccattgtcaattttgttgattctggtcatgatttaattgttgcggcggatgttaatgcttctgatttgatccgggaagttgccaccgaatgtggagttgatttcgatgaggatccttcggctatggttatcgatcacactggctatgcagtttcggaaacagaaggagatcatactttgattgcatctgatgattttattaaatctgatgtgattataggaagcaagaaaattgaggctcctgtacttttccagggcattggccattcactgaatcctgtcaatagcttggtgttaaaggttctctcagcttctccatctgcctattcagctaatcccttatccaagctgtcaactccaccatcattgacgggttctgcaatctccttggtttcagttgtccaggcaaggaacaatgcacgaattctgattactggctcactaagtatgttcagcaatcggtttttcagatctggtgtccagaaagctgggagcccaaccaaatatgagaaatcaggtaatgagcaatttttgaccgaacttagcaaatggattttccatgaaagaggtcatcttaaggctgtgaatgtgaaacaccacaaagtcgtggaaacagatgaacctgctttgtacaggattaatgatgagttggaatactcagttgagatctatgagtggtctggaacaagctgggagccatatgttgctaatgatgtccaagtgcagttttacatgatgagcccctatgttttgaaaactttatcatctgacaaaaagggtctatattccgcatcatttaaggttcccgatgtttatggtgttttccaattcaaggtcgagcaccaaaagcttgggtatactagtttatccctttcaaagcagattcctgtcagaccatatagacacaatgaatatgaaagattcatacctgctgcttacccctattatggagctgcattttctatgatggctggattcttcatcttctcgttcgttcatctctacagcaagtaaaactgtagcatctctagcttgcaggccgtggaccgttggattcgaaatttttgagtggcacaaatgatgcaatagaaatgtttagggttttgaaatttatgcgttatgttatttaccggttagaggaaaaaaaaatgccgtagagttatccgttcagtttcccctactttctcttttacgctgttataatatttcagaaatactattattatttttcatt

SEQ ID NO: 3148 - DNA, 279 bp, Gossypium hirsutum
  Clone ID: LIB3147-015-Q1-K1-E3
atggaagttaaaattcgagaaatatttttctttttctcttttcttattcgcaaatttgtttcatttttcccccatccaagtattgtcatctaagattgcctttatggagggagctattgctttgggtctttcacaattcgtagtatatatttttcgaatttgttacgtaatttgctaacatatggaattggattgcattttcctgtcaggccatatagacaaaatgaatatgaaagattcatacctgctgcttacccttattatggagctgcattttct

SEQ ID NO: 3149 - DNA, 533 bp, Gossypium hirsutum
  Clone ID: GOSHI-09MAY01-C17112_1
gccaaacaatcccctcaccactatcactgttaagtctcttcttgctctcaagttcccaatagcccaggacattgaataagcattaagtatgaaggtgcgagcatcagtgaaaaagatgtgtgagttctgtagaaccgttaagcgccgcggacgggtatatgtactatgcacttccaaccctaagcataagcaacgacaaggcatttccactttttgcttctgaaggcacactgccccctgcgacggcagagacaaatgtcaagcatccaatcattcccagttaccgcatgcggccaggactagcatcccttattcctaaaatgcaagagccgtcttcatcgattattgggtggagggctaacctggcatctctcatattcaaacgcggcaattagggaaaccacaaaaagagatacattacagtcgcctacttaatattcaactgattctgcgggaactaggattctatgattttgtttttaattgcaattatattgagtagtgatgatacatttggagccatgtttggtgtc

SEQ ID NO: 3150 - DNA, 402 bp, Gossypium hirsutum
  unsure (1)..(402): unsure at all n locations
  Clone ID: LIB3147-045-Q1-K1-F4
ccaacgcgtccgcggacgcgtgggattaaatatgaaggtgcgagcatcagtgaaaaagatgtgggagttctgtagaaccgttaagcgccgcggacgggtatatgtactatgcacttccaaccctaagcataagcaacgacaaggcatttccacatttgcttttgaaggcacactgccccctgcgtatgcctctctcattgcagttacttaatcttttcgtttttttttttcagcctagatttcagtcctgttaactgccattgttctgcagatacttcaagcagtttaaattttaaacaaatatgatatttgttatctgaatttgaatgctggtatttttcagttggtgttatgnttactgggtagggtcattttgatgaaaatacacataatttttgtttc

SEQ ID NO: 3151 - DNA, 354 bp, Gossypium hirsutum
  Clone ID: GOSHI-09MAY01-C17102_4
gctaaccgctttcacgctcctttgcgccgcattcgctccaaagctccaattcaccgccgaccatgccttcacacaagacgttcatgatcaagaagaagttggccaagaagatgaggcagaataggcctatcccttactggatccgtatgcgcactgataacaccatcaggtacaatgcgaagcgtaggcattggcgccgcaccaagctagggttctaagcaccatgagcttatttgggttcaagcttttcttttttcccaagtttattggcagacattgtgatgtggggcttaatataggaacctaccacggatgaaggatccttaaattaaagattttgatgagatttttggc

SEQ ID NO: 3152 - DNA, 561 bp, Gossypium hirsutum
  Clone ID: GOSHI-09MAY01-C17102_3
gctgcttgagaactttagtgccgcatccatgtcaacaggtgaagtgccaaaaatgccttgcgcacaagaccttcatgatcaagaagaagctcccccgcgtccggaggcaaaacaggccctttccttactggatccgaatgcgcaccgacaacaccgttaggtacaatgctaagcgtaggcactggcgccgtaccaagctagggttctaagttcgatgggcttatttgtttccagtattttctttaagttttctaagtttattttcggacttattttatttgggatttaatattgggaaccatcgagaatctttgtattagggattttgatgagattgttagtggcttcgctctagtttgattttatattatctcatcttaatgtgagtgcatggtattgaactttcctttggtaattgctttaatttaccttatatgtcaaacaattctcacctgcatgatagctatgtgcttgagggtggctttatcaaatttattactttattctaaccctgaggaagaaaaaaattaagagcatataatgagaaaatataaaaatacc

SEQ ID NO: 3153 - DNA, 575 bp, Gossypium hirsutum
  Clone ID: GOSHI-09MAY01-C17102_1
cccacgcgtccggcgttttccccctcccgtccggagagatttgtatagcagcttctcctctcaaccgccacgccaaacatgccttcacataagactttcagaatcaagaagaagctggccaagaagatgaggcagaacaggcctatcccttattggatccgcatgcgcaccgataacaccattaggtacaatgcgaagcgtaggcactggcgccgtaccaagctagggttctaagctttatgtgccttttttgtagttttgtactcacgcaaagctctgtttttttgtttatttcatgaaattttgatgtggccttgaacgtttttatatgatggttattgacgatatttagccattgtttcgactgttgtctatctaatgttttgatttcgagctttgaatttttatgaaactgaatcattatgttctttggaattaatgaaaactgttattattcagtgtaacatgtgatagagcgatatatgatgcaaaaaaagatgacacacaaagagaaataatccatatctgagtgctcgccttgatcatgtatgaagaaatggttgtggtcgtctggc

SEQ ID NO: 3154 - DNA, 494 bp, Gossypium hirsutum
  Clone ID: uC-gsflmaxxa005d07b1
atcggtgcattcggatccagtaaggaatgggcaccgacaacaccattaggtacaatgctaagcgtaggcactggcgccgtaccaagctagggttctaagttcgatgggcttatttgtttccagtattttctttaagttttctaagtttattttcggacttattttatttgggatttaactttgggttctatcgagaatctttgttttattgatttttcttactttgtccctcactttttttctttttcttttttccttctttccttattttctttctcttttttcttctcattctcttttattataatctatttatactttcttatttttcattctttttttttttatttccttttattttttctttctttctctcttttttttccgtctacttttcttatttttttatttttctctttcttccttttattttttatattttaatttttttcttttcttccattttatctctttttattattatattatttttt

SEQ ID NO: 3155 - DNA, 531 bp, Gossypium hirsutum
  Clone ID: GOSHI-09MAY01-C17052_1
ccctctcgtccgcggacgcgtggggcgagactgggaccaaccttttcctccccgagggcggcttttccgcttgggccctccgcccatattgcgcctaaacccacgcttcatttcatcaaagcctccacttccgatctccccaaaacctctccatcaccaccgtcgacgaagcctcaactcccatcccacaggccccatcacaacatccgcgaagaagctcgtctccacaacgccgccaccgtcaccaccaaccaccctcgcttctccgctaaatatgtcccgttcacctccatcaccgatcctgcctcctccgatgaatcctactctctcgacgagatcgtttaccgatctcaatctggctccctccttgacgtccagcacgacatgtccgccctcaaacacttcgacggcgcttactggcgaaacctcttcgactcacgtgtcggaaagactacttggccgttcggttccggtgtctggtcgaaaaaagaatgggtattacctgaaatcgacgatgatgatatcatctct

SEQ ID NO: 3156 - DNA, 437 bp, Gossypium hirsutum
  unsure (1)..(437): unsure at all n locations
  Clone ID: LIB3197-035-Q1-M1-A5
cgcgagactccccaccaaccatttcctccccgatggcggctttttcgtttttgccctccgcccatattgcgcctaaacccacgcttcatttcatcaaagcctccacttccgatctccccaaaacccctccatcaccgatcctgcctcctccgatgaatcctactctctcgacgagatcgtttaccgatctcaatctggctccctccttgacgtccagcacgacatgtccgccctcaaacacttcgacggcgcttactggcgaaacctcttcgactcacgtgtcggaaagactacttggccgttcggttccggtgtctggtcgaaaaaagaatgggtattacctgaaatcgacgatgatgatatcatctctgcttttgagggtactctaacctcttctgggctgaaacgtatggcaaagacttcttangaatgaatga

SEQ ID NO: 3157 - DNA, 1067 bp, Gossypium hirsutum
  Clone ID: GOSHI-09MAY01-C17352_1
atttgatcctttgctgcttttggagagaaactaagggggagaaagagaaatgaagcattggggtctgattttgctcctctttttgttatttcaacaaggaaattttctcctgcgtgtcaaagctgatgacgggtttatcaaaactaaaggactgcagctaatgttgcgtggaagtcctttctatgcaaatgggttcaatgcttattggctcatgtacatggccgctgattcatctcagagaagcaaagtctcatctgcgtttcaacaagctaaagagcacggtctcaccatagccagaacttgggctttcagtgatggtggagacaggcctcttcagtactcgcctggctcctacaatgaacaaatgttccagggattggattttgtagtatctgaggccaagagatatgggattaagctggttttaagcttcgcgaataactatgatcaatttggagggaagaaacagtatgtgagctgggcaagaaatgaaggacaatccattggctctgatgatgatttctttaccaactctgttgttaaagaatactacaagaaccacatcaaggctgttcttacaagacgtaacaccctgactggagtggcttacaaagatgaaccaacaataatggcgtgggagcttatgaatgagcctaggtgcctctcggatccatcgggaaagaccatgcaggcctggattacagagatggcctctcatgtaaagtccattgatggaaatcacttactagaagctggtttagaagggttttatggaccatcatcatctcaaaaacagcaatataaccctaactttcaagtaggaactgatttcattgcaaataatcagatccctggcattgactttgcgacagttcattcatatcctgatcaatggttacaaagctcaagtgatgaaagccaaattgcctttttgaataattggctgtacaatcacatccaagatgctcagaacatccttcagaaaccattgctctttgccgagttcggaaaatctttgaaaattgcgggtcctaaccaaagatacgagctgtacaacactgtttacc

SEQ ID NO: 3158 - DNA, 659 bp, Gossypium hirsutum
  Clone ID: LIB3543-066-Q6-K6-D1
ccccgcgtccgattagctgattcttattttattttattaccttttcaattacattttcgttatttggttcataaaatgtttacatgggttctgttggcgtaatccttagtcatttgcaaggcatgtttactcggacaattcggcttcttgaagctgggcttaaacctgtgtaatgtgtttctttcccttttcttttcattttccttagaatttaattagtcagtcattttaacacagatattttctaccttatgctgcttatacagtaccacatcccaaaggccttttatttgctaatgcttgtggtattttctttcagctatgtttttgatgggtagcctccaaatttgaaaaaacaagagcttgctaaccgttactcaaagaaggcagatgctgttgaggatttgcaagaagccatggagatcatcggatacaagttgtcgattggattggctttggagatcactctatccgaaaacttgatcaataaccatctgttaactttattctggttataagtggcaagtaaataggattttggtatatatatgtcataagtattatggatatgttttgtgttaattgaagtaggagatgtgtttattgatatgaatcttattagtattttgattgattgtggtgtgtgatgacaatggtat

SEQ ID NO: 3159 - DNA, 472 bp, Gossypium hirsutum
  Clone ID: LIB3825-031-Q6-K6-G11
cttttttatcttacaaaacttcattagctgattcttattttattttattaccttttcaattacattttcgttatttggttcataaaatgtttacatgggttctgttggcgtaatccttagtcatttgcaaggcatgtttactcggacaattcggcttcttgaagctgggcttaaacctgtctatgtttttgatgggtagcctccaaatttgaaaaaacaagagcttgctaaccgttactcaaagaaggcagatgctgttgaggatttgcaagaagccatggagatcatcggatacaagttgtcgattggattggctttggagatcactctatccgaaaacttgatcaataaccatctgttaactttattctggttataagtggcaagtaaataggattttggtatatatatgtcataagtattatggatatgttttgtgttaattgaagtaggagatgtgtttattgatatg

SEQ ID NO: 3160 - DNA, 450 bp, Gossypium hirsutum
  Clone ID: LIB3197-041-Q1-M1-D12
ctcactttagcttctccacaaaaccccaagccaaatctttagcggttgtagtcactactcctctgctctccacgttctctctcaaccagcaatgggtattaagggtttaacgaagcttctagcagacaatgcgccaaaggccatgaaggaacagaaattagagagctatttcggccgcaagattgccatcgacgccagcatgagcatttaccaatttctcattgtcgtgggtcgtatggggactgaaatgctcaccaatgaagccggtgaagttaccagtcatttgcaaggcatgtttactcggacaattcggcttcttgaagctgggcttaaacctgtctatgtttttgatgggcagcctccagatttgaaaaaacaagagcttgctaagcgttactcaaagagggcagatgctactgaggatttgcaagaagccatggagactggaaa

SEQ ID NO: 3161 - DNA, 467 bp, Gossypium hirsutum
  Clone ID: GOSHI-09MAY01-C10882_1
ccggaaggacgggccgagccacgcgtccgaccaccgcctttctctttctccttataaaccaatctcaaaaaatctcaatcatggaaggaaaaacgagacagaccctctttaaatccaaatccacatccttgtctcttcacatatatattatcgcgagcaatcgaatacctataaaagacactcctttcaaaatttctccctcttttctcctctcaattttgcctcctgttttgctgatttacatcttaaatcttgtaatttatgtcttctggtcttttaaaacggcgttgtatttgatttgttacgagataaaccagatcttttttgttccgggttttcgaagtttgctgatttatccttgccctaattgtttttagtagaagggttggatcggtaagatttgtgaaaaaatagatctaggtttgtttgtgttttggatagttggagaaaacccatagttattttag

SEQ ID NO: 3162 - DNA, 409 bp, Gossypium hirsutum
  Clone ID: GOSHI-09MAY01-C10822_1
gcatatttcaatcgagaaatgtccaccatgtttttgagatctctgctattgcctctcatggccctggctacatggtcacacgggatgagccgagggcaacagcgaccttcctctttagacgctgcatccaacacactccaataccatggaggccctctcttgaccaagccgaatggcattaacgtttacctcatatggtatggagggttctctctgaaagacagaaactccataactgatttcttcgcttccttcgcgagccctggtcgtcgccaaggaccctcggtttcgacatggtggagaacgatcagtacatacaaggataaaactgggaaacctgtttccgacactgttagacttgtcaaacaagttggtgatgtatattcttcggggaaaaccctgaagcgcg

SEQ ID NO: 3163 - DNA, 378 bp, Gossypium hirsutum
  Clone ID: GOSHI-09MAY01-C10582_1
caactttcttcttcttcttattgttctgcctaaaaaaccctcgtttctttgtcgctggaaagtcaaataacagcgttaagttacaacgttaacaccgacgaaccagctttcatatattaacgatacttcactaaataaacattctcaaacatataccaaaacccccaacactgagacagagcgataagacaaaagcaaagtggtttcagtttgttcattagatcggaccataaagctcaatgggtgtagaagttacagacatctgcatggagaagcaatcagattgtgctataggttactcgaatggtgtttcaaatgatgaaacatttcatagtcatcacaatgccatgcagtcgtatacggatggggatcccaagc

SEQ ID NO: 3164 - DNA, 357 bp, Gossypium hirsutum
  unsure (1)..(357): unsure at all n locations
  Clone ID: LIB3083-111-Q1-L1-A4
ctgaaattttggatttcccttgattctaaattcaaatgattttgctctgacagaattccaaatcatgttctctattctttttcctatgttttggtattttgcatcaatgtagagattcttatggcaatgcggatgttgcgattgaaatgtgtagctcaatgggtgtagaagttacagacatctgcatggagaagcaatcagattgtgctatagtttactcgaatggtgtttcaaatgatgaaacatttcatagtcatcacaatgccatgcagtcgtatacggatggngatcccaagctccaaggtacagatgaaggcactgaagcaaaagaatatgaggtgaaggaatgcactactg

SEQ ID NO: 3165 - DNA, 674 bp, Gossypium hirsutum
  Clone ID: GOSHI-09MAY01-C10542_1
ttcacgcgtccggaagcaggatgcttcccaggggccaaataacttgggttgtctgcaatcacttttcttattagatacagaaggcaaagctgataacgaatctcttattccagaagtcatctcaaggtctaaacatttgagggtgttaggtttggctgagtgtaatttagagcaattgccaagcaacataagttatttaaagcagttgagatgtttgagcctagcctacaatggaaatattaaaagatttccaaattccatttgcaatttgcagagtttgcgaacacttgacttttctggatgcgggggaattgaagagttaccaaaagacataaggtacctgattagccggggggcattgacggtaacaacaaaacagacgcgtttgcaagagaatggaatatcgtgcctcacttctcttcggaggctgatcttttctgagtgcgaaaatttagaaaaattggttggaagacattcaaaacctaacagccctccgggaattgttcatagttgactgccacaacttggtttcattgccacgagatttaaaatacctaactgcattagaaattttgataatttgggattgcgaaaagcttgatgtcactgtggaggagttgaaacttgagaggaaagaagatggtagcctccggaaactggcgattggaggagtg

SEQ ID NO: 3166 - DNA, 642 bp, Gossypium hirsutum
  Clone ID: GOSHI-09MAY01-C10572_1
ccgtcatcccccataattacacactcacccctttttctttctccccctcccggctcagctttgccgttgccgttgccgttgccgttgccgttgctggtgcttttcttctttttccctttaataaccaaatgaggaagggagctaagagaaaagccgcttctcatgagcaagaggagaagcaagtaaaggcttcgtcttcttcgcaagagaatctcaacaacaacaaccgtaaacctgctcccaaagctaagcttgctaagacctccaagcctcagcccgagcctgagtatttcgaagataagcgtaacttggaagatttatggaaagctgcattccctgttggaacagagtgggatcaactggactctgtttaccaattcaactggaacttttcgaatttagaagatgcatttgaagagggggggaaactatatggaaagaaagtttatctctttggttgtacagagcctcaattggtcccttacaaaggagaaaacaaagtcatttgtatacctgtgattgtggctgttgagtctcctttcccaccttcagataagattggtattaactcagtgcagagagaagctgaagagattgttcccatgaaacaaatgaaaatggactgggttccatatattccac

SEQ ID NO: 3167 - DNA, 377 bp, Gossypium hirsutum
  Clone ID: LIB3166-027-P1-K1-F12
cgccatcgcccataattacacactcacccctttttctttctccctctctgggcgctgcttcgccgttgccgttgcttttcttctttttccccttaataaccaaatgaggaagggagctaagagaaaagccgcttctcatgagcaagaggagaagcaagtaaaggcttcgtcttcttcgcaagagaatctcaacaacaacaaccgtaaacctgctcccaaagctaagcgtgctaagaccttcaagcctcagcccgagcctgagtatttcgaagataagcgtaacttggaagatttatggaaagctgcattccctgttggaacagagtgggatcaactggactctgtttaccaattcaactggaacttttcgaatttag

SEQ ID NO: 3168 - DNA, 816 bp, Gossypium hirsutum
  Clone ID: GOSHI-09MAY01-C10442_2
gccagcctctctctccttttttggtgggggcggggcggcaagctacattgggctggcacatgcttttagcgagatagtaacaaaggagagcattggcaaatttcattggggtctcttagttttccatgttataaaaaaaaaaagtaaaaaaaactccattgccgacacccgtttacttgggggggggggggtttttttggtctactagtgagtgggaagagagggattttatggctcaaatttcaccgaagctgctgatcccggattcgtttcaagtgtcgagagatgacatcacgggccaactgggtttgatttgggagctaatcaaaacgccattgatagttcccttgctgcaactgggcgtctacatttgcttggccatgtccctcatgctcttcatggagcgggtctacatgggcatagtcattatcctggttaagcttttctggaaaaaaccagagaagcgttacaaatttgagctcattcaagatgatgtggaactcggtagctctaatttccccgtcgttttaatccaaatcccaatgttcaatgaaaaagaagtttacaagatctccattggagcagcttgtggactttcatggccgtcggatcgtctcgtgatccaagtacttgatgattcaactgaccctgcaatcaagttgatggttgagcaagagtgccaaagatgggcgagcaaaggcatcaacataacgtaccaaatcagggaaaatagaacgggttacaaggcccgagcttttgaagaaggttaaaacgaagctacgttaaacactgcgaatacgtggccattttcgatgc

SEQ ID NO: 3169 - DNA, 1754 bp, Gossypium hirsutum
  Clone ID: GOSHI-09MAY01-C10442_1
gctactgattccacaatcatttctagtgaatcgagatgatgtaacgagtcaactgggcttgatgtgggaattgattaaagcaccattgttagtccctatgttgaaactttcggtttatatttgtttaggcatggcgcttatgttgtttatggaaagggtttatatggggattgtcattcgcccccgtgggcttttttggaaaaaaccagaggaacggtataagtttgtgcctattgaagacgatgaagagcacggtagctcgaattttccggtcgttttggtgcaaataccaatgtttaatgaaaaagaggtttataagatctccattggagcagcttgtggactttcatggccgtccgatcgtcttgttatacaagtacttgatgattcaactgactctgcaatcaagtcgatggtggagcaagagtgccaaaggtgggcaagcaaaggcataaacataacgtaccaaataagagaaaaccgaacaggttacaaagctggtgctttaaaagaagggttaaagaggagctatgtgaaacattgtgaatatgtagccattatcgatgccgatttcagaccggatcccgatttccttagaaaaagtatcccgtttttggaccataaccctgacattgctctagttcaagctcgttggagattcgtgaatgccgacgaatgcttgctaacaagaatgcaagagatgtcattggattaccatttcacagtggaacaagaagttggatcagcaactcatgctttcttcggttttaatggaactgctggtatatggagaatagcagccattaatgaggcaggtgggtggaaggatcggaccaccgtggaggacatggacctggcggtccgagcgagtctccggggatggaaattcctttacctgggtgaccttcaggtgaaaagtgaacttcctagtactttcaaggcatttcgattccagcaacatcgatggtcttgtggccctgctaatctcttcaggaaaatggtgtgggaaatcattccaaacaagaaagtgaaattctggaagaaagtatacgtaatttacagcttcttcttcgtccggaagatcattgctcatatggtcaccttttgcttttactgcgttgttcttccgctcacgattttgatccccgaagtttgggttcctatttggggagccgtctatattccgtcagtcattaccattctaaactctgtaggaactccaagatcaatccacctattgttttactggatcctgttcgagaacgtgatgtcgttgcaccggacaaaggcgacgtttatcggtctcctagaggcagggagagccaatgaatgggtcgtgaccgagaaactcggtgatgctgtcaagaaagcagccgatgctgctaagaacaagaacaatgccaaagcaccaaggaagttgaaattcaaattcactgataggctgaatacgttggagctcggattcgcagcattccttttcctatgcggatgctacgatttcgtccacgggaagaataactacttcgtatacctcttcctgcaaaccattaccttctttatcacaggaattggatatgttggcaccatcatttaagtaagcaaagtgtatcaacttgtctgctgctgctatcgtttgactgcaaatatcagtcccatcacttatttttagttaaacagaaatagttccttcaatatattcagtacccaaaaaaaaaaaaaaaaaattctgccggcgccacccgccgtggagctct

SEQ ID NO: 3170 - DNA, 455 bp, Gossypium hirsutum
  Clone ID: LIB3197-010-P1-M1-D3
gtgtatatggagaattgcggccattaatgaggcaggtgggtggaaggatcggaccaccgtggatgacatggacctggcagtcctagccagtttaccaggatagacattactatacctgctaatcccaatagtgccttggactaaatgtagcattgttaagacatgtctactccagatgctttcttcttctttggtttgttgctaatgatttgtatgtacaatctttttgtgttggcccttagttttattgttgactgatttttcttttgattaaattttaatttgatattatttgttttcctattaaattttttttgatcaatatgttttatatatttaatataatttgtttttttttatattttttttttttgttaaaatttttttttatttattatatttttgtttagcgaattattttctttctaagattatttttttatattataattttt

SEQ ID NO: 3171 - DNA, 387 bp, Gossypium hirsutum
  Clone ID: LIB3145-058-Q1-K1-F9
gatttaatgtaactgctggtttatggagaattttagccattaatgaggcatggggatggaaggagggaaccacggtggaggacatggaccttgcggtccgagctagtcttaggggatagaaatttctttaccttggcgaccttcaggtaaaaagtgaacttgcaagtactttcaaggcctttcgttaccagcaacatagatggtcatgtggccctgcacatttgttcagaaaaatggtggtggagatcatcacaaacaagatagtgagattttggaagaaactatacgttatttacagctgtttcttcgtcaaaaaaatcattagctaacatgggccacttttatttattttcctgtggagggcacttcttttaacccatttctaat

SEQ ID NO: 3172 - DNA, 235 bp, Gossypium hirsutum
  Clone ID: LIB3196-047-P1-M1-D3
gttcttttgtatgtatgtaatgatgatcgtgctaatgcccgatgtgtaagtattctatgagggatggtcattatattgggtcaggcattaccattctaaactttttaaggactccgagatcaatccacctatggttttactggatcctgttcgagaacgtgatgtcgttgcaccggacaaaggcaacgtttatctggctcctagaggcagggagagccaatgaatgggtcgtgac

SEQ ID NO: 3173 - DNA, 497 bp, Gossypium hirsutum
  Clone ID: GOSHI-09MAY01-C10422_1
cttgttttctcgacagggcaagaaactgtgattctgcgtcggttcgagaagaggacaaagttaaattaataaaacaaacatgttttttcacatagtattagagaggaacatgcaattgcatccacgccacttcggtcgtaacctacgggaaaacctcgtatccaagctcgtgaaagatgtcgagggcacttgcagtggtagacatggttttgtggtggcaataacgggtatcgaaaacgttgggaaaggtttgattcgagatgggaccgggtttgtgacattccctgtgaagtatcaatgtgttgttttcagaccatttaaaggggaaatcttggaagctgctgttactatggtgaacaagatggggttctttgccgaagccgggcctgttcaaatttttgtttcgaaccatttgattccggatgatatggagtttcaatccggagatatgccaaattatactacgtctgatggatcggttaagattcaaaaggaca

SEQ ID NO: 3174 - DNA, 364 bp, Gossypium hirsutum
  Clone ID: GOSHI-09MAY01-C10792_5
cccacgcgttcgcggacgcgtgggcggacccgtggggttgttttcccctcatgggcaaggtggtttctggcactccatatcatccatgcagcacagcaaaaaaggcgacattgttgactgttacctatggtaaaaacccagggcactgtctaaacacatggttgctatgttcttttgcattgcgacaccgggggcatgagctatctgaagccactcttcttagtcttaaattctttagggtaaggataaacgttccatgaaagacgccaaattatgatggcaattttttatgggtggtgtaaattccataatttcctatagaaattttttgtttcagtctatattaaataagcactaagatcct

SEQ ID NO: 3175 - DNA, 1186 bp, Gossypium hirsutum
  Clone ID: GOSHI-09MAY01-C10792_4
atcaaaccctaaatctcccctcttattggcgattcatctcagccaatagtgctctcaagcctgaggaatgactttcagccttgaaatcttcttttggcttcgactttaacgaagcaaagaaaggaaatccatgtcattttgcaaggtaaaacttaccttttcctttttcttttatttttttacatgtaattatgaaagactcaacaaaacaaaaaaagaaaatggaatcgaaaattaaagagactggaaaatggagaatcaccttttggttttgatagcctttttttttatttcaatatgcatagtatgcgtaacctcgaaaatacattgttttttggctttatagccgaaatcccaaaacaaataaaataaaaaaaatacaacttttcttcgctttttcctatttgctgttgtcctgctgccgtttgcttgtttttggtttgcaggcaaggggtacggggccagctgtggtgcacggctcgttgacgtagaggcgtgggcgtggttatggcgcaaggaggccgtacggtgctgctatggagatatggagagggcagtcggcgttggaggctgctagggtttgctagcttggctacacctagttattttggctttggtatggacctgggcaaattgacccgtttacacccctcatgaacaagttggttcctggagctctatatcatccatgcagcacaacaaaaaagccgacactgttgactgttgcctatggtaaaaacctagttgctatcttcttctgcacttcgacactggggacatgagctatctgaagccattcttcttagtcttaaattctttaaggtagggataaagttccatgaaagacgccagatagtgatggcaatttttaaaggaaggcgtagactccataatttcctttagaaattttttgttcccacccgcccgaaataagcattaggatctgtagttgcctattgtaatagtttataggcacttctgactgtaaattcgccagaatgttctcctccccagacttgaaagtcgccatgttcttcttctgccaaaggaatttgcagaatcttttgtggaatattttctaaaaaggtattttcaattaaaaaaaaaaaaaaaaaaaaaaaaaaaaaaaaaaaaaaaaaaaaaaaaaaaaaaaaaaaaaaaaaaaaaaccccacaaaaaaaaacaa

SEQ ID NO: 3176 - DNA, 661 bp, Gossypium hirsutum
  Clone ID: GOSHI-09MAY01-C10792_2
ccgggttgacccagcgttctcaatttcctaggaaattcttttctggtgtcccccctctttagatttctctagatttccttcaacccgggtttctcaaccatctttcctctcttcctcgctgaaggcaagtgaaggctacatcctccaggtatgtttcttctcccgttcttaaggcttctgttgcaagttcatgagcttgacgattctctgatctgtgaataaactggaaatggctttcttgaaaaaattgtttctttctttggatatctcggatgaccgccccgatcgctgacttgtctgttgctgttgagttgcatttttttataactgtttttgaatctcctattatggtaattgattgaaaacccagtgagatccctaactttactgcttgtaatcctgcatatgcctccgccatgaacggggacgatattgcggagtggagtactgattttaaggcaagaaactcgtccatctccccccgcaccaccagacccgaagccgatcttgaatatttgctgtcgaaggctgcgtcaacatagatagttgctgtcgtacttcttgtgttctgtctctgacgtctgttatcacctaagttggttcctggagctccatatcatccatgcagcacaacaaaaaagctgacacagttgactgttgc

SEQ ID NO: 3177 - DNA, 831 bp, Gossypium hirsutum
  Clone ID: GOSHI-09MAY01-C10792_1
cggccgcgtgggttcctctttagattgctctagatttccttcaacccgggtttctcaaccatctttcctctcttcctcgctgaaggcaagtgaaggctacatcctccagtgagatccctaactttactgcttgtaagcctgcatatgcctccgccatgaacggggacgatattgcggagtggagtactgattttaaggcaagaaactcatccatctcccccctcaccatcatacccgaagccgatcttgaatatttgttgtcaaaggctgcgtcaacatagatagttgctgtcgtacttcttgtgttctgtctctgacgtatgttatcacctaagttggttcctggagctccatatcatccatgcagcacaacaaaaaagctgacacagttgactgttgcctatggtaaaaacccagggcactgtctaaacacatggttgctatcttcttctacacttcgacaccggggacatgagctatctaaagccactcttcttagtcttaaattctttagggtagggataaagttccatgaaagactccaaatagtgatggcaattttgaaggaaggcgtagactccataatttcctatagaaattttttgtttcgatctgtactaaataagcattaggatctgtagttgcctattgtaatagtttataggcacttctgactgtaaattggccagaatgttctcctcgccaaacttgaaagtcgccatgttcttcttctgccaaaggaatttgcagaatcttttgtggaatattttctaaaaaggtattttcaattctttcccctctccccttcgtaaaccatcttgcagtagtctt

SEQ ID NO: 3178 - DNA, 543 bp, Gossypium hirsutum
  unsure (1)..(543): unsure at all n locations
  Clone ID: LIB3829-025-Q6-K6-F7
gtttctcaccatttcttttctcctgaagaggaagctcatccagttttttctcgtcttaagctttgagttcagactgacatcttgtctggataaactggaaaggctttcttgaaaaaatgtttctttctttggatatctcggatgaccgccccgatcgctgacttgtctattgttgttgagttgcatttttttataactgtttttgaatctcctattatggtaattgattgaaaacccagtgagatccctaactttactgcttgtaatcctgcatatgcctccgccatgaacggggacgatattgcggagtggagtactgattttaaggcaagaaactcatccatctcccccctcaccatcatacccgaagccgatcttgaatatttgttgtcaaaggctgcgtcaacatagatagttgctgtcgtacttcttgtgttctgtctctgacgtatgttatcacctaagttggttcctggagctccatatcatccatgcagcacaacaaanaagctgacacagttgactgttgcctatggtaaaaac

SEQ ID NO: 3179 - DNA, 528 bp, Gossypium hirsutum
  Clone ID: GOSHI-09MAY01-C10782_2
aacatatctagcttcaactccactttacctgtgaaaaagcttcactcattcattcatgcatctctttttttttcctctaagaagaacaagagagttgcttgaattgaattgcctcaaaactctttgatgtctgtcccaaagctgtttcctttaacttctctttgtctcctgttctcgaagaagaggagcctgtgatatagattgaagaagcaagttagatttaaaaaggacaatgcggttgtttccatcgaattcgagtaagggtcagagtaatggtggaagcaatcgtgctttgttgtatctcaatgtatatgacctcacacctataaataactacctttactggtttgggattgggatattccactcgggtatagaagtacatggtttggagtacggatttggagcgcatgagtaccctacaagtggggcgtttgaagtggaaccaagaagttgtcccggcttcatcttcagaagatcaatattattgggcagcactaacttgtctcgttcagaatttcggtcact

SEQ ID NO: 3180 - DNA, 988 bp, Gossypium hirsutum
  Clone ID: GOSHI-09MAY01-C10782_1
caagcttcaacttcactttacctgcgaaaaagcttcactcattcattcatgcatctccttttttggccgctaagaagaacaagagagttgcttgacccgcgcggccgcccacccctccgccctcgcgcccggagctgtttcctttaacttctctttgtctccttttctctaagaagaggagcctgtgatatagattgaagaagcaagttagatttaaaaaggacaatgcggttgtttccatcgaattcgagtaagggtcagagtaatggtggaagcaatcgcgctttgttgcatctcaatgtatatgacctcacacctataaataactacctttactggtttgggattgggatataccactcgggtatagaagtacatggtttggagtacggatttggagcacatgagtaccccacaagtggggtgtttgaagtggaaccaagaagttgtcccggcttcatcttcagaagatcaatagtattgggcagcactaacttgtctcgttcagaatttcggtcacttatggagcagctttcccagaagtaccatggggacacgtaccatttaattgctaagaattgcaaccatttcaccaatgaagtgtgcatgcagctaactggaaagcctattcctgggtgggtaaataggctggctcgactaggttcattttgtaactgtctacttccggaaagcattcaggttactgcggttcgacatcttcctgaccatccagcatattccgatgatgagagatcagattctgctgcaacgtcgttaacagcagagagcgaggaagaggatgaggaagaggatggagtcacagatcatcatctgctgactataccaaatagcaatgttgcatttctcaaagaaaagacagtgtggcttaccagagaactatgatttccccctggactgtaattgtttcttttgtgggtctttattcgttcttgtagcatacattcccaaatgcatgagagtgtatcag

SEQ ID NO: 3181 - DNA, 718 bp, Gossypium hirsutum
  Clone ID: GOSHI-09MAY01-C10652_1
cccagccgtccgaatttccagtgtcctttttttaaaagaaaaaaaattatctgttcttgctttggagatgcctggaagtatagagcctttagatttgtgtaatgttcaagttccgtactatttcaggtgcccaatctcactcgaattaatgcgtgacccggtaactgttagcaccggccagacctatgaccgaaccagtatcgagtcatgggctgctaccggcaacaccacttgtccggtcactcgagcaccgctctcggatttcactctcatccctaaccacacacttcgccggcttatacaagattggtgcgttgcgaaccgggcttttggtattgaacgaattcccacgcctaaacaaccggctgaaccgggtatggttaggtcgttgttgaaccaggcttcaacggtttcgaatccgttttcggttcgtcattctgctttggttcgactcaaggggttggctcgggagtcggagaagaattggaacgtgatttgttctcatgaggctagggagatactgatgaggattttgttttccgatgtgagttccggttcgtcggagttgagccaggaggcgcttgcggttttggtgatgtttcaactcactgagtctgagtgcacggggatcggttcagattccaacagagtggtgtatttgtcggaactcttgttccattcctcgatcgaagtacgagttaactcagcttcactcatc

SEQ ID NO: 3182 - DNA, 1038 bp, Gossypium hirsutum
  Clone ID: GOSHI-09MAY01-C10642_1
accacgcgttaaaacctggttaggtctataatggacattgtgcgccgactaaaaacccaatattggcgccggctctctctattttctcactcctctgatatcacgcgccatacaaatgccgccacgcgtaacaccgatagtctctcgttcgccgcctttcaccgccacttaaaccgtcgtaaatctggaaaagaaacaatatgtccggcgtcctcccgctttcctccagagaagacgagccatttataggtgctagaaatagtgctggaaatggagactcgttagcaatcgagatggagcaagagacgagtacttcgacgagttctggcgggagttcgaggaaaaagaacagcagattgaaatgtttcggcgtcgatctgtcgccagataatgtggcagttgctatggtgtacttcgttcaaggcgttttaggccttgcaaggcttgctgttagcttttacttgaaagatgatttgcatcttgatcctgctgaagcagctttcctattttcccccttaacattcaagctatttttattgataatttgataattcagcatttattttaagttaggctttatttcgcgtacttggatgataaaattcgccattttcttatttacgtgacatagttgtggttgaatcagtattacattttaggtcagttatttactctaatcaattatagcaattgatctcttcattttaatcaagtatgaattttttttcgttctctttacttttgctttatataaaacttatagatgtttgctttatagcagcttttcaagatgtatgttgttttggtggttcttttttttttggctacttgcagtttgtatatcgcatttgcttgctaaaaattgttaaaaataaacccaaatgatagatgtaaaatcagaataattaaaatgaaaataacttaaaattcaacactgattctgatgcgattgtattatcaagtagttcatacctttttccccagggagtcacatatcttaaagcggcttttagacagcatttatgaagtgcattgatt

SEQ ID NO: 3183 - DNA, 372 bp, Gossypium hirsutum
  Clone ID: LIB3166-028-P1-K1-E10
ctcaatctcaatattgccgtcgcaaaaccccattttgccctctctcttttgctggtcctctctatcaccgccatcaaatccgccaccgtaaaccgatagctctcgttgccgcctttcaccgccacttaaaccgtcgtaaatctggaaaagaaacaatatgtccggcgtcctcccgctttcctccagagaagacgagccatttataggtgctagaaatagtgctggaaatggagactcgttagcaatcgagatggagcaagagacgagtacttcgacgagttctggcgggagttcgaggaaaaagaacagcagattgaaatgtttcggcgtcgatctgtcgccagataatgtggcagttgctatggtgtactt

SEQ ID NO: 3184 - DNA, 849 bp, Gossypium hirsutum
  Clone ID: GOSHI-09MAY01-C10672_1
cccacgcgtccgcccacgcgtccgttcacgcgtccgcaactttcaactctaagggatcggtagaaatcaagatcaaaataccacatggtttcttcatggttcacataaaaacaccctgatttttgtttgcccctaagccaatacaatccaagtataccccagtctagaccccactcttcttctcttatcccttcccttccccaaaaataatatcttcaagaaaagttacaaacctcagccgtcttctcgcttctccagtttctttcaagcagcttccttcatggagctcacttgtttgcataacaaattcaatttgtctgctttgcctcacctttcacttccatcctccaagaaccctaaccccagattcttttctagaaaaaggaacaatctttgtctggcctcaacttctgatacccttgtgactggctccggaaaagaagttagcagcaagaaagatgctgaattgggggacttgaaatcttggatgcacaaaaatggctttccaccctgtaaatttgttctcaaagagaggccttcttatgatgagaagcatagacctatacattacgtcgctgcctgtgaggatcttcgggcgggtgacgtggctttttcggtgccgaattcattggttgtaacgcttgaaagagtgctgggaaatgagactgttgcggaacttttgacaacaaacaagttgtcagaattggcatgcttagctttgtacttaatgtatgagaagaagcaaggaaagaaatcattctggtatccatatattaaagagcttgatcgccaacgtggaaagggccacctggctgtggaatctccacttctatggtcagatgatgaacc

SEQ ID NO: 3185 - DNA, 1006 bp, Gossypium hirsutum
  Clone ID: GOSHI-09MAY01-C10612_1
cccacgcgtccgcccacgcgtccgcccacgcgtccgcccacgcgtccgcccacgcgtccgcggacgcgtgggtttgggttgaagggcaaaggaaggagcatttacattggcccgcgctttcggttcactaacttgagggtgcggggggcacaatggatagcaaacattgtccttggatctgtatcatttattgcacgcattttacctctaccttctaacacccaaagtggatcaaactggaaacttcttgagcctgcacttaatcctttacaggaagctaggctgagaagtcttcagcaaagattgggaatcccctatgatggatctcgcctggagcatcaagaagctcttaagcaattatggaaattggcttaccctcacagggagcttccacctcttaaatcagagctttggaaggacatgggttggcaaggtccagatccttccacagattttcggggtgggggattcatatcattggagactctcatcttttttgccaagaaatatccgcaatctttccagaggttgttgcacaaacaagatgggaatagatctgaatgggaatatccatttgctgtagctggcatcaatatttcatttatgttggtacagatgttggatctgcaatcagggaaaccatcttctagggctggaagacgatttttggaactacttgcagaagatgaaatggcattcgacgatctttattgtgtgacctttcagatgatggatgcacaatggcttgtgaaacgggcttcatacatggaattcaacgaaattctgaagtctacaagaacacgggtagagcacgaactctcacttgaaagtgtcctccagagtgaaagatttacctgcctatagtctggtaaaaaggtaattatgatcttgaatccaatacagacatttgttttcatcatttacagaatcgctgtcatatatatttcctttaataaactgatggaaattatatattcgttatgaaattcaagtatagctgcggaat

SEQ ID NO: 3186 - DNA, 405 bp, Gossypium hirsutum
  Clone ID: LIB3148-058-Q1-K1-A12
gcttcttcctctttcgtttattttttggtaagtggggggagtcttatagcagtttggattagtgatagttctctttggcttttccagcaaacattgtccttggatctgtatcatttattgcacgcattttacctctaccttctaacacccaaagtggatcaaactggaaacttcttgagcctgcacttaatcctttacaggaagctaggctgagaagtcttcagcaaagattgggaatcccctatgatggatctcgcctggagcatcaagaagctcttaagcaattatggaaattggcttaccctcacagggagcttccatctcttaaatcagaactttggaaggaacatggatggcaaggtccagatccctcaacagattttcggggtggagggatcatatcat

SEQ ID NO: 3187 - DNA, 1007 bp, Gossypium hirsutum
  Clone ID: GOSHI-09MAY01-C10632_1
cccacgcgtccggtttttgacaatggcggacaaagtattcccttcctccaaacccaccgccaccgctgcccctggtggatcagcagctcctactactactaccaccaccaccaccaccacaaccaacggcggaactacaaaatcccacctcattaaccccaccgcccgcctaccctaccgtccacagccccataacagacgtcgcaactaccgtccacggcgcaactactgttgctgctgctgtttctggatcatcctcatagtcctcgtgctcgcccttttagtagccataactggcaccgtcctttacgtcctttaccgccctcaccgcccttctttcaccctcgcttccctccgtatccaccgcttgaagctcaaaaccgccgtcgactcctcctcttcccatctttcaacccttttcaacttaaccctttcttccaaaaaccccaactctcatttctccttctcgtacgacccattcgtcatttcatgtgtgaccagcaatggcgatgttctgatagggaacggaacgttgccggcattcgtcagcgacggcaaggacgagtcgactttcaggggggttacggtggcgtcgtcttcggatttggacgcggagacggtgaacaacttgagaccggaactgaagacagggaatggagtgtcgttgaaagttgagatggatactaaagtgacagcaaaaatgggtggattgatgagcaagaaagttgggattagagttacgtgcgatgggattaaaggggttgtcccgaaaggtaagttgccggcggcggccaatgtctccggcgccaaatgtaaggttgatctccgtatcaagatctggaaatggacgttttgagacgagggataaaggttttccattttgatgaattttttattatggttttggtgttgaaatttgagtgtgaaattggattttttttttcatttaaaaaatgtaacgtcatataccaattctatcaatcagatttccagcattatttgtttgg

SEQ ID NO: 3188 - DNA, 401 bp, Gossypium hirsutum
  Clone ID: uC-gsronu33B108b11b1
gccgaactaccaaatcccacctcatgggggcccactctaaaaactaccctggggggccacaaccccataacagacgtggcaactaccgtccacggcgcaactactgatgctgctgctgtttctggatcatcctcatagtcctcgtgctcgcccttttagtagccataactggcaccgtcctttacgtcttttaccgccctcaccgcccttcattcaccctcgcttccctccgtatccaccgcttgaagctcaaaaccgccggcgactcctcctcttcccatctttcaacccttttcaacttaaccctttcttccaaaaaccccaactctcatctctccttctcgtacgacccattcgtcatttcatgtgtgaccagcaatggcgacgttctgatagggaac

SEQ ID NO: 3189 - DNA, 385 bp, Gossypium hirsutum
  Clone ID: GOSHI-09MAY01-C10142_1
gacaaaactaaacccaaaaaatctcttgttgttgtcttcaatggtactcttggggcaaaggcttagtaaattataccacaagctggaaaatcactaccaccaccaccaccaccaagcagaggttgatgctttgtcagcttctctacaggcttttcggtctgatgtttcgaattgtgtgaatcagctgttgcatccaaaacctggttcagaaatcttgtctttttcatggattcagcgatgttttgagttacttcctgttatcaacaaggcgtttctgaagctggttggggatatagactaccccttgagcttctgggatgttgcttccctcgatgagtattcttaactacggcttgcatttactggagcttctcaactgtgttac

SEQ ID NO: 3190 - DNA, 980 bp, Gossypium hirsutum
  Clone ID: GOSHI-09MAY01-C10172_1
cagaatggatgaaatgatgcgtggacaaagaggatggagagaattagctattttgggtgataaaatagacaagtttaccggcatgatagaaggattgatatggtctcctaagggtggtgagggtattgaccaagttgatgattgggccattgaggagggccctcattctgacttttctggaccaacttctgggagcacagcctgtgttgcaattctaagaaacaaccaactcgttgttgcaaatgctggcgattctcgttgtgtgatatctagaaagggtcaggcatacaatctctctagagatcacaaacctgatctagaggcagagaaagaaaggattttaaaggctggtggttttatacatgcaggacgtgtcaatggcagtttgaatcttgcaagagctataggcgacatggaattcaagcagaataaacttttgcctgctgaaaagcaaactgtatctgcaaatccagatataaacaccgttgagctctgtgatgatgatgacgtcctggtgccggcatgtgacggaatctgggattgcatgtcaagtcagaagctccgggccgccatccccgagccacgcctccgggaaagcaagctttctgttgtctgtgagagagtactcgacaggtgcttagcaccatcgacagccaccggtgagggttgcgacaatatgaccatggtcctggtacagttcaagaaaccaatcaagtgtgcctcatcttcggaggagcaatcctcccaatccaaatcagccgacaatgaattggagatagagggaactcaagactagtagctgcaaccgttgtcggaaggatcagatgacctgcttgttttccttgaatattccgatatgcatatgtagatggcttttagaaggaatgcaattgatgacacattaagaaagaatatatgtccttttttgtttcttgtatttgaatcattaaattgtgatgtttttttttatgaaaataaca

SEQ ID NO: 3191 - DNA, 663 bp, Gossypium hirsutum
  Clone ID: GOSHI-09MAY01-C10102_1
caaaaatctgcctctttctgttattataataatactaataaaagaaggaaagccctggaagaaactgttgtaactagctaatctaaaatcttccaataatttgttcaacttgaacttcttggtcctcactcttcatttgacgtttctctttatttctttcgatgaaaatttgattggctgcaagaacgagagagagatggtaagctcgaggcaggggtttccttcatggataagcgctgcctccggcaccagaattgattttgaaggaaacgctgataacatgttgaaaactgcccacgacgattctacaacccaaaagcctatagctgtagccgacgtcaatttgagcttcgaagagagggctttctctgccgccggtgccgcttttatttccgccatcatcgttaatcctctcgatgtcgccaagacaaggttgcaagcacaggctgctggagttccttacaagacttgctttgaaacaaatacgatgttcccagatatgagaagctctcaatcatgttcgcgtttggttgtggctctgaaccactatgtccccctgagtgtcataggtacactgggacacttgatgttttctacaaagtcattcgtcagtaaagttttgccagactgtggagaggaacaaatgcaagtttagcattggct

SEQ ID NO: 3192 - DNA, 481 bp, Gossypium hirsutum
  Clone ID: GOSHI-09MAY01-C10092_2
attgaacctcaaagcataattcagtaagcggggggcaaataaaaaaaaaatggggcaaccattaccaaagagctggagcatccatacccgacccgagatcagcgccaagtaccagatcctggagcgcgtgggttcaggcgcttactccgacgtctacagggcgcgtcgtctctccgacgacctcatcgtcgccctcaaggaagtccacgactaccaatcggcgttccgcgaaatcgaggccttgcaaatgcttcggaactgcccaaacgtcgtcctcctgcacgagtatttttggcgggaagacgaggacgccgtgctcgtcttggagttcttgaggaccgatttgtcggcggtcatccgcgacgcgaaaaaaagaaaaggaaggcggggtccgagtcggtgaagttaaaaggtggatgcttcagattttgtgcggtgtcgatgcgtgtcatcggaatatgatcgttcatcgggatttaaa

SEQ ID NO: 3193 - DNA, 1009 bp, Gossypium hirsutum
  Clone ID: GOSHI-09MAY01-C10092_1
caaaaataaattagaaaacgaattttttctaagaagagcttttttttttttttttttgaaagcaaggaagaatactactgtgaaagaaggcagcaaaaggaaaggaaaggataggatttgtagcgttcaagagggcgcttatctatctcagaaatagcagtaattaatttttgaggaaaaaatggcggcagcagcagcatcagcttccatgtcggccaccgccgtcttgattccacgtgttcctgcagccgttagaacaacccactgttccgccttgccgcctgtccctcctcgcgtttccaccgcttccttttcctcgtccgttaagctaactccagaatcccggaggtttccttttctccaaacaaaagcaacagaagacacctctgtcgataccggggagctttttgatgacttgaaagaaaaatgggataaagttgagaacaagaccacggttcttctttatggtggtggggcaatagttgccgtttggctatcatctattcttgttggcgccattaactcagtgcccttgcttccaaagataatggagttggttggacttggatattcaggatggtttgtctatagataccttctcttcaagtcaagcaggaaagaactagctacggatattgaggcactgaagaagaagattgctggaactgaatagatgtacaggattggcaatggcatgctaatctggccttcttgtatcctctaaaacagacatctttattctgtaattgtagggattccttgcatgaattcttgtcacctttatatttcccctgtccctggaataaaacttgtcaattttatgcgcaaaagacaaaaaaacttgcccaaacgtatatctactgcacaaatatttttggcaagaaaacaaagacgccgtgcttgtcttggagttcttgaggaccgatttgtcggcggtcatccgagacgcgaaaaaaagggaaggtggggtccgagtcggggaagttaaaaggtggatgcttcagatttt

SEQ ID NO: 3194 - DNA, 396 bp, Gossypium hirsutum
  Clone ID: GOSHI-09MAY01-C10072_2
aaagagacaggagtcgttgttgatttcactcatccttcagcagtttatgacaacgtaaaacaggcaacagcgttcggtctgagaagtgtggttcatgtgcctcggattacgggtgacacaatatcagcattatctgcattttgcgagaaagccagcatgggttgcctagttgcaccaactctgtccataggatctattctcctccagcaagctgccatttcagcttccttccactacaacaatgtagaaattgttgaatcaagggcgcatgcaacacatcttccctcaccagatgccatccagattgccaacaacctctccaaccttggccagatctacaacagagaagacctttcaacagatgtttcggcaaggggtcaagtcctaggtgaagat

SEQ ID NO: 3195 - DNA, 624 bp, Gossypium hirsutum
  Clone ID: GOSHI-09MAY01-C10072_1
acttagcagcctatttcatgaattatacgagctcactgctaagacatgcatgtcgctatcatacaatactctccaaaagaggcttgtcaaaacccacacaaaccttatccgaggaacaaagcatgcgtgacaataaaaggttttaggcaaagaagattttacccttatcagctgagaaggctcagtagctaaatatatttaagaacatccatggcgaccttgagctgccagtttcatcttgctatccatcgacttccttgcaatgccagagttaggccttccttctcttgctcagtgcaaccctctcaaagcaatattaaggtagtggttcaatacatgtcccttgtagatgacctgatgagatactaaacttggcattgattacaggatcttccctcaccagatgccatccagattgccaacaacctctccaaccttggtcagatttgagtggtccatacaatttcaacagcatctagtgtatggcctggagaaatttctgtagaaccccattattcttcaagctccttggtgtataacaagatacttcacagatccagtgaagaatcagtttcatcgaaatattttatgaaaggaaaggtgtatggccaagagaaagtttgt

SEQ ID NO: 3196 - DNA, 695 bp, Gossypium hirsutum
  Clone ID: GOSHI-09MAY01-C10342_6
acgcgtccgaggcagatacgccagatggcactctctcctggctgcagtgcagcacctgtctgttcggcgtgacttgtgaagagctcccagcttggttgtgccacaatgtcccccggtcgtgaacgtgcccgtgttatcttgaccaacttcaatggcatttcatccaccacccgttatgccaatgccatgggcttcatggttgacgagcctgaagcaggctgtgctgagatgatgaagatgtatcaggaggatgaggaggatgtctagtgtgttggtttggatttatttgcatatgaaatatgatgttgtctgctatttgttatgtgttttgctccgttatttctacgtttagaggactgctatagcttatttttcttacaaattctattaccaattatataaacctaagctatggcttctatctcggaagtatttttttgggttaaaaaaaaaaaaaaaaaaaaaaaaaaaaaaaaaaaaaaaaacaaaaaaaaaaaaaaacaaaaaaaaaaaaaaaaactaaacaaaaagaaaaaaaaattaaataataacaaaaaaacaatttatataagtacggggcggcccttttaaaagaaataaggttaaaatcccgggggtccaacaaaaatattttttttttaggcccccaaaatacaaatcactggccggtgttttaaaaatttgaatatgggaaa

SEQ ID NO: 3197 - DNA, 678 bp, Gossypium hirsutum
  Clone ID: GOSHI-09MAY01-C10342_5
gttctagatcgcgagcgcgccctttgttttttttttttttttttgttggaagtataaacaccattttacttcataacatcaaactggtaaacttgttctctgttgacatcatttactagagttgtttgctgggattttaactgtgtggcctattgctataataacgaattgttgttgtgttgttgtcatggtcctactcttatagacctttcttcttgttataactcgcggagttgttctcgagatggagggatataccgacaaacccggaatataccagattcgtgtatccgaggatcccttggatcagatctgtgacgcagttcttgtgaagagcccccagcttggatgtgccccaatgtcccccggtcgtgaacgtgcccgtgttatcttgcccaactccaagggcatttcaccccccccccgttatgccaatagcatgggcttcatggttgccaaggctgaagttggctgtgctgagatgatgaagatgtatcgggaggatgaggaggatgcccacccccccggtttggatttatttgcaaatgaaatgtgatgttgtccgccatttgttatgtgaattgcttcgttatttctcaaaaaaaaaaaaaaaaaaaaaaaaaaaaaaaaaaaaaaaaaaaaaaaaaaaaaaaaaaaaaaaaaaaaaacccccaaccc

SEQ ID NO: 3198 - DNA, 603 bp, Gossypium hirsutum
  Clone ID: GOSHI-09MAY01-C10342_4
ggaaagcaaaacgccaaggaccttaatttcctttattcacatactggcactgttcaagaagttaagccagtacactcgttgatttgtttctaaggatttaatctccaaaccttcttcccattttttcattacattggtcaagaaaaaagaagcaaaaaaacatggccaaagttctgttgttcattgcactatgtgtgcttccagctttggttggtgcttcacgcattctgaataatcaattggggggagaaggctatgtgtactgggatacttgccgggctggttttgaaacccctaatactagaagcctagctgatgccatggttaggttggtatgcttttactggaatattgtgtcttattgtttatatttatttttgattcatcttttttatcttgttattatctattttctttttttctttttatttttttatttttattgtttttttttttttattttttatgtttttttttttttttttttattttttttttatattttttttttttctttttttttttcttttttatttttttttttttttttttttttttttattatttatttttttttttttatttattttttatatttttttt

SEQ ID NO: 3199 - DNA, 1000 bp, Gossypium hirsutum
  Clone ID: GOSHI-09MAY01-C10342_2
cggaattctccgggtacgactctcacgctgtccgctccactgctgtcctgcggacgcctgtgggtttagctctttactcctttgttgtctttgatttgtttctaagggatttaatcgtctaggaccttcttcccatttcttcattacattgttctaagaacaaactaaaaaaaaaaaagaagcaaaaaaacatggccaaagttctgttgttcattgcttctatgtgtgcttccagctttggttagtgctacacgcattctgaataaccaattggtggttgaaggctatgtgtactgtgatacttgccgtgctggttttgaaacccctaagactagaaggctagctgatgccatggttaggctggtatgctccgacaggaagaccggccgagttgtcttcgagaaggagggatacaccgacaaaaccggaaaataccagattcgtgtatccgaggatcacttggatcagatctgtgatgcagttcttgtgaagagcccccagcttggttgtgccacaatgtcccccggtcgtgaacgtgcccgtgttatcttgaccaacttcaatggcatttcatccaccacccgttatgccggtgccatgggcttcatggttgacgagcctgaagcaggctgtgctgagatgatgaagatgtatcaggaggatgaggaggatgtctagtgtgttggtttggatttatttgcatatgaaatatgatgttgtctgctatttgttatgtgaattgctccgttatttctacgtttagaggacttctataacttatttttcttacaaattctattaccaattatataaacctaagctatggcttctatctcggaagtatttttttgggtaattgatgttgtttcaacttgatgaaactgctgtttatttagcaataaggtacattagctatgagttgtattatttaacatatacaagatacttttaaattgaagaagattatagtatttttaattttacttaattttcttttttt

SEQ ID NO: 3200 - DNA, 971 bp, Gossypium hirsutum
  Clone ID: GOSHI-09MAY01-C10342_1
aaagagcaaaaaaacatggccaagttctgttgttcattgcactatgtgtgcttccagctttggtccgtgtctttactcccactttatcatcatcactgtctctttagcctttaccctttgtttcgttgatttgtttctaaggatttaatctccaaaccttcttcccatttcttcattacattgttcaagaaaaaaaaaaagaagcaaaaaaacatggccaaagttctgttgttcattgctctatgtgtgcttccagctttggttagtgctacacgcattctgaataaccaattggtggttgaaggctatgtgtactgtgatacttgccgtgctggttttgaaacccctaagactagaaggctagctgatgccatggttaagctggtatgctccgacaggaagaccggcggagttgttttcaagaaggagggatataccgacaaaaccggaaaataccagattcgtgtatccgaggatcacttggatcagatctgtgatgcagttcttgtgaagagcccccagcttggatgtgccacaatgtcccccggtcgtgaacgtgcccgtgttatcttgaccaacttcaatggcatttcatccaccacccgttatgccaatagcatgggcttcatggttgacgagcctgaagctggctgtgctgagatgatgaagatgtatcgggaggatgaggaggatgtctagtgtgttggtttggatttatttgcatatgaaatgtgatgttgtctgctatttgttatgtgaattgctccgttatttctacgttagaggacttctataacttatttttcttacaaattctattaccaattatataaacctaagctatggcttctatctcggaagtatttttttgggtaattgatgttgtttcaacttgatggggagtatttaacaacttgaatctctgattgtttgtcttcaatgctcaataaataagaccttcttcaatcacc

SEQ ID NO: 3201 - DNA, 386 bp, Gossypium hirsutum
  Clone ID: uC-gsflmaxxa107h10b1
cctatgtttcgttgatttgtttctaaggatttaatctccaaaccttcttcccatttcttcattacattgttcaagaaaaaagaagcaaaaaaacatggccaaagttctgttgttcattgcactatgtgtgcttttagctttggttagtgctacatgcattctgtattatcaattggtgtttgtcgtgtattttttctttttatcttttctttatttttctttttattctatttatctcttcttctttctctctccttctttttattttttttcttttttttttcttttttttctctctatctctatatatctttattatttatttcttttttattctttctatttctttattcctttcttttttttttttttttctcttcaatttt

SEQ ID NO: 3202 - DNA, 367 bp, Gossypium hirsutum
  unsure (1)..(367): unsure at all n locations
  Clone ID: LIB3135-058-Q1-K1-E1
agagcccccagcttggatgtgccacaatgtcccccggtcgtgaacgtgcccgtgttatcttgaccaactccaatggcatttcatccaccacccgttatgccaatagcatgggcttcatggttgacaaggctgaagttggctgtgctgagatgatgaagatgtatcgggaggatgaggaggatgtctagtgtgtgggtttggatttatttgcatatgaaatgtgatgttgtctgctatttgttatgtgaattgcttcgttatttctacgttnnaaaaaataataccagaaataaaagcagagcaacgagcactctttttggacccaaagccggctataagacggccgatcccgggccggagacatttg

SEQ ID NO: 3203 - DNA, 345 bp, Gossypium hirsutum
  unsure (1)..(345): unsure at all n locations
  Clone ID: LIB3149-020-Q1-K1-C9
gaggatcacttggatcagatctgtgatgcatttcttgtgaagagctcccagcttggttgtgccacaatgtcccccggtcgtgaacgtgcccgtgttatcttgaccaacttcaatggcatttcatccaccacccgttatgccaatgccatgggcttcatggttgacgagcctgaagcaggctgtgctgagatgatgaagataataataaccattcagatttcgaccaanaaaaaaaaaaaaaaaaaaaaaaaaaaaaagaaaagaataaaaaaaaaaaaaaataaaaaaaanaaaaaaaaaaaaaaaaaaaaatggtggggnggtttaaagatcaaagctttcttc

SEQ ID NO: 3204 - DNA, 392 bp, Gossypium hirsutum
  Clone ID: GOSHI-09MAY01-C10372_1
aaaaaaaaaaaaaacatttacagatcgctagaacaagaaaaaatctaaagcgagttcgaagagttgcagctttgttgaggcggttgtttttgtgtgtgtgtttgggttatggtaattgtctgaagagaaacaaaacaaagatggtagcggaagctgaggttgtttgtcaacaaagggtgccggtgttagatgttccatattttggtaaaggaagtaacatcgaggagattgatgaaattgttgcgatttcatcgccggtttcttcacccaagctcggaaaagttggccttcccgccgatttacccacacctcaactggttgggctttctctttccgtttcccccccttttttttttaatgtttgtaaagatcctgaatttaaacattagatt

SEQ ID NO: 3205 - DNA, 373 bp, Gossypium hirsutum
  Clone ID: LIB3166-040-P1-K1-B12
ttcacccaagctcggaaaagttggccttcccgccgatttacccacacctcaactggatgtgaaatctgtggaaaaaatcacagatccgagtattgaaactactacggtggtgcaatttgttccggacattcgttcaggtagttttgctgatattggacctaggagatacatggaagatgaacatattagaattgatgatctatcttcgcatttgggtccccttttcaagttccctaagcctagtgctttttatggggtgcttgatggtcatggaggtcctgaagcagctgcttatgtaaggaaacatgctcttagattctttttcgaagatgtcgattttcctcggacttgtgaatttgatgatgttttcatg

SEQ ID NO: 3206 - DNA, 593 bp, Gossypium hirsutum
  Clone ID: GOSHI-09MAY01-C10272_1
aaaaaaattaaggtaggaagttcccttgtcttctactcggtgtcggacttcaatgcatttcatttcatttcatttcatttatctgcaagaaagaaggaaatagaattttcctctttcttgttttgtgaattcttgagaaatggttgatgtaaccgataaattggcatattttcaagccaccacgggactcgaagatcccgatttgtgtaccgaaatccttcaggcccatggttgggaccttgaactcgccatctcttccttcacctcttccactcaaccctccgcttcttccactgtctctgattccgaccctcccgattcacgggcccggactgattccgcctcggcctctgcctccgcctccgcctccgcctccgcctccggtcctattaccgctcccgcaccgggcttagcctggagactcgttacattaccgatttccgtgatatccggaagtttagggttgatctctggcgctgttgggctgggtctatgggccgcgggtggagttctttcgtattcccttgggatgatcgggctaggctctgggcagggcggtgaatcatcggccggattggtatcggtctcagctg

SEQ ID NO: 3207 - DNA, 418 bp, Gossypium hirsutum
  Clone ID: LIB3120-030-Q1-K1-A3
caagaacgaaggaaatagaattttcctctttttttgttttgtgaattcttgagaaatggttgatgtagccgataaattggcatattttcaagccatcacgggactcgaagatcccgatttgtgtacggaaatccttcaggcccatggttgggaccttgaactcgccatctcttccttcacctcttccactcaaccctccgcttcttccactgtctctgattccgaccctcccgattcacgggcccggactgattccgccttcgcctccggtcctattaccgctcccgcaccgggcttagcctggagactcgttacattaccgatttccgtgatatccggaagtttagggttgatctctggcgctgttgggctgggtctatgggccgcgggtggagttctttcgtattcccttgggatg

SEQ ID NO: 3208 - DNA, 705 bp, Gossypium hirsutum
  Clone ID: GOSHI-09MAY01-C10212_1
ccacgcgtccgcccacgcgtccgcccacgcgtacgtgcctcttctcctgagagcagtttagactcgccagatattcatccatttcgggtctcctcatcgggagctgaagaatcaagaaggctaacaagtttatcttctgtcaatatggctgttccaaagggatttcctttatcaaggtctactagtgacgggtatgaagcatcaggtggggaagacagtgatcgagttccttcgagaattatcgagacatcaacaaactggagcaacgttcttttcgattccgaacaggatgatagtatcgttaaactaaaagcaccatcttcatccagccaggctaacattagaatgctgtgactgatcatgatcgatgaagttagtcgattctggttctgaagctcattctttaatttatgggactaagaatttcaagtaccagagtgataatcctaattcaattggtttgggactttgaatatgtgaagagatgacaatggctgtaaaggcaactctgatttccgtcgaggcaagactagctaccggtgtttcatcggttcttgcatttaggatgacaaggaagaagaaaaggtatttaatatgtactttctgtaatactccattgtactaactgttgaacattcctaaacttttggggaaaaaatgtgcaaattttatagataatccaggttacatccattcttaatgttt

SEQ ID NO: 3209 - DNA, 1558 bp, Gossypium hirsutum
  Clone ID: GOSHI-09MAY01-C10202_1
gatatttctacttgggtagtaattatgttggcgagtacgcaggggcggatgggcggtttctttggttttcaagccaatctccaacgtctaccttcgttatctccgccaacattaacacaaagcgtatttatttaagatagaaaaaatatcaaacaattggcatgcacagtctccgcctagcttcttccgctcattcccagtctctcttcacaatgtccgccgcctccgcttcccttgctctcccttctcccctttcttcgtttcgctccaatggacctcttccttctagatgcttcctccgcctcaacaacccctcaagatctagggttttcatgagtgtctccgttggatcccaaactgtcgtcgatgatgccttgttcgctgattacaagcccacatccgccttcctctttcccggtcagggcgctcaagccgttggaatgggaaaagaagctcaggctgtgcctgctgctgcagaattgtataagaaggcaaataatatattaggttttgatcttctagatctttgcatcaatggtcccaaggaaaagttagattcaactgtcataagccagcctgctatttatgtcacaagtctagctgccgtggagctgcttcgtgcccgtgatggaggcccgcagattattgattctgttgatgtcacttgtggtctcagcttgggtgaatatactgcactagcttttgctggggcttttagctttgagagatggactcaagcttgtcaaactaagaggagtagcgatgctggtagccgcagatgctgctaaaagtgctatggtcagtatcataagacttgattcagagaaggttcagcaattgtgtgatgctgccaaccaagaagttgatgtagctgataaagtgcagattgcgaattacttgtgtcctggaaattatgcagtatctgggggtctcaaaggagtggaagcagtggaagctaaagcaaagtcattcaaggctcggatgacggtacgtttagctgttgctggtgcttttcacactagtttcatggacccagcagtctcaagattggaggctgcattggcagcaacccagattagaactccaagaatacctgtcatatcaaatgtcgatgctcagcctcatgcagatcctgagactataaagaaaatactagcacgtcaagcgacttctcctgttcagtgggaaaccacagtgaaaactttgctaaccaaagggatgaaaaagagttatgaattggggcctggaaaggtcatagctggcattgtgaagagaatggataaaagtgctgagattgagaacattggtgcttgaggagggtttttttattagttgtggctagtccaccattcatattgaataaggtgttaatgcaacttggaagttgaggttttatgaccagacatattgcaaatctagcttgtaatgatggtgtcggttgtctctatgtgtgtgtttttgtcagcattgtttcattagaaagaaataggccaagtaaacaacactccgctgtcattcatcgtttcaactgcagtgcctacattctactattcaattt

SEQ ID NO: 3210 - DNA, 904 bp, Gossypium hirsutum
  Clone ID: GOSHI-09MAY01-C11992_1
gcggcacccacactccagctctctctctctccccccgtccccgccttccaagcaacatcttcatatgctttccatagctaaatgtacgtatatataaccaacacaccctcactctcttcaatcaccaaaaatcaattttaaaaatcaaagaaaaaaatctcttttcttttgttgtaatttcttggattttccgatatgggttttgaagattcagatagggtatcgaaaccagtaatgataagggaagtttggtcagataatttggaatccgagttcgagttgatcagccaagtgatcgacgaatacccatttatttcaatggatactgagttcccgggtataattttccggccaaaagtggaccccgcaaggccgtacaacggtcagttccgaccggccgatcattacaaggtactcaaatctaacgttgatgctttgaatttgatccaagtgggtctaaccctcaccgattcttcgggtaatctgcccggatccgaaaacggaacccggttcatctgggaattcaatttccgtgatttcgacgtggagcgagatcctcacgcgccggattccatcgagcttttgaggaggcaagggattgattttgacaagaataaggaaatgggggatcgactcgcttcggttcgctgagctgatgatgtcgtctggactcgtgtgtaatgactcagtgagttgggtgacatttcatagcgcctatgattttggatatttggttaagatcctgacccgacgagatttgcccgagaaattagacgagtttttgacgattcttaaagtgttcttcggtgaccgagtttatgatttggaacacatgatgaagttttgtaacagcttgtatggtgggttggaccgagttgctcggactttagatgtgaacccgggc

SEQ ID NO: 3211 - DNA, 629 bp, Gossypium hirsutum
  Clone ID: GOSHI-09MAY01-C11952_1
cctcctccaactccgccccgcccgcctcctccaactccaacgccttgcctcaggaagtgaacttctccgagctcgaccgcgtcaaccggatagggagcggtaccggaggcaccgtttacaaagtcgtccaccgcccttcctctcgcccttatgccctcaaggttatctacgggaaccatgaagagtctgtccgccgtcagatgccgcgaggagatcgagatcctccgtgacgtggaccaccccaacgtcgtaaaatgtcacgaaatgtacgatcacaacggagaaatccaggttcttttggaattcatggatggcggatctttggaagggatcctcatatctcgcgaagctaacttatctgatctggcccgtcaagtcctcagcggtctaaactaccttcaccgccgacacatcgtccaccgcgacataaaaccttcgaatctgctaaccaattccaagaaggtggtgaagatagctgattttggggtgagccgaatcttggatcaaaccatggacccctgcaactcatctgttgggaccatagcatacatgagccctgagaggattaacaccgatttgaaccacgggctctacgatggttacgctggggatatttgggtttaggggtt

SEQ ID NO: 3212 - DNA, 480 bp, Gossypium hirsutum
  Clone ID: GOSHI-09MAY01-C11932_1
gattgttcaggaaattcacaaggatgaagctgatgatagtggtcgtgcagattgactgggaagttataatcagcttacaccagatgaggctagaagctatgctttatctcaattaccaagggaattatccaaacacacgggctttgcctttgactctcctggttacgagtccttttttgcttcacaactcggtgtatatgcacctcagaaagcatgggatgttgctcgcagagctagcatgaggtcgaagccaaagccaaaaccaaacaaaataaattgatttggaacaacattgttgtacaaattttttccccaaacccctcatttgatagcctagccctagagatctgtaaaattagtgaatttgatgtaatgctggtttttttttttttttggagttccattataaagctttcttttaggaaccaaatcgagtgaggtgtcaacgatgtacagaaaaatcatgaacactcttaaatg

SEQ ID NO: 3213 - DNA, 677 bp, Gossypium hirsutum
  Clone ID: GOSHI-09MAY01-C11922_1
taaacaaacagcgtaacgaccttgtaaacactcaaaacgctattgccagcaaacaccgcggaatcccacgcgccacctttttccaccgatctcactcgcgacccatggcgtcccccgcgaccattccgatgacgacgtctcaatctacggccggtggtggtacccaatcacagcccccgatagccacgcccgcgtttagggcgttcctctcgcgcttcacgtcctcgatccgtcaaggactctcccaacgccgtccatggtatgaactcattgatcggtccgccatggcccgtcccgataatctaactgatgcctattcccggatccgcaaaaacctctcttacttcaaagtcaattatataactctactagtggttgtgctcgccttttctatcctatcgcatcccctctctctcctcgtcctcctcggcctccttgccgcttgggtcttcctttacctcttccgaccgtccgatcagcctctcgtgatcttcggccgtacgttctccgatcgtgagacgcttggcgcgttggtggtggtgaccgccctcgtcgtgttcttgaccagtgttgggtcgctcttgatctccgcgctcttggttggcgtcgctatcgtttgcatacatggtgcttttagggttccaaaagacttgttcttggacgatcaggagcctgtg

SEQ ID NO: 3214 - DNA, 1030 bp, Gossypium hirsutum
  Clone ID: GOSHI-09MAY01-C11822_1
cgggggggcccaacgcttccgttagatttaaggaaacctaaatcactgtttcgaggcttagcgtggaaatccaagtggggggagtaccagaaataagaagagcagacccacaacttgtaaacggccaatgccaccgaaataccttctcccttttaaaccgctctccttcgccgccgcttaatttcctaaacgccgaaacccccaaccccatttccaacattacaaatggcttccttcaccatttcttcgccgtctaaatcgtcgccgtttttgtcttcttctttatcttctctcttcactccttcctctcttagccgtaaaagcttcgctttcaatatctctcgttctcctatctgcgctcccaacagtttgaaatgtgaactgcctcaacctgtgaattatgaaaatgggataccaacgatcccagtcctcaatggaaggatactgcccaagttcgtggaatcaaatcgaatggataaagctgttaacagaaatggtgccaagctcaaattgttttctggcaccgccaatcccgcactttctcaggaaattgcttggtacatgggcctggagctgggaaagatcaacataaagagatttgctgatggggaaatatatgttcagctgcaagagagtgttagaggctgtgatgtatatttagtgcagccaacatgccctcctgcaaatgagaacctcatggagcttctcataatgatagatgcttgtcggagagcatcagccaaaaatatcactgcagtgattccatattttggttatgccagagctgatagaaaagcaagttcaatatattttgtaataaattatcagggatgaaatcataaaaagatgaatatatgtatagagatgtaagctgcaaattgaataggttgaaagccaaccatttgaagcagcctagtcttgccccattcagaatcagtaacaaatttgtgctatcttatgttagaattatgcttattggacaatgcccttgcttcttgctgtttttatttctttaaagtatgaatttctg

SEQ ID NO: 3215 - DNA, 564 bp, Gossypium hirsutum
  Clone ID: GOSHI-09MAY01-C11592_1
acccttccgttgatgcttaatgaaaatgcaaagaatttacttacgagacaactgcgcgtgggcgcacgtggaagtacttaccatgggcggagggaggctttctctctttgtgagcccaaggtccttgagttgattgacaatgtaccgatactgcaaatagacatggtgtggtgctatttcttgcttcgagacatcagttggctttcagttgcaggaatacgccttgaaaaagccagagaaggacttgagcgttgtcacgggaaggatttttcacgtgttagactccttcaagctggttgccagccagagcttgcactgtggacatatgaggttggagttgttggaagggggtggtggcatatcataatggtcagttggataaatctaaaaaggcactgacatctgcacaagcaaaattctctcagttacaagtgcctgatgaagccttatctcatgtcatgagcatgggctttaaggaacgtgatgcaaggagggcattacgattgaacaaccaagatatcaggagagctgttgattttttttttgaggagaagacaaagagaa

SEQ ID NO: 3216 - DNA, 375 bp, Gossypium hirsutum
  Clone ID: LIB3166-040-P1-K1-G5
aataattacaagactggatttgcaaattgcttgctgtactattgcaacttttatataggtgaaaaatattggttaaataataaaaatgacatacatcaatagtttgttatgctcatctcttacttccttctgccacattcagccatcattttgttgtttccatatccttttgttttttccacttttattttcttaaccataatttcgttgcatccttctccaatattaagccctatttttatttttctgacaatatcagttacaagtgcctgatgaagccttatctcatgtcatgagcatgggctttaaggaacgtgatgcaaggagggcattacgattgaacaaccaagatatcatgagagctgttgattttct

SEQ ID NO: 3217 - DNA, 608 bp, Gossypium hirsutum
  Clone ID: GOSHI-09MAY01-C11582_1
accgaagccattttagtagagcccagatctattttcaatgttgaagaagccattacatgaacctctccctgttttaaatcctcatctcgaagtttccgccatgaaagctgcttccttcaacactccccattttccgtccatcatcatgaaaagaacatcaacacagccatgtccaactcgattcgcaagaaccctttttcttaaactccctccgagcttccaaaacaatcccttttttagaccgtcggctaattcctctgcttcttctttttcctccgtttcttcttcctccaacgcattcatcgagtcaactgccaacggcacgtatttgggttggaacaaagctccggagattgagatcgatggtggtggacaagctaaggctctggggttcagagacaacggccgatggtcgcgaaaggtgctttattttccatacttttagcagcactggctggctcgtccgatctgtggatttgcctcttgtgatgtactacgattcaagaaacctgctgggcataaggatttgttctatattgatgacaaagatgtggagtttaaagaagttcttgagtcacttttgccaaaagcaccactgatacatctgt

SEQ ID NO: 3218 - DNA, 512 bp, Gossypium hirsutum
  Clone ID: uC-gsflmaxxa090b07b1
tttattcgtgcgggagaaccgaagccattttaggggagcccagatctattttcaatgttgaagaagccattacatgaacctctccctgttttaaatcctcatctcgaagtttccgccatgaaagctgcttccttcaacactccccattttccgtccatcatcatgaaaagaacatcaacacagccatgtccaactcgattcgcaagaaccctttttcttaaactccctccgagcttccaaaacaatccctttttttagaccgacggctaattcctctgcttcttctttttcctccgtttcttcttcctccaacgcattcatcgagtcaactgccaacggcacgtatttgggttggaacaaagctccggagattgagatcgatggtggtggacaagctaaggctatggggaacaaagacaaagtcataaccgtggttcttttgggatggcttggggctacaaacaaacatttaagtagatatgtggaatggtataattccaggggaatccatg

SEQ ID NO: 3219 - DNA, 432 bp, Gossypium hirsutum
  Clone ID: GOSHI-09MAY01-C11552_1
cccacgcgtccgcaaatttttacactcttgccaatagaaaactgctacttgttgttatattcagtgaattcatagtgtagcttttctaataaaaccgcaaaaggaaacatgtgttttttggatggaagggaccatctgggttttctgcttcttctaccgcagaagaagttacctcaagggattgatggatctgctctcgctgccatcggtacaggagcatcaagtggtatgggtgtagagactactcgcgtcctcgcattgcgcggtgtccacgtagttatggcggtaaggaatgcagatgccggtcggaatgtcaaagaatcaatactaaaagaaatccctagtgcctaagattgatgttatggaattggatctgagctcaatggcatcagtaaggaattcatacaaatcaaccttaatctcctgacctct

SEQ ID NO: 3220 - DNA, 415 bp, Gossypium hirsutum
  Clone ID: GOSHI-09MAY01-C11482_1
aaaaaaaagaaatcgttgcataaaccaaccttaggtgggattcaaaagactcgtttcttcgatcgtttaattcttcattcgttcgaagatgtcgtactctaagaggtcaaggtattcaagttctccttccccgaacaagcgatacacccggtctgtgtcgagatccttgtcgagctcaaggagtcggtcccggagtaagagtaggagtgctgaaagtgatgttgaaaatcccgggaacagtttgtatgttactggcttgtcacctcggatcaccaagagggagttggagaagcattttgcaagcgagggaaatgtgatcgatgttcaccttgtggttgatccaaggaccagggactctcgcggatttgggtttgttacgatggctaccaacaaagaagctgatcgttgcattaag

SEQ ID NO: 3221 - DNA, 645 bp, Gossypium hirsutum
  Clone ID: GOSHI-09MAY01-C11742_1
ttggctataagatcgacagagcaagtgggccttgagggtattgtatggttacataaatgcacacaggatgttcaatgatgatgtccagggaacagctggggttgcaattgctggtcttctcggagctgtaagagcacagggaaggccaatgattgactttcctaagcaaaagattgttgttgctggtgctggaagtgcaggaataggggttgtcaatgctgcaaggaaaacaatggcaaggatgttaggaaatactgagcatgcttttgatagtgcaaagagtcaattctgggttgttgatgctaatggtctcataactgacgaacgtgaaaatattgatccagacgccctgccatttgcaaggaacactaatgaagctgggtcgtcaaggattaagggagggtttcaagtctggtggaagatggtgcggcatgtgcggcctgatgtgcttctggagttgtctggtgttggaggatttgttctcataatatgtgttgtaggctcttaaaggttctactttcacttaacccagctatctttgcaatgttcaacccttcaaatattctggatgtcctcaaagaagcttttcattggtggcacaccttattttcagtggaatcctttgagatttgtcttgataggcca

SEQ ID NO: 3222 - DNA, 531 bp, Gossypium hirsutum
  Clone ID: GOSHI-09MAY01-C11772_1
accacacatacgggaagagaccgattttatcaatctcttaaccggcgaaaaaccagaggaaatacttttccgcctcaaccccaaccaaataatgccaagacgagtttctgggtgccaagattctctggatcaacggatataacaatttggagttgaagattcggacagccgtttaacgaagagtattgcatccttaccttcaacatatgcactcaatttacgatgatttggatgagaagaaacgagacttgaagctttacgtgaacgtcgctggccatggcgatgatcacaagggacggtggagatgcgttcccttcacgcatccttcaacgtttgaaacaatagctatggaatctgaccttaaaaacaaagtcaaatccgatctcgagtctttcctcaaagccaaacagtattaccataggttgggtcgtgtttggaaacgaagctatctcctttacggtccttcaggtactggaaaatcaagctttatcgcagctttggctaatttcttgagttacgatgttacgacat

SEQ ID NO: 3223 - DNA, 707 bp, Gossypium hirsutum
  Clone ID: GOSHI-09MAY01-C11762_1
caaaaggcacaagtatttcactttgtgtctttctcaagtcggtatcggtgcggtgaagagcaatgctggattgttcatatggatggatcttcgtaagctcctaaaagagaagacgttcgatgctgaaatggacttgtggcgagtgattatcaatgaagttaagctcaatgtttcccctggttcttctttccattgtgacgagccgggttggttcagggtttgctttgctaacatggatgacaataccattggaagttgctttgttgagaataacgaccttttatgcataagcacaacgaggccgtccgtcctcgtaaactatgcagacgagccagccttaaactcagcttatctcgaaggagggacgatttcatgtccccaaacatgatgtctcctcactctcccatacctcaatcaccccttgtccgtgccaggacttaagctgatcaactaagacttttgaccacattatacagtcttcaaacctttgtctgcctacattctatatgaaacccctatttgttcaacaattgtaagttttttgggtctgtcctcacatgtaaaagtgcaatactgcgaggaaagctcaacattggtgagcacagctcgtgcacatatatactattgttgggtgtctttctttttttcttttttatttacaacaatgtacgaaggaacaaaaaaagatgtttgtgaatttgtaagac

SEQ ID NO: 3224 - DNA, 431 bp, Gossypium hirsutum
  unsure (1)..(431): unsure at all n locations
  Clone ID: LIB3166-043-P1-K1-D2
cggggcgggaccaagcgcgtccgaacaccaacacacacgaaatgcacggtgtgttgtatattcaaagacatggcttccgcgcgtttgcgagtgcggatacacgcacgggcgggatcacacacaggaagagcttgaaaggaggcacttgcattagcttgagagttncggtttgggattggtggaaagcactgtcaaggggatgaaagaagctggattgcaaccatgnatggccaaattgagaacgccaaggagattgagaagctggtgaattatgctcagaaacgcttgcatatgaaaatttatcaaagcgattggtgatttgattttgcaaaccactaaatgcaagtataactatttaacaaatatgtgtctatgtagtattaataatgaatctgtccgcttgctttgtggattttcctacttatttcaat

SEQ ID NO: 3225 - DNA, 402 bp, Gossypium hirsutum
  Clone ID: LIB3146-034-Q1-K1-F1
tggcgatcatgcggtgtatcgatgtccaaccaagcaacgaaatgacggtggatgaattcaaagcatggctccggcgtttcgatgcggatcacgacgggcggatcaaccaggaagagctgaaagaggcactgcatagcctgagagttcggtttggatggtggaaagcacgtcaagggatgaaagaagcggattgcaaccatgatggccaaattgagaacgccaaggagattgagaagctggtgaattatgctcagaaacgcttgcatataaaaatttatcaaagcgattggtgatttgattttgcaaaccactaaatgcaagtgtaacttttaaaaaaatatgggcctatgaataataaaaaatgattttaaaaatggggtcccctggctttttgaattttct

SEQ ID NO: 3226 - DNA, 723 bp, Gossypium hirsutum
  Clone ID: GOSHI-09MAY01-C11722_1
ggagtgtcgcagtgacattcataggctaaatgcacctttacttgctatttacgagtcacttattccgcctaaagaggaaaaaactaagcaacaacagttattggcgttactcgagaaactagtttggaaagaatggcctcaagcaaagttatttccttatggttcatgtgttaatgattttggggtttcgagaagtgatattgatatctgtcttgcacttaatgaggatattaacaacaaatctgaaatcttgttaaagttggcggatattttgcagttggataatcttcagaatgtgcaggcactgactcgtgctagagtccccatagtaaagcttatggatccggtgactggaatttcctgtgatatatgcataaacaatgtattggctgtagtaaatacaaagcttctaagggattatgcgcagatagatgcaagattacggcagttggcatttattgtgaaacactgggctaaatccagaggagtgaatgaaacttatcgcggaactttatctagctatgcgtatgttttgatgtgcatccatttcttacagcaaaggagaccggctatccttccatgcttgcaggggatggagaaaacctacaatgtcaccgtggataatatcgagtgtgcttactttgaccaaatcgaaaaacttctcaacttcggatcttctaacaaggaaactgttgctcaactggtttggggtttcttcaacta

SEQ ID NO: 3227 - DNA, 476 bp, Gossypium hirsutum
  Clone ID: LIB3543-022-Q1-K1-C9
cccacgcgtccgatcgtgagaaggaatacagaaaagataacagggggcaaaggctacttagccagagggagagaatgttaaaaaggcggacggattgtcgcagtgatattctcaggttaaattcacctttacttgctatctatgagtcactcatacctcctgtggaagaaaaagctaagcagaaacagttgttagcattacttgagaaactagtttgcaaagaatggccagaagcacggttatatctctatggatcttgtgagaactcttttggggtgtcaaagagtgacattgatatttgccttgcatttaatgaggacattcacgacaagtctgaaatcttgctaaagttggcagatattttgcagtcagataatcttcagaatgtgcaggcactgactcgtgccagggtccccatagtaaagcttatggatccagtgactggcatttcctgtgacatatgcataaacaatgtt

SEQ ID NO: 3228 - DNA, 949 bp, Gossypium hirsutum
  Clone ID: GOSHI-09MAY01-C11682_1
cccacgcgtccggttgatgaatatggtttgattagacaaccgaagtatggtcatctaaagcagcttcacaaggctgttaagatgtgcgaacgagctttagtttcagctgatcccgttgtcacttcacttggaaacttccaacaggctcatacgtacacgtcagaatcaggagattgcgcggctttcctatcaaactacaataccgaatctgccgcgagagtgttatttaacaacatgcactataacttacccccttggtctatcagcatccttcccgattgtaggaatgtagtgttcaatacggccaaggttggagttcagacatcacaaatgcagatgttgcctacgaattctaagatgctctcatgggaaacttatgatgaagatacttccgcattagatgatagcttaatgataagtgctaatggtctactcgagcaaataaatgtcactagggacgcaagtgattatctatggtacattactagtgttgacatcggttcatctgaatcattccttcgcggaggagaacttcccactctcattgttcaatcaacaggtcatgcagtacacatctttatcaatggacagctttcaggttctgcctttggaacgagggaaaataggagattcacattcaccgggaaggtcaatctgcgtgcaggaacaaacaaaattgcgctgctgagtgttgctgttggattaccgaacgtaggtggccacttcgagacatggaacaccggaatcctaggtccagttgcattgcatggacttgaccaaggaaaacgggacctatcatggcaaaagtggacataccaggtcggactcaaaggagaggccatgaatcttgactcaccgaatggtatttcgtctctcgagtggatggaaggatcgttggccgcacaaacacagcaccattaaaatggcataaggcttatttcgatgcacc

SEQ ID NO: 3229 - DNA, 306 bp, Gossypium hirsutum
  Clone ID: GOSHI-09MAY01-C11652_1
accaaaaatgcgcaaggtgtcatattcagtagcaggttttccataccatttctggcaaaggagtcttgccatttatagcagatgatggcaaatgattgatgagatgttgagcgtacgtcacagcctcagcccaaaactttctatctaatccagcattagataacatacatcgaactttccccacgcgcccgcgattcatacgctctgccaccccattctgttgcggtgttccacctacggtgaagtgccttactatgccacaatcttggcatatcttcaagaaaagatcgcttttatattctccac

SEQ ID NO: 3230 - DNA, 540 bp, Gossypium hirsutum
  Clone ID: GOSHI-09MAY01-C11612_1
cccacgcgtccgcccacgcgtccgcccacgcgtccggttgattctcaaggcagacaactaacaaccaagggaaagattgatgtcactttgcaagatggccgaacatttgaaggtacagtagttaattctgatttacattctgatattgcaatagtcaagttcaaatcaaaaactcctcttccaactgcaaaactgggctcatcaagcaggcttcgccctggggattgggggatagctatgggtactccgcttagccttcagaatactgtcactgcgggtattgtgagctgtgctgatcgtaaaagcagtgatttgggtcttggagggatgcgcagagagtatttacaaactgattgtgcaatcaatgctggaaattctggtggcccccttgctaatattgatggagagattgttggagtcaatattatgaaagtagcagctgcggatggattgagtttttctataccaattgactcggtttctaaaattatagagcatcccaagaagagtgggtataattatatctccttatggaactaa

SEQ ID NO: 3231 - DNA, 412 bp, Gossypium hirsutum
  Clone ID: GOSHI-09MAY01-C11602_2
tttttcttcttctacgtctcccgctctctcttttgttttcaatggcgtctctcttaaacccttcgactcttcttccacccacaaaaccctttcttcccactcgttcccgactcacttcttcacctactctgcgagttaactcactgactccccgtcttccatcaccatcgactcgtcctcgtcgagttatcaaagttgcagcagcactcgacggcgattattcatcccagaggagttgcagcaatgagcaaaggggaaccaatatggtacctgggtgggaatattacccttggcttatcggtatgggggtccctaaagaccctgcttcgaccagagaaccaatgattgggaccttatcttaacactcttgccactgggcttggcagcatggaagaggcaaagaagaacatgt

SEQ ID NO: 3232 - DNA, 1035 bp, Gossypium hirsutum
  Clone ID: GOSHI-09MAY01-C11602_1
cgcgtccgcccacccgtccgcccacgcgtccgttctctcgtccgaccctttcttcccactcgggtgcgactcacttcttcacctactctgcgagttaactcactgactccccgtcttccatcaccatcgactcgtcctcgtcgagttatcaaagttgcagcagcactcgacggcgattattcatccaagaggagtagcagcaatgagcaaagggaaacgataatgttacctggttgtgattataaccattggcttatcgttatggagttccctaaagaccctgctccaacaagagaacaaatgattgagacctatcttaacactcttgctactgtgcttggcagcatggaagaagcaaagaagaacatgtacgcttttagcaccactacatatacgggattccaatgtaccgtttcggaagaaacctcggaaaagttcaagggattgcccggggttctttgggtgttaccggattcatacatagacgtcaaaaacaaagattatggaggtgataaatatgtcaacggggaaataattccatgcaaataccctacttatcaaccaaaggcaagaaaagaatccaaatatgtgagcaaaaaatacgagagacgaaaagacggccctcctgcaggacagttccgaccaaagcaagcagcaagtcagtcggaatcatcgtcttgacaaggtaccagaaatgctgtttcgagactactcatacttatggtggtctaaagtccagtttttcatcatgcaacttagtttctctcgtttgttattcatcaatgtttcactgctaggaccggtaaataatattcgagctgatatcaagattttgcatgttattgaaatacatgttctgcgatgtcatgtatctgtaaagtctttgtagtagtttcgtgaaaaaccgaaaccgacccatacgagcttgtgatccgaatttcatcgatatgacatctaaggtttagggttatcttcgaacgcggatcatatttatttcaccatttaaactttcagtaatgagatggattttggttt

SEQ ID NO: 3233 - DNA, 245 bp, Gossypium hirsutum
  unsure (1)..(245): unsure at all n locations
  Clone ID: LIB3829-023-Q6-K6-E2
cctactctgcgagttaactcactggctcgcgcggggggcatcaccatcgactcgtcctcgtcgagttatcaaagttgcagcagcactcgactgtttttttttatccaannagancaccccctgtggggggggggggggataatnnnacctnnttntnattataaccattaacttataaaaataaanttccctaaanaccctnctccaacannatatcttatcatttntacctatcttaacactct

SEQ ID NO: 3234 - DNA, 174 bp, Gossypium hirsutum
  unsure (1)..(174): unsure at all n locations
  Clone ID: uC-gsflmaxxa095b06b1
ccctctcgtccgcttaccttatgtaggcttagagcaggggtgcttttataagattcttgtgtgccgtttcggaagaaacctcgnaaaagttcaagggattgcccggggttctttgggtgttaccggatttatacatagacgtcaaaaacaaattatattgaggtgataaatatg

SEQ ID NO: 3235 - DNA, 398 bp, Gossypium hirsutum
  Clone ID: GOSHI-09MAY01-C11622_1
gttttgaaaaactcctttatgagttttaattattatgtcactgcttatgcatagagcacgggtgtgttgaaaatggcgacggtgctgctgttatgttattgttaataaagtgcatgcggctatgatgattttgttgagttcatacagcttggatgcatgctgcagcaattgtgcatgttgtagcaacatattttctgttttagttgcaatgtaatttagtttggttgaaaacgaagtgtttaggtgatgattaagctaataagtcagcttattcatatgtacaagcaatgttttactagtcccaatgctgattagtgggattagttgaatatttggtgatgtattttgattataaatgtattgttttcccattgaataagtaagcatatcagttgttt

SEQ ID NO: 3236 - DNA, 540 bp, Gossypium hirsutum
  Clone ID: GOSHI-09MAY01-C11162_1
ttctttgggtttttaaaatttccatctctgggggtctccaatccaaccgggagagtcagaaaaaaaaaaaatggcttcttggaattcaattccactggaaatcacgtacgacacttttggttggctagcctttttttcgtggtccattagtttctaccctcaagtcatcttaaattttcgaagaaaaagcgttgttgggttgaactttgatttcgtgctgctgaatttgacaaaacactcctcttatatgatctacaacgtttgcctttacttcagccctgttattcagaggcaatactttgagaaatatggctctggagagatgatcccagtagctgctaatgatgtcgcgttctcaatacatgctgttttgttgacggctattactttgtttcaaattgtgatttttgatcgtgggacgcaaaaggtttctaagatttctgtgggaatcgtcattgctgtgtggttaatcgccgccatttgtttcttcatagcattgcctagccaatcatggctttggttatccccatctttaactcg

SEQ ID NO: 3237 - DNA, 985 bp, Gossypium hirsutum
  Clone ID: GOSHI-09MAY01-C11112_6
tggcctttacaaggaccacaaaaagggcaacaggagcagcaacatcgatgcaaacacagatgaggcctccatcaacaccagcttaccctccctaccctcctacacaatcatcaaacccgtctcctccagaggcattagcacacagcacccccatgcaggttccattttctggagtggggggacctctgtctagttgtgtcgataccattccttatgggtacagagtgcctggcagaacagctccccagccaatcaagggcacttttgaagcacaaccaagggatgggtatcaggtgcctgtctcccatcccccccttcctccaggaagtgcatacatgatgtatgatagcgaagggggtagagcacatcacccaccccaacagcctcacttctcacagggtgggtatccccctgccaatgtctctcttcagactcctcaacctggtcctagccctaatgttatgatgaggaacagtagccattcccagtatgttcgcaaccatccttacagtgatctgattgagaaattagtgagcatgggattcaggggtgaccatattgcgagtgtgattcacaggatggaggagagtgggcaggcggtggattttaatgccgtgctggataggctgaatgtgcaatcctctggtggtactcagagagggggatggtaaatgccactgcttggttgaatcgaccttgaatggtacttgaataaaaaaggtgggtttttctaatgtatatgttgggagggatatgagtatttgtatgttacctcctgctagaaattgtatgtgaccctgttgtatcctagtactcgtggtgatgctcttggatttcacacttgaattctagtaaccctttcaccgccaactgtcttaaagccggctgtcagtttgatagttcaactgctatatttgtcagtccaagctttatttcccttgaaacaatctgttgtgtggataaaaaatggaatttaccggaaaaa

SEQ ID NO: 3238 - DNA, 752 bp, Gossypium hirsutum
  Clone ID: GOSHI-09MAY01-C11112_4
ccgggcaccacgcgtcgcccacgcgtccgccacgcgtccggttcttggtctgcagatggagctaagcgaagagaaatgaaagacaatccagtacgccagcaggagcttgctgcctacttcactcactgcaccttcaattaccacacctaagacttgccctgctgaatgcaatgactgtctgctacaaggcaaagaacatggctacagcaggtaactttgcccggcgactgctagaaacaaaccccacaaatgagaatcaagcgaagacagccaggcaagtgcttcaagctgctgagaggaacatgacagatgcttctcagctgaactatgatttcagaaatccatttgtgacatggggggcaacttatgtgcctatttaccgagggcagaaggatgtatcgtgcccatattggactagtcgctttgtgcctagccaggaagggcaattgggtacagtgtgtgaccttgcattggtcggggcggatgcatcagggttgctgtgttctgcttcacagatacgatgaggcaacaaaagttggatccgcttttgaacttaatcctgctgatccttttagatgcaaaacccatcctcagcgatcaactcatatctgcagtttaaaaggtcagagtttactttagaaattattgagaactgaaattaatttgtttgtgctatttccttctgttttggttttttccggcttaataaagttcattatgattttcgtatgtaagaatgaatttggatttac

SEQ ID NO: 3239 - DNA, 1172 bp, Gossypium hirsutum
  Clone ID: GOSHI-09MAY01-C11112_3
ttggggtgaaaacttgtatggtcgatgctgatggcttgcagaacggtgatgttactgcaattttcgagggtgcggaagtggctgaaggcagtgaagaggagggtggttgggaccttgaagatttggaacttccccctgaggcagacaccccgaaggtttctggcaatgcccgttctatttttgtggcaccaactcccggtatgcctgtaagtcagatttgggttcagaaatcatctcttgctgctgaacatgcagcagctggcaattttgatacagcaatgcgtttgctgagcagacaacttggcataagaaacttttctcctttgaaatccttgtttcttgatcttcacactggcagccatagctatcttcgtgcattctcatccgctccagttgtgtcgttggcagttgagaggggatggagtgagtctgctagtcctaatgttaggtgtccgcccgccctggtattcaatttctctcagttggatgaaaagctgaaggctggttacaaggccacaacagctggaaaatttactgaggcactccggctcttcctcagcattcttcatactattccgttgattgttgtggagtcaaggagggaagttgatgaggtcaaggagctaattattatcgccaaggagtatgttcttggtctgcagatggagcttaagcgtagagaattgaaagacaatccagtacgccagcaggagcttgctgcctacttcacccactgcaaccttcaactgcctcacctcagacttgctctgctgaatgcaatgaccatctgctataaggctaagaaccttgctacagcaggtaactttgcccggcgactactagaaacaaaccccacaaatgagaatcaagcaaagacagcaagacaagtgctccaagctgcagagaggaagatgacagatgcctctcagctgaactatgacttcagaaacccattcgtgacttgtggggcaacttatgtgccaatttaccgaggacagatggatgtatcctgcccatattgcactgctcgcttcgtccctagccgggatgggcaattgtgtgctgtatgtgatatcgctgctgtcggtgcagatgcatcaggactgctctgttctccttcacatattcgcaatcaaattcgatgattgcgctacttttgtctgagtcttgtt

SEQ ID NO: 3240 - DNA, 934 bp, Gossypium hirsutum
  Clone ID: GOSHI-09MAY01-C11112_2
cgcctggggcaccgccgggcaattatgggcgggacccacgcgtccgcgaagagagatgaaagacaatccagttcgccggggggagcttgctgcctacttcacccactgcaaccttcaactgcctcacctcagacttgctctgctgaatccaatgaccatctgctataaggctaagaaccttgctacagcaggtaactttgcccggcgactactagaaacaaaccccacaaatgagaatcaagcaaagacagcatggacaagtgctccaagctgcagagaggaagatgacagatgcctctcagctgaactatgacttcaggaacccttttgtgacatgcggggcaacttacgtcccaatttaccgaggacagaaagatgtatcttgcccttactgtactactcgctttgtgcctacccaggaaggtcaattgtgtacaatctgtgatctcgctgtcattggagcagacgcatcaggtttgctctgttctccttctcaaattcgatgattaagctctgcatactcgaggcatgtttccttcaatcttgctcaacctttgagcagccagcggaaccaatcacatcgatcgaattcttatcctcaggtaaaaaggtatgtgcttgatgaaatctctgatctcaagttcattacttttcaccatttacttttatttgccttttgttttcattataatattcacatgtattttaaacaagttgggaattttggatttttggctattcttttttctttcatgggctgaaaatagtcatagggccctgtttaaaatagataataatggtcatatctcatatgtaggacaattacatgacattgtgtgtcaaatttgcttacttccctttggtacctcttttttttctagtttccattgcttggtgttttttcctattaagtacttgaacctttttttgtgtt

SEQ ID NO: 3241 - DNA, 996 bp, Gossypium hirsutum
  Clone ID: GOSHI-09MAY01-C11112_1
cggaccggtccgttttcccggttttctacgcttctatcgcgtccgctgcgccagtggtgtccttggcagttgacagcggatggagtgagtctgctagtcctaatgtgaggggtccacccgctctcgtattcaacttttctcagctggacgaaaagctgaaggctgggtacaaggccacaacagatggaaaatttaccgaggctcttcggcttttcctcaacattcttcatacaattccattgattgttgtggagtcaaggagggaagttgatgaagtcaaagagttaattatcatcgccaaggagtatgttcttggtctgcagatggagcttaagcgtagagaattgaaagacaatccggtacgccagcaggagcttgctgcctacttcacccattgcaaccttcaattacctcatctcagacttgccctgcgaaatgcaatgaccatctgttacaaggcaaaaaacctggctacagcagctaactttgccaggcgtcttctagaaacaaaccctaacgagaaccatgcgaaggcagccaggcaagtactccaagcttcagagaggaatatgacagatgcatctcagttaaactacgatttcaggaacccttttgtgacatgcggggcaacttacgtcccgatttaccgaggacagaaagatgtatcttgcccttactgtactactcgcttcgtgcctacccaggagggtcaattgtgtacaatctgtgatctcgcagtcatcggagcagacgcatcaggtttgctctgttctccttctcaaattcgataattttgaactacataatcgaggcttgtttctttaatcttgctcaacctttgagcaactgccgtaccagtcacgtcggtagtcagagggcccttgtttaaaataaataatggtcatatctcatatataggacaattacatgttaatgtgtgtctaatttgctcacttctctttgataccttttttttttctttttttcaaggttcct

SEQ ID NO: 3242 - DNA, 593 bp, Gossypium hirsutum
  Clone ID: uC-gsronu33B154f02b2
gctatcttattgaaaaatttgtgagcatgggattcagggctgaccatattgcgagtgtgattcagaggatggaggagagtgggcaagcggtggattttaatgccgtgctggataggctgaatgtgcaatcctctggtggtactcagagagggggatggtaaatgccactgcttagttgaatcgaccttgaatggtacttgaataaaaaaggtggttttatttctaatgtatatgttgggagggatatgagtatttgtatgatgcctatcaagcaaagacagctggacacgtgctgcatgctgaggactgggagatgacagatgcctgtcatctgagctatgactacctgagcccatcctggacttgtggggcaacttatgtgccaattgacctgtgccagatgtaccaattctgagcctgttgcactgctcgcttcgtccctagccgggatgggcaattgtgggctgtatgtgatttcgctgttcgcggggcagatgcatcatgactgctctgttctccttacaaaatcgcactcaaatttgatgattgcgctacttttgtctgagtcttgcttcaggcttcctctaccttac

SEQ ID NO: 3243 - DNA, 269 bp, Gossypium hirsutum
  unsure (1)..(269): unsure at all n locations
  Clone ID: LIB3145-052-Q1-K1-E4
ggattcaggggtgaccatattgcgagtgtgattcanaggatggaggagagtgggcaggcggtggattttaatgccgtgctggataggctgaatgtgcaatcctctgggggtactcagagaaggggaatggaaatgccactgcttgggtgaatcgaccttgaatggtacttgaataaaaaggtgggttnttctatgtatatgtgggaggaatgagatttgatgtacctctgctaaaatgatgtgacctgtgatctagactcggggatgct

SEQ ID NO: 3244 - DNA, 1635 bp, Gossypium hirsutum
  Clone ID: GOSHI-09MAY01-C11092_1
cgggtggaatgccctcgcgtccgcccacgcgtacgcccacgcgtccgagcaaataaaactttgaattattcatacaaaacaatgaaaacccacttttttcccctggtttttctcctcattttttccttagcccaaggtctgaaccccaaatgtgccatccaagaccatggctcaaacctgcaagtgttccatgtttacagtccatgctcacccttcaaaccctcaaaaccactctcatgggaagaggatgtgctgcaaacgctagccaaggaccaagccagggtgcagtttttgtccagcctggtggctaagaaatctgtggtgcctatagcttcaggcaggcagattgtgcaaagcccaacttacattgtgaaggccaatattggaaccccacctcagcccatgcttatggccatggatacaagcagtgatgctgcttgggtgccttgcactggctgcattggctgctcttctactgcttttgactttgctaaatccaccactttcaagacccttggctgccaagctgctcaatgcaagcaggtaccaaaccccacttgcggcggaagcgcgtgcgcattcaacatgacctacggtggctcaaccatagccggtaacctatcacaggacaccataaccttagccaccgacccaatcccaaactacactttcggttgcctccaaaagacagcaggcagctcagtgccaccacaaggtgtattgggcttgggccggggcccattatccctcctttcccaatcccaaaatttgtaccaatcaacattttcatattgcttgcctagcattaggtcacctaacttttctgggtcattgagacttggaccaagtgggcaacccgtgaggatcaaatacaccccgttgctcaagaaccctaggaggccctcactttattacgtcaatttgattggaattagggttggaagaaggattgttgatatcccaccaagtgccattgctttcaatccttccactggtgctggcaccattattgattctggtaccgtcttcacccggctagttgagccagcctatgtagctgtccgggacgcattccggagacgagtaagggtggcgaacgtgacatctctgggtgggttcgacacatgttactcggtcccaatcaatgcaccgaccataacatttatgttttcgggcatgaacgtgacattgccacaagagaacctactgctccacagcacagcaggcagcatcacatgtcttgcgatggcatcggcaccagcgctgaatgtgatcgccaatatgcagcagcagaaccatagggtggttttcgatgtgccaaattcgaggatgggggtcgcccgtgagcgatgttcgtaaaaagtgtggggtctttttcttctaacttttgggaaacagtgttggtgttgattaaaagcagaatatatctgattaataatgaaagtcaaatttttgtagttatatattactttgtactggaggctctggtcctagtcacgggctttcccttacttttattatgtcttgtttttaggttttaatatccaaaatttcgaatcctgttactattattataatcgtgctttaacacaatcataattttggttcaatcatgttataaaaaattagttttgt

SEQ ID NO: 3245 - DNA, 567 bp, Gossypium hirsutum
  Clone ID: LIB3829-019-Q6-K6-E7
aaacgttgaattattacacgaaacatgaaaacccacttttttcccctggttttcctcctcattttttttagcccaaggtctgaaccccaaatgtgacatccaagaccatggctcaaacctgcaagtgttccatgtttacagtccatgctcacccttgaaaccctcaaaaccactctcatgggaagaggatgtgctgcaaacgctagccaaggaccaagccagggtgcagtttttgtccagcctcgtggctaagaaatctgtggtgcctatagcttcaggcaggcagattgtgcaaagtccaacttacattgtgaaggccaatattggaaccccacctcaaaccatgcttatggccatggatacaagcagtgatgctgcttgggtgccttgcactggctgcattggctgctcttctactgcttttgactttgctaaatccaccactttcaagacccttggctgtcaagctgctcaatgcaagcaggtaattaagctgccaagctttcatatattacctgcttagccacccgctttggctgggtaagtaattgtatttcatcataaagt

SEQ ID NO: 3246 - DNA, 531 bp, Gossypium hirsutum
  Clone ID: uC-gsflnu33B111h06b1
ttttatggcatcggcaccagcgctgaatgtgatcgccaatatgcagcagcagaaccatagggtggttttcgatgtgccaaattcgaggatgggggtcgcccgtgagcgatgttcgtaaaaagtgtggggtctttttcttctaacttttgggaaacagtgttggtgttgattaaaagcagaatatatctgattaataatgaaagtaaaatttttgtagttatatattactttgtactggaggctggtcctagtcacgggctttcccttacttttattatgtcttgtttttaggttttaatatccaaattttcgaattctgtttctattattaaaaaaaaaaaaaaaaaaaaaaataaaagtaaaaaattaataaaataaacataataaaaaagtagaataaaaactataaaaactatatacttaattgcaagtatggtcatataactattaaaaaactccattgattaacggggggggctcttttagggatccaatttattccccgggtggggataaatttttttttttggg

SEQ ID NO: 3247 - DNA, 687 bp, Gossypium hirsutum
  Clone ID: uC-gsronu33B042a08b1
tgtttctcaagaaccctaggagaccctcactttattacgtcaatttgattggaattagggttggaagaaggattgttgatatcccaccaagtgccattgctttcaatccttccactggtgctggcaccattattgattctggtactgtcttcacccggctagttgaaccagcctatgtagctgtccgtgacgcattccgtagactagtatgggtggcgaacgtgacatctctggttgggtttcgaccacatgtttcttggtccctatcaatgcttcctccctttcatttttttttttgttcctgtaactctacttcgcccctagtgaacccttctgctccttagccctatatgttttttctctgttttctttatttcctgttccctatttcttattatactctaatttttcttctttcttctcacttttttttttttttcttcttctcattttattcttttttttttcctttcatctattttctctccttttttatatctcttccttctatattttcttttattattctccattttatttcttcctttatttttttatttttatatctcctttctctctctttttttctcttttaatctttcctactatatttctttttttttctcattttctcttttctcttttttttttccctattcttttctccctattttattatccttctct

SEQ ID NO: 3248 - DNA, 435 bp, Gossypium hirsutum
  unsure (1)..(435): unsure at all n locations
  Clone ID: LIB3493-038-P1-M1-E8
cttttacattactcgaatgcttttctttttctcttnagattttatttgcaggcccagctgccatttccagcttctttttttgttagagacgtttcctgttggagcttaaatcactgcgttattcggatcggcgaaagtttcattcttccagaccatactcaccctgcacaccctaaccacctcgctcatacgaaaacggtgttcgttaaacgctagccaacgaccaagccagggtgcaacttttgtacagccctcatgctaaaaaatctgcggtgcctatagctttatgcaggcagagtgtgcaaagtccaacttacattgtgaaggccaatattggaaccccacctcataccatgcttatggccctggatacaagcagtgatgcttcttgggtgccttgcactggctgcattggctgctcttctactgcttttg

SEQ ID NO: 3249 - DNA, 128 bp, Gossypium hirsutum
  Clone ID: uC-gsronu33B039h08b1
atcccgctgctcaagaaccctaggagaccctcactttattacgtcaatttgattggaattagggctggaagatgcatagcacggttatgttcaaaatgcagtttccttgcatctagagatgatctacc

SEQ ID NO: 3250 - DNA, 898 bp, Gossypium hirsutum
  Clone ID: GOSHI-09MAY01-C11042_1
gaagcacttttctattgtggtgttgccatttttcttctgttaattgatcgtctaaggaggcctactggactagattctacagcagaaaccttggcctctcacttaggtcaacgcatctcttctgttgctattcttgtgcttagtctcataactcccatggtgacaatgggtctagtctggccctggactggtcccgcagcatctgctactctcgccccttacctggttggtattgttgtccagtttgcctttgagcagtatgcaagatatcagaagtcaccttcatggcctgtcatcccgataattttccaagtttacagattgcatcagctgaatagagctgctcaactagtgacagccctgtcattcacagtgaaaggtgctgaaatgactacatacaacatggcaataaacagctctttgggaacacttttgaatgtactccagtgccttggggttatctgcatttggtcactctcaagtttcctcatgaggttctacccttccaccaccaggattacatagcggggaagcatttcatgttcagaaggttggtgaaactgtcagtacatgttatttttcgagaagactgcatttgatcttactaaatgtaattaaaaatatattggacctggcatatgctgtttggttacgctctgctgtgaatttttcaagcatatcaaaaagcttccttaagcatcttggaacacaggttttccatgctgaagagagccaaagcagttaagatttctatgccgggacctaatctgacaattaaagcagtaagcaacgttagaattttatttatttatttatgagcatgaaatcccaactttgtattttgatattttccccttatgcatagtcgagatatggcaagttaaccttgaagggtttc

SEQ ID NO: 3251 - DNA, 402 bp, Gossypium hirsutum
  Clone ID: GOSHI-09MAY01-C11012_6
cggacgcgtggggccggcagaagcagagagcctacgcttaaatctcaagcaatgacattcaagcgtaggaatggtggccgcaacaagcacggccgtggccacgtcaagttcatccgctgctctaactgtggaaaatgctgtcccaaggataagtcgatcaagagatttcttgtgaggaacattgtggagcaagctgctgtcagagatgtccaggaagctggcgtctatgacacctacactctgcctaagctgtacgtgaagatgcaatactgtgtttcgtgtgcgaatccactctcatgtttgtgagggtacgatcccgtaccaacaggagggaccgtgaccctcctcagcgcttcattagacgcaggatgacatgccaaagcctggacagcctggtcaagc

SEQ ID NO: 3252 - DNA, 639 bp, Gossypium hirsutum
  Clone ID: GOSHI-09MAY01-C11012_4
ctcgtcactcggcggctgtagctgagagcctcaacatctacactgtatcctcgagccatgactttcaagcgtgggaatggtggccgcaacaaacatggccgtggccacgtgaagttcatccgctgctctaactgtggcaaatgctgccctaaggataagtcgatcaaaaggtttcttgtgaggaacattgtggagcaagctgctgttagggatgtccaggaagcttgcgtctatgacacctacactctgcctaagctttatgtgaagatgcaatactgtgtttcatgtgctatccactcccacgttgtgagggtccggtctcgcaccgacaggaggaaccgtgacccacctcaacgcttcatcaggcgcagggatgatatgccaaagcctggtcagcctggtcaagctcctcgtccaggtgttgctgttcctgcccgtccttaaggcccccaaagttaaagataaatttctatttttgtatttgctttgaaatgggctgctttaattttgagaaaatttggatttgtgtagaaggtttttgattagttaaaagtttgatcgcatttgacaagctatgaatggttgagaatactgggtggaatctcataatttctatttagttgcttattttatccccca

SEQ ID NO: 3253 - DNA, 766 bp, Gossypium hirsutum
  Clone ID: GOSHI-09MAY01-C11012_3
gtccgcccacgcgtccccagaaaccctcgttattaatcggcggaagcagatagcctctagccatgactttcaagcgtaggaatggtggccgcaacaagcatggccgtggccatgtcaaattcatccgctgttctaactgtggcaaatgctgccccaaggataagtcaattaagaggtttcttgtgaggaacattgtggaacaagctgctgttagagatgtccaagaagcctgcgtttatgacacttatactttgcctaagctgtatgttaagatgcaatactgtgtctcgtgtgcgatccactcccacgttgtgagagtccgatcccgcaccgataggaggaaacgtgatccacccgcccgcttcatcagacgcagggatgatatgccaaagcctggtcagcctggtcaagcaccacgtccaggtgttgcagttcctgctcgtgcttaaggcctgtgaaagcttttaagataaattttctatattcttattttggttttaaatggttgcattaattttaagaacatggagacatgtaggaaggttttgattgcttcaaagtttaataccatttgatacctttttattgttattttggaagccttgaatggttgagatttgagaatacttgttcataaaactgttgcttttgcttgtacttatttctccttattttgcataacatttaccaaaatttatttaatatattttttcattaattttatttccaaaaaaaaaaaacctgcaggcccggggattcccttgtt

SEQ ID NO: 3254 - DNA, 707 bp, Gossypium hirsutum
  Clone ID: GOSHI-09MAY01-C11012_2
ttcacgaccctagttgttagcgagcagaagcaaagagcctccaaaaaacacttcaaccctctagccatgacattcaagcgtaggaatggtggccgaaacaaacatggccgtggccatgtcaagttcatccgctgctctaactgcggtaaatgttgccctaaggataagtcaatcaagaggtttcttgtgaggaacatcgtggagcaagctgctgtcagggatgtccaggaagcctgcgtctatgacacgtacactctgcccaagctgtatgtgaagatgcaatactgtgtttcatgtgcgatccattcccacgttgtgagggtccgatcccgcactgacaggaggaaacgtgacccgcctcagcgcttcattagacgcagggatgatatgccaaagcccggtcagcctggtcaggctcctcgtcctggtgttgcggctcctgctcgtgcataaggcttttgaagtttaagatgaatttgtatttcgtgttttgctttgagatatggttgcttgaattttgagaacttggatcatgtagggagtttttttttattgttttaaagttcgatactttgttaaatcttggaaggtattgagtggttgggaatacttgttggaacttggaacttcataatttctgtttagttgcatatgattatccaaaacgaaccccgcgcttggaggggggttttctataattgtatgtc

SEQ ID NO: 3255 - DNA, 684 bp, Gossypium hirsutum
  Clone ID: GOSHI-09MAY01-C11012_1
tcgcccattcgtccgcccacgcgtccggaaccctcgtcactcggcggcagaagcagagagcctcaacatctacactttatcctcaaaccatgactttcaagcgtaggaatggtggccgcaacaaacatggccgtggccacgtgaagttcatccgctgctctaactgtggcaaatgctgccctaaggataagtcgatcaaaaggtttcttgtgaggaacattgtggagcaagctgctgttagggatgtccaggaagcttgcgtctatgacacctacactctgcctaagctgtacgtgaagatgcaatcactgcgtttcgtgtgctgatccactcccacttgttgtgagggttcctaccttgcctcgacaggatgaaccctggttcctatttaactccttattagtttcccgtattaatttccctcacatttttattttttctatacgtcttctttttcgtttttacttcccctttactatcttttatataccctaattcatctcaataatttcctctatatttttatccatctacaatttctctttataaattcttttctcttttttttttttttactttctattatttattttaatttatattttttcagttattcctcattatttgctccttctcaaatttcttccctttattatttttttatcatttattctctttctcttt

SEQ ID NO: 3256 - DNA, 594 bp, Gossypium hirsutum
  unsure (1)..(594): unsure at all n locations
  Clone ID: LIB3829-022-Q6-K6-C2
gccatgaacttatcaagncgtagggagatgggtggcccgcaacaaggcatggggcgggggcgcatgtcnnaaattcatcccgctgttcttaaccctgtggcaaatgccctgccccaaggnnataagtcatttttattaggnntttcttgnntgaggaacaattgtgtgtggggaggggtgggtgttnnagagatgtccaagnaagcccctgcgtttattgaacacttatacatttagcctacagctgtnnatgttaagaatgcaatnnactgtgtctcgtgtgccgatcccactcccacnngttgtgagagtcccgatcccgcaccccgataggaggaaacgtnngatccacccgcccgcttcattcagacgcaggngatgatatgnccaaagcctggntcagcctggtcaagcaccacgtccaggtgttgcagttcctgctcgtgcttaaggcctgtgaaagcttttaagataaattttctatattcttattttggttttaaatggctgcattaattttaagaacatggagacatgtaggaagggtttgattgcttcacagcttactaccatttgatacctttttattgttat

SEQ ID NO: 3257 - DNA, 1378 bp, Gossypium hirsutum
  Clone ID: GOSHI-09MAY01-C11002_1
cgtctcttccacgcccgtccgggccaaatcagtctgacatgatacctcctaccttgcagcttcctggtagtaggttgaaaactacacttagtgctcgggatatggatttagacatggaactactggggctggaatgtcgtcgccgccgccagcagcagcaacagttaattgatgagatatctggcctttcctccccaaccagctggaccgacgcgtcggcggtcgcggccgcgggcgcccgggctggtgaactaaatagatttggaggggtgaagccaactaacctcgatgatatttttggctctcttgatcctagtattatgccacaaatacaaggactctcgcttgatgctgcagcatctcagctgcaatctcccactggagttcatacgcgccagaatattaaccagcagctcagggctagctacccgaccaacctaccatcctctccagtgagggcttcttcatcctttgggatcgatccatctgggccgtctgcagctgcagttttaagttcaaggtcatctgcctttgcaaagcgtagccagagctttatcgagcgtactgctgtaaatcgtcattcagggctgtcttcgccagcttcttctgcaagtgcaatgccttccaacctatcagattggggttcccccgatggcaaactagactggggcatacagggagaagagctaaacaaactaagaaaatctgcttccttcgggttccggagcagtggcagcaatttgggaaatgcccctcgttctatatcatcaactacagatgagcctgatgtgtcttgggtccagtctctggtggtggaccctccttctgccgggcagttaagttttgaggaggagcagtgtcatcgtaaccctgggggcgcggagctgcttcctgcttgggtggagcaaatatacatggaccagaaacagatggtggcctgaaagcacaagcctatcccccccattatctcctaagttaacttttaactagtttttgtatttttgcccatttctttgaatttttatcaaatactcagcatctgtaattggaatgaaatggcccaggagagaatacaaggtgagcagaagaaaaaggtttctgccaaacctactctgaggttctcaagaataatgtctgttattcgtttttgtcccaatattgggttttcttggataggtcggtctaaagcaggagaggatagttaggccaatggtcaacacttcaattagtcaagtttcagggttacattcatttcaatttgcaaagggaagcaagcgcagcactgattcttttagtaattttcttttggtgggggcttgttcatattttatgtattaaaaactactgcattatttaatttatatatctattttctgtt

SEQ ID NO: 3258 - DNA, 419 bp, Gossypium hirsutum
  Clone ID: uC-gsflnu33B100a08b1
tccatcgcgtccgggccaaatcagtctaacatcataccttctaccttgcagcttcctggtagtaggctgaaaactacacttagtgctcgggatatggatttagacatggaactactggggctggaatgtcgtcgccgccgccagcagcagcaacagttaattgatgagatatctggcctttcctccccaaccagctggaacaattctacagcattttctgccgctggtgaccgaactggtgaactaaatagatttggaggggtgaagccaactaacctcgatgatatttttggatctcttgatcctagtattatgccacaaatacaaggactctcgcttgatgctgcagcatctcagctgcaatctcccactggagttcatacgcgccagaatattaaccagcagctcagggctagcta

SEQ ID NO: 3259 - DNA, 464 bp, Gossypium hirsutum
  Clone ID: LIB3189-004-P1-K1-B11
gccggatatgcaagggaatttcttcaactcgatgaggatgtttctaaaagatgctgaagaggagattgctaagatcaaggcatatgaaagaaaagctttgttgcaagtaaaagaagttactgaatattttcatgggaatgcaacaaaggaagaagctcatcctttcagaatcttcatgattgtgaaagatttcctttcaatattggatcatgtctgtaaggaagtaggccaaatgcaggatagaacaatggtgggttccgccagatcctttcggatatctgcaactgcttcactaccagtccttagcaggtataatgtgggacaagacgcaagttcagatgacgaaagcttgtctccgtgaagctgcacgaatacgggtcctaagacttactcccacagttggacccttttccagctaaaccaacagttaggatgtctcatttaccatctcaagcatcatgtca

SEQ ID NO: 3260 - DNA, 385 bp, Gossypium hirsutum
  Clone ID: LIB3166-038-P1-K1-B3
gattgctaagataaaggatgatgaaagaaaagctttattgcttgtgaaagaagttactgaatattttcatgggaatgcaacaaaggaagaagctcatcccttaagaatcttcatgattgtgagggatttcctgtcaatattggatcatgtctgcaaagaagtggggctattgcaggatagaacaatggtgggtgctgctagatcctttcggatatctgcaacggcttcactgccagttcttagcaggtacaatgtgagacaagatggaagttcagatgatgaaagcttggctccttgaagttgtgtgaatacaggtcctaagaaaactcaaacctcggtttttttccaaccaaaccaacatctaagatacttctcttttccatta

SEQ ID NO: 3261 - DNA, 450 bp, Gossypium hirsutum
  Clone ID: GOSHI-09MAY01-C11302_1
gcacccagtgaactgaaaaaagaaaacccggaattttaaagacaaaaaaatgccttcttctccgttgattcttctctcaaaaaccatgattttcccagaccaaaaatcaaaccttgaagacctcaagctttcagtttccgatcttcctatgctatcttgccattacattcaaaaaggttgcctctttactcgcccttcaatccccattaattcactgatttcccttctcaaacaatccttgtccaagacgctgtcgtttttccctcctctcgccggccgtttttacacagacccaaatggttacatttacattacttgtaacgacgccggcgttgaattccaccatgccaaatgtgacaccaagttcatccgtgacgtcatcggtccggttcatgtaccgcagctggttaaagagtttttcacctttgataaaacggtgaggtatcgagg

SEQ ID NO: 3262 - DNA, 540 bp, Gossypium hirsutum
  Clone ID: GOSHI-09MAY01-C11322_6
tgaagctgtattggggaattgcagctgatggctctgtggtcatatctgatgatttagatgtcattaaagaagggtgtgccaaatcctttgctcctttcccaactggattcatgttccacagtgaaggggggctgatgagctttgagcatccaatgaacaaaatcagggcaatgccaagggtagacagtgaaggagtgatttgtggtgctaatttcaaggttgatgtttacactagagttaatagcattccacgacccgcccgtccgaccaattggactgatcactgggattcccattaaagagagagagaagcagaattaaacataagaaagatgccatggttatgttgttccaaagctctagacaaacactagggtttcttctgtttttcatcctagttgttggttttccctttgggtacttttctatgttatatgttggtggtgttggtttaatttctttgggattgtaaataatgagcaaataacatacttaaacttattataatttcaatcttaattccaatttattaacgttgta

SEQ ID NO: 3263 - DNA, 1119 bp, Gossypium hirsutum
  Clone ID: GOSHI-09MAY01-C11322_3
cccatctctacttccatttcatctgccatcaatttgctctgaagatcatgttggctatttttcacaaggcatttgctaatccaccagaggagctgaatagtccagcttctcataaatctaccaagaagcctaaacagcctgaagaaaccctaaatgatttcctatctcatcaccctcacaacactttctccatgagctttggcaacgctgctgttttggcttatgtccgccatgaacgtgctgcttcagttcatcagaggttgttttgtgggtttgatgacatatactgcctcttcttagggagcttgaacaatctatttatgctgaatagacaatatggtctttccaaagggagcaatgaggcgatgtttgtgattgaagcatataggacactaagggataggggtccataccctgctgatcaggttgttaaggatcttgaaggaagctttgcctttgtgatctatgacagcaagactggaaccgtgtttgctgcactggggtctgatggtggagtgaagctgtattgggggattgcagctgatggctctgtggtcatatctgatgatttagatgtcattaaagaagggtgtgccaaatcctttgctcctttcccaactggattcatgttccacagtgaaggggggctgatgagctttgagcatccaatgaacaaaatcagggcaatgccgagggtagacagtgaaggagtgatttgtggtgctaatttcaaggttgatgtttacagtagagttaatagcattccacgagtgggcagtgcaaccaattggactgatcactgggattcccattaattagtatttaaaaagaggagagagaagcaaaattaaacataagagagatgccatgaatatgctctagacaaacaccggggtttcttctgtttttcatcctagttgttggtttttcttttggtacttttctatgttatatgttggttgtgttggtttaatttctttgggatattatagtttcaatcttaattccaatttataaatgttgtacccaatatccaaatcaatgcgtttgtgatccaaactgtcctttggtcccaatacatattatgattttcaaattaaacattatcattatttcaca

SEQ ID NO: 3264 - DNA, 648 bp, Gossypium hirsutum
  Clone ID: GOSHI-09MAY01-C11322_2
cggccgcgtgggcggacgcgtgggttcacaccctcccccccgaaattccattccattctattgaatatcttccaatcaatatctctctttcttccatcacaataaaaagtttctctctgttaagaattcatgtcggaccagggtaaaccattgccgaaattcggtgaatgggatgtcaacgatcctgcatcagccgatggatttacggtgatctttaacaaggcaagggatgagaagaaaacaggtggcaaacccgagtcactggaaaaagctgacactcatggtaagcctggagccgaccccaacaaaccccaatccaaaaaatggctttgctgcgttcaagccccgcaggcggaatcttgaagaactcatgccgatataagagcttccactgcatgatgaagcccccaccttatatcctaaacaagatagggatgaatggggggcatttgataaagctcttttgggattggatttgatttttggttgtaaaaatttatgttgtggtgagataaaagggagcaaagaagaaatgcacttactgtatttatatttgtatgtaatgatttggtaggctgttatgaaaagtttgggttatcatttttcttctttgtgattgccttatagcttgtattataaaagctgtgt

SEQ ID NO: 3265 - DNA, 666 bp, Gossypium hirsutum
  Clone ID: GOSHI-09MAY01-C11322_1
cccagcgtcccccccccggcaaaaataccttttttttcagtctgctctccctaaaaagcttccattttttttcctttttaaaattcctctatttctctctttcttcacaacaacaacaaaaaagtttcaatccaatctcaattattcatgtcggaggacaagggtcggccattgccgaaatttggtgaatgggatgtcaatgatcctgcatcggctgaagggtttaccgtgatttttaacaaggcaagggatgagaagaaaacaggtagcaaacctgagtcaccagcaaaagctgatgctcacggtaaacctggaccggatcctagcaaaccccagagtaagaaatggctttgctgcgttcaagcaccaccggctgaatcttgatgaagtccggcacgtatacgagctttcacaagtacattcaagcccctcaccatggattcttaaacaaagataagatttaattatggtgggagggggagaaaaaaaagataaacacacatactgtatctatatgtactaatttggtgggttattatattattagaagctaagctgagtttatttgttgttgtcatttgccttgttcatgttataagctgtaaagcctgtattgacattcctttcttctcttctcttctcttctttccacacacatgtatttat

SEQ ID NO: 3266 - DNA, 750 bp, Gossypium hirsutum
  unsure (1)..(750): unsure at all n locations
  Clone ID: AI055094.1
gaatagtccagcttctcataaatctactaagaagcctaaacagcctgaagaaaccctaaatgatttcctatctcatcaccctcacaacactttctccatgagctttggcaacgctgctgttttggcttatgtccgccatgaacgtgctgcttcagttcatcagaggttgttttgtgggtttgatgacatatactgccttttcttagggagcttgaacaatctatttatgctgaatagacagtatgagtctttccaaagggagcaatgggctgatgtttgtgattgaagcatataggacactaaaggaanngggtccatacnctgctgatcanggttgtanagggatccttgaaagaaagctttgcctttggttgaatctatggacaggcaagactgggactccggtngtttggctgcacttgggagtctggatagggtggaagtganagctggtattgggggggattgcaggctgatgggctctggtggtcatatcctgatgaattaagatgtcattaaagaagggtgtgccaaatcctttgctnctttccaactggatcatggtcacaggaaggggggctatgagcttgagcancaatgaacaaatcaggcattgccgaggtaacagagtaagatgaatggggctnatttcaggggagttacaggaggattgatatccgtgtgggagcgacaatgggcggaccggagccattattgttgtaaaggagggaccattgccttgaaggcggg

SEQ ID NO: 3267 - DNA, 850 bp, Gossypium hirsutum
  Clone ID: AI054775.1
gctttgaagatcatgttggctatttttcacaaggcatttgctaatccaccagaggagctgaatagtccagcttctcataaatctactaagaagcctaaacagcctgaagaaaccctaaatgatttcctatctcatcaccctcacaacacttttttcatgagctttggcaacgctgctgttttggcttatgtccgccatgaacgtgctgcttcagttcatcagaggttgttttgtgggtttgatgacatatactgccttttcttagggagcttgaacaatctatttatgctgaatagacagtatggtctttccaaagggagcaatgaggcgatgtttgtgattgaagcatataggacactaagggataggggtccataccctgctgatcaggttgttaaggatcttgaaggaagctctgcctttgtgatctatgacagcaagactggaaccgtgtatgctgcacttgggtctgatggtggaattgaaactgtttgtgggattgcagctgatggctttgtggtcatttctggtgaattagattgtcttatataaggtgtgcccaatgcattgctcctttgcaactggattatgattccattataagggtcttagagcttgatgatcatttatatattgtgaatgttaagttaacattaatgttgattgatatattataggtatttattctctgttgtaattaactttggtattctcgttgatatgccgtttctgtagtatttacagtaggtgtgtttagctattgtcatattattgttactatatatttcgattatgatatataatttacttattctttgatagtactctattattgctgtattatgtacag

SEQ ID NO: 3268 - DNA, 470 bp, Gossypium hirsutum
  Clone ID: LIB3189-024-P1-K1-F2
attagctctgaagatcatgttggctatttttcacaaggcattcgctaatccaccagaggagctgaagagtccagcttgtcataaatctaccaagaagcctaaacagcctgaagaaaccctaaatgatttcctatctcatgaccctcacaacactttgtccatgagctttggcaacgctgctgttttggcttatgtccggcatgaacgtgctgcttcagttcatcagaggttgtgtagagagcttgcactcatagtcagcctgtagccaacccgctcaaaccccaatccaaaagctggctttactagattgaagccccgcaggcagaatcttgaagaactcatgccgatataagagcttccactgcatgatgaagcgcccaccttatatcctaaacaagatagggatgaatggggggcatttgataaagctcttttgggattggatttgatttttggttgtaaaaatttat

SEQ ID NO: 3269 - DNA, 313 bp, Gossypium hirsutum
  unsure (1)..(313): unsure at all n locations
  Clone ID: LIB3272-021-P1-K1-E6
ccggcacgtatacgagctttcacaagtacattcaagcccctcaccatggattcttaaacaaagataagatttacttatggtgggatggggataaaaaagataaacacacatactgtatctatatgtactaatttggtgggttattgtattattagaagctgagtttatttgttggtgtcatttgtcttgttcatgttataagctgtaaagcttttattgacattcttttcttcatatcatacgagggattcgcgtgtttgtcnaatttttaattttttttaaaatttttataattttaatattttataatttt

SEQ ID NO: 3270 - DNA, 1442 bp, Gossypium hirsutum
  Clone ID: GOSHI-09MAY01-C12972_1
cccacgcgtccgtatacattaagctgactttcacatacatttccatcattcttttttcacactttttttatataattttgatagtataatatggagaaatggtatggggtttcagggctggtgttggttttgagtttgttctttggggttaaaggagaaccccaagtcccatgttacttcatttttggagattcattggtagataatgggaacaataatgaacttcgttcattggctagagctgattacttgccttatgggattgactttgctaatggaccgaccggccggttttcgaacggtcgaactacggtggatgtcatagctgaacttttggggtttgacgattacatccctccatactcaactgcaagtggtagacaaatactgggaggagttaactatgcatctgctgctgctggaatcagagaagaaactggacaacaactgggagctcggattagtttcagtgggcaagtcaaaaattaccaacaaacagttcaacaagtggtgaacgtgcttggagatgaagacagtgcagcaaattacttaaggcagtgtatttattcaattggattgggtagcaacgattaccttaacaactatttcatgcccctttactactcaaccagtagacaatatagtcccgaggaatatgccaattctctgattcaagagtacactgagcagcttcaggcattatacaactatggggcaaggaagtttgtgttgataggtttgggtcagatcggttgcagtccaaatgaattggctcaaaacagtggagatggtcgaacatgtgtggaaagaatcaatgctgccaataggattttcaataacaagcttaggggtcttgtcgatcaattcaataacgccaaatctgatgctaaattcgtctacattaatgcctacggaattttccaagacatcaccagcaaccctgcagcttacggttttaaggtgacaaatgcaggatgttgtggagtggggaggaacaatgggcaaataacatgcttgccattccaaacaccatgccagaacagggatgagtacttgttttgggatgcatttcatccaagtgaggctgccaatgtgatcattgggaggagatcctacagcgctcaatctcctaccgatgcttaccccattgatatccgccgtcttgctcagctctgaaactgaaagtcgacgaggtttttgatgggaaattattgatatttaattgaatcgttgtagaattctttctatatttgtgtcgttttgaattgtgtaacagcttacaatcataagtgttattgttctaagggaagtggcaagcaatatatatatatatgcacttttatatgtagctccaaatgatgagtgttgttctgtttggtaattgttgtaaagttttagtttgtatcatcactaataatgttaatggattgatgggttggttt

SEQ ID NO: 3271 - DNA, 609 bp, Gossypium hirsutum
  Clone ID: GOSHI-09MAY01-C12802_1
cccacgcgtccgagcgcctctgcctctgaagataggcctgatatggttaatatgtcaccggaagaagcaccatttgagcagaataatgaaggaagttcgctttataattttctttatcccgataaagatctcctcccagatgataaagaaatgaccatatttgatcatcttgaagagttacgacagaggatatttgtgtctgtattggctgttggagctgctatattgggatgctttgcattttcaaaagaactgatagtgtttcttgaagctcctgttaaagcacagggtgtacgatttctgcaactggctcctggagagtttttcttcacaactttaaaggtgtcgggatattgtggccttcttttaggaagccctgtaattctgtatgagatcatagcctctgttcttccaggcttaaccagagcagagagaaggtttctggggcctattgtgttgggctcctcagttcttttctatgctggtattgctttctcctacttggttctgactccagcagccttaaatttctttgtttcgtacgcggaaagggttgtggaatctttgtggttcattgatcaatactttgagcttgtactaatgctcatg

SEQ ID NO: 3272 - DNA, 624 bp, Gossypium hirsutum
  Clone ID: GOSHI-09MAY01-C12822_1
ttgtgatgatgatgagttcatggttctggcgtgtgtccgtttctgggactgcatgtccagtcagacactagttgatttcattcatgaccagctaaaatcggaaagcaagctttctgttgtttgtgagagggtacttgacaagtgcttagcaccatcaacagccaccggtgagggttgtgataatatgaccatgatcttggtgcagttcaagaaaccgatcaaatccacctcatccgcagaggagcaatcctcgaattccgaatccactgaaactgaaccaaagctagagggaaatgcagaaaagtagttgctgcaactgttgggggagccttggaggtgtcagatcctctgattgaagatttgacgaccctttggttcctcaaatattgtggtatgcatttgtagatgggttagagaaggaatgaattgacatatatatatatatatattatatgcaccaccacattatgacaaaatagcatgtacagaatgttttctgggtcatggatcttgtgttaaaagaatctttatgttgtattataccttttagatgaaggaccactttaaaagtcttacaaaaacatcttaaattaccttgaagagatgtgagaccctggttgcaat

SEQ ID NO: 3273 - DNA, 419 bp, Gossypium hirsutum
  Clone ID: LIB3145-015-Q1-K1-C11
cccacgcgtccgcccacgcgtccgataacacaaaggcgagagaatacattacaagaccgaggaggaaaaaaaaaaaagataaataaataataggagagccaaataaaaagagggatttgatagaattttcgttttcatttttattttataatttctattattatttttctgtttgtttggcgcaaagatttctatttacgcaacagctctcaagttggtcgtcgttttctctcgatctgttcttcacgttcgtcgatttatagctttctctcacgatttcctcgccctcgattattgttttttctcggtagattcttttgtctttttaatctcttctttaattcaaaacattgtttcttttttttttttaattccggggggttcaaaccctagaaaccgtgtggatttcgaatgctttt

SEQ ID NO: 3274 - DNA, 360 bp, Gossypium hirsutum
  Clone ID: LIB3166-053-P1-K1-H4
aaaaaataaaaagataaataaataatatgagagccaaataaaaagagggatttgatagagttttcgttttcatttttattttataatttctattattatttctgtttgtttggcgcaaagatttctattcacgcatcagctctcaagttggtcgtcgttttctctcgatctgttcttcacgttcgtcgagttatagctttctctcacgatttcctcgcccttgattattgttttctctcggttaaatttggaggggggaagatttcgtgagttcgaaaaatgggaggagttattttgaattattatcttttatttttccctgtaaggggtgagagcctttttttgtgaaaatttttttaa

SEQ ID NO: 3275 - DNA, 643 bp, Gossypium hirsutum
  Clone ID: GOSHI-09MAY01-C12512_1
cgacgtcgagtccaaatttgcatgtgtcttcttcatccttttcaggttctttggctagatggaggtcaccgtggaccttgacgttgttgcgaggatggatttacttgatttctttaaggaagaatgtgagcagagaggagccacagtcgtatatgctacccatatttttgatggtttggagacatgggcatcacatttggcttacatccaagatggtcaattgaagagatctgcgaagttaacagaaattaatgagttgaaaagctcagaaaatttgctctctgttgttgaagcctggcttcgctctgaaaccaagtgcgagaaaaagaaaccgtccaattcccctgcccaagtccagaagtcctcgccttttggtacttcgcctttcatgtcgtcgaggcacatggcatactaccgttgatctttctgaatccagctgtttttcaataatttttgaaggccaaaaccagatacacgagcggaaaactttctttctagtcatcttctattaacgtggagttggccattgtggatttatatacttgttagcttgcggttgcctgatggatggctacgtatattcctcgcctgcggcggcagtgttgaaaaatgaaaattgtgaaactgatgttctgtctttagc

SEQ ID NO: 3276 - DNA, 1013 bp, Gossypium hirsutum
  Clone ID: GOSHI-09MAY01-C12532_2
ccctcgcgtccgcagaagaacaaaaaaattcaacggccgaccgtttgtgtcgttccggagacgtttcacatctcatttcaccagatctcaactcttccttcgccgggtttatttgttcttccttgttttttggctgttttcaataaatttcttctatttttccatggctgctccacctgcaagagctcgagccgattacgactatctcataaagctccttttgatcggcgacagcggtgtgggtaagagttgccttcttttgcgtttttcggatggctcatttactacaagttttatcacaaccattggaatcgactttaagattaggactatagagcttgatggaaaaagaatcaaactgcaaatttgggatactgctgggcaagagcggtttcggactattacaactgcttactaccgtggagccatgggcattttgctcgtctatgatgtgactgatgagtcatctttcaataacattagaaactggattcgtaatattgaacagcatgcttcggacaatgtcaacaaaattctggtaagaagaagaaaaacagcaagtttaagcgcaaaagagaaggatccaaagagcttaaaagccccaataatggatataagaaagggattaggaaacacccacttagagttcctgggatgaggcctggtgaaaagttgttatatatgtaaagtaaagatcatattgccaagctttgccttcaaaaagctcaatgggagaagcatatgaatatgttgcccttgccgaaacgtggacacagtttaaagaactgccttgaagtaatggattaaagaacttgttcaactgtgaggagctggacattcgcttcaaaaatgtctcacctctcaaagggtggactaaattgctcatgttttgtctgtagggatctggactttgagcaagactgccccaaatactatggaattatcaagggggtgtggaaaattgcgtggagtacacattggcaagatgtcccataagcaagacattttttgtt

SEQ ID NO: 3277 - DNA, 1028 bp, Gossypium hirsutum
  Clone ID: GOSHI-09MAY01-C12532_1
cggacgcgtgggtttcttttcaattttcttttcctttttctctctttctctaaaagaaaggttttcttcaatggccgaccggtgctgacgtaccagaggcgcttccctcctcattcctctcatctcctttcaccagatccgggtttgttttcgataaatttcttctatttccatggctgctccacctgcaagagctcgagctgattacgactacctcatcaagctccttttaatcggcgacagcggtgtgggtaagagttgcctccttttgcgtttctcagatggctcatttactactagttttatcacgacaattggaattgactttaagataaggactatagagcttgatggaaaaaggatcaaactgcaaatttgggatactgctgggcaagagcggtttcgaacaattacaaccgcttactaccgtggagccatgggtattttgctcgtgtatgatgtgactgatgagtcatctttcaataacattagaaattggattcgtaatattgaacagcatgcttcggacaatgtcaacaagattctggttggcaataaggctgacatggatgaaagcaaaagggccgtccctacctcaaagggccaagctcttgctgatgaatatggcatcaagttctttgagactagtgcaaaaacaaacttaaatgttgaggaggttttcttttcaatagccagggacatcaagcaaagacttgctgacactgactcaaaggctgagccacaggcaatcaaaattaaccaacaagaccagggagttggggctgcggcagctgctcaaaaatcatcttgctgtggagcttgaacaaactacattgcggatgagatctgaagggtacattttcttctctatggtgccattttgatcctgggaaaactaatttgttacaactaatttgtttatattctcctgcatatcattattttacagctgctactgtctggtgtgaaatgttattagaccttgggattttgcaatattatttatatttgattattggtttaaaaag

SEQ ID NO: 3278 - DNA, 603 bp, Gossypium hirsutum
  unsure (1)..(603): unsure at all n locations
  Clone ID: AI731246.1
gccgaccggtgctgacgttccaaagacgcttttctcctcatttctctcatctcctttcatcagatctcactctttcttttccctgacccgggattgttaattttctcctttatttttgattgattcgataagtttcttctattaccatggctgctccacctgcaagagctcgagccgattacgactacctcataaagctccttttgatcggcgacagcggtgtgggtaagagttgcctccttttgcgtttttcagatggctcatttactacaagttttatcacaaccatcgggattgactttaagatcaggactatagagcttgatggcaaacggatcaaactccaaatttgggatactgctgggcaagagcggtttcgtacaattacaactgcttactaccgtggagctatgggtattttgcttgtttatgatgtgactgatgagtcatctttcaataacattagaaattggattcgttatattgaacaacatgcctctgataatgtcaaccaagttcttgttggttataaggttgacttgaataaanccaaaaggttgtccctactccaaagggcaanctctcgcttaagaatatggcttg

SEQ ID NO: 3279 - DNA, 576 bp, Gossypium hirsutum
  unsure (1)..(576): unsure at all n locations
  Clone ID: LIB3584-011-P1-K1-D7
cagnactcaactcttccttcgccgggtttatttggtcttccttcgttttttggctgttttcgataaattttttccatttttccatggctgctccacctgcaagagctcgagccgattacgactatctcataaagctccttttgatcggcgacagcggtgtgggtaagagttgcctcctttggcgtgtgtcggatggctcatttactacaagttttatcacaaccattggaatcgactttaagattaggactatagagcttgatggaaaaaggatcaaactgcaaatttgggatactgctgggcaagagcggtttcggactattacaacagcttactaccgtggagccatgggcattttgctcgtctatgatgtgactgatgagtcatctttcaataacattagaaactggattcgtaatattgaacagcatgcttcagacaatgtcaacaaaattctggtgggtaataaggctgatatggacgaaagcaaaagggccggccctacctcaaagggccaagctcttgccgatgaataccgcatcaagttcttcgaaacttgtgccaaaaccaacttaa

SEQ ID NO: 3280 - DNA, 436 bp, Gossypium hirsutum
  Clone ID: LIB3493-020-P1-M1-H1
attttctccctaagaaaaaaaattaaacagccgaccggtgctgacgtaccagagacgcttcaccagatctcacttttctcttccctgatctgggtttattcgttagttccgataaatttattctattcccatggctgctccacctgcaagagctcgagccgattatgactacctcataaagctccttttgatcggcgacagcggtgtgggtaagagttgcctggctttgcgtttttcggacggctcattcactacaagttttatcacgacaattggaattgactttaagataaggaccatagagcttgatggaaaaaggacaagttgcaaatttgggatactgcttggcaagagaggttcgtacaattacaactgcttactaccgtggaccatgggcatattgctgggtatgcgtgactgatgaatcattttaata

SEQ ID NO: 3281 - DNA, 376 bp, Gossypium hirsutum
  Clone ID: GOSHI-09MAY01-C12482_2
ctaaggcctctgctactttagctttcaaagcttaggggtgttgaagagtgttgctggagaagccacaggtcaacaatcctgcagaccaattggcttcactatctttgaatgataaccatgtctcttgagtgactggaattttggtattgtagggttgagtttggaacatttatttatgcctttgtttgttgcggtaggttgcaaggattctattactttgctagcattgtgggtttttcgggctggcttcccgttacacgcgtttgctatttactggatttgtatttatgattgtagttaattccaataaaatttggttaatgttattggaactttattttttaatattattttttttttattttcattttttctt

SEQ ID NO: 3282 - DNA, 547 bp, Gossypium hirsutum
  Clone ID: LIB3828-034-Q6-N6-F6
gatgttaaaaataaagttccaatgacattgaacaaaacttattgtaacaaataacaattcagtaaatagaaaaagcctatgaagccaaaccgaaaaaacacaatgctagcaaagtattagaatccttgcaaccacaaaaaaaaaaacaaaaaaaaacaaaagcttagataaatgttccaaactcaaccctacaataccaaaattccagtcactcaagaggcatggttatcattcaaagatagtgaagccaattggtctgcaggattgttgacctgtggctttgcagcaacactcttcaacacctttaaggcctctgctactttagctttcaaagcttcgggtgactcaatgacatgcaaaacttcagtctggtccatctctagaagcatgccggtaaccttggctgctgcatcacactcgagatgttccacaagggggtataggctttcaccaagcatcgtcctttgttgctcaggggttgcatttgcaagagcagtagccaaaggttgaagaggcataggctgtccagtgccagcatcttgcaatg

SEQ ID NO: 3283 - DNA, 710 bp, Gossypium hirsutum
  Clone ID: GOSHI-09MAY01-C12442_1
ctttcccctctcagaaaatatattatacaagaaagatagcttttttgcaagtagttgataaggtatataagctatccccttttaacaaatcactgcatcaccttccaattcaataaattccaattttccttattatttcataatcaaatctatcttctgcttttctcacattaaactttgtgtccaatcctagccgaggatctgttgcatagccttctttcctcgaacaacagcatgacagtcatcagatgatgaacatagagttttgttagtagtagtagaggcttattaagaccctgactgctgtgctgggtcatgtcttgcaatgggatggcttttttcccagcaaatttcatgctccaatctcctcatgaagaagatcatcaaccctcaacttctatcaatcaaatgcttccttcttgcccgccccaagacttccacggtgtggcatcatttcttgggaagagatcaatgtcattttcagggatagatgtgtgcgaagaagcaaatggggaggatgatttatcagatgatggttcacaggcaggagaaaagaagaggagacttaacatggagcaggttaagactcttgagaagaactttgagttgggtaataagcttgaacctgagagaaaaagcagctggctcgggctcttggtttgcaaccaaggcagattgctatttggtttcaaaaccgaagacctagatgg

SEQ ID NO: 3284 - DNA, 688 bp, Gossypium hirsutum
  Clone ID: GOSHI-09MAY01-C12402_1
ctcacgcgtccgcgtctctccactctctaatgggcagtctgaagttaagctccccatgcagatcctctcctccttacctttcctgttttctctgcttttttttctctctcaaatgcggatagaagctaatagaaactagctttttcactcatgggctctgtcactgtaaaaccctcattaaatactttctgtttcattcccgagagccccaaaattcgttgtcattcgcctcacttctcattcctcaaactcagaccttcccctgtttctttcccctttaaatctccttctgatccaataaactcatctcccaaatgtaaaattcgaagctttatggttaaccctttattggttttagtcccagttttgagaagcatcagaggcttggctttttcgcattcccaaaaatgggcttcacgtttgcacgattgcattacagaatcggaggaaattttagaccaatacaatggcaattatttgcaaagtggaggtcttgggatggctttattgagtgtaacagctagcgctaaagttcggattagtccattcgtggcgacattggcggcgaatcccacgtttgtttctggtttgtgtgcatggttcattgctcaatcgatgaagatttttttaaatttctttatagagcggaaatgggatttccggatattgttgccttctggggggtgcc

SEQ ID NO: 3285 - DNA, 897 bp, Gossypium hirsutum
  Clone ID: GOSHI-09MAY01-C12772_2
cccagcgtccggtaatattgttttaccttttttattttcatcttgacataattgcaatcatagccgagatttacatttgaagcttcaatggcgatttcatctctcccttgtattcaacctgtaagagttcctttcaaagcttgtagtttctttcctgctagtgtttgtggtggattcaacaataagaaaaggataaatgctgttgttttttcttcgttgaggaaagtttccaccgatctcaaccttctcccctagataatttaccttgggaagcctgatggtcctacctgccacacagggtcagagacatgctatttcacatcaataggtgatttgtttaaggagcaagaagttgaagaaactaacttggcattgacaactttatactcattagaggctacaatttccaaaagagagttagagttagcagggaaacatggaaagccttcgtggactaaacggctcttacttgatgaaaacttcttgtgctcaaaaatccgggaagaagcagatgagttgtgccgaatgctggaggagaaaaaggacagttcatgcattgcctcaaaaatggcagatgtgatctaccatgctatggttttgctaaggcgcaaagatgtaaagatagaaaatgttctagaagttcttcggcgaagattctctcaatcgggtatagaggagaagcaaagccgtgcatcaaccgagagttaaatgtaagctgtacttttgctaaggtctagatttgcagcttttatcccatgcttaggttgttttcaataaattcgaaataacctatatctgtcataattaccagttttttgcttttattttcgaagtacatgtattttgattttacttgaccttttcttgtataacaataagatgcattttgtttcttaa

SEQ ID NO: 3286 - DNA, 745 bp, Gossypium hirsutum
  unsure (1)..(745): unsure at all n locations
  Clone ID: AI055211.1
ctttgttttggtttagggtattgctattacgggtctaatacattactgatctaatcctcaaaatctaccgatttctaatccgtttcttttgttcagtttaggtgctgcttcaagttttataccttgtttaccctctttctctgtccatccatttctccctctttttttctttttcttcttttttatcctctcaaaatcctttttctgttgtagaatttactcgttttgtggagtatgccaaaaatgggngtttttcctgggaagaagcagatgaagttgtgccgaacgctggaggagaaagaggacagttcatgtactgcctcagaaatggcagatgtgatctaccatgctatggtttataattatntttagctttctgcactaaatattcaggaaagttntatctgcttgagttgacctacgtatcttatgaggngctgacaacaagtgctntncttnctctttgtgggggccttcttcagctcanggcctatacccaggggaaatgagantatagttctcatgcaagaatanatggggactcgatcacaccaatggtttatgcctgacaaacatttgcactggtctttacaacccttgcttnggagcgctgggctatgatgaactatcatcanattaaaatcgcgttaantgaacgatgtggaactgggatatntaatgaccacgttgcatgtgagcaaactctgtaatacacctatgattaatgccccaacctgggtagttt

SEQ ID NO: 3287 - DNA, 396 bp, Gossypium hirsutum
  Clone ID: LIB3149-049-Q1-K1-F5
tgagttcctatcttggaacaattatgatgtctgttcctatttttaagtgatcagtttactaatgtaaggaagaagcagatgagttgtgccgaacgctggaggagaaagaggacagttcatgtactgcctcagaaatggcagatgtgatctacgatgctatggtttataattatttttagctttctgcactaaatattcaagaaagttttatctgcttgagttgacctacgtatcttatgaggggctgacaacaagtgctttccttcctctttgtgggggccttcttcaggctcagggcctatacccacgggaaatgagatatagtttctcatgcaagaataaatggggaactcgtatcacaccaatggctctatggcctgacaaatcatttgcact

SEQ ID NO: 3288 - DNA, 649 bp, Gossypium hirsutum
  Clone ID: LIB3831-001-Q1-K6-F12
gttcgtattccgtaggacaccagtacgagaggggaagatccgtgtcggtgcttctccattgcctgacattcttatacaagaaagcttgacataactgcaatcatagccgagatttacatttgaagcttcaatggcgatttcatctctcccttgtattcaacctggatgcactagctacaactatcacttctaggaaggcaacgttcttcagtcgatcacgggcaacattgtggacaaaaggagaaacttccaacaatttcatcaacatttatgacatatttgttgattgtgatcgcgattctataatttacctttgggaagcctgatggtcctacctgctacacagggtcagagacatgctatttcacatcaataggtgatttgtttaaggagcaagaagttgaagaaactaacttggcattgacaactttatactcattagaggctacaatttccaaaagagagttagagttagcagggaaacatggaaagccttcgtggactaaacggctcttacttgatgaaaacttcttgtgctcaaaaatccgggaagaagcagatgagttgtgccgaatgctggaggagaaaaaggacagttcatgcattgcctcaaaatggcagatgtgatctaccatgctatggttttgct

SEQ ID NO: 3289 - DNA, 483 bp, Gossypium hirsutum
  unsure (1)..(483): unsure at all n locations
  Clone ID: LIB3582-053-P1-K1-H8
tgtcttttcagattgtgttccgtgcgagaccagggcgagaggggaagatccgtgtccgtgcttgtccattgcctgacatccttctacaagaaagcttgacattactgcaattatagccgagatttacatttgaagcttcaatggcgatttcatctctcccttgtgttcaacctggagaggggtggtttcaaagcttgtancttctttcctgctgntgtttgtggtggattcaacaataagaaaaggataaatgctgttgttttttctttgttgaggaaaatttccaacgatgtcaacattgaatccaatgtactttttctttaatgtgcatttgcttgatgaagcagccaactgtttttagtaattatctgcttggcttttactccatcaagggattggctgattaaatggtttgcaaggttggattttatacgactttaacccttatccttgaagaaaaagtggtaaaatactatctaataa

SEQ ID NO: 3290 - DNA, 406 bp, Gossypium hirsutum
  unsure (1)..(406): unsure at all n locations
  Clone ID: LIB3145-009-Q1-K1-G10
tcaaaaatcctttaagaagtttattttttgtgccgaacnctggccgaccgcattttataattcatgtactgcctcaaaaatggcaaatgtgatctaccatgctatggttttgctaaggcacaaacatgtaaagatagaaaatgttctataagttctcggcgaagattctctcaatcggctatagaggagaagcaaagccgtgcatcaaccaaaagttaaatgtaaactgtacttttgctaaggtctagatttgcagcttttatcccatgcttacgttgttttcaataaattccaaataacctatctctgtcataattaccagttttttgcatttcttttcgaaatacacgtattttgattttacttgaccttttcttgtatcacaataaaatgcattttgtttctt

SEQ ID NO: 3291 - DNA, 383 bp, Gossypium hirsutum
  unsure (1)..(383): unsure at all n locations
  Clone ID: LIB3135-031-Q1-K1-D2
cccacgcgttcgcccacgcgtncgatagctcaaaatgttgacactggagccatattaatgcaaggctttgtcaacagggatgcactagctacaactatcacttctaggaaggcaacgttcttcagtcgatcacgggcaacattgtggacaaaaggagaaacttccaacaatttcatcaacatttatgacatatttgttgattgtgatcgcgattctgttcgttctaaataactttctcattgacatcttattgattgcttaatttatgaagtttgacataattgaaacttgtcctttagataatttacctttgggaagcctgatgggcctacctgctacacaagggcagagacatgctatttcacatcaataggtgatttgtt

SEQ ID NO: 3292 - DNA, 334 bp, Gossypium hirsutum
  Clone ID: LIB3146-016-Q1-K1-B9
cccacgcgtccgcccacgcgtccgcccacgcgttcgcccacgcgtccgcccacgcgtgcgggcgaagattctctcaatcgggtatagaggagaagcaaagccgtgcatcaaccgagagttaaatgtaagctgtacttttgctaaggtctagatttgcagcttttatcccatgcttaggttgttttcaataaattcgaaataacctatatctgtcataattaccagttttttgcttttattttcgaagtacatgtattttgattttacttgaccttttcttgtataacaataagatgcattttgtttcttaaagtccgcctaatattctggtttt

SEQ ID NO: 3293 - DNA, 1500 bp, Gossypium hirsutum
  Clone ID: GOSHI-09MAY01-C12762_1
gctgaatttctcagttgttggttggttgattgattgttgttgtggttgaagaggatgtgggctgcttcatgtcttgcatcttgttgtgcggcatgtgcctgcgatgcatgccgcacggtggtttcggggattagtcggagatctgcaaggatcgcttattgtggactttttgctctttctcttgttgtttcgtggatccttcgtgaggttgctgccccgctgatggagaagctcccttggatcaaccatttccataaaacacccgacagggaatggtttgaaacggatgcagtgctgcgggttagcttgggaaactttctgttctttactatcctagctttctcaatggttggtgtgaaaaaccagagggatcctcgtgatgctgtgcaccatggtggatggatgatgaaaattatctgctggttcattttagtgattttgatgttttttgttccaaacgagattatcagcttctatgagtcagcatcaaagtttggcgcaggactgtttcttttggttcaagtcgtgcttttactcgactttgttcatggatggaatgacaaatgggttggatatgatgagcaattctggtatgttgctctactagttgtttctcttgtttgttatttggcaacatttggcttctcgggacttctcttccacttgttcactccatccggacaagattgtggactcaataccttctttatcgttatgaccttgactcttgttcttttgtttgccatagttgcactgcatcctgcggttggcggtagcattttgccagcttcagttatatcactgtactgcatgtacctatgctatagtggacttgcaagtgaaccgagagattacgaatgcaatggtcttcacaagcattcaaaagcaatttcaactggtaccttgaccttaggtctgcttaccactgtcctgtcagttgtctactctgctgttcgtgctgggtcttcaacaactttactctccccaccaagctcgcctcgtgcaggaaagcctttgcttccaatggacaaggcagatgaacacgaagaaaaagagaagaacaagccggtctcctattcatatgccttcttccacataatcttttctcttgcaagtatgtactcagcaatgcttttaaccggatggtcaacctcggtcggagaaagcggcaagttagtcgacgtaggatggccatcggtgtgggttcggattataactgggtgggcaacagcaggtctctatgtatggtctctagttgctcctattcttttcccagagagggaattttaggtctccaaagtaagttattggccattgttgcaataaatttagtttaaatatgtatgtgtgtgtgtgatttgactgaccaagatggattaaaaaaaaatattatgtgcgtctcaaaagagaagttgaatatatgtgtgtgattagtgatggatttgttcccaaaaaaaaaaaaaaaaaaaaaaaaaaaaaaaaaaaagagggtggggaggg

SEQ ID NO: 3294 - DNA, 609 bp, Gossypium hirsutum
  unsure (1)..(609): unsure at all n locations
  Clone ID: LIB3828-011-Q1-N6-F2
accgataaatttggaacaatacatntgaaataaactgatacaaaagacattacgtccacaggtgcgatactatctatcttgggtggaggtaaacattttcttcaatattgtgataattacataatgaaaatattaacaataaggagtgagaacaaatccatcattaatcacacatatattcaacttctcttttgagacgcacataatatttttttttaatccatcttggtcagtcaaatcacacacacacatataaactaaatttattgcaacaatggccaataacttactttggagacctaaaattccctctctgggaaaagaataggagcaactagagaccatacatagagacctgctgttgcccacccagttataatccgaacccacaccgatggccatcctacgtcgactaacttgccgctttctccgaccgaggttgaccatccggttaaaagcattgctgagtacatacttgcaagagaaaagattatgtggaagaaggcatatgaataggagaccggcttgttcttctctttttcttcgtgttcatctgccttgtccattggaagcaaaggctttcctgcacgaggcgagcttggtggggag

SEQ ID NO: 3295 - DNA, 432 bp, Gossypium hirsutum
  Clone ID: LIB3189-032-P1-K1-H11
cgtaagttatctgctggttcattttagtgattttgatgttttttggtccaaacgagattatcagggtctatgagtcagcatcaaagtttggtgcaggactgtttcttttggttcaagtcgtgcttttactcgactttgttcatggatggaatgacaaattggttggatctgatgagcaattcctgtattgttcgctgcttgttttttcttttgtcggcactttggcctcctttttattttttgtgttcttattatcctttgtttttctttttctctcttagtatgtatgcttcttttatcttttttattcgtttttttcgttgttttttttcatttattttttatcctgattattttcactttattttctttccttttttgttccttttatttttcttatattctttggtttttatttttgtcttttttctt

SEQ ID NO: 3296 - DNA, 469 bp, Gossypium hirsutum
  Clone ID: GOSHI-09MAY01-C12702_1
caacaattaggtgagaggggaaatcaaatgtagaatgatgagtacagaagaaaaaagttcgatgaattgcaatcgagacttgctgatacacgttcatccatctatcatattgaacttatcgacaaagtaaaacttcaagttcagcaatttcatgagattgacatgaagcgtacaatagcagacgaatctatgagagtcaatcttgacatcccagaatcagttggcttatcaacaccaatgccagtcccagcatcatcaaggctggctgatttagatactggaagacgtggtaagagaaaactttaactttttttaacatattttcttgtttatttgatttagggaaatggtgttagcacttgtatgtatagagttcctagtaaggttattttcagaaagacagcatcacccttctcattgttattgctgtttaatgtctttttctttaataaaaattatcttctctaaa

SEQ ID NO: 3297 - DNA, 525 bp, Gossypium hirsutum
  Clone ID: LIB3829-027-Q6-N6-E5
aatgataatttattgtttattgatgtagtaagttgcatcgactagtttgaatgcgatgaggatgcttgatacagaggcattcgcaagtttactagtcttaatatggcatatagggaacgtgcacaacaatgtggtcttgaaaggtaaacaaaccccaccccatgtggccatgtgttatgcatgaggacttcatagagacttacgccattgtccagcaatttcatgttctttcaccctgcacacgtcttccagtatctaaatcagccagccttgatgatgatgggactggcattggtgttgataagccaactgattctgggatgtcaagattgactctcatagattcgtctgctattgtacgcttcatgtcaatctcatgaaattgctgaacttgaagttttactttgtcgataagttcaatatgatagatggatgaacgtgtatcagcaagtctcgattgcaattcatcgaacttttttcttctgtactcatcattctccatttgatttcccctctcacctaatt

SEQ ID NO: 3298 - DNA, 1039 bp, Gossypium hirsutum
  Clone ID: GOSHI-09MAY01-C12652_3
ctcactctccacaaatcaaatatggcaagcaaagagcccgatcacgagcacagagaagacgatgacgcccccgccgccgatgatgaagacaccggtgctcaagttgcccctatcgtcaggcttgaggaagtcgccgttaccaccggcgaggaagaagaagatgccatactcgatctgaagtcgaaactgtaccgatttgataaagacgggaatcaatggaaagagagaggcgctggtactgtgaagctgttgaagcacaataagaccggaaaagttcgccttgttatgaggcaatctaagactctcaagatctgcgccaatcattatgtgttggcaacgatgacggtgcaggagcacgcagggaacgacaaatcgtgcctatggcacgcttctgactttgctgatgatgaactgaaagatgaacttttctgcattcgttttgcatcagtggacaattgcaaaagcttcatggaaacggtccgagaagttgctgaatcacaaaaatcaacagaggaaaataaagaggcatctgctgcagctggtctacttgagaagttgagtgttgaggaaaaggaagccaaggataaagtggaagagaaggatgttaaagcaaaggaagaaacggaaacaaaggaggatacaaaaaaagtagatgatagtgagaagaaagatggggagccagcatcaacttaaaaaaaggggttgggttgtgtttgttttctgtgccatatgctttttgggatatatggtgagattagtcacctcccatgtcttgcatattcatctcctgcagaggaaactagatgggtcagtatgtttataagctggaatggtttgagttcctttgcgtgtcattaggtgtgagtgttgaggtttgttcaaacaccgagtcatgtttacatacattgcatgttgttgagagtttttttcgcggttttgagtattgtgagggagagttgcattcaaccgggtttttcccagtattattattatctccaaattgtctaaattgcttattattgatagactcgtgtttctt

SEQ ID NO: 3299 - DNA, 983 bp, Gossypium hirsutum
  Clone ID: GOSHI-09MAY01-C12652_2
aacaacttccttatcgctaatatatatatataaaaaaccctataccccaaccctcgcgtccgcccccgcctcccctccaacgcctcactccaaacaaagcaatcatggcaagcaaagaaccggatcaggagcacagagaagacgaggatgccgcccccgccgaggaagaagacaccggagctcaaatcgcccctatcatcaagctcgaggaagtcgccgtcagcaccggcgaggaaaacgaagatccgatactcgatctgaagtcgaagctctaccgatttgataaagaaggcaatcaatggaaagagagaggcgctggtactgtgaagctgttgaagcacaaagagactggaaaagttcgccttgttatgaggcaatctaagactctcaagatctgcgccaatcatttagtgttgccgactatgacggtgcaggagcacgcagggaacgacaaatcgtgcctgtggcacgcttctgactacgctgatggtgaattgaaagatgatctgttctgcattcgttttgcatctgtgaaaaattgcaaaaccttcatgcaaaagttccaagaagttgctgaatcacaaaaaccgaaagaggaaaataaagatgcatctgctgctgctggactgctggagaagttgagcgttgatgaaaagaagaccgaggataaagctggagaggagaaaaaggaaacagaagccacagaaaaggcagattccgagaagaaagatggggaggcagcttcctcaacttaaaaggcggttgggtttgttttccatgccatgtacttttggcgaatatggtgagagtagtctctggcatattcctcggatggaactagatgtgttattggttggaatggtctcgagtgtttgttgaggtttggttgtaccctgggtcatgtttgcatgttgagattcatgttttacggtcattcaaccgggttttccccagtattatactatcatgctgaatttttcttt

SEQ ID NO: 3300 - DNA, 1366 bp, Gossypium hirsutum
  Clone ID: GOSHI-09MAY01-C12652_1
cccccccctcccccctcccgtccccccgttttataaaaaccctaaaccgcctgatatttatctcttagaacgaaaaaccccaaacgcctcactctcaagaaaaaaacaattatggcaagcaaagaacccgaacacgagcacagagaagatgaagaagctcctgccgccgaggatgaagacactggagctcaagtcgcccctattgtcaagttagaggaagtcgctgtcagtacaggcgaggaaaatgaagatccgatcctcgatctgaagtcgaagctgtatcgatttgataaagaagggaatcaatggaaagagagaggtgctggtactgtgaagctgttgaagcacaaagagacaggaaaagttcgccttgttatgaggcaatctaagactctcaagatctgcgccaatcatctagtgttgccgacaatgacggtgcaggagcacgctgggaatgacaaatcgtgcttatggcacgcctctgactatgctgatggtgaattgaaagatgaacttttctgcattcgttttgcatcagtggaaaattgcaaaacctttatgcaaatgttccaagaagttgctgaatcacaaaaaccaaaagaggaaaacaaggatgcatctgatgctgctggacaacttgagaagttgagctttcaagagaaagctggagagaaggctgttgctaagaaggaagagaaggaaacaaaagtggatacagaaaaagcagatacagagaacaaagatggggagccagcttcctccacttgaaaagagtttggctctgttcttcatgccattggcttttggcgaatatggtgagattagtcagctgatcaacctcctcacccatgtctaggatatttctacgggtgaaactagatgggtagtctatgggttggaatggtcgaggtcgtttgtgtccttaggtttgggtgtttgtcaagggttggtctaccccgagtcatgtcagttatgtttgcatggttagagttgcgtttgggatttgagtagtgtcagacatggttcatttgattgcgtttttcctggcagtaaccactgtgttgaagttatcttgctgctcagcccatgcattgaaagagttcttgttattagacaacctcctttttttttttttacttggggtttaaattttttggtatttggtatctctatgtttccaagggaagaaggtttgggtgaaaaaaaaaaaaaaacaacctacccgcgcccgtattccgataggctaatctttccttgagcgtctggccttgcccggcgcctttggtttttcttcggccgcccccgcggtggacctccatttcgccctatatttgagtcgttttcccgcccgctcactgggccgtcc

SEQ ID NO: 3301 - DNA, 592 bp, Gossypium hirsutum
  unsure (1)..(592): unsure at all n locations
  Clone ID: LIB3582-058-P1-K1-H11
cccagcgtccgctntaaaaaaaaacggtgggggggggcaaagaaccaaaccgagcacagagaagatcaagaagctcctgccgccgaggatgaagacactggagctcaagtcgcccctattgtcaagttagaggaagtcgctgtcattacatgctagngaaaacnaatatcctatgttgtagctggggggnanactntatcnatttnataaannaagnaatcaatggaaagagagaggtgctggtactgtgaagctgttgaagcacaaagagacaggaaaagttcgccttgttatgaggcaatctaagactctnaagatctgtgccaatcatttagtgttggngngnntgactgtgggagagctcgttgggaatgatttttttttcttatgggagggttgtggttgtgttttattgttattgggagtattatattttgtggattggngtttgtttgttttggtttttgttttttttttttttaatatttttttttttttttttttttttttgtttgtttttttttttttttttttttttttgttgttgttgttntgttttttgttttantttgtttttgttttttattgtggg

SEQ ID NO: 3302 - DNA, 421 bp, Gossypium hirsutum
  Clone ID: uC-gsronu33B148e08b1
ctggtacgcctgcaggggccggaccggaccgcctggacccactcatgcgccaggacgtagcttgaccacgcagggaacgacacatcgagcggggggcattcttttgactttgctggtgatgaaccgaacgatgaacttttctgcattcgttttgcatcagtggacaattgcaaaagctccatggaaacggtccgagaagttgctgaatcacaaaaatcaacagaggaaaataaagaggcatctgctgcagctggtctacttgagaagttgagtgttgaggaaaaggaagccaaggataaagtggaagagaaggatgttaaagcaaaggaagaaacggaaacaaaggaggatacaaaaaaagtagatgatagtgagaagaaagatggggagccagaatcaacttaaaaaagggggttgggtt

SEQ ID NO: 3303 - DNA, 995 bp, Gossypium hirsutum
  Clone ID: GOSHI-09MAY01-C12172_1
tcccccccgccccattcaaaggaaattgaaactcgctcaggtccataaacaaaggaaagcaaagagaaagaagcttttcatttcaagggttttagcaatggcaaccaatacgcaagagcagcaatctcaggctggtaggcaccaggaagttggccacaagagccttttgcaaagtgatgctctttaccagtatatcctcgagaccagtgtgtatccgagggagcctgaacccatgaaggagctcagagagttgactgccaagcacccatggaaccttatgacaacatcagccgatgaaggccagttcttgaacatgcttcttaagttgatcaatgccaagaacaccatggagattggtgtctacactggctattctctcttagccactgcccttgctatccctgatgatggaaagatcctagccatggatgttaacagagaaaactacgagctgggtctgcctgtaatccaaaaggctggtgttgcacacaaaattgatttcaaagagggccctgctttgccagttcttgatcaattagtggaagatgaaaagaaccacggatcctttgacttcatctttgtggatgctgataaagacaattacctaaactaccacaagaggctaattgagctggtgaaagtaggcggtttgatcggctacgacaataccctatggaatgggtccggtggtagcaccacctgatgcgcctctcaggaagtacgttaggtattacagagacttcgtcatggaactcaacaaggctcttgctgttgatcccaggattgagatctgcatgctcccggttggtgatggcatcaccctttgccgtcgcgttaaatgaacaaccctcaccaccaccaaagcttgacccacctcttacattcggcacaaaaaagttgacacccaccttctttttctttcctcatctttatattgggtatgttatttttatcataatgtcacggtggttggatgattgaagaatgccatattt

SEQ ID NO: 3304 - DNA, 488 bp, Gossypium hirsutum
  Clone ID: GOSHI-09MAY01-C12162_1
caaggaaaccagaatggtcggtttaattaccccaaccggggggaaaattccattgccccgaaaacccaagggttcttccgaagggttcgtccacggaggttaattcaggccctaaaatcaggccgaaagcgcttatcattggacaccaggtgaatattcctgtactaccccttgttggtcccgagggacggaggaggctaggttagccgaaagatggttatcggttcaaggacgcaaggtgcccctgctttttcagggtaagaaggggtagagaaaatgccccgagccaatgttcgagtaccaggcgctacggcgctgaagtaacccatgctatactcccaggaaaagctcgaacgaccttaagttcacgctccctgggaaggagagacaggattctgtttacagtgggcttcaggcagttgatttgaactctgagcttgtttgcattcatgattctgcaagacccttggtgagatctggagatgtaa

SEQ ID NO: 3305 - DNA, 374 bp, Gossypium hirsutum
  Clone ID: GOSHI-09MAY01-C12042_1
cggacgcgtggggaaattgcaagattttatgacgcaggaatgggtacaatcatatttgcaccagtagcagtgttgtcatggttcccattcatctcaaccttccagtctcgccttctctttaaccaagcctttagccgtgggctggagatttctctcatccttgccggaaacaaagctaatgtcgagacatgatttctactttctggctgcggttaggtttgcttgaactagttattgtttttattttttggcctcgatttattaatttatgaatttaactacaatccttttatagtatatattatttttgatggagtacaaccgtcccatacttgaatttatgtgcattcacagatggttctgttagtagtatg

SEQ ID NO: 3306 - DNA, 1055 bp, Gossypium hirsutum
  Clone ID: GOSHI-09MAY01-C12372_1
gatggtggtgatttagctgaaacagatgctttattaaactttgatggtgatgctatttgtaaatcttgctatgagagtgtgaattcacttttgctaaattctcctaatgatgttcatgaagatgatacatcaaagactaaagaacatgagacattagtttcagatatgtgtcctggtactttagaagctgcaacttattcttcaaagttggatgaagttccagaccaacagtcacattctgggcacactgaaccctcgcgtccggggcatccggaaatcaatgtgccttcatctgcatcgcggtcaaatcctcattctcccgaacttaatgatgaaggttgctgcatgttgaacagtgaggatcctgaaatcccatgcaacgatgatgttctcttagctaaagcttttgctccacaagagtgtcataaagtgggcagtgaccaggcctcatcctttgcaaatcaaaatgatagtaaagaagaactgagcttgatgcagacagaagataatcttgctcaatgttttactgctcccaagatggtaggactggtcgtgttgtcggaatctagtcaagctgccaaatctgagttccatgatggtcaatgtcatgtgatttccagacaggctcagaattccctggttgacccatataggttcaaaacctcccacgcatttcccaattctgctgcaaatggtgcagcaaaggaagagccgtcagatgaatgccatacccaagatatttctacttatgcagaagcaagttccattgtagatagtgttttggaagctgaagcaaacaagacaacatttgatcagatagaatacggaagtgaagatgatgttcctagcttttctgatcttgaagccatgatacttgagatggatttatgtccagatgaatctgattctttcattaggagcgaagtctcaagatatcaagatgagcatacaaggaagacactcattaggttggaacagtgtgctcggtccgctatgcaaagagctactacatctcgaggggcacttgctgttttatatggccgtcatatgaaaca

SEQ ID NO: 3307 - DNA, 436 bp, Gossypium hirsutum
  Clone ID: GOSHI-09MAY01-C12282_1
ctgccatcacccgcctgtcacagaagcaaccgttcgcggactgggctgacccgatcaacagaatccacccgtttctaaagaaccgaaccaagacccaagccagggagtatgttcggttcccaaatgttgtacggaaagtaagagaatatgagatctccccctcccttttcagttcttcgttctcttcttcctcttcgtcttcaacggcgtcgtttgggaagctgggttttgttgggtggtatttaggaatggtgaagtccgggcccgttttaaccaagagcgttacttcatcggctatttatgtagctgctgatttgtcttctcagacgatttcgaagtcatcttcagaaccttaccatttggtgaggacttcgcgtatggcgggataccggttggtaatattaggaccatcactgcatccttgggtcaacttgat

SEQ ID NO: 3308 - DNA, 368 bp, Gossypium hirsutum
  Clone ID: LIB3166-050-P1-K1-F1
cgccattggaagagggaaaagaaaacgaaacccaaagaaaggacataatgagcgggtctttgcgtaggttcgctgccatcacccgcctgtcacagaagcaaccgttcgccgacttggctgacccgatcaacagaatccacccgtttctaaagaaccgaaccaagacccaagccagggagtatgttcggttcccaaatgttgtacggaaagtaagagaatatgagatctccccctcccttttcagttcttcgttctcttcttcctcttcgtcttcaacggcgtcgtttgggacgaagaggaagaagaaaacgaaacccaaagaaaggacataatgagcggttctttgcgtaggttcgctgccatcaccc

SEQ ID NO: 3309 - DNA, 791 bp, Gossypium hirsutum
  Clone ID: GOSHI-09MAY01-C12212_1
tcgcccacgcgtccgagaagagctttgtggcatagaacaagctggagccggagaggaagagccagttggccaagaagttaggactgcaaccaaggcaggtggcggtatggttccagaaccgccgtgcaaggtggaagacatagcagcttgaaagggactatgacctcctcaaatcttactttgattcccttcagtccaattatgacactattctcaaagaaaatgagaagctcaaatctgaggtagctttcttgactgaaaaactacaagccaaagatgtggcaacagaagcaatagcaggtgaaaaggatgaagggttagcagctgagatggcctccgccctccaattcagtatgaaggtggaggaccgtcttagtagcggcagtgtctgaagcgcggtggtggatgaggatgccccacagctggtggacagcggcaattcctactttccaagcgatgaatactccagaggcattggccctttcgatggggttcagtcggaagatgaggatggcagtgataattgcgggagttacttctccgatgtgttcgcaaccacagagcatgaggcattaggattgcgggcctggtcctaacctaaaggatcctgcaacaatatatctctctagtgtttcaatgctatggatgtcacgccttgaatcaagacaacagttgaaaataaccaaaaatacaagtgatgtcagaaacccggtacatagggtaaagtatatggatgaaatatagtctaaagtcaatggaataataataatactaatatgtttaagttttac

SEQ ID NO: 3310 - DNA, 952 bp, Gossypium hirsutum
  Clone ID: GOSHI-09MAY01-C12202_1
aacacttcaagaaattggctaccatctctaaaaacagataaagatcaatcggccaaagaacgaaaaggctggtcaataacagtccacgacctctcaggctctcccgtagcaatggcatcaatggtaaccccatttgtcccttcccctggctcggacagggtcagccgttcaaaccctggagcatggtcaattcttcgtccggaatgtggaacctggaaaccctggggtcgcctcgaagcctggcgtgagcctggtttcactgacgcccttggataccgatttgacctcttccatgatgatattgtggccacaggaacaaccaccaccgtcgccagttccaccctcagcaccaaacttgggggaaaattcaccatggatatgacaacaaacatatcaactccatcaataagcccgcaaagcagctgcgacctggggtcaggctcacgtcccgggtcaagaccaggatcgggatcagggtcagatttcggatttgggttgcccctttccccgcagagcatgtaccggggtggatttgtgatgtcgtcaacggtggaaggtgtggggaaatgcagtaaaccggaagtggaagtaggagtaaagcacgtgacatgcacggaggatgctgctgcctttgtggcattggcagcggctatggatctaagcatggatgcttgtcagtccttctctcaaaagttaaggaaagagctgagacagcaaagtcagacctctgtagattaagggtttttgtcgatttagttgtttttggattgggatttgggattctttcggcagattagctaacagcagtttttgagctgaatgtaaggattagttttgtacagtgcggaatgacgaggcatgaacctttttttatttattttaaaaaactttgtgattagtgaatttgttgattgtttaattccttgtactttctcctcatagatatatgtgc

SEQ ID NO: 3311 - DNA, 512 bp, Gossypium hirsutum
  Clone ID: GOSHI-09MAY01-C12232_1
cccacgcgtccgatctgaattgagagataatgcatgaaatctcgatcccaaaaaatcctccctggggccagtcttttccatgaatgttttgctcacgtgagttacgcttggacctcctctccaccagcatccaaggaccatattcatcgcttccgaccaccgaatcaacaactattcgtgaggttccaatcgccggagcatttcctcccaaattatgccctgttgcttgtatatgcggacagcatccttggagtgaccataccgtcaacacgagaagcagaaaaccggtaagctttcgtactcgattccttgaaggtttccattgatgagaaggaatcagtggtttctccaaattgatatatactgtcatacgtgcatattgtcctcttgtttgactgtctatactaaaatcaaatttggttaccatccccaccattccctcaatttcccataagacctcttttttgtagaggtagctaggcagtcctgggagtctaatccaagccagaaca

SEQ ID NO: 3312 - DNA, 792 bp, Gossypium hirsutum
  Clone ID: GOSHI-09MAY01-C13992_1
gggacccggaggcgtaagagccgagtgatcaaaacacagataggaaaggactgaaaaagaaaaacagaaatggctccgaaagcagatacccaatctgccggcgctgtcgctgcagctgacgcatcctctcaattctcaatggacccactattccacatcttgaaagtcgtcccttactccttccttcgcgctccgcgcctccgcctcaagatcccctccgtctcccttccttccgccatgactgtcttttctctcgtcctcctcacttacttcatggtggtctccggcttcgtctacgacgtcatcgtggagccccctggcattggctctacccaagatcctgccactggcgccgtccgacctgttgttttccttccaggtcgagtcaatggtcagtacatcatagaaggactctcctctgggtttatgtttgtgcttggtggcattgggattgtcctcctggatcttgcccttgataaaaacagggctaggagtgtcaaggtttcctacgccattgcaggaatctcctccgttgttattgcctatgtcatgactacgctctttgttcgcatcaagatccctggttatctcagatgaagataataattccttagctattacttatagtcttcactttagttgaacaatgttgctttgctttctttgtgtcttctttattgaagaacctggatctggtggttttaaattttcacttgccattgatttacggatttgagatctgaagcttttgatggtaattcgattcgattcatggaccaacaagttgaacat

SEQ ID NO: 3313 - DNA, 496 bp, Gossypium hirsutum
  Clone ID: LIB3585-061-P1-K1-E11
tcggacagcatattgcctattcgccggcgctggcgccgcagctggcgcatactctgaattctcaatggacccattattccacatattgaaagtcgtcccctactcttttcttcacccttcgcgcatccgcctaaagatcccatccgtcacgattgcttacgccatgaccgtcttttctctcgtcctactcacttacttgatggaggtctccggcttcggatacgacgacattgtggagccccctggcattggctctacccaagaccctgccactggcgccgtccgacctgttgttttccttgcaggatcgagtaaatggtcaatacatcatagaatgactctactctgggtttatgtatgagcttggaggaattgggatcggcctatttggatctagcccttgataaaaacaagacatggagacataaggttttttaacccattgagggaatctgctaaattggtatagtctatggaatgactacccttttttatt

SEQ ID NO: 3314 - DNA, 513 bp, Gossypium hirsutum
  Clone ID: GOSHI-09MAY01-C13962_1
ttaagaacgaggcgcttaggttgtatgcggcccatgtagctcaacttcgcaataaaggattgcctacgattccgactacgttaaagacagagaaggcatgcaatcccttccttcggacgtcaaggacagagatccggcaggcattagatattccagccaccatgaatgaagcagaagccttgggtgtcatccgtcgagcaaaggacaatttctaggattacttttggggttaatacaaaaattggtccccgaatgcaatccggtaaatccgatccctcaacatatattattttagctacgaatgagttagttctgttacataaaatactgatgtgacataattgatcaaatattaaattgtgattttagtattagttgatcatgtcacgttagtattttatgttttgtttttaagtgtatagtttagggatcaatttacggaataccccttagttatactcggttcctctttgtgtataggttatgtaataatgtttagcatgtcaatacact

SEQ ID NO: 3315 - DNA, 691 bp, Gossypium hirsutum
  Clone ID: GOSHI-09MAY01-C13932_1
tgcgccacgcgtcgccacgcgtccgctcactcttacttactctgataatggcttgcaaaattagttccttgctttctcacgttttcatcctcagcattctgtttgttattgctgggcaagccattgcagcacgtgacatctcgaagaatgatgatcaaatgaaacagcctgaatatctaaaacatgaccgtagtgtgctcattccaggccttggacgagtgttgctgccaccagttttcaaacatcacaatccacacactatcggcactggcacccacaccggcagcagtggccgccatgttggcagcacaattggtggaaatcgccagcttccaggtagtgatgacacattcctcattcgttccaaaccctggttttgaggtgccaattccagcaggtcgtggtgctggcattgcacgaacaaacccacgtccttgaacatgcttggctatgaaacttccaataaatctaagaataaagggaatcaattatctgcattgagtctttaggggttccattgtagtctatcgtattcattcacataactaaagtgatatgaattcgagtttgtcattttagtgaagtctagagtctactcctgtatgtattttccagttggaatctatttcttgtcaagtaatcatgtatctcaatttccacattagttataaattatgacctatcatgctta

SEQ ID NO: 3316 - DNA, 381 bp, Gossypium hirsutum
  unsure (1)..(381): unsure at all n locations
  Clone ID: LIB3189-022-P1-K1-D8
tcctagctctcactcttacttactctgatttngtcntgcaaaattagttccttgctttctcacgttttcatcctcagcattctgggtgttattgctgggcaagccattgcagcacgtgacatctcgaagaatgatgatcaaatgaaacagcctgaatatctaaaacatgaccgtagtgtgctcattccaggccttggacgagtgttgctgccaccagttttcaaacattacaatccacacactatcggcactggcacccacaccggcagcagtggcggtcactttggcagcacaattggccgaaatcgccagattccaggtggtgatttcacattttgttccaaaccccttgtttttttatgtgtccaaatttcatgtatg

SEQ ID NO: 3317 - DNA, 696 bp, Gossypium hirsutum
  Clone ID: GOSHI-09MAY01-C13922_1
caccgactcatcaggcatatcaaccggcccctttttttttgtactctcaaccaccacaacccctgcaaggccaaccttccatgggccaccatcctgatgaggcagcttatgttccttctcagacctatccaccaaacctgcgccagccaccctctcagcaacccagtggccctccttcctcccaacagtattttgggattccacctcaaatgcatgagccaccatctagaaggcctggtctaggattttctactggatatgtcccacaatctgggcctagtgaacaatatgcttatggtggatcacctccacagtatggcagtgcctccccaatgaaattgcagcagctcccctcttctaccggaagtggttatccgcagcttccgacagctagggtactaccacatgcattacctactgtatccgggggtggtggtgaatcagctccgtctggacctggaaacagggttcccattgatgatgtggtggacaaggtaaccggcatgggatttcctagagaccatgttagagcaacagttagaaagttgacggagaatggccagtcggttgacctcaatgtggtgttggataagcctaatgaatgatagtgatatacagccacccagagcttggtttggcaggtaaacctgtggtatctttaattcagtcatgtatagaaattatcacttgattctc

SEQ ID NO: 3318 - DNA, 830 bp, Gossypium hirsutum
  Clone ID: GOSHI-09MAY01-C13582_1
ccttcttcctctgaaccacaaactaatacctccttaaacatcattttaatacaataaatatcaaattaaaatatttttaaaaagtgggcaaagccgcaaaggaaaacaaaacaaggggcgaaaccttaattccatcaaaataattcaaaggaaaatatctgcagaatcataatggagaattatctctttctgttctcgcttgttcttctctttggtcttttacccttttcctctcaaaccccaaaccctaaaaaccccaatcccaaacctccgctcacccaggcacacaccgagcttataaactatggttttccgatcggtcttcttccggcctcggtgacgaagtacactcttaaccaaacatccggtaacttcgccattgatctcggtggcacgtgcaagatcacgctcccgcctgacaactacctggctacttactcgaagcgggtaacggggaagattgaaaacggaaagatagcggaactcgatgggatcagggtacgggctttgttcaaatggtggtccataaccgggattcgatccagcggggataatttggtctttgaagttgggatggttacggctaaatatcctgctaagaactttgatgaaagccctctctgtgaaggccgtcattcgtcttcttaaaaagctaaaaccaaagtgaaaaataaagggcttctcagtttgctgcaaggattaagttattacgtacgtgttctgtaatcgtaagtatgtttgtctcgtctaagactaaacaagtcctttgtgatcttcagatgtttgttggatctaagactaaatcaatagaacaattaacgttttcttcc

SEQ ID NO: 3319 - DNA, 323 bp, Gossypium hirsutum
  Clone ID: AI729818.1
gtcgaccggaaagatagcggaactcgatgggatcagggtccgggctttgttcaaatggtggtccataaccgggattcgatccagtggggataatttggtctttgaagttgggatggttacggctaaatatcctgctaagaacttcgatgaaagccctctctgtgaaggccgtcattcgtcttcttaaaaagctaaaaccaaagtgaaaaataaaggtttgatatttgagctttgaaaattttccatgtttcctttcttttaatttgtttgttggaaaagcttctaaataaagttttacatgctaaaaaaagtcgacgcggccg

SEQ ID NO: 3320 - DNA, 610 bp, Gossypium hirsutum
  Clone ID: GOSHI-09MAY01-C13542_1
caaaaaaaaaaaaaaaaacaaacaaaggtagcctgagcaaactatgaggaagtgggcgatcccttccgctttggttcttctttgccttctcagtctcctctcagatcatgggagaaaagtacaagcaaatgccgaggaaggagctgtagatcctcctaaagtcgaggaaaagatcggcgctgtgcctcatggcttacaaactgattctgatgtagttaaaagggaatcggaatccatctcttcgagatcgcttcgcaataatgcggagaagtttgagttccaagctgaagtgtctcggcttatggatatcattatcaattctctttatagcaacaaggatattttcctcagggagttgatctccaatgcttctgatgcactggacaagattaggttcctttcactcacagacaaagaagttttgggtgaaggcgacacttccaagctggatatccagattaagttggacaaagagaagaagatgctttcccttcgcgacagaggtataggaatgacaaaagaagatttaattaagaatttgggaacaattgcaaaatctggaacttcggcatttgttgagagaatgcagagcactggagaccttaatctg

SEQ ID NO: 3321 - DNA, 408 bp, Gossypium hirsutum
  Clone ID: LIB3197-053-Q1-M1-F5
cttgcctaacaattccactaggtgaaatcttaaaagagcagccaatggggaattggacgatcccttccgctcttattcttctttgccttctcagtctcctctcagaccaaggtaggaaactacaagcaaatgccaaggaaggagccgtggatcctccaaaagttgaggataatatcggcgctgtgcctcacggcttacaaactgattctgatgttgttaaaagggaatcggattcgatctcttcgagatcgcttcgcaacaatgcggagaaatttgagttccaagctgaggtgtctcggcttatggatattattatcaattctctttatagcaataaggacattttcctcccagagttgatctccaatgcttctggatcgttggacaagaataggtttctttcactca

SEQ ID NO: 3322 - DNA, 593 bp, Gossypium hirsutum
  Clone ID: GOSHI-09MAY01-C13572_1
attttgaaggggaagtccataccaatatttgtttcttgctaatcatggtacggtggctagggatgtgtacctacattgatgatattggtaaagggtgtttagcagcactggatactgccgagaagagtaccggtagtggagggaagaagaagggtccggctcaactgagggtatataatttggggaatacttcgcctgtgccagtttcagatcttgtgagtatcttggagaggctgttgaaagttaatgcaaagagggatattatgaagttgccacgaaacggggatgttcagtttactcatgccaatattagcttggctcagagagagcttggatataagccctcaactgatttgcagactggtttgaagaaatttgtcaggtggtatcttggttactataatggtgggaagaaggctgctgggtgattcattctttgaattgcggtaggatcctccaaattcttgttcattatcattcgaatccttggttttaacatttctctgttcgttaggaaattatccgttgttcatacatctttaatgatgccatcgtataaagaaggatatcatgtcctacttgggagaaagttt

SEQ ID NO: 3323 - DNA, 801 bp, Gossypium hirsutum
  Clone ID: GOSHI-09MAY01-C13562_1
gtggtctttatttactcgcactctatattcactctctgtatctatacctgtctctctatctctctctgtttttctctctcccgcaaggattttattattgtgaaaacaacattgtggagatcaattagcttcttcttttttttcactttcaagctctcatggctgccattattgaatctgggtggctgtatctgatcacgcatttcagtgacttccaactagcaagtctaggaagtttctttcttcacgaaagtgttttcttcttatccggacttccatttatatatctggaaagagctggattgctgagcaaatacaagattcagacgaaaaacaacagccttgctgctcaggaaaaatgtatcacccgcctgcttctgtatcacattggtgtcaaccttccgcttatgattgcatcttatcctttcttcagattcatgggcatgaagagtagtctgccatttccatcctggaaaagtggttctgtcacagataatattctatttcatcctggaggattttgtgttttactggggacatcgttttttacatacaaaatggctgtacaagcatgtgcacagtgttcatcatgagtatgctactccatttggactgacatccgagtatgctcaccctgccgagatattgttccttggctttgcaacaataattggtccagccatcactggcccacatcttattactctctggttgtggatgactcttagagaactaaaaacaggtgaggcacattgtggttaccatttttcatggagcctcttaaactttttacctttatat

SEQ ID NO: 3324 - DNA, 512 bp, Gossypium hirsutum
  Clone ID: LIB3585-016-P1-K1-A3
cccacgcgtccgcccacgcgtccgcccacgcgtccgagattttattattgtgaaagcaacattgtggagatcaattagcttcttcttttttttcactttcaagctctcatggctgccattattgaatctgggtggctgtatctgatcacgcatttcagtgacttccaactagcaagtctaggaagtttctttcttcacgaaagtgttttcttcttatccggacttccatttatatatctggaaagagctggattgctgagcaaatacaagattcagacgaaaaacaacagccttgctgctcaggaaaaatgtatcacccgcctgcttctgtatcacattggtgtcaaccttccgcttatgattgcatcttatcctttcttcagattcatgggcatgaagagtagtctgccatttccatcctggaaagtggttctgtcacagataatattctatttcatcctggaggattttgtgttttactggggacaatcgtttttacatacaaaatggct

SEQ ID NO: 3325 - DNA, 568 bp, Gossypium hirsutum
  Clone ID: GOSHI-09MAY01-C13492_1
cccacgcgtccgatccatatagcttctgattatctacttgatgaagccacaaacttgtggggccataatcttgacttaatggataatcgggttttaagatatccaaatcgtgtgcagaacttatacttcacattcctctttgtgcttcgagctgtgacaaaggcagctgattacttggaacaagctgaatacgataccggtaatccaaccgaggacctgaaaacacattccctaatgagacagctactttataatccaaaattgcaagctgcatgcccacttccatttgatgaagctaaattatggaaaggacaaagaggacctgaactgaagcagaaaatacaagctcagttcaaaaatatcagtgcgttgatggactgtgtagggtgtgagaaatgtcgactttggggaaagcttcaggttcttggtcttggaactgcattgaagatacttttctctgttaatggtgaagatcactcgcatcagacattggagttgcaacggaacgaagtgattgccctgattaatctactcaatcgactatccgagtctataaaaattgccattg

SEQ ID NO: 3326 - DNA, 581 bp, Gossypium hirsutum
  Clone ID: GOSHI-09MAY01-C13482_3
cccacgcgtccgtgttgataaaatttctgtggtgatgaagccctatacaaaggaggtagttaaagcttatgggaggtttttggaatcagcaacaacataccatcaacaggttcaagcctctgtgcaagaaactttgaagaagcatgagctgacaagacctcttgcaaccaaagagcttgagtggttttcggcatctgctctattggctctacctattattattttgttcagaatattttcagcaattttctgcaaaaagacaaagaagcgtgttcgacatactaacgcagcccaccatggtcgtcgtaagggcaaaagggggcacacagacaagtagactgcgtgtatttaggttttggtctcttaatgttgggaaatattagaggctaactggacgtgtgtttttactttttaggggctctaggtgatcatgttgggtaggcagctgtggtgtcgcaattgggaagtatctaatcttctcttacccctcagggaccctggttttaatactattattattgtttggagatgatgctggatgtgctaaggattattagaaaggcgtaatgttatggtgtttt

SEQ ID NO: 3327 - DNA, 647 bp, Gossypium hirsutum
  Clone ID: GOSHI-09MAY01-C13482_2
cccacgcgtccgcccacgcgtccgggtttttggaatcggcaacaacataccatcaacaggttcaagccgctgtgcaagaaaatttgaagaagcatgagctgacaagacctcttgcaaccaaagagcttgagtggtttgcggcatctgctctattggctctacctattattattttgttcagaatattttcagcaattttctgcaaaaagacaaagaagcgtgttcgacatactaacgcaacccaccatggtcgtcgtaagggcaaaagggggcacacagacaagtagactgcgtgtatttaggttttggtctcttaatgttgggaaatattagaggggctctaggtgatcatgttgggtatggagctgtggtgtcgcaattggaagtatttaatcttctcttacctctcaaggtccctggttttaatattattattattttttggggacggtgtggaattagaaaaagttaagaaccctagtgacgctacaaggttgaaatcttgagattcctagttgtagtaggagttgtgtattttatttatgttagtgtaactttattttgttttgcttttcttttcttctggattcacaaacgaaacaactcagtctctgtttcagaaatcatcattcttcttttggtgagac

SEQ ID NO: 3328 - DNA, 594 bp, Gossypium hirsutum
  Clone ID: GOSHI-09MAY01-C13482_1
ttggtgcattttctattgttctaataagattgatgtagtttgccgtaaataaccttgtcttcaccatgtcaaaaactttaatttttgcagcaaaaagacaaagaagcgtgttcgacatactaacgcaacccaccatggtcgtcgtaagggcaaaagggggcacacagacaagtagactgcgtgtatttaggttttggtctctgaatgttgggaaatattagaggctaactggacgtgtgtttttacttttgaggggctctaggtgatcatgttgggtagggagctgtggtgtcgcaattgggaagtatttaatcttctcttacccctcaaggtccctggttttaatattattattattttttggggagggtgtggaattagaaaaagttaagaaccctagtgacgctacaaggttgaaatcttgagattcctagttgtagtaggagttgtgtattttatttatgttagtgtaattttattttgttttgtttttctttttcttctggattcacaaacgaaacaactcagtctctgtttcagaaatcatcataccttttaagttgagacatccaaggggttttatactctttatct

SEQ ID NO: 3329 - DNA, 812 bp, Gossypium hirsutum
  Clone ID: GOSHI-09MAY01-C13462_1
cccacgcgtccgctagatcgcgagcggccgcccgctacctgctctccctcccccattgccactgcttctctctcttctcacattagctattgtgttcttcattttgcttcttgtaactatttaaagataaggagtaagttcttaagtgtttcatactttgatgtctacacctttggaacatgattacataggtttagcagcgacttcttcaatggaaagaagctctgagaagatatcttcttcttcttcctcttcaattccctccaatattgaagacaaaaccaccaacaatccttccctgaatctcaaagaaactgagctgaggcttggcttaccaggttctcagtcacctgagagaaagctgtctctttttggcaaagatttggagactaatgataaaagcaacggttttgttggtagccctttgaagaacttggtgtctggagctaaaaggggtttctcagatgccattgatgggtctaatgggaattgggttttcgctataaatggtaaatctgatgtagagttgggtaaaggtgctgtcttggcctctcctagaggtggtttggataataaaaccaatccccaacaggtaaggacgtctgtgcctgtcatgaaagaggttgttggtgttccccagtctccaaaaccggttcaagataagaagaatcttgttcctcctgtaaatgaacatgctagtgccccagctgcaaaggcacaggtggtaggatggccaccaatcagatcattcaggaaagacagcatggcctctaatttggcaaagacagtgatgaaactgctggtgtctgtat

SEQ ID NO: 3330 - DNA, 656 bp, Gossypium hirsutum
  Clone ID: GOSHI-09MAY01-C13782_1
aaattttattagaagaagcactctattgctctgtttctctcggtgtagcataagatcaagatcaactgttcttcaaccaaaagggaaaaagctgcttggaacgttgcactgataaacaatcaagctcagttgaatagtagagtaacttcgcattggtgttcttgaaggttcccccatttgctcccaaaggtgcttatgggagattattgtttttgtgggcatctgaccttttaaatcaattacaagagagaatacagatatgggcaccatacaccgcagtggagtttttaagaaaacaaatgataaagccaggctcgttatcgcaacaattcttggaattgtgattggattctttattggtgtttcatttccgtcagtttccttttacaagattcacttaccttcaaaccttagatcggcttttgatgcatccatagctaatgaccaagactttatggtcaggtcacctgagagaactgcagacaatcttcctaagatatatgttcctacaaatcctcgtggtgcagaattgttacctcctggaattgttgttccagaatctgacctttacctgcgcaggttatggggtgaacctatgaggatctgaaaaaataccaaagtatttagtgacatttacggttggctttgatcacaac

SEQ ID NO: 3331 - DNA, 443 bp, Gossypium hirsutum
  Clone ID: LIB3189-016-P1-K1-G10
gcgtctctctcttagtctttaagcataaaattttattagaagaagcactctattgctctgtttctctcgttgtagcataagatcaagatcaactgttcttcaaccaaaagggaaaaagctgtggagtttttaagaaaacaaatgataaagccaggctcgttatcgcaacaattcttggaattgtgattggattctttattggtgtttcatttccgtcagtttccttttacaagattcacttaccttcaaaccttagatcggcttttgatgcatccatagctaatgaccaagactttatggtcaggtcacctgagagaactgcagacaatcttcctaagatatatgttcctacaaatcctcgtggtgcagaattgttaccttctggaattgttggtccagaatctgacctttacctgcgcaggttatggggtggacctagtgag

SEQ ID NO: 3332 - DNA, 849 bp, Gossypium hirsutum
  Clone ID: GOSHI-09MAY01-C13662_1
gggaaaaaaaacaaagaaatgatgaagtttgaggctcagattctttcaaaagaaatcgtcaaacctgcttccccagaaattcatctaaaagaacccttgcagactctgtgtatttgatcagctaactcccaccacttacgctccaatcatattattttatgccccgagtgataccaacacctccaatattttgactcagctgaagaaatctctttcagaaaccctaaacatcttatatcccttctctgggagaatctttagtaacatgttcatccatgatttcgacgccggtgttccgtttttatcggctcgaatcggttgtcgattatccgagtttcttaggcatcatcaaattgagaccttgaacaacttgctcccatgccctcctttctacaaggaatcaaatcatcagggtcctctcttggtttgtcaagtcaccatgtttgcatgtgggggagtagctttaggcatctgcgcctcacataaaatcactgacgccaaaacaggcttcattttcacctttgtttggagaacaatctgccaaggataccaccctgaaattaaatttcctgccttatctaaggcctccttgatctttccacctaaaaatccaatgcccaagaattacatatccatgatggaaaacttatggttcaccaaaggtaattttgttacacggcaattcgtgtttaatgaggaaacaatagccatcctaaaggacatggcaaaaggggaagtctagactacaccgacacgaaccgaactgtctctggtttcatctggaaatgttcaatggcggcatccaggcgatacaagaaccttgaaaccatccattgttgtccaagcata

SEQ ID NO: 3333 - DNA, 372 bp, Gossypium hirsutum
  Clone ID: LIB3083-083-Q1-L1-E3
tggactccataaagttttatcaacttttcatttcagaaggtctgtccattctgacgatagcgttttcccttgaaaaatctttacttgctatctgtttttgaatcatttcctctcaaatgcatcttcaatctgcgcttcttgaccatctcctttcctaatcgaatgcatggcggttcaactattctctcgtcagagatgagacaatgtgaagggtcatctttgaagccaaaagttcacccatcaactctgaaccaccaaacctgatgctgatttggagtttcttttgtcgaacattgcatgaaattgaatcgtcatccttggtagtcctcctgatgcttgtggtttttgttcatatttaaggttgagccatgt

SEQ ID NO: 3334 - DNA, 317 bp, Gossypium hirsutum
  Clone ID: LIB3189-013-P1-K1-E4
gcgtccgttttgaatcatttcctctcaatttcatcttcatattgtgcttcttgaccatctcctttcctaatgtagtgcatggcgggtcaactagtctctcgtcagagatgagacaatgtgaagggtcatctttgaagccaaaagttcacccatcaactctgaaccaccaaacctgatgctgatttggagtttcttttgtcgaacattgcatgaaattgaatcgtcatccttggactttacatgactactccctttggctcaacaagctttatgcttgatcccatcaatttacctaaaggacccttaactttagcttg

SEQ ID NO: 3335 - DNA, 450 bp, Gossypium hirsutum
  Clone ID: GOSHI-09MAY01-C13192_1
atcagcgatccgggtatctacttgagacaagaggaagcataatataccaagttgagaccagagcaagagtaattatatttgatatttcaacacttgaaggcaatagggttttgcggaataattcatcttcatttaacctttcacatagatctttaactagagaacatggaggtcttatgagttggcccgaacatttctttagggggagacaacatacacaaaatcatgacgcatctgatcaacaagtaaacagattgtcagcgagagccatgcagttaagcatatttggcagtaaggtaaatttgccacagcgtagctggagtttatcaaggatgaatcagtctcagccaataaacaacccgtcatataatagatttctttcattccctggccatctactggtctctgccggatcagaaggagcttctactatgacgaagaatcacaaag

SEQ ID NO: 3336 - DNA, 941 bp, Gossypium hirsutum
  Clone ID: GOSHI-09MAY01-C13112_1
ctccaatctcatactccaaaccttgttctctttatccctcactttagtcctcactttcctcaaaatccctgttttctttcttcaaggtctccatacttacatccaccctgataacgttgccggccaccacggcggccctgcttcttcttcttccggtgttagagccgctatccgtagaccttcagattcaggttctggacttgatggttaccaatctttatcttcaagaaccaatgctgagctcaaaaagaagaacaaatctaaagataaattcgaattcgatgaaaacaatgcacagatctttaggctaaaacttgatgagggtcatcttcaaacaaggcttttttacaatgattatcacaattctttcgttttttcctttgtgggtatttcttgccgggtgctccccgcgttttcccggcgcccgcaagattctggggttttagcaaatggtgatttgataccaattatctttgggtttattggtttaatcaaagctttttcatcacttgcaaagatatcgtttgagatatctggttccaagagatctgaaaagcaattcagtgcaatttttggtgttttagggtttatttgggggattataatttgttctgggattggaccattggtttttgatttccatttcgattcaattgaagggtcttggaggatttttgtttctatattgatgggattcattgctggttctttatatatgcctgctgggaaaaatgcaagatccttttggctcggtgctgatcaacttagatgtaatttatccataatttcttgtggatggttctctagattgattctatatgccaattatatattgactgtgtttactgctttactttggatcaatccatttgttgaaatccttagttttgtgagtttttcggaatccgatttaccagatttaggcttttctgcttattgct

SEQ ID NO: 3337 - DNA, 268 bp, Gossypium hirsutum
  Clone ID: LIB3189-004-P1-K1-C2
gccggccctgcttcttcttcttccggtgttagagccgctatccgtagaccttcagattcaggttctggacttgatggttaccaatctttatcttcaagaaccaatgctgagctcaaaaagaagaacaaatctaaagataaattcgaattcgatgaaaacaatgcacagatctttacgctaaaacctgatttgggtcaactgaatacaaggctttcatacagagaggattgcaaaccttggatgggtggcttcatgggtcaaccttatt

SEQ ID NO: 3338 - DNA, 1382 bp, Gossypium hirsutum
  Clone ID: GOSHI-09MAY01-C13122_1
cggacgcctggccaagtatagcctttttcttttgcctttttgtcatttcccttaattaattgtctcttatggagtcgttctcttttttgttgataatttcaattttctatcttctcttcaaaatatggaattggatcaataacgtgagagaccaacaatgttacattttggattaccaatgctacaagcccagtgatgataggatggtggggactgagttctgcggggaagtgataaagaggaacaagaatctcggactcaacgagtacaagttcttgctgaaagccattgtcagttcaggcatcggagaacaaacctacgccccgaggatcatgttttccgggagagaagagagcccgaaactggaagatgggatcttggaaatggaagagttttttcacgatagcatcgagaaggtgttatcaagggcaggcatatcccctcaagaaatcgatctcttattcgtcaatgtctccatgttatccgcagttccttctttgtgttctcggatcataaaccactacaaaatgagaccagacatcaagtcttttaacttaactggaatggggtgtagtgctagtctgatttctcttgacattgttcgcaatgtcttcaagtcttacaagaacaagttcgcattgcttgtgacttcggaatcgttgagtccgaattggtatgccggcaacgatagatcgatgattctctccaattgtttgttccgttcgggtggctgcgcagtacttttgacgaacaacaagtccttgaagcatcgagcaatgttcaaattgaaatgcttggtgagaacacatcatggagccaaagatgagtcgtatggttgttgtatccaaagggaagatgataaacgaaggatgggatttcaccttagcaaaagccttcccaaagccgcaactcgttctttcgtcgataatttgagggtcatcaccccaaagatcctgcctgttagggaactattccggttcatggcagtttcactccttaaaaaatggaacgtcgtccgccatggttcttcccacaagggagcttctccaggaccaatcaaagcttggggtgaacttcaagagtggggtggaccatttctgcatccccccaggagggatagccctgatagatgggatcggaataagccctgatttgaccgagtttgatttggacccccctcggatgacccgcccccgatttggcaacacatcggcaaatacctgtggtatgttttggcatacatggaaaccaaaaaaagctgaaaaaaagggataaggtgttgatgataagctttggtgctggctttaaatgcaacagttgtttgtgggaagttgttacggatttacgacaatgggattgtttggaagatgacatttacattt

SEQ ID NO: 3339 - DNA, 335 bp, Gossypium hirsutum
  Clone ID: LIB3189-026-P1-K1-C12
accgtcctgattcccgttcgaccacgcgtccggaccagacatcaagtcttttaacttaactggaatggggtgtagtgctagtctgattgcgctggcattgttcgcaatgtcttcaagtcttacaagaacaagttcgcattgcttgttacttcttaattctttgagtccgaatcttcttttcctgtaattatttatatattaattattttctatttttcttttaaactaattttattttcatatattttcttctatttattttattttttttttcaactttttctatatagaattttttttttatttattattcttctttaattactcaaattata

SEQ ID NO: 3340 - DNA, 600 bp, Gossypium hirsutum
  Clone ID: GOSHI-09MAY01-C13052_1
cgtgacactgacactctgcttctaagctttactttttctcttttttctctcaatactgtttcactaaaaaatgccaatcaaaaaagatccttcgattccaccgccgatgatcagcaagatcggcccttacaccgtcttcgttacccctccgtcaaccccttctccaactgaccctcctgtttttcactctcccaagaaggccgcgccgccttctccttctccttatccttctgctccgccgcctgtccagccacctccccaacagttcgacaagtctttccgtacttcccaatccctttccgacggttcatttctgggtttcttcaaaaacgctgccttcaaactccaaaacgctcattcaagcttggatgaccatttagctcgttggttcggcttaaatcagtccaagtatcaatgggcattggacgattattatgagagcaagggattggaaagggaaggggtaaaagtgaaagaaatatctagcaaaatacagagtgtgtagcatacttctcgtcccgaacgggactgaagaccctgaaccgtctcgccttttacattttctaatgttatcctttctcgaggttatatcgtgggttc

SEQ ID NO: 3341 - DNA, 107 bp, Gossypium hirsutum
  Clone ID: GOSHI-09MAY01-C13022_1
agaacagagaacttaaaactgattttttcattgggaatcctactgtttaattaagacttctaccccggatggggcctgcggatgctcacacaatgtgatttctgccc

SEQ ID NO: 3342 - DNA, 534 bp, Gossypium hirsutum
  Clone ID: GOSHI-09MAY01-C13332_1
tgtttttcagccattatcacccacaaaagtggggggcaatgcccctttcctcgacctccattgtcctctaaccactcaaacaccccatctttgactcctccctcttctttaactccgtcatcttaaaaaaaaaaaagtggatagttgagctgctattgagattttcttttttctccccaaccctgtcttatcttggttgctacctgcctcctgcatgaaacagaaacagagttccctttcttgcttctcactgttgcgatgaagtatatccggaccaacaacttgaaacggttattctcattaaaaagacgcagtttcgaagaaggtggtgccaaccaacatggggttttcgaagaagacaccaccaatgatagtttctaagattgcttctgttgcagagcgttctcagcgaccttcctggcgaagcttctcctttgaagaatcttttgttgccaccaatgcttttagctcagagaatttggtagggaaaggagggtttgcagaggtatacaaaggagtactaaaggacgggga

SEQ ID NO: 3343 - DNA, 755 bp, Gossypium hirsutum
  Clone ID: GOSHI-09MAY01-C8961_1
ctcttcctcccttttctttcttatgctcttcccaatcgctttgtctcttttttggtctcgcctaaattaaaatataattccataacatgaccaatcacaactactggatggttccttccttttgattttctttcttttacaactttccatctggacatagcaaaaaaacagagagatctatagtttcactgaacttgcagcagatggcatcatcatcatcggaaaacttggccaacattgaatcgtgggcgtttcgtcccagctttgctgattcttggctctccgaagccgaagctcttaccagagcactccaagactccatctctacttccttctctaactctgattcgcattctctttccccgctcttcagccttgtcaactctaaccccttaccgacgcctactcctacccccagcgggtcaaacatttcaggctctgaccctgaaaccactgttaaacgtcagcggacactactcaagccccttcctactggaaaagtctcaaagtctaaacgcaagtcccgtgcctccaagttctctcaaaccactttcataaaggcggatcccgccaatttcaggcagatggtgcaacaggtgactggagtccgcttttgtaacgcgcagatgtctttgagtccgatcctgaagcccgagcctcaaagaaccggatgcctgcctacgctcgacacatcagcctatttgttggatcagcatcagccatcttcaggagctgtttccgggtccagcttattc

SEQ ID NO: 3344 - DNA, 1094 bp, Gossypium hirsutum
  Clone ID: GOSHI-09MAY01-C8911_1
accttctcctctaattattgttttgctttttatatttattgtaaatacattttttaaaatttacctttggttggtgggaagggtaaatttttttggcttataaatatcgacgcctgtgccaattggcatcccagcaaaactatgcccccaaaccccaagagtttcacctcaacaaaacacctacaaagcaaatatgccaattgagagctcttccactaatggcccaaccgtctgtgtcaccggtgccggtggcttcatcgcctcctggattgtcaagcttcttcttgaaaaaggttacactgtcaagggcactgtaaggaacccagacgatcccaagaattgtcatttgagagagcttgaaggagcaaaggagaggctatctcttcacaaagcttaccttcttgattaccaatctcttaaggaagccattagcggttgcgatggagttttccatactgcttcacctgtgactgatgatcctgaacaaatggtggagccggccgtgattgggactaagaatgtgataatggcagcggcagaggccaaagttcgacgtgtggtgttcacatcttccataggtgccgtgtacatggaccccaacaggagccctgatgtggtggtcgatgagtcttgctggagcgaccttgagttttgcaaaaacaccaagaattggtattgttatgggaaggcagtggcagaacaagcagcctgggaaacagccaaggaaaaaggggtggaccttgtggcgattaccccagttttggtgctgggtccattgctgcatccaactgtgaatgccagcattgttcacatcctcaagtacttaaccggctcggcaaagacctatgccaattcagttcaagcctatgttcacgtcagagatgtcgcattagcacaccttctcgtgtatgagaatccctctgccttcggccgctacctctgcgctcagagcgtcctccaccgtggtgaagtggtggagattttagccaagttcttccccgagtatcccatccctaccaagtgctcagatgagaagaacccaagagcaaaaccctacaagttcacgaaccagaagctgagggatttggggttgg

SEQ ID NO: 3345 - DNA, 569 bp, Gossypium hirsutum
  Clone ID: AI731964.1
cccaagaatttcacctcaacaaaacacctacaaagcaaatatgccaattgagagctcttccactaatggcccaaccgtctgtgtcaccggtgccggtggcttcatcgcctcctggattgtcaagcttcttcttgaaaaaggttacactgtcaagggcactgtaaggaacccagacgatcccaagaattgtcatttgagagagcttgaaggagcaaaggagaggctatctcttcacaaagcttaccttcttgattaccaatctcttaaggaagccattagcggttgcgatggagttttccatactgcttcacctgtgactgatgatcctgaacaaatggtggagccggccgtgattgggactaagaatgtgataatggcagcggcagaagccaaatttcgacgtgtggtgttcacatcttccataggtgcagtgtacatggaccccaacaggagccctgatgtggtggtcgatgagtcttgctggagcgaccttgagttttgcaaaaacaccaaggtcacttggattcttccttttaattactgcttaagggcaactctaaacttttcct

SEQ ID NO: 3346 - DNA, 1626 bp, Gossypium hirsutum
  Clone ID: GOSHI-09MAY01-C8931_1
ttcctgttgaattaaatgacataccggcaccaggaatcaatggagctgctaacactggcattatggagatgatgggtttaaggaagtcatcaaagcttgctaggcaggattttcctgcactctatggcaatagacataagaagataaagatgctgtttccttatgaagaatttgtaaatttcttccagtgtgaagtctttgacttatcaccaaggggccttctaaattgtgggaacagttgctatgcaaatgctgttctgcagtgtttaacctgcacaaagcctctcagcatctatttgctacatggatcccattcgagaatctgttacaggaaagatcggtgtcttatgtgtgagcttgaacaacatgttatgttgttaagagagtgtggtggccccttgtcaccaagtaggatcctttcacacattcgaactattaattgccaaatgggcgatggaagtcaggaagatgcacatgagttcttgaagtctataaaattcactaagccaatatccctcacaacccttcattttccctcatactcttggttgcttctatgcaatctatatgcttggagagattaggtggggaacacccgcgcgtccccaggttgcaaggagacaacatttattcaacatacttttggagggcgcctttggtcaaaggtaaagtgtttacgatgttctcacgagtcagaaagatatgaaaatattatggatcttactttggagatatatggttgggttgagtcactggaagatgcattgactcagtttacaacacccgaagatttagatggagaaaacatgtacagatgtggaaggtgtgctggttatgcacgggctaggaagcagttgcgcatacacgaggctcctaatatcctgacaattgtcttaaagaggtttcaggagggaaaatatgggaaaataaacaagtgtatcacttttcctgacatgttggatatggttccttttatgactggaacgggtgacattcctccgctttacatgctttatgctgttgtggtgcatttggatacactgaatgcatctttttcaggacattacgtgtcatatgtaaaagatttgcgaggtaactggttcaggatagatgatactgaggtacatccagtctcaatgagccaagtgatgtccgaggatgcatacatcttattttacatgaggtcataccctcgtcctcaaagagcagtatctgaaaagatcaagcaagttcctgctaggcacctcacatcgaaaatggagaagcctacacgaccagcacaaagcaaatccggcagccattctgttggccccaagctttacccagattccaggtccggaactgctgcaggctatatcaaccgtgactctaatggcattcttaggcagagtgcacatagtaacattcaccgagtggtagagatgtatgctgagccatccaacgtggagttctctgatgctacgtcaagtgattggtccctttttacaagctcagatgaagcttcttttacaacagagagtactcgagactcttcagtactgttgattatactgatacaagcaatggtggagatcctttctcaatcttcaataacttgtataccccagaatcatcctcttgcaacac

SEQ ID NO: 3347 - DNA, 507 bp, Gossypium hirsutum
  Clone ID: LIB3582-030-P1-K1-E3
cggacgcgtgggcggacgcgtgggtttggagatatatggttgggttgagtcactggaagatgcattgactcagtttacaacacccgaagatttagatggagaaaacatgtacagatgtggaaggtgtgctggttatgcacgggctaggaagcagttgcgcatacacgaggctcctaatatcctgacaattgtcttaaagaggtttcaggagggaaaatatgggaaaataaacaagtgtatcacttttcctgacatgttggatatggttccttttatgactggaacgggtgacattcctccgctttacatgctttatgctgttgtggtgcatttggatacactgaatgcatctttttcaggacattacgtgtcatatgtaaaagatttgcgaggtaactggttcaggatagatgatactgaggtaaagtcagcttcttcccccccccccccaaaaaaaaaaaaaaaaagaattctttgcttcagtgaaaggttattgattgttttact

SEQ ID NO: 3348 - DNA, 464 bp, Gossypium hirsutum
  Clone ID: LIB3582-003-P1-K1-E10
gggaaaataaacaagtgtatcacttttcctgacatgttggatatggttccttttatgactggaacgggtgacatccctccgctttacatgctttatgctgttgtggtgcatttggatacactgaatgcatctttttcgggacactacgtgtcatatgtaaaagatttgcgaggtaactggttcaggatagatgatactgaggtaaagtcagcttcccccccaccccaaaaaaaaaaaaaagaattctttgcttcagtgaaaggttatcgtgttatcggtcttatgcatgaacatgatggttttacttatttgaaattcgctcattgaaaatatttaatgactgttttttctttagattttatcttttgcaatgggaatgaaacaaggttttggttccctctttcaggtacatccagtctcaatgagccaagtgatgtccgaagatgcatacattttattttaca

SEQ ID NO: 3349 - DNA, 800 bp, Gossypium hirsutum
  Clone ID: GOSHI-09MAY01-C8801_1
ctcgaaattatttctttcttccaccactcgccgccgggagcgccgccactgtcctctggggccgccgacattcttttcctctttctctcgccgtttcgctacgcccttttttcaactgaagccgctatcgctgccgtcctatcaattggttttcctttccattaaattagatggcagattcaagcgagccccaggatcccggaaaggaacttcggcaatctgaaacagaacctcaacaatctgaacaagtctgcaacttctttaggaagccaacgaagggcaaaaacataaggaaaaggacaataaatgaggatgaagatgaagactccagaaatggcacatctttgttgcacaatcaaaaaaaggcttcgaagcctgacaataagttgtacttttcaactggatcctccaagagtgctactgccactgaatcaagtactgaatctcacaagccggtttttcaatttgagtcttccaaggaaattcaagtccaaaatgatagcggagctacagcaatcttagaaactgagactgagtttacgaaagatgctcgagctatacgtgagaaagttcttaagcgagcagaggaggctttgaaggggaaaagcacaagctctgggggagaaaaattgtacactggaatgcatggctatgtggatcataaagctggatttcgaagagaacaaaccgttgccagtgagaaagcaggtggctctcatggacctcttagagcttctgcccacatcagggtttcagcaagatttgattatcaacccgacatctgtaaagactacaaagac

SEQ ID NO: 3350 - DNA, 1423 bp, Gossypium hirsutum
  Clone ID: GOSHI-09MAY01-C8821_1
cccacgcgtccgatgaagtccaagttctacaatggaccagttaatggttcaaagatggggatagatgctgcaaggagccttgatgcttctgccagattggactggagataagcctgtgtcaataatgggattccaggaaagaattgctagactctactgtcattactcgccttattgagattttgaagacatcaccatcaaacctgcaaagaaaagtagcttctatcttggaattcataacaataattgaaccaagcatggaaacaataatcaaagtagatgtatcatctggtttggaagctgtttttcaacaaaaagctggaaaagacaaggaagctgatgtagaaggtcaggaactagacgaatatgctcttgaacttgaggaagctggccttgcagtctctgcagcctcaaggctactaacaaaacttcttgactcggaacagttttgccagaaaatagactctacccatttcaccaaactactccgcaaaatccttaagtccgatatccctcttcgaaacaaagattgggttgccgcttgccttgttaaactgtgctctatatccagtcctaatgtagatttcgagaatccaatcaacatggaggtaactctttatgagacaatcccaagacttatagagcagataaaattgtctctttctccagaaacacaggaatccgccgctgttgaacttaacagaataatttccgaaggggttgtggattccacccgagctgtcgcatctgaggttggtatatttccacttgtgaatcttattgaacaagggagtgacagggcagtcgaagcagccttatcaatactgtataatctgagtatggacagtgagaatcattctgcaatcatagctgctggggcggtgccagcgttgaggaagattgttttatcgcaaagatcacactggtcacgagcacttcgtctgctaaggaatctgcctgtgtgatgccaacatgaatactatgtttttagggccttcgtacagatcctacaatcatttttgttctattcagcaggagccatttctatcgagttataacaatcgcattggtataatttcattggaaagtccatgtttttgtgacaaaagttttatactcagctccttgccttttatcataataatgaactcatgtcagatattgtggaaacctttgatgataaaaaagtttgtccttgaagaaaaaaaaaaaaaaaaaaaaaaaaaaaaaaaaaaaaaaaaaaaaaaaaaaaaaaaaaaaaaaaaaaaaaaaaaaaaaaaaaaaaaaaaaaaaaaaaaaaaaaaaaaaaaaaaaaaaaaaaaaaaaaaaaaaaaaaaaaaaggggggcccccctttttggaggaaccaaattttcttgcccgcgggcctggcaaaagaaaaattttttttttatgggcccccc

SEQ ID NO: 3351 - DNA, 253 bp, Gossypium hirsutum
  Clone ID: LIB3148-019-Q1-K1-F6
cccacgcgtccgatttcattggaaagtccatgtttttgtgacaaaagttttatactgagctccttgccttttatcataatagtgaactcatgtcagatattgtggaaacctttgatgataaaaaagtttgtccttgaagaaactgattgctgctgtgtatgaatatcaatgaacatatttatagcgtgattaagaccagaagtacaaaaaatggtgatgactggcaaaaaaaataaattataataaaataaaa

SEQ ID NO: 3352 - DNA, 2005 bp, Gossypium hirsutum
  Clone ID: GOSHI-09MAY01-C8581_1
gaaaaaaaagagcttccgccacatggaaaggaactccgcggcttccgttccgtatttactcggccactcccttacaaaatagaaacagaacccttcattacctcaaatattcggctccctattactcttttcctctagggtcagggttacctcttcctattctcctccgttctctttcttctgataagctatggaatctaatctcgttatcaaggttaagtatggaaatactctaaggcgtttcaatgctcgaattgttgatggtgaacgcctggatcttaatatgactggactaagggcaaaaattatggggcttttcaattttccttttgatactgaacttactctgacatatattgatgaagatggggatattgttacccttgttgatgatgatgatttgtgtgatgtgatgaggcaacgccttaaattcctgaggattaatgtgcaactaaataatgacaagctcaataaaccttacacaagatcaagtgggggttctactcccttgagatccccatctgttcagcctccattgccaagctttaatactgcttctgctgatgcactgaattctgtaccagtgcctcttcgtgatgctctaactgaagttttctcaaagctttccgtagaagttgcttcgaaagcttcatctgccagtccattgttgggtgatcttttggagtccttgtctaagatgggacaatcctacttgagtcctgcttcccaacctggagttggtgctgattctggcattcctgttggatcttctgagagcccttctggaccatatgctccaactggtgttttaccaaaatttacagctgttgattcaagcttcaagactggcaaggaagccaacactgaaaacgcagcagatggtgtggatgtacctgctgtttctgatccagctgctgttgatttgaatgctgaccctctttatgatgccaaccttactggatatactaccatgccctctggaccatctgcatcgaacatttgtgctcataatgacaagaaaaacacataggagaacaatggacgtaacaaggggaagagtgtgagcatggatgcatcaactcccttctttgatactacaaggaaagattatccttcaaatgaatgtcccttcagtggagtgcctgtagcaaatggccctactgtgcctccggtttcgtaccatcccttcagtccaagtaataggagccttggatcgactgatggaaatgtcttgtttggtacattccacaagggagttcagtgtgatggttgtggggttcttcccattactggacctcggttcaagtctaaagtaaaagacaactatgatctctgcagcatctgcttttctaaaatgggaaatgaagctgattatataagaatggacaagcctatgcattaccggcatccatggtgtttcagggcatcaaatgatcatgttccaagagttggcccagcactccctcatgtcttgaggaatcgtgtactaaagttgtctcggcctaaactagaaagtcactttatcttggatgtcaatgtattggatgggactgtaatggctccatctacaccatttacaaagatctggcgaatgcgcaacaatggtactctgccctggtatcgtgggatgcaacttgtctggattgggggagacaagttaacaaatgcaatctcggttgatatagacattcccgccgaaggtgtgcctcttgatggggacctggacattgctgttgattttactgcaccagagttgcctgggtcggtatgtttcttactggaggatggcatctgaatctggcattaagtttggacaacgtgtttgggttcttatccatgttgattcttccctgaaggattcaatttgccctcgcctccggggttttaacttgaatttgccgcctgaaagcagtggccaaaaagactctcacattgcggatatgaatgctgattttgttactgagctttgtagctctggtgcaagccccgtgccagtgaagcacat

SEQ ID NO: 3353 - DNA, 431 bp, Gossypium hirsutum
  Clone ID: GOSHI-09MAY01-C8561_1
aaaaataaacaactcaaagattagtccgttgatagaaagcgtgaagatcgggtctaagctgggttctcttgaaagtttaaccaattctttgaatcttttgtagtctccctcgtgtatatataaatcaccctcaagagaagagaaaagagctccgcaattcatttcatcttttttcctttttgtaacaactttttttttctaaaggtatatatatttaaagtcttgttgtagtttttagttgtcggtttagggtttttttctttctaaaatttcaatctctttttatcgtttcatgtgtgtaattacaacgaaaaataccccaagggttatggtggagtgaggtgtgattttggaatctgttactttttctttcattttctagggaaacccaaacagtgtgcttgtttacttcaatttttctgcttttttct

SEQ ID NO: 3354 - DNA, 559 bp, Gossypium hirsutum
  Clone ID: GOSHI-09MAY01-C8481_1
aagaaggtgaactatccccaaatggggattttgaggaagacaattttgctgattatggagaagctagtttggagattgctcttaaggtgaaggaaggtgcagcaaacagacaataccagagacatggagaggaggaagtgtgccgtggggaggctgggggagagaatgatgctgatgctgatgatgaaggtgatgaaagtgctcagaggacatcagaggatagtgagaatgcttctgagaatggtgaggtttttggaagtgattctggcgaaggtgaatcgagggaggagcaagaggaagatattgatcatgatgaacatgataataaagtggagagtgaaggggaggctgaagggatggctgatgcccatgatgcggaagctgatgttacattgttaccattttcagaacatttcctgctaactgtaaagccccttgcaaagtacgtcccttcaccattacatgagaacaagaaggattcacaagttttctatggaaatgactcattttacgtgctttttaggcttcaccatacattgtatgcgagaatacaatcagc

SEQ ID NO: 3355 - DNA, 413 bp, Gossypium hirsutum
  Clone ID: GOSHI-09MAY01-C8791_1
cttcctttcccttcatcatcctcctccggcctagtacttcccaaatacatgtctccgagggcaactctttcccaccctctaggcttcaaattcaatcttaattcttcacctaagcttcttaaatcgtttgacccagagtttttcctccatctccgaacccgcaaaacaagttctcttggaggaattttgaccgacaaaactggggtgcgcgactcttcaagaactatgattaaaacttctgtgttaaaggagtctagggacagagacgatgggattcaagcgcttgaacaagaagtagaaggtttcattgacggatcaatgcgggttcaaggtttcgagtccactttgaaccgtctgagcaagtggttggtgtcagctttgtttgagggggtgatactttggaggcctgacgc

SEQ ID NO: 3356 - DNA, 612 bp, Gossypium hirsutum
  Clone ID: GOSHI-09MAY01-C8771_6
ttttgaaaaaaaaaaaaccctcaaaagccctaattcggaaaaaaaaaatcaaaccctttcgccccattcgagcaagcaccgcctggtgatgcgaaagctggggagaagatcttcaagaccaagtgtgctcagtgtcataccgtcgataaaggcgccggtcacaagcaagggccaaatttgaatgggcttttcaggaggcagtccgggacaacaccgggatactcgtactctgctgctaataaaaatatggctgtgatttggggagagaatactttgtatgactacttgcttaatcctaagaagtacattcccgggacaaagatggttttccccggattgaagaagcctcaagatcgtgccgacctgattgcatacctgaaggaatcaaccgcctgattcgtctccggttttattaatatgacctatattttggaactgtgacaaaatgaagaattttgatcaatgatgtattttttttacatggaaaaagaaaccattcttgaaataaaggttaaccatgaaaacgactccaaagataattggagtgaaaatgatttttgttagactaaaaacttttgatgagaggaattggttattcatgatggttatttg

SEQ ID NO: 3357 - DNA, 786 bp, Gossypium hirsutum
  Clone ID: GOSHI-09MAY01-C8771_3
aacaaagctccaccgctaatccttcgataccgaaccttttgaagaacgaaaagcaatggcttcattcgagcaagcgccgcccggaaatgcgaaagctggggagaagatcttcaaaaccaagtgcgcgcagtgtcacaccgtagataaaggcgctggtcacaagcaagggccaaatttgaatgggcttttcgggaggcagtccggcacaactgcgggatactcttattccgctgctaacaaaaatatggctgtgatttggtcagagaacacattgtatgactacttgcttaatcctaagaagtatattcctgggacaaagatggttttccccggattgaagaagccacaggatcgtgccgatctcattgcttatctcaaggaatcaactgcctgatgggtgtgctttttatcagctattttggaacaaatgaaagagtttttgatcaatgatttttttttctttttgttacatgatataaaaactaggcgattcgcataataaaaggaaaacagctccaatataaattgggttttggagttgaaccgagtagtgaaaccgagttgtgtaagaccaatcacatgaaaagtgaggcatttcaaattttcatgatttatttaggctccaacagtttcactgttaggtcctgctaacttgtttaaaaagaaaaaaaactatacataaaaaaaaaaaaaaccaaagaaaactataaaagaacctcatatggaaaactaacatgcaaatcggtcccctgactagatatataggggccatagactaatcaaacc

SEQ ID NO: 3358 - DNA, 603 bp, Gossypium hirsutum
  Clone ID: GOSHI-09MAY01-C8771_1
cacgcgtccggacacacaagaaaaccaaacacggtttctctattattttcttgtcttacttatggccgtcgttaaggctttcattgcttcacttctcatctctcttctccttctccaacttgttgctgctgatcaactggtgacaagtgccagcaagcgcaagggaactgccccccctgcgaaaattgactgcggcggggcttgtgcggcgaggtgccgattatcatcgaggccacacctatgcaagagggcatgcgggacatgttgcgcacgctgcaactgtgttccaccggggacagccggtaaccaagaaatgtgtccttgctatgctagcttgaccacccacggtggccgacgcaagtgcccttgagtgttaatcgacaatcggaacgaatctttctcttttgatgttggtatgaaattaataaacgtatgcatggtttagttaagaataattctaaaaaaaaaaaaaaaaggtgtcctttgttaagcacgaattcatttacttaatcactagttttttttagcgatttattttgaggatggatttttaatttgaggttggatatttataaaaaaaatattcgaatttttttttttttt

SEQ ID NO: 3359 - DNA, 418 bp, Gossypium hirsutum
  Clone ID: LIB3135-046-Q1-K1-D7
cccacgcgtccgcccacgcgtccggcggcgaggtgccgattatcatcgaggccacacctatgcaagagggcatgcgggacatgttgtgcacgctgcaactgtgttccaccggggacagccggtaaccaagaaatgtgtccttgctatgctagcttgaccacccacggtggccgacgcaagtgcccttgagtgttaaccgacaatcggaacgaatctttctcttttgatgttgttatgaaattaataaacgtatgcatggtttagttaagaataattctaaaaaaaaaaaaaaaaagtgtcctttgtaaagcacgaatcattttacttaatcactagttttttttagcgatattatatgatgtatgatttcttattttgagtttgaatatataataaataaataatcgaaattttcttt

SEQ ID NO: 3360 - DNA, 472 bp, Gossypium hirsutum
  unsure (1)..(472): unsure at all n locations
  Clone ID: LIB3584-009-P1-K1-B11
cgtccgcccaaacatcccggtttacgcactngggaccaaacacaaatactctattattttcttgtcttagttatggccatctttaaggctttcattgcttcacttctcatctctcttctccttctccaacttgttgctgcttatcaactggtgacaagtgccagcaagaacaaggggggcgggtcccttttttttttttgactgcngcggggcttgngcggcgaggggccgattatcatcgaggccacacctatgcaagagggcatgcgggacatgttgtgcacgctgcaactgtgttccaccggggacagccggtaaccaagaaatgtgtccttgctatgctagcttgaccacccacggtggccgacgcangtgcccttgagtgttaaccgacaatcggaacgaatctttctcttttgatgttgttatgaaattaataaacgtctgcgtggtttngttaagaataattctt

SEQ ID NO: 3361 - DNA, 366 bp, Gossypium hirsutum
  Clone ID: LIB3147-005-Q1-K1-B8
cccacgcgtccgcccacgcgtccgttctccttctccaacttgttgctgctgatcaactggtgacaagtgccagcaagcgcaagggaactgccccccctgcgaaaattgactgcggcggggcttgtgcggcgaggtgccgattatcatcgaggccacacctatgcaagatggcatgcgggacatgttgcgcacgctgcaactgtgttccaccggtgacagccggtaaccaagaaatgtgtccttgctatgctagcttgaccacccacgggggccgacgcaagtgcccttgagtgttaatcaacaatcggaacggattttttcttttgaaggtggtatgaaaataataaaccgatgcctgggttaagt

SEQ ID NO: 3362 - DNA, 375 bp, Gossypium hirsutum
  Clone ID: LIB3272-038-P1-K1-E9
ccgaaccttttgaagaacgaaaagcaatggcttcattcgagcaagcgccgcccggaaatgcgaaagctggggagaagatcttcaaaaccaagtgcgcgcagtgtcacaccgtagataaaggcgctggtcacaagcaaggtcggtcagatctgattttgttcttcattgaattcaggccaaatttgaatgggcttttcgggaggcagtccggcacaactgcgggatactatgattgcggtgcatcagagcactgcttacatgttttcaccggacacagtcggtgactacgagatgtgtccttgctatgctagcttgaccacccacggtggccgacgcaagtgcccttgagtgctaattgacaatcggaacgaatct

SEQ ID NO: 3363 - DNA, 363 bp, Gossypium hirsutum
  Clone ID: LIB3166-032-P1-K1-D1
ctgtttctttcttataattaggtttcagtcatggctattgtttctaaagctttgattgcctcacttctcatctctcttctcctttttcaactggttgaagctgatcatcaactggtgacagatgctaggaagggagcctctcccccgaagaaaattgactgtggtggagcatgtgcagctaggtgccggttatcatcaaggccacacctatgcaagagggcatgcgggacatgttgcgcgcgttgcaactgtgttcctccaggaactgccggttaccaagaaatgtgcccctgctatgctagcttgaccacccatggtggcaaacgcaagtgcccttgagttgatatcgacttgaaacgagcc

SEQ ID NO: 3364 - DNA, 642 bp, Gossypium hirsutum
  Clone ID: GOSHI-09MAY01-C8711_1
cccacgcgtccgcattttctctcaactgtctcgcagccgatcttcctaacctcccatctggcccatggctaccaaagaaaacttattctcttgctccgtgaaatgcgtaaaataaaacatgatttcatcctctttgaaagcacttaaaaaaaaacccttcaaaacattatttcatcctctttgaaagcacctaaagaaaagcccttctcttccgcgagtccatcgaaaatatgaggttcaaagccctcttcgttgcgaaggttttaatacctgctgaaacaccatatggttaagttctcttctccaactttgtttttcgtatttgaaatgttttggttaaactttaggttttatttggttttaaaaacatcatgccaacataaaaaccgaacctttgaaagtattatttggttaaactgatgaatatcttgtattttccgcgctgttggatacttgggttgttttgtctaatttttgcaggaataagctttgtgacaacacagagtgcattttggtaatttttgtgtgtatattctctgatttcttgggtgcccttccatatcccgattgtgatctctatttggtgctcttccttttctggaaaaaattataattaaaattaagattcattttaaggcaaaa

SEQ ID NO: 3365 - DNA, 405 bp, Gossypium hirsutum
  Clone ID: LIB3148-013-Q1-K1-E11
attttctctcaactgtctcgcagccgatcttcctaacctcccatcttccccatggctaccaaagaaaacttattctcttgctccgtgaaatgcgtaaaataaaacatgatttcatcctctttgaaagcacttaaaaaaaaacccttcaaaacattatttcatcctctttgaaagcacctaaagaaaagcccttctcttccacgagtccatcgaaaatatgaggttcaaagccctcttcgttgcgaaggttttaatacctgctgaaacaccatatgagacgctccgtgagctttagacctcgtgagctggattaattgagattctatacttgacgacatggatggaatattttttatttatgatgacaaaacatcaatagatggggattaagttaatttgcatatt

SEQ ID NO: 3366 - DNA, 1055 bp, Gossypium hirsutum
  Clone ID: GOSHI-09MAY01-C8651_2
cccacgcgtccgatacccaactattgaactccccatttattccttttttccccctccgccaccctctcggccgcggccgtcgagccgaatcgcaaccatcaaggatcatccgcgaaatttcactctatggcacccataaagggcattctttccttgcaaagggcatctttgttaagagcttgcggtgaaaggtggaaactaggcactagatcatttagtactcaaggagcaacaactgctgatgctccacaggcacctcctcctcctccaccgcctgaaaaaacccattttggtggtctaaaagatgaagaccgtattttcaccaacttatatgggttgcatgacccttttctcaaaggtgccatgaaacgtggtgactggtatagaaccaaggatttagtactcaagggtgctgattggattgtgaatgaaatgaagaaatctggacttcgaggacgtggtggtgctggatttccatcgggcctcaaatggtcttttatgccaaaagtatctgatggtcgtccttcttatcttgttgtcaatgctgatgaaagtgaacctggaacctgtaaggacagggaaattatgcggcacgatccacacaaactattggagggctgcttgattgcgggggttggaatgagagctacagctgcttatatctacatcaggggtgaatatgtgaatgaacgtaaaaaccttgaaagagctagaaaagaagcttatgaagctggactattgggcaaaaatgcatgtggttctggttatgattttgatgttcacgtccattatggtgctggtgcctatatttgtggtgaagaaacagcacttttagagagccttgaaggaaaacaagggaaacctagattgaaacctcctttccctgctaatgctggattatatggttgtcccaccactgtcacaaatgtggagacagtggctgtttcgcccacaatactgagacgtggtcctgagtggtttgccagttttggaaggaagaataattccgggacaaaaattgtttgtgtctcaagtcatgtcaacaagccttgcac

SEQ ID NO: 3367 - DNA, 1201 bp, Gossypium hirsutum
  Clone ID: GOSHI-09MAY01-C8651_1
cccacgcgtccgatgattttgacgttcacatccattttggtgccggtgcttatatttgtggtgaagaaacagcacttctagagagccttgaaggaaaacaagggaaacctagattgaagcctcctttccctgctaatgctgggttatatggttgtcccaccactgtcacaaatgtggagacagtggctgtttcgcccacaatactgagacgtggtcctgagtggtttgccagttttgggaggaagaataattccgggacaaaattgttttgtgtctcaggtcatgtcaacaagccttgcacagttgaggaggagatgagtataccacttaaggagttgatagagaggcactgtggaggtgtcagaggtggatgggacaatttacttgcagtaatacctggaggttcatctgttccacttttacccaagcacatatgtgatgatgtcttgatggattacgatgcactcaaggctgtccagtcaggactgggaactgctgcagtaattgtgatggataaatcaactgatgttgtagatgcaatcgcaaggctttcatacttctacaagcacgagagttgtggacagtgcacaccctgcagggaagggactggatggctctggatgatcatggaaagattgaaagttgggaatgcaaagttggaagagattgacatgcttcaggaggtgaccaagcagattgaagggcacacaatttgcgctttgggtgatgcagcagcttggcctgtgcagggtcttatacggcattttaggccagagctggagagaaggattagagagcgtgcagaaagggagttgctggaggcttctgcttaatctctgctcagggattacctgtgcaagtggccattatggaataaaattgaagtacccaaaacttggagaataggtgactctcaggcatctggtgttgtggaagtgttttatttgttatctcctaagctgttgtgttaacaacatttcactgttttagaaaataatgaatgtctccaatgtctgggctatacttgtttctcatagcatccacaacgttttcttttttggccatttgatgaacatggctaatgatctgtattctttttatttctttttgggaacatataatgggatctgtatttttctttggtcatagatgtcgtaggataaaaataaacgttttcagagaaataaaataaagttatact

SEQ ID NO: 3368 - DNA, 1442 bp, Gossypium hirsutum
  Clone ID: GOSHI-09MAY01-C8641_1
atccgggtcgcgcacgcgtgcgacccgcgtacgcccacgcgtccgcccacgcgtccgcccacgcgtccgggacaattgggcaattggggaaaatgcaagtccttcactggattcgggcaggcaaaatcgatacggtgggcttggaactggaggaggtggtggattctctaaggccgatgaggctgataattggacggctctaaaacggtcaattccatctcgatcttcgacatttggttcaggtttccgtgactcgggaccagagcctgatagatggtcccgaggtgggggtggaggtggaatcagagaggaaaggcctagattagttttggatccactgcgaggggatgtgaatgagcttgtggttaagacaaataagtcgaatccttttggggcaccgaggcccagggaagaggtgctagcggagaaaggattggattggaagaagctggactctgaaattgaggcaaagaaggaaactagtaggcctaccagcgcccactccagcaggccatcgagtgcacaatctagcaggtccgaaggtcccctgcagcaagcgattgaaaatgtcgttaagccgaggcctaaggtcaatccgtttggtgatgctaagcctagagaagttttgctggaaggccgaggtcaggaccggcggaagattgatcttgaattagaccgtcgcaggatagacaggccagaaacagaggaggaaaagatattgaaagaagaaatagataacttaaaggagcttgagaaagattcgaccccaacttcggaatctggggaccaacactctttacatgaaaagcttcttcacaaggaaagggaattagagatgctgatactagatttggaaaacaaagctagatttgggcagaaagttgttgaaaggcctggttctggagctggcaggactggcagcttcacggatagacctcctcctcaatctggatccattgatggctctagaagtgtggagttcatggataggcccagatctcgtggtactgctgatgcatggacaaggccaggtgatgaccgaagaggatttcaagctggcagggatagaggatttgtaggaaacagagatatggacaggccaaggtcaagggagagatggtgaaccgccattgtcattgttttgttcaactctgacaacatggaccaataatattttgtcacctctcttcttttcctactgttcttttgctctggtaaagtggagcaaaggattcttggaaacagggagctatgcgttaaatcttcataccatatgtaatatggccactcagcccgtcattctttttatttttaatttctaaagcaaggagcctgtatttggtaggactcaaattttgtttaagaaacaatgtgggattcaccagtttatttttaatattccattggaatgttatagagataatgtagtgtagaggttggtg

SEQ ID NO: 3369 - DNA, 637 bp, Gossypium hirsutum
  Clone ID: GOSHI-09MAY01-C8621_1
aataattaagttatttattttctttctttgtgtttcaggatcactgcaagatccgcggaggtccctctctctttgcttccataccttccttaccttttgtcactgaatttttgcaggccccgtcctcccaccccatccctgttcttcaactaatagggttttctctttataaacacccacattccactctcatacatatattaataatataaccctaagtgaatttttcatctttctgttgctgcatagtcttcctcattgggacaaaatagatcatttatcaaagggtttacaggaacctactcaaggggaataaagatcaaagaaaatggcatcttcaagctattcaaacccaccatgtgcagcctgcaaatgtttgagaaggaaatgcatgccagattgtatatttgcaccctatttcccaccagaagagcctcataaattcatcaacgttcacaagatattcggtgcaagcaatgttagcaaattgctaaatgatgttgccgccccatcaaagggaagaggcagtcaactccctcgcctatgatatctatgcaaggattaaagatctctgtttatggctgctttggagccaattttgtctctcaaaatcaatttttagacttcaaaatgattg

SEQ ID NO: 3370 - DNA, 624 bp, Gossypium hirsutum
  Clone ID: GOSHI-09MAY01-C8141_1
cccacgcgtccgctaaaaccctaaaaaaaacaagaaacctttcaatggaaggagcacaaatggaggattttcggatcgaagagtgtgaaaatgacaacaatacacacgaagattctcaaatggaagaatctgagcaaaacaataaacacatggaggtcgcacccgccgttatttccgtccacccgacccggaactcagttgcagtcgctgtcgggtcggaccttcgtgtcttcaatctcctagaagattgtgctgtgattttggtggatgaggcaggcggggcttcacataatgattcaattagaggtattaaatatggagcaaatgggaaactctttgtatctgctggagatgacaagcttgtcaaggtttggtctaccgagtcttggcgctgtattgctactgtgtgttctgagaagagagtgagtgcagttgctataagcaatgatggtcttcatgtttgttttgctgacaaatttggagtggtttgggtagtggatcttccaggggttgatgaaactcaagctcctcttaacaagaaggcagtgccattgcttgctcattattgtagtatcattactagcctggagttttcacctgatggacattttattgtcagtgctg

SEQ ID NO: 3371 - DNA, 571 bp, Gossypium hirsutum
  Clone ID: GOSHI-09MAY01-C8051_1
cgaactaatcatctactaaactttaaccctttttccatttgcaacagagagtgaatacatggctacctccagcatggcatgagctgcttcagggttcttgctcacacccaatgtcgcagcgaattcaagctccacttctaagaccaccaccgtgtttttcccttcaaagaacaacaacaattccaggcttgtggtgacgagggcagctgacgaggctgctgcaccagcaccagctaccaccactgcaccatcagaaggcggtgaagcccctaaacctaagccaccaccaattggaccaaaaagaggaaccagggttaagattcttagaagagagtcctactggtacaacagctttgggtcagttgttacagtcgaccaggaccctaagactcgctatccagtggtggttcgattcaacaaagttaattacgccaatggatcaaccaacaactatgccttggatgagattgcagaagttaactgagtcatttaattcttaacattttttcggcattaatattgtccttcttccctttcatctctagaattaagcttaatatttgtacccccc

SEQ ID NO: 3372 - DNA, 676 bp, Gossypium hirsutum
  Clone ID: GOSHI-09MAY01-C8071_2
tcgcccacgcgtccgcccactcgtccgcccacgcgtccggaagagcagaattttattgcaatgatgaatgaagcaagagagaggcgagctaagttgaatgcggatgccccaactcttcccatggagattagagccgaaaaggctgttgatgccatttacgtctgttgcttcggcagagacccgatagaagaggaagacgagagcttgctaaatatcatgctatgtgcagctttcccaaccgtcaagcgatcaatgatacaaagaatcatcaaggacaaagcaatcaaagtagcagaaggtggtgatgatgcagacatcgttccagaaccaaagccattatcaaaggaagctgtacaaatgcaaatgaaagaccttgaattccttaaacaaaacacggagacatgaaagagctgattttaatgaaaaaattggagtcggttcgcttcttcgaactgcacttggatggtatcagaaaatgaagctaaggaaatggctccatattgaaaccatccaacacttgattttcagattgcactcaatggcagataaatcataggtttactgggtcttcagtatgttttgtttcttggaggttgagttgaaactcatttttagggtgtaaccattaaaggcaacagtttgtgagtgaaatacacgttcatagcaatgtttttgg

SEQ ID NO: 3373 - DNA, 627 bp, Gossypium hirsutum
  Clone ID: GOSHI-09MAY01-C8071_1
cccaactccaacaaaacatcaatggcggcagctaagccattgccgtcatctcttcacactcaccaaattctctcttcatgcaaccaaattttaccttcgctcctccatttccgtcaacattacagcaacccgaaatgccaacaaccacaaaggcgaagaaaacactcaagctccttagatggcgcctacgacttggctatcaaagcttacatggaaaacccaaactccatctctggtttcgcaaacaaagtcattggctctctccctatagtcggccttgtcgctaggatttttagtgatgaaggcggtgttggtggggatatcattgattttgctgagtttagaagaagggtgggcaagaaatgtactgttactgattctagagccttttacgagttccaagaaaggagaggccggggaggggatcctttgtatgttctgctatcatgttggctagcagctgtgggtgctggtcttcttaaatctgaggagatattggagggggtggcaaggcttcggatttccaatgatatcgaattcgaagagcagaattttattgcaatgatgaatgaagcaagagagaggcgagctaagctgaatgcggatgccccaactcttcccatggag

SEQ ID NO: 3374 - DNA, 519 bp, Gossypium hirsutum
  Clone ID: GOSHI-09MAY01-C8061_1
cccacgcgtccgaaaaaagtaaaccagagagaaaaaagagattcagctttcttaattttttggctttggtttttgtttttttgcaattctgttgttgtaatttgattgatttacgtgttaatcaacaagatttggtggtgaatttgactgaaatttaaggttttttagggattgttcgtggatattatgatttttttttcgagagttaatcagatgagagatctgagctaaaaaagagattttgaaaaatgacgaatacggaggtagctatgaaagggaattgtgtgaacggaagaggaggaggagagagcttttcttctggttatagtgagccaaatgatggtaggaacaccgtggaagggcaaaatggtcattcgactcgtcaagctccggctacagaccccgaatcggcgttgtataatgaactatggcatgcatgtgctggacctttggtcactgttcctcgtgaacaagatcgtgtgttttactttcctcaaggtcacatagaacaggttgagg

SEQ ID NO: 3375 - DNA, 270 bp, Gossypium hirsutum
  Clone ID: GOSHI-09MAY01-C8011_1
ggaaatttccagctctggactattgacttccagctcagttcctctctcgcactatgatctgtatttttaatataatatatgagagaagaacatgcaaccttcatccacttaaatcaatgacaccctctttcttcctgtatctctgcatctctttgtggtaactaccatctttgttcacgatggagattactgtacattctccattacatttcctttactaataaactatgttccatagacttgttctaaaaaaaaaaaactacattccaa

SEQ ID NO: 3376 - DNA, 668 bp, Gossypium hirsutum
  Clone ID: GOSHI-09MAY01-C8391_2
cggacgcgtgggttccattccacgggagtattttttttcccttttcattttttgccctcaccttggcctgcccctctccgcgcctcccctgcgtttcccttttttcccttcttatttcccttttttccttcattactgatgttgaaattccgctggaagaaccataaaaaagacatcaatatcagcttcaagtatcagaggagagaaattcaagattgctcctttttctctctataaattaattattattatcgaaaatggctatttcctctgtttatttgttaatcgacaatgagcgatcaatcggaggaattgcctctcatggctcccccaccgacactgaccccaacgagatcgacctcgaggccggtccagccgatcaaattcagtgtcgaatttgcctcgaaaccgacggtagagattttattgctccttgcaagtgcaaaggaacatcaaaatatgtacatcgggaatgtttagatcattggcgagctgtaaaggtataaacattgataccctttttcttcatttttgaacagtgaacttggaattctttatactttacttgtactatggtttcactggcgtctgtaggagtgcttttctttacaggtaaattgtttgtatgtttatacaacatttacaacaatcaataaaacttaaacaag

SEQ ID NO: 3377 - DNA, 904 bp, Gossypium hirsutum
  Clone ID: GOSHI-09MAY01-C8391_1
cggacgcgtggggcaaaattaagaaaagaaaagaattcatatgtaaaataatagaagaaaatatacatactgaattactgatgttgaaattccgctggaagaaccataaaaaagacatcagtatcagcttcaagaatcagaggagagaaattcgagattgctcctttttctctctagaaatttctaggttttaagactccgtcttaattaattattattatcgaaaacggctatttcctctgtttatttgctaatcgacaatgagcgatcaatcggaggaattgcctctcatggctcccccaccgatcaccgagcccagcgagatcgacctcgaggccggtccagccgatcaaattcagtgtcgaatttgcctcgaaaccgacggtagagattttattgctccttgcaagtgcaaaggaacatcaaaatatgtacatcgggaatgtttagatcattggcgagctgtaaaggaagggtttgcatttgctcattgcacaacctgtaaagctccttatcatttgagagttcatgttgctgctgatacgaaatggcggactttgaaattccgtttttttgtgacgagagacattttatccatatttctggcggttcaactagtcattgcttcacttgcatatttggtctatctaattgatggttaccagcagtcatggctccgtcttgcatggggttttgatagcgagcttattttctattacatatgtggggcactgctattttttgctttgctggggctatcagggtgctttattacatgctatgatcgacgagtgcgtaatgatttggctcacccttgtagagaattatgcctctgttgttgtcagcctgggatgtgtgctgactgccacttgcctggcactctttgtatgtggactgactgtat

SEQ ID NO: 3378 - DNA, 404 bp, Gossypium hirsutum
  Clone ID: GOSHI-09MAY01-C8381_1
cggacgcgtgggtgatgatgagcagctcctcctgacatattgaaaaagaccaaccttttcatattcttcataaagtccctcagggtgatactcctcatgttaaagccaaacatgctcagctggttgaaagggatccagacgcagcaattgtactattctggaaggcaataaacgccgggcatagagtagagagcgcactacaagacatggcgggggtgatgacgctactcacccccactgacgaagcagattgatgccatcacgtctttcatgggccgtcgccccaaacacgctcatgaatcactcgacaatgttctcattgacttatacctgatatgtgggaaaggagacgagctgattgagctattataacgaaagccacgattactataccgaggagagat

SEQ ID NO: 3379 - DNA, 655 bp, Gossypium hirsutum
  Clone ID: GOSHI-09MAY01-C8351_1
atcatctcgacgagaactggcgcccacgcgtccgaaacgcaataattcaatccgacgatggtccacacattttagctggaggcctcaattccttggaggaaacagattactccacagagagatggactgatattgttaagtactatgaagaaattggtaaaccaacaccaaaggttgaagtaatgaaatacctgaagaataaacagtacactgatgccaaggatttctcaggggaatgtgagcccgtcgtcgtgattgccaaaggacaaagtgtgcaagggacatgcaagtacggtactcgggttgattacatactagcatctccgaattcgtcgtacaaattcgttccgggttcgtattcggtattgtcttcaaaagggacttcagatcatcacatagtgaaagtcgacgtagtaaaaacagatgataatttcatagaaatggcagccggaagcgacggcaacaccgaaacagatagtcctgaagataccggagacagttctcctcaaaaacatatggtaaacacttcatgacgggagaattataccttgctttaataattttgaatagaactatagggtatatcggtaaactatatgaaggttcttactagaatcatatggatttggccatcattaaaaataggcactaatcc

SEQ ID NO: 3380 - DNA, 618 bp, Gossypium hirsutum
  Clone ID: GOSHI-09MAY01-C8371_1
tcctagtgtaatttcttgtatttggacgtcccatcatctatttgattttggttttccttcgtctttttggttctttttcttccttcaaaatcccgcggacgcgtggggacgatcacaaataaaggaaaacagaagcaaatcttttccgtgaaaagattcacagggccggggacggggaagagagccagcagttcttgggatgaaccctaaacaccttccaccgtagtactattactgtttgcctgatcagacacaagccatggctacaaagagattgtaatctgttagtgaaagatttaggtagcttagaatttagatagtttaggcagagccctcccttcggccttggctctactctccggcacttgaaatccagacaaaaacaaagtccaagttgaaaaaagaaaatcccacagagataaccaaaacaccaacccttgttttcatttttgttttgttaatggattctgcttctgtagggggtgctgcaaccgatccgaatagcgtcaacgagggtccatcatctgctgtagttacagcttcagcaacgccgcccacggttccacaacaaggtggagctggtcgtcttcttccccagctccaccgagtcgctacgag

SEQ ID NO: 3381 - DNA, 517 bp, Gossypium hirsutum
  Clone ID: uC-gsflmaxxa029h09b1
attttatttttcaatccaattctttatctacagtagaggacgggttactttcaaaccccattttgttcctagagtgatttcttgtatttggacgtcccatcatccatttgattttggttaccctttgtctttttgggtctttttcttccttcaaaatctttctattatcgactctgactatcacaaattaaaggaaaacagaagcaaatctttaccttgaaatgattcacatggccgaatactgtgaaacaaccatcatcacattggatgaaccctaaacaccttccaccgtagtactattactgtttacctgatcaaacccaagccatggctacaaagagaattgaatttgttaatgaaagatttatatagcttacaatttatattagttaggcagagccctccctttcgccttgggtttactcttcggcacttgaaatccagaccaaaacaaagtccaagtttaaaaaagaaaattccacagagataacccaaacacccacccttgtttcatttt

SEQ ID NO: 3382 - DNA, 642 bp, Gossypium hirsutum
  Clone ID: GOSHI-09MAY01-C8331_2
ctgagcaagagatggatcgtagagataaagaaaggatggccaagctccgcactttgggtaatattcgtttaattggcgagcttctgaagcagaaaatggtgcctgagaagatagtccatcacattgtacaggaacttttgggccatgacagtgcggcttgccctgcagaggagaatgttgaggccatttgtcagttcttcaacactattgctaaccaactggatgagtgcccaaattcgcggcgagtaaatgatacatacttcaccagattgaaggaattgactacaaatcctctgcttgctccaaggttgagatttatggttcgtgatgttctcgatcttcgtgcaaacaaatgggttcccagacgggacgaggtgaaagccaaaacaattacggaaattcattctgaggctgaaaagaatcttgggctgcgtccaggtgctactgcaagtattacaaataatcgtcttgttccagttggttctgatactactggtcctggtggatttcctatcacccgcccctgtactggaggtttgattcctgtaatgccaggaacccgtataatgcctgctatgccttgaatagacaatgataatatggaagctcctatgcgtcggtcaatgcccacgggtgatgcac

SEQ ID NO: 3383 - DNA, 1588 bp, Gossypium hirsutum
  Clone ID: GOSHI-09MAY01-C8331_1
ctcttctttgctctctcgcagaagagagagaaactctcaccttcaatctcctttctctctctagaaacccccctaaaagattccatttttgtacatttaaaaaacttaaattttctccctctttttttttttaatctttcatatattcacattcagcgtttttacgtatcgctgagttatttgttcttttttgaatcggtcggcagagattgaatctcacgtgataagatctaggtatgcagcaaggtgatcaaacggtgttgagtttaagacctggcggtggtcgagggaacagactttttggtggtccttcgtcatcttcgtcgtcatcatcatcctcgtcttcttcattagcatttggttccttttcttctgatcttcctctatttcgttcccatggcggtggcggtgcttcttctcttaaggctgcagactcacgttttgagggccgtgaacgtgtgcggtacactagggaccaacttctacagcttagagaggctgtaaaagttgctgatgagattcttaaaatcaaacaagattttgaagtggagctcttcggtgaagataaaagctggagtcgtggagaaagcaatcctccaaattatagtcagaaccgctactctgaacctgacaaccgtgattggtttagccgttcagcacagtttcctccggctggagatgagaggtcccgggaattgcttcggggtagagatttggggaaccgatttgattccagacaacaagaagctaataaatttaatcgccaagaacaattcaaccctcaaatttcaagggcacaaaactcttctacccaagggggaggatctactccagccttggttaaggctgaggtgccatggtcggccagaaggggtaatctttctgagaaggagcgtgtcctaaagactgttaaagggatattgaacaagctgactcctgagaagtatgatcttctgaagggccaacttattgattctggtatcacatcagctgatatcttgaagggtgttatttctctaatatttgagaaggctgttctggagcccacgttttgccctatgtatgctctcttatgctctgatcttaatgataagctcccctcattcccatccgatgaacctggtggaaaagatgttacttttaagcgagtcctcctgaatacctgccaggaggcatttgagggagctgacaagctcagggaagaagtgaggcttgatgactgcccccgagcaagagatggagcgcagggataaagaaaggatggccaagctccgcactctgggtaacattcgtttaattggcgagcttctgaagcagaaaatggtacctgagaagatagtccatcacattgtgcaggaacttttgggtcaagattctaaagcttgccctgcgagagatgttgaagccatttgtcagtcttcaatattattgtaagcagcttgtgagaccccaaatacgggcataatgatgtactaacagactgaagaatggctcaatctcaattgaccggactaaaatatggtcgacgcttattctgcaacacggttcagggtaaggagcaccattcgaacctttagtgaaaaattgg

SEQ ID NO: 3384 - DNA, 783 bp, Gossypium hirsutum
  Clone ID: GOSHI-09MAY01-C9981_1
gctgtttccagttataacttatgtcatagaaataatcgatttctagattattagcttacttatttctcaatttttttctgggttttttttctttataggtgtcagaaacgatgtggtttatgaatctagtcaagctcttatggagaagggggcggtcgaggcttttgaggttgccatggtgaggactcaagctcgaatagtcgaaggggatgcgggtaaggtaatttgcaaggaagcagagaggttgaagccagcagcagtggttatgggaactcgtggtagaagcttaagtcaaagtgtatttcaaggaagtgtaagcgagtattgcttccacaactgcaaatccgcacccgtcataatcgtacctgggaaagaagctggagatgaatcactgatatagtggcaaaggcaatggttaacttgagaaaccattagtcatggaatcgatattgtttgcttgtagcactgtatgtaaagattgattgcttggttgtttatctgaatggttgcattgtatgggctgtgttgcttcagagcctcttatctagtggtaccatacgatatattgggtgtaatatattcggtttggtatttcgattttatttgccgattatgcatccgaagtgcatcagattaccgcccgctgaccgcctcaaaggactctacttcacagcaatctttcttcatggcattaaacaagtgcttgctaataaaatagatattattaattaagactcgggggcggactaatccttggggttaatctgggtgttactggagaag

SEQ ID NO: 3385 - DNA, 472 bp, Gossypium hirsutum
  Clone ID: uC-gsflnu33B143b09b1
ctcacgcgtccgaaaatccaggaaaacccgagttcagaaacgaaaacaagattgctattttctttcattttgggaattaatcaagaaaatggagacggtgatggaagatgaagagtacaattacagagaagtaaatttgccttcgctgatcccagtagtcccagagccagcactagagagggaaacaggggagagaaggagaggccgagatatactcattgctattgatcacggtcccaagagcaaacacgcctttgattgggctcttattcacttcctcaggcttgctgataccatccatcttgtccatgctgtttacagtgtcagaaacgatgtggtttatgaaactagtcaagctcttatggagaagttagctgtcgaggcttttgaggttgccatggtgaggactcaagctcgaatagttgaaggtgatgctggtaaggtaatctgcaagggagcagagaggttgaag

SEQ ID NO: 3386 - DNA, 717 bp, Gossypium hirsutum
  Clone ID: GOSHI-09MAY01-C9931_1
agctgcgagcctgggatgagaccaataacacccagcccgaaaagctcatttggaatcttatgggaatgatgaacaactgctggttccgtgtaaaaacaaacgtgtgcaggccacacaaaggtgaaatcgggattgttttcgagcacccgacactgccgggcaaccaatccggtggatggatggctaaggaacgacaccccgaaaacccaaccataaagaagagtgtctcttctcctttcatgaacactgcctccaaaacattttcaatgtccgaggtcaataaacacaactctgctgattcggcttggatcgtcctcccacgcgtccgctatgattgttcttggttcctcaaggatcaccctgggggcagcgacagtattcttatcaacgccggaaccgactgcaccgaggagttcgacgccattcactccgacaaagccaagaaaatgctagaagattatcgaatcggtgagttgttaacgtcgggatatgtttccgactcggcggggtcctcgcctaatacttccgtgcatggagcgtccaacatgagctttttagctcctattaaagaagttgcgcccacaagacctgtggcgcttattccacgtgagaaaatcccatgcaaactcgtcgaaaaaacatccatctcccatgacgttcgtcggttccgattcgcgttgccgtcggaagatcaagtgctcgggttacctgtaggga

SEQ ID NO: 3387 - DNA, 432 bp, Gossypium hirsutum
  Clone ID: GOSHI-09MAY01-C9881_1
cactaattctatcttctccaagtcaaagtttcaaagttaactcttgcctttgtagaaaatggattttcttggaatttttcttttgtcttctcttgccatgttgaagacgattcatggacatggaggtgcatggtctaacgctcacgctacattctatgggagcagtgatgcgtctggtacaatgggtggagcatgtggctatggaaatctttatagccaaagctatggcacaagcactgctgcattgagcactgctctattcaacaaagggctcgcttgtggggcatgctttgagatcaagtgtgttaatgacaatagatggtgtctcccacgctccattatagtaacaagcaacaaacttctgcccaccaaacaacgctctcccgaataatgcaggcggatggggtaaccctcctttacgacactttgatc

SEQ ID NO: 3388 - DNA, 585 bp, Gossypium hirsutum
  Clone ID: GOSHI-09MAY01-C9811_1
aagctaaggtaccgcctgcatggtacccgtgtccggatattcctcggagtcgatcccatcgcgtcctatctgaattattcaaaatgatgaaatatagatcgattgatggttttcctttaactacaaaggattatgtacaccgaatagggaggactggaagagctggtaggatgggaggtgctcacacattcttcacacagcaaaataagggacttgctggagaactggtaaatgatgtaaacgaagctgggcaggttgtaccacctgcactattgaaatttggaactcatgtaaagaaaaaggagtccaagctatatggggctcacttctaggaaatagctgctgatgctccaaaggctaaaaaaataacatttgatgactcggatgatgaaaactgacgcacatggcctgcagtaaaatatgtagaattggttaatagaaactggtacacactatttttaattctatgacgttccgccatatttatttactttttttaaaccagttttgttaaagcattaattgatctgaatattcatcattctggtgttactataaaacctagatttgattattttcattgat

SEQ ID NO: 3389 - DNA, 892 bp, Gossypium hirsutum
  Clone ID: GOSHI-09MAY01-C9551_2
gccgggattccgggccgccgagcctcgtggagctcctcattcctaacgaaattatcgagtatttttttcacaaacccataaaattgtctaagttatggcggaggaagtgaagaagcaggctgaagctgaaacgacggcggctccaccgccggcagtggaggttccaaaagctgaatctgaggaaaaaactgtatctccaccgccagcagaggagaaacctgaagagtccaaagctcttgttgtagttgagaaggctccagagcctgaaccaaagaaaatctcaggaggatcacatgatagagatattgcccttgcagaggttgaaaaggcaaaaaggttgtcattcatcaaggcatgggaagaaagtgaaaagaccaaagcagagaataagtcccagaaaaagctctctgctattgtagcatgggagaacagcaagaaagcatctctggaagcaaaactgaagaaaattgaggaacaattggaaaagaagaaagcagaatatgcagagaaaatgaaaaacaaggtagctttgcttcacaagggaagcagaagaaaagagggcaatggttgaagccaaacgaggagaagaggttctcaaggcggaggaaatggctgcaaaataccgtgcaaccggacaaactccaaaaaaggtcctcgggtgtttctgaagttcaaaagcttggggtctgaggttgaagcaaatgtgaattttgactggtgttgtttgaagcttcccgtttttcatctgtatatctcttggtttctatgtttgttttgtgtgtaaacagtaacatcacaaatatttaatctaccatcgtatttgttgattgatatagttttcgttttggttcttttagacacaagttggaggtttccatctggacttattaaa

SEQ ID NO: 3390 - DNA, 917 bp, Gossypium hirsutum
  Clone ID: GOSHI-09MAY01-C9551_1
cccacgcgtccgcggacgcgtgggaaatattatagagataatcgaaaattttctagacttatccattaccaaattattatcatttgtctttttcctttcacaaattgtacacctataagctttaattatggcggaggaaacgaagaaggaggttgcggctgaaacgcccgtggctccgacgccggcagtggaagctccaacgccggtagcggaggatctcaaagctgattccaagaaaacaaccgtagctccaccgccagctgaggaaaaatccgatgaatcgaaggctcttgccgtcgttgagaaagcccctgagccagcaccaaagaacagttcaactggatcacatgatagagatgttgctcttgcggatcttgaaaaagaaaaaaagttgtcattcattaaggcatgggaagatagtgaaaaaaccaaagctgagaacaaggcccagaaaaagctctctgctattgtagcatgggagaacagcaagaaagcagctcttgaagcaaaactcaaaaaaattgaggaacaattggaaaagaagaaagccgagtacgccgagacaatgaagaacaaggtagcttcaattcacaaggaagcagaagaaaagagagcaatggtcgaagccaaacgtggagaagaggttctcaaggccgaagaaatggccgctaaataccgtgcgaccggacaaagtccgaaaaagctccttgggtgtttctgaaagtttctcggtccggttttgaaatgaatttcattaaaatttgtttgcttgcaaacattttttttttcctctgtttgtaactccatgttttcaattgtgtttatctatcttgtttgtttctatgttgtttttgtgtcttgagcaatgtggaaggacatcattacaaattatgtattattggatgtgttgttatagg

SEQ ID NO: 3391 - DNA, 479 bp, Gossypium hirsutum
  Clone ID: uC-gsflnu33B088c06b1
cgtagaaggaggttgcggctgaaacgcccgtggctccgactccggcagtggaagctccaacgccggtagcggaggatctcaaagctgatttcaagaaaacaaccgtagcttcaccgtcagttgaggaaaaatccgatgaatctatggctcttgccgtcgttgagaaagcccctgagctattaccaaagttcatttcatctggatcatatgttatagtatgattttctattttttcttgattttttatttctagttatcttctatttatttttttcttattttttcttttcaactatttctttatacttctctttcttatttcttatctcttttccattattctatttttcttttcacttctattttttatattatctattttttttttttttttcaaatattatttattttatttttttacttctactttaatatacttttttcattttttatcattcttttcttctcatttttttttt

SEQ ID NO: 3392 - DNA, 379 bp, Gossypium hirsutum
  Clone ID: LIB3083-020-Q1-L1-F2
ttcttcttcaacctgagttttctttttcctccatggactcaaagaaagcccctgagccagcaccaaagaaaagttcgagtggatcacatgatagagatgttgctcttgcggatcttgaaaaggaaaaaaaattgtcattcattaaggcatgggaagatagtgaaaaaaccaaagctgagaacaaggcccagaaaaagctctctgctattgtagcatgggagaacagcaagaaagcagctcttgaagcaaaactcaaaaaaattgaggaacaattggaaaagaagaaagccgagtacgccgagacaatgaagaacaaggtagcttcaattcacaaggaagcagaagaaaagagagcaatggtcgaagccaaacgtggaga

SEQ ID NO: 3393 - DNA, 441 bp, Gossypium hirsutum
  Clone ID: GOSHI-09MAY01-C9541_2
tttttaataaaaaaatataattttgagctcaatgatctttctttctgtcctttaatatgttcgcattcatcgaagctatacagaaggaatctgaacataaagaagattacatatagctgagaaaggttatttgagaaaagtttaaaaaaatgggtgtaacggagaatcatcagcaccaccaccacccaccgccgccacaagtggttgctccgccggctgctcctcctcctaatttcgctctttcaaggggacctacttggactccagctgaacaacttcatcaacttcaatactgcatccactccaatccttcttggcctcaagcacttttattggcattccaacacttcattgtgaatcttggtacaacggtgttaattgcaagtactatggtgcctcgtatgggtggtaatcatggtgataaagctcgggttattcaag

SEQ ID NO: 3394 - DNA, 703 bp, Gossypium hirsutum
  Clone ID: LIB3582-040-P1-K1-E11
atttattatttttttcgtcggtgatttattgtcagttctgaaaaaagaatataaaagttacttggaagaacactttcaaagttcaaacctttattttttatttgttaggaatctgaacaaaaagaagattacaaatagctgaaaagggtaattgaaaaaagtttaaaaaaatgggtgaaacggagaatcatcagcaccaccaccacccaccgccgccacaagtggttgctccgccggctgctcctcctcctaatttcgctctttcaaggggacctacttggactccagctgaacaacttcatcaacttcaatactgcatccactccaatccttcttggcctcaagcacttttattggcattccaacacttcattgtgaatcttggtacaacggtgttaattgcaagtactatggtgcctcgtatgggtggtaatcatggtgataaagctcgggttattcaagtattgctgtttatgtcaggcattaatacgttacttcaaacgcttattggctcgagacttcccacagtgatgggtgtatcgtttgcttataccttgccgctgttgtctatcatcaatgattataccgatgagacctttgcaactgagcatgatcggtttattcgcggtataagaaccattcagggatcactaatagttgcttcctttgttaatatcatccttcggtacagtagggcatgggg

SEQ ID NO: 3395 - DNA, 437 bp, Gossypium hirsutum
  Clone ID: GOSHI-09MAY01-C9511_1
gaaaagcattcgactttgcaaacagaaggggcgtcaaagaaccgtcttctctgcctctacggtaaccgtatattactcatacaaattgcaaagcaaaaccaagaaatccctcacatacaaaaatgggtgattcaaaggtcgaaaccatctccagattagctcaatggaggatcgacaactttagtccttgttcttacaaaaaatccgaccccttcaaggtcggtctttggaactggcacttgtctatagagaagaatcgatatatgtatattcgattatttcccgagccatctcgtgtgtctaaggagcagcctccttatgctaaatttatactcaggatctctaatgttggtgctaatcgtagactttatatctccccagttcatgatagaccgctgcgaacgtgccatgacctttattggcctgttgattctaca

SEQ ID NO: 3396 - DNA, 752 bp, Gossypium hirsutum
  Clone ID: GOSHI-09MAY01-C9441_1
gctcctgatcctgttcatggaaaaagaaactatacttacatggatgttgttagagcttatttaagaggaagaaaggttcagctttgtggattagctcaatatgcaaatctgctgggggtaaccattggttatacaattacagcatcaattagtatggtggctgtgaaaaggtcaaattgtttccacaagcatggtcatcacgtgaagtgccaaacatcaaacaatcctttcatgatcatctttgcttgtattcaaattgttcttagccaaatcccaaattttcacaagctttcatggctttcaatccttgctgctgtcatgtcttttacttatgcttccattggtcttggactctccattgctaaagctgcaagtgggggagaacatgtaaggacaagcttaactggtgtacaagtaggggttgacgtgtcaggctctgaaaaggtttggagaacattccaagctattggggacattgcctttgcttatgcttactccaccgtcctcattgagattcaggatacaataaaagcgagtccaccagaaaataagtcgatgaagagagcgagtggtgtcggtgtcacgacaaccactttattctatgtactttgtggcattgttggatacgcagcattcggaaacgatgcaccaggaaatttccttacagggttcggtttctacgaacccttttggttaatcgacttcgccaacgtctgtattgctgtccaccttattggtgcatacccaagttt

SEQ ID NO: 3397 - DNA, 278 bp, Gossypium hirsutum
  Clone ID: LIB3148-010-Q1-K1-E5
aaacaatcctttcatgattatctttgcttgtattcaaattgttcttagccaaatcccaaattttcacaagctttcatggctttcaatccttgcggcggtgatgtgttttacacttgcgctcacaggggtcgggcactctatattgctaacgctgcatgggggggagcacacgtggagacacgctactctggtgtacaagtaggggttggcctgtcaggctctgaaaaggtttggagaacattccaagcttttggggacattggctttgcttatgctta

SEQ ID NO: 3398 - DNA, 228 bp, Gossypium hirsutum
  Clone ID: LIB3120-039-P1-K1-C6
ctcctgtcccatctgatacaatgaaggaactatcttctccatatgcagcctctctaaaactagcgctttttctttttgtaatttcaggatacaataaaagcgagtccaccagaaaataagtcaatgaagagagcgagtggtgtcggtgtcacgaccaccactttattctatgtactgtgtggcattgttggatacgcagcattcggaaacgatgcaccaggaaatttc

SEQ ID NO: 3399 - DNA, 687 bp, Gossypium hirsutum
  Clone ID: GOSHI-09MAY01-C9471_1
cccacgcgtccgcagctttggaggtcggtgtccttggccaggaaattggagccaaccggaacgacgacgtttaggatggcggtgaattgccgccacaggttggacccaaagctggagccgtactacttcggaaacgctattcagagtattccgactttcgcctcagcaggtgagttgcttggaaaggacttgagctgggccgccgatatactgcataaaaacgtggtggcgcataacaatgatacggtgcggaaaggtgtagcggattgggagaagcagccgaggttgttcccattgggtaacgctgacggtgcatcaatcaccatggggagctctcccagattcccaatgtacaataatgattttgggtgggggcgacctttggcggtgaggagtggtagggccaacaagtttgatgggaagatctcagcctttcctgggagagatgggaacgggagcgttgattttgaggtgttttggcccctgacaccatgttgggggttgagaatgaccctgagattatgcagtacgtatccgaattccttggagtgcaatcagtagggaaaagaaacataaattccaggtggcaatttgtgaatgggtggataagtgtaaacctttaccaaatcttggaggaagaaaataccaccataaacttcaacccgctggatttcatttctgtaactc

SEQ ID NO: 3400 - DNA, 775 bp, Gossypium hirsutum
  Clone ID: GOSHI-09MAY01-C9761_1
tttaactcatccatttttctctcatccaaacaactataaaaaggcttttttttttttgagaattgtcccgagaaaattaaatccttgtccttaacccagatccgtagatcatcacctccaaattcttgccgataaattagttccttttagattcttttttttttgtgcatattccctttgttgggcaatcaaaatatattcttttttttttttcattaatactgctaagtttttatctctcataacaacctaactttttctcttttctctcccacctagtaaatgcagcctgatgatcccaaaaacacttgttttggttcactgattaatgggtatttagtagatgttcaatagactttatccctttgcttctccttgtagtcactagaagtaacggttttttttttggagtttggaggagggttttgaaagtattttagaatctggattttgagttttggagttgataccaatttggatggatctgagagttagttcaaagagaagggtttcgagtcaatttctctgttaaaacttaaaagtaaaaatttcaatatttataaagtagaataagagtttttccttttcttttttccttttaaataaacccagtaagaataaatcatggaacatgttattggtggaaaattcaagcttggtcgaaagattgggagtggatcctttggtgaactctatttaggtgttaatgtccaaagtggagaggaagtggctgttaagttggaatctatcaagaccaagcatccccaacttctgt

SEQ ID NO: 3401 - DNA, 752 bp, Gossypium hirsutum
  Clone ID: GOSHI-09MAY01-C9701_1
agacaacgctttctatacttaatgaggaagctgaggctattttagaagatatcaatccatctccagtacaagttcttgggtatggtgtgggttccatagcagcaatttatgcactgctagagtgggagaaatcattacagcttattggcattcttggccttgtcctgaccgtttaccggcgggtctcttcatacaagaacgctgaagatctgaagaaagatctgacgttgttgttgggtcctgctaaagttggagctgtggcatattcatggattgctgggaagttagagaccaatggcattggactttcgacctcaccttcatccttagatgttcaaaaccgagtgttgcaggctgctgcgaagcttgaatctcaaccatccagtgcagaagatccatcgattgctccaataaatgagaaagtagatctttcggaagcatagggatcgtggattttgtcatcatcatattggtgaaatgcaagttgacctgcctcactgatataatattttcaataccctaagaatgagtcttgtacattagtgttacatcaacagagttgtatactaataataatcattggacaaataataccagccaaaccaataaacaagtttgaaaattgctttcaaacttgtggctcaacttagcttagtttggtggttttggttagaaattggcgcaaccgtatgcaggatatatgtcactggttttaatatatgtttaattatcattcacaagttcacattcat

SEQ ID NO: 3402 - DNA, 596 bp, Gossypium hirsutum
  Clone ID: GOSHI-09MAY01-C9721_1
aggattttcaatccattgatctttgatttccatttagaggttaattgggtcatatcttatgttggagaagggcgttcgtatttaggttctggtaagaggaaaagccatgagggtatgataaagcttggtttcagcctagtaaaagggaaagctaatcatcctatggaggattatcatgtcggtaagttcatgcagattctatagcatgagttagggcttttttctatctacgatggtcatttggtagatattatatcatcttacctaaagaagcactcgcttgccaatatcctaaagaaggtgggatgtgccatatcattttcgaatggcttgcttttattatttttaaaacatcatatgcttacattttctcacttattattggaagagttttaggttgacccctttagacttatgagaaaacagatcaggcaattctttcacaaagctcagacttggtcgtggtggatccactgttgtaactacaacattgataaatggaataaaactatgtgtggaaaacgtaagagattcacgtgttgttctttctagagggagtcaagcaatacagatgacaacagatcatgaacccatca

SEQ ID NO: 3403 - DNA, 746 bp, Gossypium hirsutum
  Clone ID: GOSHI-09MAY01-C9691_2
cccacgcgtccgcccacgccgcccggaaaatcaggagtaactgaagaagatgcagatattcgtcaaaaccctaacagggaagactatcactctcgaggttgaaagcagcgataccatcgacaatgtcaaggccaagattcaggataaagaaggcatccctcctgatcagcagaggttgatttttgctggtaagcaactggaagatggccgaaccctcgctgattataacatccaaaaggagtccactcttcacctagttttaaggcttaggggaggaaccatgatcaaggtgaagactctcaccgggaaagaaattgaaattgacattgaaccaactgataccattgatcgtatcaaggaacgggtcgaagagaaagaaggaattcctccagttcagcaaaggcttatatacgccgggaagcaacttgcagatgacaagacagcgcgggactacaatattgagggtggctctgtgctgcatcttgtgcttgcactgcggggtggccgtctctagatggtgcaatataaaaaaaaagaaaaaaagaagaagaaaatcctggacagaaactgttgcaattttaattattgcataaatctaatgagttcgcatttgatttgttgagaaatgcatggaacatttatgaattgatgatttcctcaagggacagatgttgtgttgtattacttgattgtataaatcacccttctttggatggcctcgcaaaaaaaaaaaaaaaaaaaaaatt

SEQ ID NO: 3404 - DNA, 724 bp, Gossypium hirsutum
  Clone ID: GOSHI-09MAY01-C9691_1
cccacgcgtccgcccacgcgtccgagaaaatcaggagtaactgaagaagatgcagatattcgtcaaaaccctaacagggaagactatcactctcgaggttgaaagcagcgataccatcgacaatgtcaaggccaagattcaggataaagaaggcatccctcctgatcagcagaggttgatttttgctggtaagcaactggaagatggccgaaccctagctgattataacatccaaaaggagtccactcttcacctagttttaaggcttaggggtggaaccatgatcaaggtgaagactctcaccgggaaagaaattgaaattgacattgaaccaactgataccattgatcgtatcaaggaacgggttgaagagaaagaaggaattcctccagttcagcaaaggcttatatacgcccggaagcaacttgcagatgacaagacagcgcgggactacaccaagtttgttcttctgcattgtactgaatgcatctctgggatttacttgatcattgacatgcttcttcgttattcttgtgatttgaaatccttgtttattttccattggctaatataacttatggggggtgcttattgaccatatttctccaaaggtgtagagactattcacaacttcttttacatacaggattcaaaatttgatgattttacactttcgtgtaacactgaatcttaagtatgttatgtgatcagatgcccttaagta

SEQ ID NO: 3405 - DNA, 537 bp, Gossypium hirsutum
  Clone ID: LIB3829-020-Q6-N6-C9
accttactaattaaagcccattagacctttttttccgactttttgacataccctcatgagtttgcgaggccatccaaagaaggctgatttatacaatcaagtaatacaacacaacatctgtcccttgacgaaatcatcaattcatatatgttccatgcatttctcaacaaatcaaatgcgaactcattagatttatgcaataattgaaattgcaaaagtttctgtccaggtatttttttcgtattgcaccatctacagacagccaccccgcagtgcaagcacaagatgcagcacagagccaccctcaatattgtagtcccgcgctgtcttgtcatctgcaagttgcttcccggcgtatataagcctttgctgaactggaggaattccttctttctcttcaacccgttccttgatacgatcaatggtatcagttggttcaatgtcaatttcaatttctttcccggtgagagtcttcaccttgatcatggttccacccctaagccttaaaactaggtgaagagtggactccttttggat

SEQ ID NO: 3406 - DNA, 464 bp, Gossypium hirsutum
  Clone ID: AI729670.1
aactactgataccattgatcgtatcaaggaacgggttgaagagaaagaaagaattcctccagttcagcaaaggcttatatatgccgggaagcaacttgcagatgacaagacagcgcgggactacaatattgagggtggctctgtgctgcatcttgtgcttgcactgaggggtggctgtctctaaatggtgccatgaaaaaaaaacctggacagaaactgttgcaattttaattattgcataaatctaatgactttgcatttgattcgttgagaaatgcatgaattgatgatgatttcctcaagacacagatgttgtgttgtattacttgttttgtataaatcagccttcttcggatggcctcgcaaactcttgaggatatgtcaaaaaggtccaaatgggctttagttaataaggtttaaaaaaaaaaaaaaaaaaaaaaaaaaaaaaaaaaaaaaaaaaaaaa

SEQ ID NO: 3407 - DNA, 1000 bp, Gossypium hirsutum
  Clone ID: GOSHI-09MAY01-C9661_1
aaggggcttatgaaataaaggcacacccttggttcaaagacattgaatggggcagattttgtcatagagaagctgcgtttatgccacaggttaacagtgacctggacacacaaaactttgaaaagtttgaagagttgggggctcaagtacaatcttcgaccagatcaggtccctggagaaagatgctttcttcgaaggatgcaaattttgtaggttatacgtacaagaatgttgagattgtcaaggaacatcatcttccaggcattgctgaggtgaagaagaaaagcattgcacctaagagaccttctgtgaaatcattgttcgacactcctggacctcctgatcccccaacaaaggggagctttctcaacctcttgccaactcaattcgaggaacctgaaagcccggtgtctgaacatcaatctatttgagccacacaatatcctcggaaaccctttgcacagatagtagaatgatgcaatatgtaggtaaatcgttcttatgcgaattggtaatgaaaatctttcccaacattgcaaatcggcaatgagtcatcatatgctttagaaagatgactcgtatacattagaaagattcctcttcgtttaagcatgtttcgaaatagcatatatggccattcatggtacatcatatatataaggagtttactttcttcttttgaatcttttcaagctgtgccttcggattcgaatcattaccatgtttatattttcctgttgaagaaagatgaaggcagaagttgaactgataagtgtagtacaggtttgtgcattattttcccgtcacgccagtagctgtagaaacaaattatacaaatataatctcataaattctcttttctcgggttggttcttctagatcttaatattaattgtagttgattcctggtgaaatatgtgataataatctggaacatgcaaaattttgtgtgatgatgtttcatctgattgatagttatatatatgatttagagatactt

SEQ ID NO: 3408 - DNA, 592 bp, Gossypium hirsutum
  Clone ID: uC-gsronu33b025f05b1
ttttaagtttgaagagttgggggctcaaggggggtctttgaccagatcaggggcctggagaaagatgctttcttcgaaggatgcaaattttgtaggttatacgtacaagaatgttgagattgtcaaggaacatcatcttccaggcattgctgaggtgaagaagaaaagcaatgcacctaagagaccttctgtgaaatcattgttcgacactcctggacctcctgatcccccaacaaaggggagctttctcaaccttttgccaacttaattagaggaacctgtaagcccggtgtctgaacattaatttattagagtgacacaatattcttggaaacctttgcacagatagtttaatgatgcaatatgtaggtaaattcgtcttatgcaaattggtagcgaatatttcccaatgtggaaatcggcatgagtcataattgctttgaaagatacttctctactttaaaagaattctttttgtttaagctgtttaaatacacatttgcctttatggtccacctttttttaggagtttactttttttagaatttttaaggttgctttcgaatgatcctacccgttttttttcctttta

SEQ ID NO: 3409 - DNA, 694 bp, Gossypium hirsutum
  Clone ID: GOSHI-09MAY01-C9191_1
caaatttctaaagctattgaagaagaatggcaagttcctccattatttttctcttgctttcccttctatgcattgtttgcgaggccagatctccaactgctgcaagatcaggtgcctcaaatttcatcaaggcttcatgtagtgccaccaaatatccatcactttgcatccaatctctcgcagcttttgccccttcaatccagcggagcccacgccaactggctcagactgccctttcggtgagcctagagagggcaaagtccacccaggcattcgtctccaaaatgaagaaattcaggggacttaagaggagggaatatgaagcaatcaaagattgcattgaggagatgagcgagagcgtggacaggctgagcaaatcagtgcaagagctcaagtacatgggtcaagccaagggtcaggatttcttgtggcacgttagcaatgtggagacctgggttagtgctgcactaaccgatgagaacacttgtgtggatgggttcgcaggaagggctttggatggtaagattaaggcctccatcagagctcgtgtcattaatgtcgctcaagtcaccagcaatgctttgtcattggtgaaccagtttgcctccaagcagtgatcaacctagccgctggttgctcttgcagtaaaagtggaaaaaaaaaaaagtggtccagttgtggtcaatggttactt

SEQ ID NO: 3410 - DNA, 925 bp, Gossypium hirsutum
  Clone ID: GOSHI-09MAY01-C9141_1
tatatgggtgtgttgaaaaagaagggaaacccagttataacatgaatgagttcttgccttatggtaagattgggcttgaagcttttcaagttttcttgagctatttatatactgggaagcttaaagcttctcccatggaggtttccacttgtgttgatacacactgtgcacatgatgcttgtcgacccgccatcgattttgctgtggaattgatgtatgcttcttctatatttcaaatacctgagatggtttcactttttcagcgacggcttcttaatttcgtggataaggctctcgtagaagacattattccgaccttgtggttgctttccattgtcaatgcagtcagcttgtttctcaatgtgttgacggacgcgcgggcgcgcgcctgggcggccgcgccggcgagaaagagcttccttatgaagttgcggagagcattcggttacttcgctgcaagcctcccactgaagctgaagatggtgaggcagtggttgttcctttgagagagaaacaaatccggagaatacaaaaagctttagactccgacgatgttgagcttgttaaactgcttttaaccgagtccgatgtaactttggatgatgccactgccctccattacgccgcagcgtattgtgatcccaaggttgtttctgagattcttgccctacgtctggctgatgtcaatcgacgaaactctcgtggttatacggttcttcacatagctgcaatgcgtaaagaaccggccgtgataatgtcgcttttagcaaaaggggcatctgcttcggagttgacgttggatggacgaagtgcttttaacatctgccagagattgacgagaccgaaggattatcacgcgataactgagcatgggaaggaaacaaattaagatcggatatgcatcgatgttttgtatagagaaatt

SEQ ID NO: 3411 - DNA, 757 bp, Gossypium hirsutum
  Clone ID: GOSHI-09MAY01-C9121_1
ctttgataaggatatttgggaattagggtttttaattggagttcaatttgtgtaattatattgaccaaaggaatagcctttgataaggataactgggaattagggtttttgattggtgttcaatttgtgtaattttattgaccaaaggaatagcctttgataaggatagactttaaaggcttcaacttgatataaccttttttttttcttatactcaatgttttgttgattttatcggctttttttcttgacaattttttgtcttttacagaaaaaacccttaattttttttaaattcttttttgattatttgattggtttttcatgttgtttttgagctgtcatacatggaaacattcaaaggaaatatgaaattgagccatgttttacccaaaagtgtttttggttcatttttttcttattacaggtagcaaaagcacttggtggtctaattcccttacccgaacccggtccgagtgacccgagaagaaaagaattaatcgagttggagcaacataaagccgtgatcgatacgaaagctgattccttggtccgtcgtgaactctggctcggtttagcttacttggtggttcaaaccgccgggttcatgagactaaccttttgggaactctcatgggatgtgatggaacctatttgcttctacgtcacttccatgtacttcatggccggatatgcatttttccttagaacgtccaaagaaccttctttcgaaggattctatcaaagcaggttcaac

SEQ ID NO: 3412 - DNA, 430 bp, Gossypium hirsutum
  Clone ID: LIB3166-010-P1-K1-C9
ctttgataaggatatttgggaattagggtttttaattggagttcaatttgtgtaattatgttgaccaaaggaagtagcctttgataaggataactgggaattagggtttttgatttgtgttcaatttgtgtaatttaattgaccaaaggaatagcctttgataaggatagactttaaaggcttcaacttgatataaccttttttttttcttatactcaatgttttgttgattattattggcttttttttttttgacaattttttttttttttacataaaaatacccttattatttttttttttggttggttgtgttttttattattttttttgtttctatttatatctgattctttttttttttaattattttatctcttttttttttatatctattattattttttttattattttattttaacttttt

SEQ ID NO: 3413 - DNA, 445 bp, Gossypium hirsutum
  Clone ID: GOSHI-09MAY01-C9051_1
cccacgcgtccgcggacgcgtgggttccattcttcacttcgccaaagaacccaggatgaggaaacgtttacttaccattcttctggcagcgattatttccgccggagcaacggcggtaaaggctcaaaactgtggttgtgcagaaggtttatgttgtagccgttgggggtattgcggaaccggcgatgattattgcggcacagggtgtcaacagggtccttgtaatccgccgccagctctgaacaatgttttggtggcggatattgttacaccggagttctttaatgggatattggatgttgcagaagacagttgtgaagggaagaatttttacacgagatcggcgtttcttgaagcattgggtccttatcctcagttcggaaggattgggactgttgatgattctaatcgggaaattgcagctttctttgcgcatagtcacgca

SEQ ID NO: 3414 - DNA, 418 bp, Gossypium hirsutum
  Clone ID: GOSHI-09MAY01-C9351_2
cccacgcgtccgagcaaacaaacaagccgccagtcatgagtaacatctcatcctctttcactctctcccaatgtcaacaacaacatctcttggaaaaactcgttgtcttcaacgtcaaaggcagagataaacgcggtcgtaatgttcttctcatcatcggcaaatactttcctgctcgcatggttagtagtgaggttctgaagaagtatttagaagaaacgatttaccccaaattagggggcaaaaccgttctcggtggtgtatgtacatacagatgttcaaaagagtgaaaattttcctggaatatcagttcttcgatcagtctccgatgctattccgatgaacctcaagaacaatctcgaggttgtttatttcttgcatcctggattacaggccagacttttccttgccacctttg

SEQ ID NO: 3415 - DNA, 707 bp, Gossypium hirsutum
  Clone ID: GOSHI-09MAY01-C9351_1
acttagcacacgtgaactatgcaaatcaagctggggggaatgtagaagacatttgcccggcttttcccaaaaccctgttcattacggaagtatagatcgtagactaaacctatttctacttatcgctttactcccaaattaggggcaaaaccgctctcggtggtgtatgtacatacagatgttcaaaagagtgaaaattttcctggaatatcagttcttcgatcagtctccgatgctattccgatgaacctcaagaacaatctcgaggttgtttatttcttgcatcctggattacaggccagacttttccttgccacctttggccggttgtttttcgacggagggttgtattctaaacttaaatacgtgagtaggcttgactttctatgggaccatgtgaggaggttggagatgaaaataccagactttgtgcatgatcatgatgaagagctggagtaccatcccatgatggactatgggttagagagcgaccaccctagagtttacactgagccgccctccatggatcctatttcgatgtactctatgaggtgcatagcttaagctttaagcccgtgctgaaaggttgaaactttagatttgtagttgatacgttatgggttttgctttttgatagaggagttttggtgttcatattgtataaaatgggagtttgtaaatggaaccttaagacgtcattggcagag

SEQ ID NO: 3416 - DNA, 584 bp, Gossypium hirsutum
  Clone ID: GOSHI-09MAY01-C9341_5
aaacaagagctgtatcagatacttttgcagatgaagaaaagcgatccaagttcttgaggtggaggattcaattcttggaaaaaagcatcagaaagcttgatttcagtcccaatggtatctctaccatagttcaggtaaacgatctcaagaactctcccggacctggaaaaaggagctcaggcaagctaccaaccaagcccttcacttgcttcaggacaattatccagagtttgtggccaaacaggtatatacacattaatatcttaaatcttttttgtatcatggtgttgaatttcaacaaatattgaatgttggttttggattttgaaggtgtttatcaatgttccatggtggtacttggctttcaatatgatgattagtcctttcctaactcagagaaccaagagcaagtttgtgtgtgcaagtccagccaaatcatctgatatccttttcaggcaagtggactccaataatttctacaatgaatttttttaatcataaattcctttattatattttgcatactaacttatgattgtatatatacatagatatattgcgcctgaacaagtaccagttcagta

SEQ ID NO: 3417 - DNA, 1024 bp, Gossypium hirsutum
  Clone ID: GOSHI-09MAY01-C9341_3
gagaaaccagaggaagaggcctcttcttctttgaaactagaggtggttgctcaatcagaagagaggccagaagaagccgaagttccccgacctccaccccaagaggtgtctatatggggaattccgcttcttgcggacgaaagaagcgatgttatcctattgaaattcttaagggctagggatttcaaagtcaaggacgcattcaccatgatcaaaaacactgttatctggcgtaaggagttcggagttgatggcttgctggatgaggagcttggaaatgaattggagaaagtggttttcatgcacggatttgataaagaaggtcatcctgtatgctacaacgtgtatggggaattccaaaacaaggagctgtatcagaatacttttgcagatgaagaaaagcgatccaagttcttgaggtggaggattcaattcttggaaaaaagcatcagaaagcttgatttcagtcccaatggtatctctaccatagttcaggtgaacgacctcaagaactcacctggacctggtaaaaaggaactcagacaagctaccaaccaagcccttaacttgcttcaagataactatcccgaatttgtggccaaacaagtgttcatcaacgttccatggtggtacttggctttcaataggatgatcagtcctttcctgactcagagaaccaagagcaagttcgtatttgcaagtccagccaaatctgctgagaccctcttcaaatatattgctccggagcaagtaccagttcaatatggtggactgagcagagagggtgaacaggaatttagcgtggccgatgccgtcacagaggttacaatcaagccagcagcgaagcacagtgttgaattccctataactgagaattgtaatctggtttggggaccccgagtagtgggatgggaagtcaattatggagccgaattcgtgcccgaccgccaagatgggtatactgtgatcgtattgaaaacaaggaaaggttctttgtgtgatgaaaccgtgatcctcgatgctt

SEQ ID NO: 3418 - DNA, 955 bp, Gossypium hirsutum
  Clone ID: GOSHI-09MAY01-C9341_2
ccccgcgtccgccctgcctccgccctcgcgtccggtcccaatgggatctctaccatagttcaggttaacgatctcaagaactctcccggacctggaaaaagggagctcaggcaagctaccaaccaagcccttcacttgcttcaggacaattatccagagtttgtggccaaacaggtgtttatcaatgttccatggtggtacttggctttcaatatgatgattagtcctttcctaactcagagaaccaagagcaagtttgtgtgtgcaagtccagccaaatcatctgatatccttttcagatatattgcgcctgaacaagtaccagttcagtatggtggattgagcagggacggtgaacaagaatttaccgtggccgatgccgccacagaggttacaatcaagccagcaaccaagcacagtgttgaattccctataactgagaattgtaatctggtttgggaactccgagtagtgggatgggaagtcaattatggagccgaattcgtgccgaccgccgaagatgggtataccgtgatcgtatcgaaaacaaggaaagtttcttcggccgatgaaaccgtgatctccgatagcttcaagaccggtgagcctggaaaggttgttctcaccattgataatcaaacatcaaagaagaagaaactcctttaccggtccaagaccaagccttattctgattgaagctttgaaatgatcaatggggttggattttgttttcttctttattggaaaaattatttttataaatttagaatctttggggatttatttttatttatatatatattttttattagctaattgggattgtggttttttattttggttaaaaatgaatctgggatggaactgtgtgtaatgtggaaaaaggaactgttttgttattctgaaaactctttgtttctaaagtttgtgtaaatgtcttcctattttgttcatt

SEQ ID NO: 3419 - DNA, 858 bp, Gossypium hirsutum
  Clone ID: GOSHI-09MAY01-C9341_1
cccacgcgtccgcggccgcccgggttcgggaggtggagagattcagttcctggacggtgtccttccgaaaactcgacttcaatcctactggtatcaataccatggttcaagtgaacgacctcaagaattcacctggacctggtaaaaaggaactcagacaagctaccaaccaagcccttaacttgcttcaagataactatcccgaatttgtggccaaacaagtgttcatcaacgttccatggtggtacttggctttcaataggatgatcagtcctttcctgactcagagaaccaagagcatgttcgtttttgcaagtccagccctatctgctgagaccccttcttcaagtaagtggatttcattcatttcctccttttaattttgcttgtttcatcaaatggtaatccaagaccttctcatataggaatctatttatgaacattggtatcatttcatctatgaccataaaaagggcccttgacaagtgtttatatttattactctagacattaatttgccgtttattgcaatatgtttgattaatatgaatggatctttaatcataaatagataattagtttgtcccatagtggtttcatattaacttcaaaatttttttgggggtaaatattagatatattgctccggagcagtaccagttcatatggtggactgagcaaaaagtgacaagatttacgtggccatgccgtacaagttacaataagccagcgcgaacacatgttgaattcctatactgagtatattgatcattactaaaatgtcatcagatgccatcatgtataacaattatgatttgaatagcagatgtatctgttggaactccatatggatgagca

SEQ ID NO: 3420 - DNA, 674 bp, Gossypium hirsutum
  Clone ID: uC-gsronu33B042c03b1
ctcagagatccaagagcaagttcgtatttgcaagtccagccaaatctgctgagaccctcttcaaatatattgctccggagcaagtaccagttcaatatggtggactgagcagagagggtgaacaggaatttagcgtggccgatgccgtcacagaggttacaatcaagccagcagcgaagcatagtgttgaattccctataactgagaattgtaatctggtttggtaacttcgagtagtgtgatgggcaagctttcttagtatcctctttttcatttttctttttatcttctttttatattttttttatttctatttttctaattttcatttattattttttattttttttttttgtttttttttttttctttgtatcttaacttttctttaatttttattttcttataattaacttttttattttttttttttattccattttaatttcttttgttttattatcttttcccccttctacattttctttaatttcttaattattttttaattttttttcttttttttttttatttttatttttaattatcatattttttatttttcttttttttttttttttcattttcttcattaataatattctattcatcttttattatttatttttttttcttttttttttttttttcctttccttttatttttatatttt

SEQ ID NO: 3421 - DNA, 566 bp, Gossypium hirsutum
  Clone ID: LIB3828-004-Q1-N6-C4
ataacaaatgtttaatgaacatagacaagagataataatacaccaataaatttacacaaactttacaaagcaaaggtatgaagaatgacaacaacactttctttcacattgcacacatgtccatcccccattcacagtcctcaaatattcttttctttcaatcaatacaaataaaataaatcccaagacccttaattttccaaaccaaaaaccaaaaagaaaccttgtaacttgttcttctgcccatcagcattggccaagtcataatccccaaaggattttattcagaataaggtttggccttggacctatacaccaacttcttcttctttgtggtttggttatcaattgttaatacaattttcccaggctcacccgttttgaagctgttggagatcaccgtttcatcggccggacccacttttctcgtcttcgatacaatcacggtgtatccatcttcagctgtgggcacaaattcagctccatagttcacgtcccaccccacaactcgtacctcccacaccacagtactcttctgccatttcaacacccaaaccaaatgttat

SEQ ID NO: 3422 - DNA, 560 bp, Gossypium hirsutum
  Clone ID: uC-gsronu33B041f09b1
tcactataggttaagctgctacgcctgccggtacccggaccgtacttcctcgacccacccacgcgtccttattcactgtcactgatgaagaaaaacggtccaagttcttgagatggaggattcagtccctggaaaagagcatccgaaaactcgacttcaatcctactggtatcaataccatggttcaagtgaacgacctgaagaattcacctggacctggtaaaaaggaactcagacaagctaccaaccaagcccttaacttgcttcaagataactatcccgaatttgtggccaaacaagtgttcatcaacgttccatggtggtacttggctttcaataggatgatcagtcctttcctgactcagagaaccaagagcatgttcgtatttgcaagtccagccaaatctgctgagaccctcttcaaatatattgctccggagcaagtaccagttcaatatgtttggactgagcatagagggtgaacaggaatttagcgtggccgaaaaagctcattgtttcaattatcccagcttaaatccttgtgttgaatcccctataac

SEQ ID NO: 3423 - DNA, 811 bp, Gossypium hirsutum
  Clone ID: GOSHI-09MAY01-C9241_1
cacagcttctatcaacaccgctgacgtcgcgtcgttatattctacctcaccgccatcggccgacgtcctcccttcttctttcataattcatatcacatctcaaatcctgattattttccctttaatttatacccttttcgtgtttatatacttgcaagttcgtatttgggtaaattcaatttcaagctaattctttttaaataaaaggaggaaaaacagattttatagtgaaaatcatgaaggtcgtacaccgagacctagttcccaatggccctggcagcgtcaagatgataccagtggattcagaggatctctggtttgcttacaatttgatagctactggggattgggttatggctcgaactgtcaggaaagttctaagggagacagccggtggaagagatgcagagcgtgttgccctgaagttggaaataaaagtcgaggccatagattatgacaaagaaggatctgtcttgcgtataaggggaaagaacaccttggagaatgagcatgttaagataggacaattccatactctcgaacttgagcttcagcgaccttttgttttaagaaagaaaatatgggactcattggcattacatgttctccggcaggcctctgatcctggtgcgagtgcagatctggctgtggtactaatgcaagaagggctagcaaatattttgcttgttggtaaaagtatgacaagtacccgttcacggattgaaacttcaattcctcgtaagcatggacctgccattgctggttatgaatcggctttgaagaagttctttgagaatgttctacaggcttt

SEQ ID NO: 3424 - DNA, 466 bp, Gossypium hirsutum
  Clone ID: LIB3543-021-Q1-K1-G12
aataaacaccgctgtcgtcgtgtagctatgttctacctgaccggcatcggtcgacgcgcgccctccgtctttcataactcatagcacatctcagatcctgactcttatcgcgttagtcgatacccttgacgagtatgtatacttgcgagcgcgtatgtgggtaggttccatatcaggctaacgctttatagatacaaggaggaaagacagattgcatagagataatcatgaagggcctgcaccgagacctagttcccaatggccctgacagcgtgcagacgataccaatggatacagaggatctctggtttgcttacagcatgacagctactggggagtgcgatatggctcgaactgccaggaaagttctaggggagacagccggtggaagagacgcagagcgagctcgcctgaatttggaaataaaagctcgggccgtcgattatgacagagaaggatctgtctt

SEQ ID NO: 3425 - DNA, 698 bp, Gossypium hirsutum
  Clone ID: GOSHI-09MAY01-C9221_1
gattggaattccgatggcggcttctattatgatggggtgtggatcaacaagcatggtttatggttatgtttcggcttttgattttctcagatgcttggggcattccaatgttgaggttgttccccatgaagttttcatcaagctacctttcctcaaatatttcctctatacccccacgtaccatagcctgcaccacacagagatggggaccaacttctgtctcttcatgccgctgtttgacgctatggggaatacgcttaaccgcaactcctggcagctacacaagaaaattagttcagattcagcaaagaatgggagggtgccagattttgtgttcctagcacatggggtggacttaacctcatcgatgcatgccccattcgttttcagatcattcgcatccgtaccattctccaccaggatctttcttctgcctttgttgcctgtggcgtttttggttatgttaataatgtgggcttggtctaagaccttcctcatcagtttctacaatcttagaggccatttgcaccagacatgggttgttcctaaattcggctttcagtatttcttaccatttgcaatggagggcatcaataagcgcatagaggaggccattctaagggctgataggataggggtgaggtcatcagccttgctgcattaaataagaacgaggctctgaatggaggagggacact

SEQ ID NO: 3426 - DNA, 833 bp, Gossypium hirsutum
  Clone ID: GOSHI-09MAY01-C4951_1
cccacgcgtccggacgaaagagagcaattgaaacagttctttgcgccgctcagccaacatgggtatgtgccagggattccatgcacaagaggcgtgccactggtggcaagaagaaggcttggaggaagaagcgaaagtatgaacttggtcgtcagccagcaaatactaagctctctagcaacaagactgtaaggagaatccgtgttagaggaggcaatgtgaagtggagggcattgagattggatacaggcaactattcatggggtagcgaagctgtcacccgcaagacccgtattcttgatgtggtatataatgcctcaaacaatgagcttgtcaggacacagaccctcgtaaagagtgctattgttcaagtggatgctgctccctttaagcaatggtaccttcaacactatggtgttgatattgggaggaagaagaagacagcagctaagaaggaagctactgaggacggagaagttgctgccgaggaaactaagaagagtaaccatgtgctaaggaagcttgagaagcgccagaaggaacgtacacttgatgctcacattgaagaacaatttggctctggtagattgttggcatgcatttcttcccgaccaggtcaatgtggcagagctgatggatacatattggagggtaaagagctagaattctatatgaagaaaatccaaaggaagaagggcaagggcgctggagctgcttagatgcagtatttcaaatggtctactctctcatcaatgtggtttttgttgcctttaaattttgttctcttattttcctacaattgaggatatggtacatttttattgtgaacattt

SEQ ID NO: 3427 - DNA, 612 bp, Gossypium hirsutum
  Clone ID: uC-gsronu33B055g12b1
tggagatcccgtgttagaggaggcaatgtgaagtggagggcattgagataggatacaggcaactattcatggggtatgcgaagctctttctcctttgaccctgtttttttgatgttttattttattttctattccttcatatctttttaattttcttctttcttttacattatttttaatcttttatattttttccttttatcatttcttttctttctaatcttctttctttttttctttttctttttttttttatttattatttttcttttttttatcttattttttttttctatctcataatcttatttatatttatctcactatttttttttctcaatcattttctatattatccttcttttttttcacctattttttttctcttttattttttttttcaatttaattcttttcatttattctattatatttctttctttttatcactctttatattatacttactctatctcatattttcctctctcttttctattctttatttcttcttattcttctctctatttatcatctcatcttctttccttaatctttttacctatctaatctttcatctctcatctcattttatatatattattataactt

SEQ ID NO: 3428 - DNA, 585 bp, Gossypium hirsutum
  Clone ID: GOSHI-09MAY01-C4971_4
tgaaaattctgaaaaaaagaattccacttttctttgaatgagaattttttcgctggcctcaactctttgacattgttttcggtcgcccggccggccgcgtgggttctgggaaagaatcgaaggtttttgcgctttgttttcccccctttcttttacattgcctttactaagacgccattggctgttcgctgaaataaagagataaaaaaaaaaaaaggttgaagaagatcgtctcattttcaccatttccagagatccaaaacaataaatatccctcttttttaaaaagatgatgaggatgaagactaaagcgacaggactgtcaccggcggtgacaaatggagaatcaggttttgtcggtggcggtgaaccgactgctcatgattgggagcttagacccggtggcatgttggttcaaaagcgagacctcgacaccggtcgtccccctatcccaccgccgacaattagagtcagagtcaaatacaagtcaatctatcatgaaatcagcatcaattctcaagctacattcggagagttgaagaagatgttaacaggcccaacagggctacaccatcaagaccaaaa

SEQ ID NO: 3429 - DNA, 653 bp, Gossypium hirsutum
  Clone ID: GOSHI-09MAY01-C4971_3
aaaaaaaggtaaaaccattgtaaatttaaaaattaaaaacacaagaccatacaccaaggaagatcaaacaataacaaaaaatcgacataagcatagggtacgaaaacaaaaccaccaatccaggcaaagattagcaattattcaggagcaacaatcgaccaactcggtttctcatttgccaatccaacaacaataccagcacaagcaccagcaccagcaggcatctggtcccgtcgtagttaccacaaatgggacccactcgttcccgcccccgcggcattgccggtcacctcgacatctacatcttcatcaaccgctaataactcagccccaccgaagttcccttgggaattcttcgattaaggacagtatgctactatgtcctctttggttttcattgcattttttatctgtgtcaacctcattcgggcttgcttcttcttcttgtacttagattttctcaagcatcccttttcttttcttttcttttttttcccactttcataaaatctggcattaagctcatcagacaaaaaatcaaaacaaactggggcgcctccatcatttaaaaaaaaacaaccaccctgtttctattctcttttatatcccagtctgtaatgtccttttgatgggagccgaaacttgggattctc

SEQ ID NO: 3430 - DNA, 1554 bp, Gossypium hirsutum
  Clone ID: GOSHI-09MAY01-C4971_2
catccgacggcctgcaagaattcatcacgactcgcttcgatttcctccattccttttacattgcctttacggggaggccattgactgtacgctgaaataaatagattaaaaaaaaaaaaggttgaagaaggtgaagagtctctgtttcagcttctttatctgtctttgcttaaaaaaattatttcttcttcttattcttttattgttgtgtaaatacgcgtaggcgtagggattggtctcctataatgctgggatcagattctgattcttttttttaactttggctgaaaaatacgtttcttctccttgatttttgatacagatcgtctcattttcaccatttccagagatccaaaacaataaatatccctcttttttaaaaagatgatgaggatgaagactaaagcgacagggctgtcaccggcggtgacaaatgaagaatcaggttttgtcggtggcggtgaaccgactgctcatgattgggagcttagacccggtggcatgttggttcaaaagcgagacctcgacaacggtcgtccccctatcccaccgccgacaattagagtcagagtcaaatacaagtcaatctatcatgaaatcagcatcaattctcaagctacattcggagagttgaagaagatgttaacaggcccaacggggctacaccatcaagaccaaaaacttttatacaaagacaaagagagggattcgaaggcgtttttagatacggccggtgtgaaagacaaatccaagcttgttttaattgaagacccgattagccaagaaaagagattactggaaatgagaaagaatgctaaactggaaaaagcttctaaatctatctctgaaatcagcttggaggttgataggcttggtaatcaggtgtctacttttgaatctataattactaaaggtgggaaagtagcagagaaagatgtgcttaatttgattgaacagttaatgaatcaattgcttaagttggatgcgattacggccgatggagatgtcaaattgcaaagaaaaatgcaggtgagaagagttcaaaaatgtgttgaaacattggatatgttgaagattaaaaacgctatgccaagcaacaatggaggtcaaatggaaatccaaaatcaacacaagcatacaaatgggcaaaaactagccccaacccaagagcaaaagcctaggcattttaactggcaaagactagcaccagttcaagagcagcaatcgagcaactcaattgcccatttgccaatccatcaacaccaccaatcagcatcggggcccgtcgtagtcaccacgaactgggagacatttgattcctccccagcatcgttgccggtcccctcagcatccacatcaaccgccaataattcagtcccgccaaaattcccttgggacttctttgactaagcaccactatgccacgtctctgctctatttttctctggtgtgtgtgttgatgtgcttcggtttgcctttctcttgggtttgttatcatcatcatcatcatcatcatcttcttcttcttctttttcttccattctttctgtactt

SEQ ID NO: 3431 - DNA, 882 bp, Gossypium hirsutum
  Clone ID: GOSHI-09MAY01-C4971_1
tgaagacccaattagtcaagaaaagaggttattggagaccagaaacggtcccgtgggggagaaggcttctgggtccatctcccaagtcagcttggaggttgataggcttggtagtcaggtgtctacttttgaatctataattactaaaggtgggaaagtagcagagaaagatgtgcttaatttgattgaacagttaatgaatcaattgcttaagttggatggtattatggctgatggtgatgtcaaattgcaaagaaaaatgcaggtgagcagagttcaaaaatatgttgaaacattggatatgttgaagattaaaaacgccatgcctagtaccaatggagctcaatccgaaacacagaatcgacataagcatagtgttcgaaaacaagagcagcaatccaggcaaagattagcaccaatccaggagcaacaatcgagcaactcggtttctcatttgccaatccatcaacaataccagcacaagcatcagcaccagcaggcatctggtccggtcgtagttactacgaaatgggaaacattcgattcatccccggcaacattgccggtcacctcgacatctacatcttcatcaaccgctaataactcagccccaccgaagttcccttgggaattcttcgattaaagacagtatgctactatgtcctctttggttttcatttcattttttatctgtgtgaatgtgatttgggtttgcttcttcttcttgtacttagattttctcaagcaacccttttcttttcttttttttcctttccctttttccttgcatctggctttaagttcatcataaaaaaaataaaaaaaaaatggggcgcctccatcatttaaaaaaaaacaaccaccctgtccttattctctttt

SEQ ID NO: 3432 - DNA, 438 bp, Gossypium hirsutum
  Clone ID: LIB3197-040-Q1-M1-D2
ggtgaactgaatggcagattaaaaattaagggtgcagttgcccaacaatatctaagtacagaaagaatggaagaaaaagaagaagatgctgacagggccaacaggattacaccatcaagatcaaaagctattatacaaagacaaggagagggattccaaagcttttctagacatggcaggtgtgaaggacaagtccaaaattgttttagttgaagacccaattagtcaagaaaagaggttattggagaccagaaagaatgctaagatagagaaggcttctaaatccatctcccaagaagttgataggcttgctggccaagtgtcagcttttgaaacaataatcaccaaaggtgggaaagtagcggagaaagacttgattaattcgattgagctgctgatgaatcagttgcttaaattagatgggattacagccgatgg

SEQ ID NO: 3433 - DNA, 393 bp, Gossypium hirsutum
  Clone ID: LIB3083-049-Q1-L1-C11
cctgcgatctgagaattttctgggagggaatcgaaggtttttgcgctttgttttcccccctttcttttacattgtctttactaagacgccattggctgttcgctgaaataaagagataaaaaaaaaaagggctgaagaagagatccaaaacaataaatatccttcttttttaaaaagatgatgaggatgaagactaaagcgacagggctgtcaccggcggtgacaaatgaagaatcaggttttgtcggtggcggtgaaccgactgctcatgattgggagcttagacccggtggcatgttggttcaaaagcgagacctcgacaacggtcgtccccctatcccaccgccgacaattagagtcagagtcaaatacaagtcaatctatcatgaaatc

SEQ ID NO: 3434 - DNA, 567 bp, Gossypium hirsutum
  Clone ID: GOSHI-09MAY01-C4961_9
aaagccaaagcatctttcaataatattacgtgctgaggcatgtttcatattaaaaaactcttgcggagaacttggctggtaaccctgacgccactcgttcagatgaaatcgctgtcctctaaatggtgcgagaaatccctcacaatttgtgtatccagcatcaactagataataacaacctttaaattatttttttttaaaagaatgattgattctgcccacaaagtttgatcttaatgaataattcaaagtcctctaactatacgctttaccatgaggaacttttagcccatgtcttctactaatggcatctcgaagcacccgtccatcggcacccgccccttcccaaccaggaagaacatactccaattgcatctcacggacgggtgggcaaacacctagcatatttgttgctatgtcaccttttcgcgttcgacatctaggtttatcaactgttggaaccctaatcttgatgtgggttctatcaagagcacctaagcaattctacatcccctgatataaaaccttgagttagaatactaatttaaatctaaacggacgggtggg

SEQ ID NO: 3435 - DNA, 479 bp, Gossypium hirsutum
  Clone ID: GOSHI-09MAY01-C4961_8
attcaaaattatatttttttaatttaacaccattgttgttggcttttttaagcaaacaaatggctctcagttttaattgatttgtgcattcatgaagctaagaagaagagcactcatgatgttttacaaacaaaacacgtttgcacacatatatatgaaacaccatttgttcatataaaaagtaaaacctgcatctaccgatcaattacaatgttcttctctttgaccttctatccatcgtcaacaaactcatagttatgctaatgatggcgacgcaacagcaaatattataaccgagcaatgacatgattgaatgtaaaaccgggacattatccttagaacaacatgctcacaacatattaggcgttgaatacagcgtcatcttctatttctcgaacagcttgaagaggaccactaccaaacatgaagcctcgatcggagagattgttcaaaggaccatctccatataaacatacctg

SEQ ID NO: 3436 - DNA, 859 bp, Gossypium hirsutum
  Clone ID: GOSHI-09MAY01-C4961_5
aacagttgataaaccaagaaatcgacgcaaaaaggttcttcggaagccattagtaggagacatggactaaaagttcctcatggttgttaaatactagttgagctggatacacaaactgtgagggatgtactgcaccttttagaggacaaaaatatcatttgaatgagtggcgtcaaggttaccagctaagtactccggaagaattattcaatatgaaacatgcttcagcatgtaatgttattgaaagatgctttgggttattaaaacctagatggggaatacttagctggtaaccttgacgccactcattcaaatgatatttttgtcctctaaaaggtgcaataaatccctcacaatttgtgtatccagcatcaactagataataacaaccatgaggaacttttagtccatgtctcctactaatggcatctcgaagaaaagaacctttttgcgttcgatatctaggtttatcaactgtcggaaccctaatcttgatgtgggttccatctaaagctcctgagcaattcttgaaccatttccaccttgggtctgtagaattagctgtaattggccaattgtacacatttgcaaccatgttgtcaatgcaaaaccaattcttttgcgcctcacactttgtactattaaaggcagacgagccattactcgaaaatttcttcgttttagaaactaaagaaacctgaaaatagccatcgataaagtaaagaagcacttgccgaaacagttggaccagagatctgagacggtggagccgacgaaagataccaagatgaaagtgaatcgggagcggatggaggtgactttgctggcagcttcagtttgatgtgttttggggcttttg

SEQ ID NO: 3437 - DNA, 571 bp, Gossypium hirsutum
  Clone ID: GOSHI-09MAY01-C4961_3
gacgaatcaatagaaaataaattataattcaacaagtctagtacaatacaaaaaacaattcaaacaccatcaaagtttcttaaactagatacatgaaataacataaataaattaacatttactacttttaccttaaacctaactaatttctagatgcttgccattcatcaaacatttggttggctagctccatcctccaactagctcatgcatccgatggatgaatatttacgatattcggttcatcgtcatctatcacattactaggtaatccttctcccaactaggatagaataatggactcctaagtattcctcatctaagttttaataacccaaagcatctttcaataacattatgcgctgaagcatgtttcatattgaaaaattcttccggagtacttggctggtaaccctgacgccactcattcaaatgatatatttgtcctctaaaaggtgcaagaaatccctcacaatttgcgtatccaacatcaactagataataacaacagtggttcagtgaatacaacatgaggaacttttaatccatgtctcctactaatggcatctcg

SEQ ID NO: 3438 - DNA, 1324 bp, Gossypium hirsutum
  Clone ID: GOSHI-09MAY01-C4961_2
tcgcgatctagaaccttttttttttttttttttttttttttttacagtaagttacatttcttttcattggtaattaacatttaatgatgttttacaaacaaaacacgtttgcacacatatatatgaaacaccatttgttcatataaaaagtaaaacctgcaactacagatcaattacaatgttcttctctttgactttctatccatcgtcaacaaactcaaagctatgctaatgatggcgacgcaacagcaaatattataaccgagcaatgacatgattgaatgcagaaccgggacattatccttaaaacaacatgctcacaacatattaggcattgaattcagcgtcatcttccattgctcgaacagcttgaagaggaccactaccaaacatgaagcctcgatcggagagattgttcaaaggaccatcgccatataaacatacctgtggttcaatccgattcaagcgcttccactcatcatctgacagagaccagttaaatatgtcgatgttttgctttatcctgtcgggttttaggctacatggtagaacactggttcctctttgaaacccccaccgtagaattacctgctcagttgtctttttgtgcctatctgctatctctccaacaattgataatttcagcatcggtccatgtactgatctagacctccaaaatgaaatccgaggagttccgagttcatattccccacccgatctactatcggacactccaggacttgaagtaggtactcccaaaggcgtatgcgccgatacatggatacacttcatttggcagaacttcaccagctcatcttgcctccaaaaaggatgcaactccacctgattaacagcaagtacgatttttgcgaatttaatcaattctttgatctgatgaacaccgaaattgctaacaccgatagcttgaactaaaccagaatcgactaggccttccatggccttccataccttcttgaggcgattcagaaactgcctatgctcactcccagacttcaaaggcggatcagttgcatcaccaaaaccagagctctcaggccaatgcatcaaatgaaattgatgcccacattgaagcttagcccacgactgatccccattatcagtaaccgtttcgaggcaaatcgagcatgaaacagagccgaaagacttccctacatttttgcaggcaacacatcgccggcgatacagaaaataaaaagcataaaaaacttacagaacagatgaagaagggaattggatgaagaagaagaaggaagatgaaaccggaataaggagaaacaacatggtggaggggaggaagatattc

SEQ ID NO: 3439 - DNA, 841 bp, Gossypium hirsutum
  Clone ID: GOSHI-09MAY01-C4961_1
catcatatctcattactaggtagtccatctcccaacacagcttcaataagatcaatactcatataggttcgaataaaattatagagcaaacaacatgcaataatgattctattatgcacccttacaggatagaatgatggactcctaagtattccccatctaggttttaataacccaaagcatctttcaataacattacgtgctgaggcatgtttcatattgaaaaactcttccggagtacttggctggtaaccctgacgccactcgttcagatgatatcgctgtcctctaaatggtgcaagaaatccctcacaatttgtgtatccagcatcaactagataataacaaccatgaggaacttttagtccatgtctcctactgatggcatctcggagcacccgtccatcggcaactgaaccttcccaaccaggaagaacataaacaaattgcatctcaggtgtacaaacacctagcatatttgttgctatgtcaccttttcgcgttcgatatctaggtttatcagctgttggcaccctaatcttgatgtgggttccatctaaagcacctaagcaattcttgaaccatttccaccttgggtctgtagaattagctgtaattggctctgcctttttaaataacacatcttgtaagcgtatgacagcatttaaaacattgtgaaatgatctgctagcggtttccccggacctattaaagtgatgcttgataactcgatttttaaggtatgatgagaaatgatatgtaaaaacattgtcacttactcatcaacaaacatgttccttgacgacttccattcccctaaaggttggaacctttccaccga

SEQ ID NO: 3440 - DNA, 581 bp, Gossypium hirsutum
  unsure (1)..(581): unsure at all n locations
  Clone ID: LIB3825-028-Q6-K6-H3
tctaaaaatcgacgtttccaagcccagtcttaagcagctcatttcaatgagtattaaattggtaacaaagccggcatttccagcccaggggagatgtccactcgagaaattcatatgtgctcttcttcttagcttcatgaatgcacaaatcaattaaaactcagagccatttgtttgcttgaaatggccatcttcattggtgngagaaaatttcattgtagtgctataatctttctttgcatttgctgtttcccctgcaaggtgtaggcttattgatgttctgggcattgtttaggtgatgatattagtccagaccgactgcagttagatatctactcatccaatcacgactaaatttaacaggctattgtgtgttattgctccctcttcttctttggcttgcttgattgcttatttcactcacagttgagcttcttgtattcactgaaccactgttgttattatctagttgatgttggatacgcaaattgtgagggatttcttgcaccttttagaggacaaatatatcatttgaatgagtggcgtcagggttaccagccaaatactccggaagaaatttt

SEQ ID NO: 3441 - DNA, 491 bp, Gossypium hirsutum
  Clone ID: LIB3583-009-P1-K1-D6
cggacgcgtgggcaaactttaggaggactgaagttgtcaaggaacatgcttgttgatgagcaagtgacaatatttttacatatcatttcttatcaccttaaaaatcgagttatcgtcactttaaaaggttaggggaaaccgttagtagatcatttcacaatgttttaaatgttgtcgtactcttacaagatgtgttatttaaaaaggtagggccaattacaactaattctacagacccaaggtggaaatggttcaaggtattagagtgagttccatataaatatcatacataatttagttgatttagatttaaatatagtaacctaacccatacatgtgatgtagaattacttaggtgctttagatagaacccacatcaagattagggtttcaataattgatgaacctagatatcgaacgcgaaaaggtgacatagcaacaaatatgttaggtgtttgtacacttgatatacattttgtttatgttcttct

SEQ ID NO: 3442 - DNA, 469 bp, Gossypium hirsutum
  unsure (1)..(469): unsure at all n locations
  Clone ID: LIB3120-031-Q1-K1-B8
atggactaaagttcctcatggtaaagagcaaaattagaggactttgaattaatctttaagatcatacttttttgaggaattaaccatgacaaatagttttttttataggttgttattatctagttgatgctggatacataaattgtgagggatttcttgcaccttttagaggacaaagatatcatttgaatgagtggcgtcagggttactagccaagtactccggaagaatttttcaatataaaacatgcttcagcacgtaatgttattgaaagatgctttgagatattaaaacttagatggagaatacttaggagtccatcattctatcttgtgagggtgcacaatagaattattattgcatgttgtttgcttcataatttgatagatgacgatgaatcgaatatcgtaaatattcatctatcggatgcatgagctacttngaggatgaaactagccaaccaaatgtt

SEQ ID NO: 3443 - DNA, 308 bp, Gossypium hirsutum
  Clone ID: LIB3584-026-P1-K1-D11
gaaatgtaacttactatagcttatggtgaaaaacatttaatgatattttacaaacaaaacacggggggagcacatatatatgaaatactatttgttcatataaaaagtaaaacctgcaactacagatcaattacaatgttcttctctttgactttctatccatcgtcaacaaactcaaagctatgctaatgatggcgacgcaacagaaaatattataaccgagcaatgacatgattgaaagcaaaaccgggacattatcctttgaacaatcttttcgatcgaggctaaatgtttggtagtggtcctct

SEQ ID NO: 3444 - DNA, 791 bp, Gossypium hirsutum
  Clone ID: GOSHI-09MAY01-C4881_1
cccacgcgtgcgttccaggcaaaaagcacattgtcatcacaaatgagcatgtctgatcacgattccaatggggcggtaagtgccgtggatgaccagaatgtatgttatagttctcaacttacaactccaacagatgctgcttctggtgaagggttgtcaactcctacctttgatgtgccaatgtcaccaaagaaggctctccgtgctgcaatgctgaaacagtcgttttgcagacactattctgtatagctcataagaaggcactactggatcattgtgataaaactgatccagtaaagctgcagcaggaaaaggaaagattggaaagaaggcagcgtgaagaaaaggcgaagattgaagctcaaatcttagctgctgaagcagcagcaaaaatgaaggcagaggttgagctgaaaaagcaacgggaaagagaaagagaagctgctcgaattgcattacaaaagatggagaaaacagcggagattgagcagaacctggagattttgaaggaactggagatgttaagtggatgctccctttctaataatcaattgcatggtcgtaagagtgattctgaacaggtgaatggagcatcacatggagggaatggtggaaatcccctgcagcagttgggtttgttcatcaaggtcgagtattcggaagacgaggatgatgaggcaattctgaatgaagatggtgaagagggggaaatagtgtcgtaaaaatactagttttggttgcagcttcagcatcagcatcccctgtgttataactcctttgttaataatagt

SEQ ID NO: 3445 - DNA, 620 bp, Gossypium hirsutum
  Clone ID: GOSHI-09MAY01-C4861_1
tttgttagttaagcctcacacaggaagaaaaaaactgataagatatatacattaccctgtggcataccagcttgaatttctctcgttcttcctgattgagttgtgcatggttgaatatgaaatgctcaagtttcagccatctctgctagttgctgcagcaatttacacagcacagtgtagtcttttccggttcaagaactggacaaagaccagtgagtggcatactaaatacacagaagatcagctgttgtaagttattatatttggattgctaggctttcctagctttatttgacctttgtgtagaacactaatgaaggatgcttttgtcatgcatgtcaacagggaatgttcaaagttgatggttacttaccatcagaaagcaggatccggaaaactcaagggagtacatagaaagtatagttcatacaagtttggatatgcagcaaaaactgaaccagcactatttctcctagatccctgacacaactgcttgatgacagttcatgggttgactattttttaagtatctaatctcgactaaggaatttccagttgcaaaatttagcaacacctagaaacagaagacgagttctttttatatcatatgttcatactct

SEQ ID NO: 3446 - DNA, 612 bp, Gossypium hirsutum
  unsure (1)..(612): unsure at all n locations
  Clone ID: LIB3543-064-Q6-K6-F7
tcttctgtgtttcanaaaacattccgaggaagtgttctagatatggagaaattaatggtgaacactttcaattccacatgtctgtgccactcctatgttttcatgaggagatttctcaggcagcacaatctgagaaaagcttgaatttctctcgttcttcctgattgagttgagcatggttgaatatgaaatgctcaagtttcagccatctctgctagctgctgcagcaatttacacagcacagtgcagtcttttccggttcaagaactggacaaagaccagtgagtggcatactaaatacacagaagatcagctgttggaatgctcaaagttgatggttacttaccatcagaaagcaggatccggaaaactcaagggagtacatagaaagtatagttcatacaagtttggatatgcagcaaaaactgaaccagcactatttctcctagatccctgacgcaactgcttgatgacggttcatgggttgactattttttaagtatctaatctcgattaaggaatttccagttgcaaaatctagcaacacctagaaacagaagatgaggtctttttatattatatgttcatactcctgggttctggtattttggg

SEQ ID NO: 3447 - DNA, 539 bp, Gossypium hirsutum
  Clone ID: GOSHI-09MAY01-C4541_13
agtcagtccaagcactatagtgtcggggcatatagaatcaactcagatccaactgatatcatggctgaaggtttttaggatgggcctgttgaggtcgccttccccgtttatgaggattttgctcactacaaatctggagtttacaagcatgtgacaggcagtgttatgggaggtcatgcagttaagcttatcgggtggggaacttctgatgatggggaggattactggctccttgcaaaccagtggaataaaggctggggtgaagatggttacttcaagatcagaaggggcacaaatgagtgtggaatcgaagatgatgtggtagctggtttaccttcaaccaaaaatcttgtgagagaggtagctgacatggacattcttaaagctgcttcattttgagagtaattcatctagtcatgtctattattattatcccttatcagccaagatacctatatatattgttgtgcttcaccataataataatgtacccacatgaactcttaaacttctgatataatataaaaatggattgctac

SEQ ID NO: 3448 - DNA, 456 bp, Gossypium hirsutum
  Clone ID: GOSHI-09MAY01-C4541_7
cggacgcgtgggctagccttcttccttttcctccgcggctacatttccactctcgttcccgcgatatcaaagtgaaaatgaaggtggtcgccgcctacttgcttgccgtgctcggaggaaacgcttctccttccgccgatgacttgaaggttattctcggatcagttggagctgaggctgatgatgataggatagagttgctattgtactgaagttaaaggcaaagatatcaccgagctaattgcaagtggaagggagaagttggcttctgttccttctggtggtggtgctgttgcggttgccgctcctacagctggtgggcccggcgctgctgctcctgcccctgcggcctagtttggggacatcctatcctaatcagtacctttggacttttcttggctaggaaggtgtcgttggttcgagccatattttacatgggtgctcagtgtttgggag

SEQ ID NO: 3449 - DNA, 1059 bp, Gossypium hirsutum
  Clone ID: GOSHI-09MAY01-C4541_6
tcgttcacgcgtccgtcttcacctatctctttcacaaaggagagcacagaaaaaaggggttcttgttcttgttcaagttattgatcaatggctaaggatgttgaggttggtggtgagttccaagccaaggactaccatgatcctccaccagctccattggtagatgcccaagagttaactcagtggtctttttatagggctataatagctgagttcattgccacccttttgtttttatacatcactgtgttaacagtgatcggatacaagagccaagttgatccagataagggtggtcaagattgtgatggtgttggcattcttggtattgcttgggcctttggtggcatgattttcatccttgtttactgcactgctggtatctcagggggacatatcaacccagcagtgacctttgggcttttcttggctcgtaaggtatcattggttcgagccatactttatatggctgctcaatgtttgggagccatatgtggatgtgggctagtgaaggcattccaaaagtcatattacaacaagtatggaggactccggctccggtcttcactctggtcgacccacgcagtccggtctttttcacgaccactcaatctgtaaattatgatggaggatgtcatgcttttatgtatgtggcacttattttcaatgtgccccatcattatccctgcttttctttccttttttatggtctttctttgtttggcttggtgtttctcagctatctttgaaaattctataaaaatcaagcactttgggttgctttaaaatagatactacaagatcaaaaggggtgtaaacgagtgcagaataaaatccgatgtcgtaaccggattgccttccaccaaaaaccttgttcgagaggttacagatacaggaattgtcaaacatgctggaggctcttttaagatcatctagacaggctcacctaatatcatagttatcaatgtttgaactggcaccgttgtttccatttcaagcctcaaatgttacgcttcgcattgcaagaactccagcctgtatatcattcatatgttctgc

SEQ ID NO: 3450 - DNA, 1225 bp, Gossypium hirsutum
  Clone ID: GOSHI-09MAY01-C4541_5
attaacattcactcaaaactctctcagttcatcccatatatatacacacacaactccacttccccatcacaaaaaatatattcttcacttcacatcttttgggcaatcaattttgtaagcaagtatggctaaggacgttgaggttggtggtgagttccaagccaaggactaccatgatcctccaccagctccattagtggacggggaggagttgacaaagtggtcattttatagggctgtaatagccgagtttattgccacgctcttatttttatacatcactgtgttgacagtgatcggatacaagagtcaggttgaccctgataagggcagtgaccaatgcggtggtgttggcattcttggcattgcttgggcttttggtgggatgatctttatccttgtttactgcactgctggtatctctggaggacacatcaacccagcagtgacctttgggcttttcttggctaggaaggtgtccttagatcgagccatattttatatggctgctcagtgtttgggagccatatgggggtgtgggctggtcaaggccttccaaaactcgtactacaaccagtatggaggaggagccaacagcctggctgaaggatacagcactggaactggtttggcggctgaaatcatcggcacctttgtccttgtctacactgttttctctgcaactgatcccaagaggaatgcaagagactcccatatccctgtcttggcaccacttcccattgggtttgctgtgttcatggttcacttagccactattcccatcaccggaaccggtatcaacccggctcgtagtttgggggctgctgttatcttcaaccaggacaagatatgggatgaccattggatattctgggtaggaccttttattggagctgccattgccgcaatctatcaccagtttatattgagggcatccggtgctaaagctctgggatccttcaggagcagctctgccatgtaaaatctgttgaagcaagaactgtgcagccatgagttcaaagtaaaggctggcatgcttggatgaatgaaatgaagttttcttcagaccattgaatttgtaaagaataatcaaagtgtaatgcttcttctctatgcatgtggcacttatttttaatgtgcctcaaactttgctttatttaaatggagttcagttccttttcctttttctttaaaaaaaaccccaaaaagggcggcccgcgatcta

SEQ ID NO: 3451 - DNA, 609 bp, Gossypium hirsutum
  Clone ID: GOSHI-09MAY01-C4541_4
cgttcgcccagcgtccgctttttcctccgggggtgggtttccactctcgttcccgcgttatcaaagtaaaaatgaaggtggtcgccgcctacttgctcgccgtgctcggaggaaacgcttccccttccgccgttgacttgaaggttattctcggatcagttggtgctgaggctgatgatggggggggggagttgctattgtccgaagttaaaggcgaggatatcaccgagctaattgctggtggaagggagaagttggcttccgttccttctggtggtggtgctgttgcggttgccgctcctgcagctggtggtggcggcgctgcccctgcagccgaggccaagaaagaagagaaggtcgaggagaaggaagaatccgacgatgaattgggtttcagcctcttcgattaatcaagcaaacccccccccccgcctttttagggtccttcgtacgtaattttcaatgttttggattctgtaggtggacatggttttaatcttctcggttttgtttgagaaattttagttaatgcattaacttttggttaaaaaaaaaaaaaaaaaaaaacccaaggcggccgttagaggacagaaaagtacgcggcagcga

SEQ ID NO: 3452 - DNA, 775 bp, Gossypium hirsutum
  Clone ID: GOSHI-09MAY01-C4541_3
aagcagtcaaaacactataccggcgcggcgcctcgcgtccgatcaaatcctgctgatttcatggctgtggtttataagaatggaccggttgaggtctccgtctccgtttatgaggattttgctcactacaagtcgggagtttacagacatttgactggcgatgttatgggaggccatgcagttaagctgatcgggtggggaacttcatatgatggagaggattactggcttcttgcaaaccaatggaatagaggctggggtgatgatggttacttcaagatcaaaaggggtgtagatgaatgcggtatcgaatccgatgtcgtagctggattgccttccaccaaaaaccttgttcgagaggttacagatactggaattgtcgaagatgcttcattctaagagaagatcatctagacaggcttacctaatatcatagtttatcaatgaaggaactgttatcgttggttccatttcaagtttcaaatgttacgcttcgccttgcaagaacttcggcctgtatataattcatatgttctgcttcgtagtatggataatgtaatgcaaccattctgacaaattaccacttcgatttagctttataattatcgtcagaaatggcttgatgctgcaagggaaaaaaagaaaaaaaaaaaaaaaaaaagaaaggaaaaaaaaaagaaaaaaaaaaaaaaaaaaaaagaaaaagaagggaggaaaaaaaaaaaaggaaaaaaaaaagaaaaccccgaaaaaaaaaaagggggggcgccccttt

SEQ ID NO: 3453 - DNA, 645 bp, Gossypium hirsutum
  Clone ID: GOSHI-09MAY01-C4541_2
aaaccctagcaacacactatttcacccacccctccgccagcgcaaaccctagcttcttcgttttcctccgcggctccatttctcgttccctcaatatcaaagtaaaaatgaaggtggtcgccgcttacttgctcgccgtactcggaggaaacgcttccccttccgccgatgacttgaaggttattctcggatcagttggagctgaggctgatgatgataggatagagttgctattatccgaagttaaaggcaaagatattaccgagctaattgctagtggaagggagaagttggcttccgttccttctggtggtggtgctgttgcggttgccgctcctgcaggtggtggtggtggtgctgcacctgcagccgaggccaagaaagaagagaaggtcgaggagaaggaagaatccgacgatgatatgggtttcagcctcttcgattaagcaagcaaagcaaatatcaaggctttctagggtccttcgtacgtaagttttcaatgttttggattctgtaggtggacatggttttaactcttctcggattttgtttgagaaagttttagttaatgacattaacattttggttataattgcggctttctggaaaaaaaaaaaaaaagcaaaaagaaaaaggaactatatg

SEQ ID NO: 3454 - DNA, 1307 bp, Gossypium hirsutum
  Clone ID: GOSHI-09MAY01-C4541_1
cccacgcgtccgtcacacacaactcctccacttccccatcttttcacgtcgcccccccacgcctccgctttttggcaattctattcagttttgtaagcaagctatggctaaggacattgaggttggtggtgagttccaggccaaggactaccatgatcctccacccgctccattggtggacgctcaggagttagcacaagtggtctttttacagggctgtcatagctgagttcattgccactctcctctttctctacatcactgtcttgactgtgatcggttacaagacccagaccgaccctgctaagggcggtgaagattgtggtggcgttggcattctcggcattgcttgggcttttggtggcatgatctttatccttgtttactgcactgctggtatctctgggggacacatcaacccagcagtgacctttgggcttttcttggctaggaaggtgtccttagttcgagccatattttatatggctgctcaatgtttgggagccatatgtggatgtgggctagtgaaggcattccaaaagtcatattacaacaagtatggaggaggagccaacagcctcgctgatggatacagcactggaactggtttggcagctgaaatcattggtacctttgtccttgtctacactgttttctctgcaactgatcccaagaggaatgcaagagattctcatatccctgtcttggcaccacttcctattggatttgctgtgttcatggttcacttggcaactattccaatcaccggcaccggtatcaaccctgctcgtagctttggggccgctgttatctacaaccaggacaagccatgggatgatcattggatcttctgggttggaccattcattggtgcagccattgctgcaatctatcaccagtttatcctgagggcagctgctgttaaagctcttggatccttcaggagcagctctgccatgtaattaagcaaatcattctccagccacaagtttaaacaaaaaaaaaaaaaccggggagggggggggttgccatggaggattggattaagttttatcaatgtggtcaagaggctttttcagaccactcaatttgtaaattataatggaggatgtcatgcttttatgtatgtggcacttattttcaatgtgccccatcattatccctgcttttctttcctttttcatggtctttcttcagtttggcttggtgtttctaagttatctttgaaaagttcataaaaatcaagtgctttgctgctgctttattcacacaagcttaattcagttcctatcctttcttctctgatg

SEQ ID NO: 3455 - DNA, 594 bp, Gossypium hirsutum
  Clone ID: LIB3583-058-P1-K1-H8
gttttatttaatttgtaaaattgatgaaatatcttgatgtatggatttacgacattaggaatggatggagattccatatcagtctgctacagaagaagcaacatgttattttcatctttaaaaatatatataattgttattgctataccatttatatttgaaaatgtgaattcaaatttttagaaagagataagaattgaaaaacctataaattccataatagaacgagctagattgaattgtgacaatatatatatatcaacgaaatataccctttttttttacttacaaatttgcttaaaaactgacaccaatcaaccaaaagttaaataaaatcttcatctttcttaacattcttagactaatgtttttctgtgcagcggcaaatgaaagaatataacagtgacgtgagacaaagcagtcgccgcttctatgcggttacaagcgacaacatgttttaaggaggaaaaagttggaatcctaatgctgcacttgcccaaaataagttttcaatcatattttctatccaacatccattctttggtcacaaaatgattaaaatatatatggattaaatcattgacttcttttaat

SEQ ID NO: 3456 - DNA, 506 bp, Gossypium hirsutum
  unsure (1)..(506): unsure at all n locations
  Clone ID: LIB3543-042-Q1-K6-G12
gggctcnncatcaggggggggggggggtgataataataaaataaagttggtattatccgaagttaagggcaaagatattactgagctaattgctagtggaagggagaagttagcttccgttccttccggtggtggtgtttttgcggttgccgctcctgcagctgggggggggggggggggtttttttcctncanctnangccaanaaagaagagaaggtcgaggagaaggaagaatccgacgatgatatgggtttcagcctcttcgactaagcaagcaaagcaaatatcaaggctttttagggtccctcgtatgtaagttttcaatgttttggattttgtaggtggatatggtgttaactcttctcggattttgtttgagaaagttttagttaatgacattaacattttggttataattgcggctttctggaatacatggttgagttttgttggntaaaatttttttttntnttttnntttggttnttttttttgttttttttatt

SEQ ID NO: 3457 - DNA, 362 bp, Gossypium hirsutum
  unsure (1)..(362): unsure at all n locations
  Clone ID: LIB3148-022-Q1-K1-B6
gttagcttccgttccttccggaggaggggttgttgcggttgccgctcctgcacctggtggcggaggcggcgatgctgcacctgcagctgaggccaagaaaaagagaaggtcgaggagaaggaagaatccgacgatgatatgggtttcagcctcttcgactaagcaagcaaagcaaatatcaaggctttttagggtccctcggatgtaagttttcaatgttttggattttgtaggtggatatggtgttaactcttctcggattttgtttgagaaagttttagttaatgacattaacattttggttattnaaaaaaaaataatttatattagtaattttttttattattgtttaaatttaataa

SEQ ID NO: 3458 - DNA, 366 bp, Gossypium hirsutum
  unsure (1)..(366): unsure at all n locations
  Clone ID: LIB3189-034-P1-K1-G3
cccacgcgtccgttttcctccgcggctacatttccactctcgttcccgagatatcaaagtaaaatgaaggtggtcgccgcctacttgcttgccgtgctcggaggaaacgcttctccttccgccgatgacttgaaggttattctcggatcagttggagctgaggctgatgatgataggatagagttgctattgtctgaagttaaaggcaaagatatcaccgagctaattgcaagtggaagggagaagttggcttctgttccttctggtggtggtgctggtgcggttgccgctcctacagctggtgggtgcggcgnnactctcttatttcctaaaccatttacttccctcgatttctaaaggcagttg

SEQ ID NO: 3459 - DNA, 692 bp, Gossypium hirsutum
  Clone ID: AW187339.1
ctagccttcttctttttcctccgcggctacatttccactctcgttcccgcgatatcaaagtaaaaatgaaggtggtcgccgtctacttgtttgccgtactcagaggaaacgcttctccttcgccgataacttgaaggttattctcagatcaggtgtggaaccaaagaaaagaggaaaaggagcaggggaactaaattttataataatggaagcagcctcgtgcagtctcgagctttgtgagcggcaaatgaaagaatataacagtgacgtgagacaaagcagtcgccgcttctatgcggttacaaacgacaacatgttttaaggaggaaaaagttggaatcctattgctgcacttgcccaaaataagttttcaatcatattttctatccaacatccattctttggtcacaaaatgattaaaatatatatgattaaaatcatagacttcttttaatgtttttttcttatcaaatctaggatctaaaagcaagatagaaggaacttaaagcaaaagaggctaaattgaataagcgtgaacgggtaatttgttgttggctgtttacactcgagtgaggctggcccttgaataataagtgtggtgcttctgatttatttttgcggtattcgatatcaattgtgataagttgttcctttcgcattgtagttacaaattatacagatttctgaagtat

SEQ ID NO: 3460 - DNA, 518 bp, Gossypium hirsutum
  Clone ID: uC-gsronu33B136a09b1
tttgttacgcgtccgcccacgcgtccgatagctgtagagctaaccagcccttccaatataaccacctaaagagacccatcaagcaaaaaaacaagggaggaatatagcagcaatggcgacgccaaagcagcagcagatgttggaacaacagcaatcaccgatgcagcgagtgaagaactcggaggctggggtgatgatggttacttcaagatcaaaaggggtgtagacgagtgcggtatcgaatccgatgtcgtagccggattgccttccaccaaaaaccttgttcgagaggttacagatacaggaattgtcgaagatgcttcattctaagagaagatcatctagacaggcttacctaatatcatagtttatcaatgaaggaactgttatcgttgtttccatttcaagtttcaaatgttacgcttcgcattgcaagaacttcagcctgtatataattcatatgttctgctacgaagtatggataatgcaatgcaaccattctgacaaattaccacttc

SEQ ID NO: 3461 - DNA, 395 bp, Gossypium hirsutum
  Clone ID: LIB3166-044-P1-K1-C4
aggcttccgccaacccttccgaatttttgtaagctattttggttaaggacgttgaggtggggggggggttccaagccaaggcctacaatgatcctccacaagttcaattggtggacggggaggagttgacaaagtggtcattttatagggctgtaatagccgagtttattgccacgctcttatttttatacatcactgtgttgacagtgatcggatacaagagtcaggttgaccctgataagggcagtgacgaatgtggtggtgttggcattcttggcattgcttgggcttttggtgggatgatctttatccttgtttactgcactgctggtatctctggaggacacatcaacccagcagtgacctttgggcttttcttggctaggaaggtgtcc

SEQ ID NO: 3462 - DNA, 365 bp, Gossypium hirsutum
  Clone ID: LIB3196-018-P1-M1-E1
agcctttttccttttcctccgcggctacatttccactctcgttcccacaatatcaaagtaaaaatgaaggtggtcgccgtttacttacttgccgtactcggaggaaacgcttctccttccaccgatgacttgaaggtgtggaaccaaagcaaagagaaaaggagtaggggaattaaattttataataatggaagcagcctcgtgctgtctcgagctttgtgaggaattgagaaggaaagaggatgcaatagcacgaggtatgatcatgggtgcagcagcttcaactgaaaagtacttgtacaggaattaaattgacaattgtagtatgcttgtagttaaagtttcttatagtgaacatcatgttg

SEQ ID NO: 3463 - DNA, 359 bp, Gossypium hirsutum
  Clone ID: LIB3272-032-P1-K1-C7
cgcgtagattggtggtgagggtcgaggggtgcactaccatgatcctccacaggtcccaaggctgctcggcgcggaatttgacaaagtggtcattttataggggggaagcccgcccgacagtgccgcagcgtagcttaaaaggactgtgttacagtgatcggatacaagagtcaggttgaccctgataagggcagtgaccaatgcggtggtgttggcattcttggcattgcttgggcttttggtgggatgatctttatccttgtttactgcactgctggtatctttggaggacacatcaacccaacagggacctttgggcttttcttggctaggaaggtgtccttagttcgagccatatt

SEQ ID NO: 3464 - DNA, 270 bp, Gossypium hirsutum
  Clone ID: LIB3272-043-P1-K1-H12
tcgatattcttcattgtaccatattttacccttcaattttgtcagcaaggagggcttatgacgctttggtttgagattacttccaagacctgggctcccattatcctccaccaggttcattggtggactgggaggtgttgtcaaacaggtcattttatagggctgtcatagccgagtttattgccacgctcttatttttatacatcattgtggtgacagtgatcgggttcaagagtcaggttgaccctgatcagggcagggcccaatgtg

SEQ ID NO: 3465 - DNA, 241 bp, Gossypium hirsutum
  unsure (1)..(241): unsure at all n locations
  Clone ID: LIB3149-036-Q1-K1-B11
caagaggctttttcagaccactcaatttgtttattataatggaggatgtcatgcttttatgtatgtggcacttattttcaatgtgccccatcattatccctgcttttctttcctattttatggtctttctttgtttggcttggtgtttctaagttatctttgaaaattttataaaaatcangtcnctataaaaaaaacacaaacaaacaaagacaatgaaaaatacattaaacaaatantg

SEQ ID NO: 3466 - DNA, 547 bp, Gossypium hirsutum
  Clone ID: GOSHI-09MAY01-C4571_1
cccacgcgtccggactagttctagatcgcgatctagaactagtcccacgcggccgcccacgcgcgcgctgcaacagctgccttgacaccagaaccagagccaactcatgacaatcttgcagaagacccattaacttacccagaagatgaagatgttaataatgatgctgaagtttttgatccttcggataaggaggaaggatcagtgattgaagatgaagttgttgaaccccaaaacattacaagtcctaatgaaactgttgtggttgttgattcacctcctgtggttttagaggatgctcctaagaaatcatatgcttcaattgtcaaagtaatgaaaactaatacagcgtctgctccggtctatgttcctaccaataatgtgagggtggcacctaaagaacctcactccattgtttctgcaaaacctgctcccgcaaccgaggtagcatcgcctaacagtgacaatgcacctgacagtagcaatgacaatgaggtagctgtaggacactccatatacgtacgggaatttgccttacactgcaaac

SEQ ID NO: 3467 - DNA, 533 bp, Gossypium hirsutum
  Clone ID: GOSHI-09MAY01-C4511_1
gttgggcctgtggaatggttgaagccctacactgatgacacaatagttgacctagggcgaaaaggagttaaaggtcttctggctgtaccaattagctttgtcagcgagcatattgaaactcttgaagagattgatgttgagtataaagaattggctttagaatccggtatacaaaattggggtcgtgttcctgcattaggatgtgaaccaatgttcatttcagacttggcagatgctgtaattgagagtcttccatatgttggagctatggcagtttcaaatcttgaagctagacagtcattagttccacttggaagtgtggaagagttattggcaacttatgattcgcaacgaagggagctcccagcaccggtgaccgtttgggaatggggttggacgaaaagtgctgaaacttggaatggcagagcagccatgctggcagtgcttgtgctgctgctactggaggtcacaactggagagggatttctgcaccagtggggaatattgccgttgttccactaaatccgacacac

SEQ ID NO: 3468 - DNA, 709 bp, Gossypium hirsutum
  Clone ID: GOSHI-09MAY01-C4501_1
caaaatccatctggctgggttttaccatcctatttagtactcagcaacgtaaaatgtaaatcatcaaatcagtatatttatttatttatttatttatttatatcttactcttttgctagtatagccgggaaagaaagaaatccagtccatcttccttttcaaacacagaaaaaagggatttgattctcctattctgaagaaccatgaatcctcgaagggacatgcgtaacagcagagttgcactctttgatggcatcgaggaaggtggcataagggcctcatcttcttactcacatgaaatcgatgaacatgaaaatgaaagagcaatggaaggattgcaagatagagtcaatctactgaagagactgtcaggtgatatacatgaggaggtcgatagccacaatcgcatgctggatcggatgggaaatgatatggatgcatctaggggaatactctcaggaactatggacaagtttaagatggtatttgagaccaaatcaagcagaagaatgtttacactggtggcatcttttgtggttgttttccttatcatatactatcttactaagtaactggtctacggtgtttttgatacagctgagaactttatgtgacaatttgtaagaccctttttatatatggttactgaaatgtgcttccgacatgtaagatattttcgtatgtttatatgaagatttcttggtatatc

SEQ ID NO: 3469 - DNA, 1525 bp, Gossypium hirsutum
  Clone ID: GOSHI-09MAY01-C4521_1
tctcacgcgtccgcccacgcgtccgatagatttcgtttccatggctcatttcttaacttatcttttactctcgtttcttataatctacgactctcttggcctctcgcaatccaaccagttttgtgatgctggggttggatatcctgagtcaacgtgtgggttttcgtcatcatcgtcgtcaaagctgttgattaagggaggaactctgttggatgctcaccagcaggaggtagctgatgtttatgttgaagatggcattattgttgctgttaagcctaatataaaggttgatgaggatgtcaccttgcttgatgccactgggaaaatatgtcatgccaggaggaattgatcctcacacacacctggctatggagttcatgggtactgagactattgatgacttctttagcggtcaggcagcagcattagcaggtggaacaacaatgcatattgactttgttatacctgttaatggtagcttggtagcaggatttgaagcctataaaaagaaagcaatgaagtcttgtatgaattatggtttccatatggcaatcacaaaatgggatgaatcagtttcaagggaaatggaaataatggttaaggagaaaggtattaactccctcgcgtgcgcccccgcctgccaggggtctcttatgatcagtgatgagcttctactgcaaggattagagagatgtaagtctctcggtgccctggctatggtccatgctgaaaatggagatgctgtgtttgaaggacagaaaagaatgattgatcttggtattactggtccagacgggcatgctctttctagccctcctgtgctagaaggcgaggcaactgcacgagcaactcgtttggcaaagtttgtgaacacgcctctatatgttgtccatgtgatgagcattgatgccatggaagaaatagctagagctagaaaatcagggcagaaggttattggagagcccgtggtctctggattgctcctcaatgagtctgggctttggcatcctgacttcgtcactgcagcaaagtatgtcatgagtcctcctatcaggcaatcacgacatgacaaggctctgcacgctgccctttcaactggagttctgctgccgcgcggccctgatcattgtacttttaattctactcaaaaagctcttggcattgatgatttccggaaaattcccaatggtgtcaatgggattgacgagaggatgcacctagtttgggatacaatggtggaatctggccaaatttccgtcactgattttgtccggattacaagcactgaatgtgccagaatcttcaatatttatccaagaaaaggagcaattcttgttggatcagatgcagatattattatatttaatcccaactctagctttgaaataagtgcgagcatgcaccactccagaactgacacaaatgtctatgatggtaggaaaggaaagggaaagtttgaagtgacaatagttggaggatgagttgtttggcaagatgaccagctaaaagttggtccttggttctg

SEQ ID NO: 3470 - DNA, 778 bp, Gossypium hirsutum
  Clone ID: GOSHI-09MAY01-C4491_1
cccacgcgtcgcccacgcgtccggaagcatacagatagttatgatcctcaggataagaagcaaagagggaaaattgtggttgaacttatgtatgccccttttagagctgacagtggtaagttagaggggacacaagacggatacagcaaaaaggaaagcgggtttgaccggacattcgacagtgaagtctttggtggagcaggtcttctttcagttctgattcaaggagccgaggatgttgagggtgaacgccacaataacccttttgccgtagtttttttcaaaggagaaacaaaaaggacaaagatgatcaagagagcccgagatcccctctggaacgaagagtttcactacatgctcgaggaacctccattaaatgagaagatccatatcgaagtcatgagcaagcgaacaggctttagcttccgatcaaaggaacatctgggaaatgtcgatatcaatcttactgacgtcgtccataacggacgaatcaaccagaaataccacctgatcgattcgaagaatggagtaatacatgttgcgataaaatgggtgacagcttgagaaacaggaagagaatttaaaccgatgtcaattggttttgcagtaacatacaaagattgatacaagtacaagagaaatatacagaaacaaagattactgcaaaaaatccatgtatagaatcccagttaaattcagtgccaatatattttttactgtaaattctcagtgccttaatctagctatgcttatttagttaaaaaaaaaaaaacaaaac

SEQ ID NO: 3471 - DNA, 905 bp, Gossypium hirsutum
  Clone ID: GOSHI-09MAY01-C4481_1
cccacgcgtccgggcacctccttctgaaaaaagcagtaaatctcggactattattgcaagacaagttaatggaattgcggctgagcaggtagtccgtcctgctgcagatgttgagaaagttccatccacaggaagcacaagtgggttaacttggggtatctcctcaatatttggtagcagtgataaccgctcatctgtgaaagagagcttgacaaacaaaccgtataccgaacctgcacaaaacatggaacatgccttctccatgatccatttgaaagagcccccatctctcctgaggccttcagaagatcgttcagaaactgaagctattgaaattgctgtcaccaaattgctcttgagatcgtactatgacattgtcaggaagaatatagaggactctgtgcctaaagcaattatgcacttcttggtcaaccattcgaaacgtgaacttcacaatgtctttatcagaaagctctacagagaaaacctgtttgaagaaatgttacaggaacctgatgagatcgctgctaagagaaaacgtactcgagaaacactccgagttctccaacaggcattcaggacattggacgagttgccattggaagctgaaacagtagagaggggatacagtttgggttcggatccaacaggcttgccaaagatccacggattggcaacatcatcaatatactcttcgggtggttcagacgatgcctatacagcttcttctaaaaacccataatctcgcaagtcatttcactctggtgaactgtcgacacactcgtatgctaataatacagattcaaatggaagtgggcgtagttacttgccaggtctctatctacagtgattattaaacgaatggaccgacagggtcattttagtcaagttcctttatctatccg

SEQ ID NO: 3472 - DNA, 427 bp, Gossypium hirsutum
  unsure (1)..(427): unsure at all n locations
  Clone ID: LIB3166-019-P1-K1-C10
gggcggccgacgcgtccgcccttttcttcctatctatagttngtggtttaatatgtaagctgcaacattatatgaatgttgatcttttaatttataatatctatatccaggtaaaccatacaaaactagaacttcacaatgtctttatcaaaaagctttacatagagaatctgtttgaagaaatgttacaggaacctgatgagattgcttctaagagaaaacgtactcgagaaacactccgagttctccaacatgcattcatgacattggactagttgccattggaagctgaaacagtatataggggatacagtttgtgatcggatccaacatgcttgccaaatatccactgactgccaacatcatcaatatactctactggtggttcagactatgcctattcatcttctcctaaaaacccaaaatc

SEQ ID NO: 3473 - DNA, 634 bp, Gossypium hirsutum
  Clone ID: GOSHI-09MAY01-C4471_1
cccagcgtccgcccagcgtccgatcaaagctgatatacaccaatgcaggtaatgccattttggcattagcttcaaatgccacacatttgctatggaaatggcctcaaaatgaccttaatttgagtggaaaggctacaaccgatgttccccctcaactgtggcaaccaagaagctgctcgcgagtgatgaccaatgaccttacagacagcacgcctgaagaagccgtgccttgttttgctttgtcaaagaatgattcatatctgttgtcagcatcaggagggataatttccctattcaacatgctgacatttaagaggatgatgtctttcatgtcaccatcacctgcggcaacaagcctagctttccaccctcaggataacaacatagttgctattggaatggatgactccactatattgatatatcatgtccgtttcacagaggttaaaagcaagctcaagggtcattctggaagagtcaccgggcttgctttctctactgccatggatttgcttgtttcttctggagaagatgctcagattttcacatggaatcttggtggatgggggaaatgtaaaagcaaacaattgcagttccccgatgagagaatcccgataagcggttcaaataccat

SEQ ID NO: 3474 - DNA, 766 bp, Gossypium hirsutum
  Clone ID: GOSHI-09MAY01-C4431_1
caagaaagcaaccatgtatcctgcccaactgaaatacgagccattctcaattaccgaaattatggcaatgttgatgaaaagaattgcaaacctcaccaaaaccacagctaaaccctcccctcctttctctttaaaatatttattattattttcccttccttccctttcttctgcttcagagaaactcctcgccggcactgccactgatgtcgccgatatttctggagaaagcgatctggtgtactcagacccacctgtatcagccaccatcaagcctcttttgcccgatctccttcaaccacgtgtcgtcatctatgatggggtctgccatctttgccaccgaggggttaagtcggtgattaaagcggacaaacacaggaagatcaagttctgctgtgtgcagtcaaaggctgctgaaccatacttgagagtttgcggtgttgatcgagaggatgttcttcttcgctttgtgttcattgaagggccttggtctttatcatcaaggttccacagctgcattgagagtgctatcatacttgccacttccctactccgctttaagtgcattcttgataattccactccattgaaggatgcagtttatgatttcattgccaagcggcgttatgactggtttgggaagagtgaaaactgcctattttgcaagagacgagctcttggagcgattcattgatagggaaaatatgatggatcgtatcgatcaaatttgtaacttggattccttaaatacaatagacaatttaat

SEQ ID NO: 3475 - DNA, 419 bp, Gossypium hirsutum
  Clone ID: LIB3145-026-Q1-K1-C2
gatgcatttggacctgatgcaatgaaatgaacaatatttccatgaaaaaagcttctaaaaactaaatgcccgctgaagttaatttcttgatggttatcagattgagaattttattgcttgatgtacgtctatttcctgccttctgaaattgattgttctgcagctgcattgagagtgctatcatacttgccacttccctactccgctttaagtgcattcttgataattccaactccattgagggatgcagtttatgatttcattgccaagcggcgttatgactggtttgggaagagtgaagactgcctagttttgcaagagagcgagctcttggagcgatttattgatagggaagaaatgatggatcgtaatcgtaatcgatcaaatttgtaacttggattctcttaatacaattagac

SEQ ID NO: 3476 - DNA, 1013 bp, Gossypium hirsutum
  Clone ID: GOSHI-09MAY01-C4421_1
cttagttgcaactgcgaggcgagtgaaaacatactctgtatttggaataacacccaattattgttttatgtcctaagaatcaagagcagagcagagcagaacggagaagaagaagatggagaggattctgtcggcggtaggtggaggaggagagtctttgttaggtagcatgaagattgcagtcctgccgatagccaaagtgttcaccatgtgttttctgggctttttaatggcttccaagtatgttaatatcttgcctgctaacggccgaaagcctttaaacgggttggtgttttctcttttgcttccgtgtttgatcttctctcaactgggacaagctattactctgcagaaaatgctcgagtggtggttcatacctgtgaatgttgttctcggctctttggttggctcactcataggtttcattgttgtaaccttagtcaagcctccctacccatacttcaagttctcaatcgtacaaatcgggattggaaacattgggaatgtaccacttgttctgatcgcagctttatgtagagatacatcaaatccttttggggacacagacacttgtaccactcagggaactgcatatatttcatttggacagtgggttggcgcaatcattctatacacatatgtatttaatatgttagctcctcccgtggaaggtacctttgaccttgaagatgcaagtcttccccttaagatccctcagaaggatgtctctcctgagcaagctccattgctggtgcaagaggatgcatcagtggattcagataattcagatacgaaaggaaagattaaaagttttcttgtttttatttatgagaaagttaaagctcaagcagattcttcaacctcctattattgcttcaatcctagccatgattcttggtgcagtgccgtttctaaagaaattaatatttacaagtgatgctccactttatttcttgacagatagctgcattattcttggggaagccatgatcccatgcattttgctggcacta

SEQ ID NO: 3477 - DNA, 631 bp, Gossypium hirsutum
  Clone ID: AI055684.1
gttggatgtcctaagaatcaagagcagagcagagcagaacggagaagaagaagatggagaggattctgtcggcggtaggtggaggaggagagtctttgttaggtagcataaagattgcagtcctgccgatagccaaagtgttcaccatgtgttttctgggctttttaatggcttccaagtatgttaatatcttgcctgctaacggccgaaagcttttaaacgggttggtgttttctcttttgcttccgtgtttgatcttctctcaactgggacaagctattactctgcagaaaatgctcgagtggtggttcatacctgtgaatgttgttctcggctctttggttggctcactcatagggttaattgttgtaaccttagtcaagccttccttaccatactgtagattctaatcggtcaattcggaatggtaacattggtgatgttccacttggtcttgacgcagtttttagtatagttgcatcagaaccttttggggactcagacccttggtccattcagggaactgcttattttaattgtgacgtggttgggccatcatctttcccattggtttaattggtagttctccgggaagggccttggccttaaaatcagtttccttagatcctag

SEQ ID NO: 3478 - DNA, 525 bp, Gossypium hirsutum
  Clone ID: GOSHI-09MAY01-C4781_1
cccacgcgtccggtcaggtcattaccactccttcttccagctgtagaagatggcatctttaacgacaatgggcgaattagacaaagctctgtggagctattaggagatctcctgtttaaggttgccggaacttccgggaaagctttacttgagggtggcagtgatgatgaaggtgctagtactgaagcacatggacgtgctattatagaggttctgggaagggataagcgcaatgaagttcttgctgcattatatatggttcgaactgatgtcagcattactgtacgccaggctgcattacatgtatggaagactattgtagcaaatactccgaagacgctcaaggaaataatgcctgttttaatgaatactctaattacttctcttgcatcagcatcctctgaaaggcggcaggttgctggaagagcactgggagaacttgtgagaaaactcggggagagagtacttctcttataattccaattctatctcagggattaaaggacccagatgctagtagaagac

SEQ ID NO: 3479 - DNA, 847 bp, Gossypium hirsutum
  Clone ID: GOSHI-09MAY01-C4731_1
aaagaccaaggttgaaagattaaacggtgctttcgaatttagaaaaagcaaagagagactttacatcatgccatttatgtgcagaatacaaagttgaaagtctgtattctgcataaggtgatcagaaagaagaggaagggtatacagaatttcatcttacaaccagatcgaagatggacgttgatttactctttccgcaggagccagattctaagctgaatcggtttctaagacatttggtgagggaaaaatgtttcttcgaggggaattcgtgtttactattaaagaatgcagttggccttggtatgctcatagaagctataagtattggcaaagaaaagagagacctgactaccatggagccagtaaaagccaatcatatagtttcttggcatcctgaaataccaatcggcaaagcatgttctgctcttacctcagcaaatattatcaagtttttaacaggagattttaggttgagcaaagctagatccagcgatcttttctaggaagctgtttggcctcgccttttagccagaggttggcactctgaatagctaaaggatcaggtttttgctagtttgaagaactcttttgtgttccttataccggttgtaaaaaatttttcaaaaaggagactagtgaaagggaaccattattttgattctgttactgacattctaaataaagttgcttcagaaatagtgtttcttgactttgaaatcgaagtgcctgaaggcagcagagagaacaaagagaataagtgggagccaataatagatcaagctcttgattttgtggtagataaaaacaaattttacctcaagccatgaaatctggttgcaattgg

SEQ ID NO: 3480 - DNA, 475 bp, Gossypium hirsutum
  Clone ID: GOSHI-09MAY01-C4681_1
aaaaatagtaaaatcttttttcttctttaacaagtacaagaggaaaggagattgacaaattattcttgggaggagaatctattctctctctttgtcataacagccgtagcatctttcgtcaacaactctttccttccgagagttcacagggatttgaagcgtaaataagatcttattaagatatagtttgggggtgtagatattgctacctgttttgtttaaacatggtgatggtagagtcgattgcaacaacttcacttcttggacaccgccctttatgtggaagattttccgctagggatgtctcctgcaaacaaaaatctttgagtaactgcctgtctcctttcaaagaatttattggcaaaacgatcgttggtcctccttcgccaagattgagagtggaaaggttagttaattcatccatcaaggcgcttgcaatggaactgacaaaagaggtttatgcatatgaaggaaa

SEQ ID NO: 3481 - DNA, 687 bp, Gossypium hirsutum
  Clone ID: GOSHI-09MAY01-C4641_1
cccacgcgtccgcttttgttttcttggacttgattgaattttaaggaaattagaggataaatatggctcttgaagctctgaaatctccaacaatggcgactgccccttacagcaacaagtacgaagacatcgacaacaattacgtcgatacatggaagaaaggcaagcgttcaaagcgacaacgcgacgacgagtcttcttcttctccgccgccgccgccgccgccgccaccgacgaatgaagaagagtaccttgctctttgtctcatcatgctagctcgtggtggttccaccactgaaaacgccgtgacagacggtggaaacgatgaccatcgtctgtcttcttcttcttcagcaccggcaccagcggctttgaagttgtcttacaagtgcagtgtttgtaacaaggctttcccttcttaccaagctctaggtggacataaagccagccaccgtaaatcctccaccgatgctaaacccgataatcagtccatcaccaccagcagtaccaccgccagcggggaagccggcggtaacggtaaagcccataagtgttcgatctgccataagtctttccctacaggccaagctttgggaggtcacaaacgctgtcactacgaaggcggaaacaccaccaccaccaccaccaccaccgcgccatcaccaacaacaagagcagtagcgtcag

SEQ ID NO: 3482 - DNA, 997 bp, Gossypium hirsutum
  Clone ID: GOSHI-09MAY01-C4671_1
ccttatcagtgtccacagttcaccccttgtgtgaggccgccgacaaagtgtataatctctctcaacagcctcaagccctctttttttttcttttttcttcctgtctctttttatgttttgtgcgtaaatggcatcatcccttctctctagaactcttttgggtcaccgcttaattcgattctcctcgtctctccctcagaaccccttgattttctctaatcttttcaataagagagagttccgtgtacaggctgagtcttaccataccacatataaggcctctggtcagcattctcgtttaatggcttctgcagcaattgagacaagaagtaatttttcgacacagtctctttctaccaatgatccggttgtttctgttgattggcttcatgctaatttaagggagcctgatttgaaggtattggatgcatcatggtacatgccagatgagcagaggaatccaattcaagagtaccaggttgctcacattcctggtgctcttttctttgatgttgatggaatatctgatcgaactacaaagttgccgcatatgctgccatccgaggaaggttttgcggctgctgtgtctgctcttggcatccataataaagatgggctggttgtttatgatgggaagggaatttttagtgcagcacgtgtctggtggatgttccgagtctttgggcatgacagggtctgggtgttagatggaggcctcccaaggtggcgtgcttcaggttatgatgttgaatccagtgcttctagtgatgctattttgaaagccagtgctgctagtgaggcaatagagaaagtctatcgggggcaaactgctggaccactcacatttcagacaaaatttcagccgcatcttgtctggacacttgatcaggttagaagaaacattgaggaaaagactcaccaacatatagctgcccgttccaagcccagatgttatggtgctgcaccagaacctcgtaaaggaattagaagtggccat

SEQ ID NO: 3483 - DNA, 419 bp, Gossypium hirsutum
  Clone ID: LIB3197-054-Q1-M1-C5
gtgtccacagttcactccttcttgaagcagacgacaaaatatataatctctctcaacagcctcaagcccctctcttttttatgttttgtgcgtaaatggcatcatcccttctctctagaactcttttgggtcaccgcttaattcgattttcctcgtctctccctcagaaccccttgattttctctaatcttttcaataagagagagttccgtgtacaggctgagtcttaccataccacatataaggcctctggtcagcattctcgtttaatggcttctgcagcaattgagacaagaagtaatttttcgacacagtctctttctaccaatgatccggttgtttctgttgattggcttcatgctaatttaagggagcctgatttgaaggtattggatgcatcatggtacatgccagatgag

SEQ ID NO: 3484 - DNA, 724 bp, Gossypium hirsutum
  Clone ID: GOSHI-09MAY01-C4661_5
agttaatatagagagttcatatcataaaatgtcgaaccatagatgaggctggaatttctaaaacaacatagtcataaggtaggcacggcacagcctccaagccatgaacaaaatatacgtaactagatcgctacacaactaataaaaggataaatcaacatcaactgttattcctatagtaaaatagtcctaccatacacgctgatgatgatctcctaattgtaggttgatgagaaccttaggatgatttgtgctttaattttctattcccagaaggtgccctgggtggtgtccatggtgtggtttctgctcatggggaggcttctctcccttacctttgggtggtattacatatttgtgtggctcacttaagaggtgtctatgaggaggtttaggttcatgaggtgctccctttcccttacccttggatggtttgtcaccggggaatggtttcatggatggcttaccgtcagggaatccttcaacatgtggaggtttacccccgagtgtcgggaggttttgggggtccctgacgtggaggtttatgtgtgtcctcaacttccacattcaataggtgtctatgaggaggtttgggttcatgaggtgctccctttcccttacccttggatggtttgtcaccagggaatccttcaacatgcggaggtttaccccctgaatgtcgtggaggtattaccaccctattgttgggaggttatgtgtgccc

SEQ ID NO: 3485 - DNA, 939 bp, Gossypium hirsutum
  Clone ID: GOSHI-09MAY01-C4661_4
aaaaaaaaaaaaaagtttaatcgagataacaaatccatttgatttagacttggaagaaaaacaatgtaagttttgtgacaacaaatacaatcccaaccgaagcatacaaagattattctatggagagagtcttgaacaaagtaaaaatgaaaaggcaagaaaaacaaacacatatttatacagctgaatatctatatatatatatagatatatatctggcatttagatgagccaaatctcccaagctgttgttcccttgagcttccgggcactgccggcaaaatacttgccttggtggaaagcttgccctaactctagctcagagggctgtcttgaaccatccccagcaaatgttccagcaccataagggcttccacctttcactttctccatctcaaacataccagcaccaaaagtgtacccaatgggcacaaatagcattccatggtgaaccagttgagtgattgcagttaagggagtagtttcttgtccaccaccttgggagccagtgctgtagaaaatgccagcaggtttaccagcaagggcttgtgttctccatagaccaccagttgcatccatgaatgctttaaactgtgcagccatcatcccaaatctagttggaaacccaaatagcacaccatctgcctccgtcagctcatctggtgttatgataggggcatctgtctttggtggtgctcccattttcccaagaacttcttctggtagtgtttctgctacctgccaaagtttgacttccactccctcgacagattcagctcctttcttcatctcttgggccagtttctcaacatgtccatacatggaatagtatacaatgtagactttggtgaccattttctcttttggttaactctgggtgtttggttttttgttgttgttgttggtttaatggaaatgcccggttttcgaacgcgtggg

SEQ ID NO: 3486 - DNA, 899 bp, Gossypium hirsutum
  Clone ID: GOSHI-09MAY01-C4661_3
tcatggatggcttaccgtcaggaaatccttcaacatgtgaaagttttaccccctgagtgtcgtgaaggtttatgtgtgtcctcaacttccacattcaataggtgtctatgagaaggtttgggttcataaggtgctccctttcccttacccttggatggttcgtcaccaggcaatccttcaacatgcgcaggtttaccccctcaatgtcgtgcaggtttaccacctcattgttgtggagcgtttatgtgtgccctcaacttccacactcaataggtgtctgtcaggaggtttgggttcatgaggtgcccctcttcccctacccttgaatggtttgtcaccagggaatccttcaacatgtggaggtttaccccctgaatgtcgtggaggtttaccacctgagtgctgtggaggtttatgtgtgccctcaacttccacactcaataagtgtctatgaggaggtttgggttcatgaggtgctccctttcccttacccttggatggtttttcaccagggaatggcttcatgggtgctttatcggtagggaacccctcaacatgtggaggtttaccccccgagtgtcttggaggtttaccacctgaatgtcgtggaggtttatgtgtgccctcaacttccacactcaataagtttctatgaggaggtttttccccatgtggtggctcctgtcctttaccgccaggtccactgtgtattggcggtcggtgttcagggaatggcttgtgttgtggttgcttctcacctgggaaaggcttccccttgggaagctcattatcatgatgttggttagctagagaaggagtgatgataaaaaccaccactccaacgagaaacaaaagcaagcaggctttagacatgtttgggaatatatctctcggttttg

SEQ ID NO: 3487 - DNA, 1019 bp, Gossypium hirsutum
  Clone ID: GOSHI-09MAY01-C4661_2
cggcatatttgagtttcgctcagttttcattgaaaaccctagacctcccaacgaagtagcagagccgcagtttctctgtcgatatccgaaacaagaaatggctgtcacattcaacgacctgggttctgctgctggcttgaagaagctggatgagtatctccttactcgcagctacatctctgggtaccaagcttcaaaggatgatattaccgtctacgcagctctatctggtgccccatcgtctagctatgtcaatgtttctcgatggtacaaacacattgatgcccttttgagaatctcaggtgtttctgaagaaggctgtggtgtgactgttgagggatttgctcccgctgaggctgttgccactccttcagttgctgattccaaggctgcagctgctgaggatgacgacgacgatgatgtagatctgttcggtgaagagactgaggaggaaaagaaggcagctgaagaacgtgcagctgctgttaaggcctctggcaagaagaaagaatctggcaagtcctctgtgttgttggatattaaaccatgggacgatgagactgacatgaagaaacttgaagaagcggtaagaagtgttcagatggaaggactgctttggggagcatctaagcttgtgcccgttggttatggaattaagaaattgcaaattatgatgaccattgtggatgatttggtgtcagttgacactctcatcgaggaacatctgacggttgaaccaatcaatgagtatgttcagagttgtgacattgttgcattcaacaaaatataatttgctatttgggatgcctgcagtaggagttccttgaagaggccttcaaagttatgtttgagattttcatgttttttgttttgctagaacttaatttaagttgtcgttattcttgtgttggacaatggatcgtttatcatgaatatggagcatcaaacacctgatggtttattttaaaaaaaagagatctagtttgtgattaagaaaggcaggcggcgaaacttgtttt

SEQ ID NO: 3488 - DNA, 974 bp, Gossypium hirsutum
  Clone ID: GOSHI-09MAY01-C4661_1
cgcccacccgccccgccgctcatctgcttctcttctccttctcttgcctttccaggttccaaactctcgttcttcctccagctcctatcctttaacaggaaatggcggttacattcaacgacttgggttctgctgccggcttgaagaagctcgatgagtatctcctcactcgcagttacatctctggataccaagcttcaaaggatgatatcaccgtctacacagctctatctggggccccatcgtctagctatctgaatgtttctcgatggtacaaacacatcgatgcccttttgaggatctcaggtgtttctgaagaaggctgtggtgtgactgttgagggatttgctcccgctgaggctgtggccactcctccaactgcagattcaaaggctgcagctgctgaagatgacgacgatgatgatgtagacttgtttggtgaagagactgaggaggaaaagaaggcagctgaagaacgtgcagctgcagttaaggcctcttccaagaagaaagaatccggaaagtcctcggtattattggatattaagccatgggacgatgagacagacatgaaaaagcttgaagaagcagtaagaagtgttcaaatggaaggactactttggggagcttctaagcttgtgcctgttggttacggaatcaagaaattgcaaattatgatgacaattgtggatgatttagtgtcggttgatactctgattgaggaacatcttacagtggaaccaattaatgaatacgttcagagctgtgatattgttgcatttaacaaaatataaactattttgggatgctgcaatagtagtttcttgaggagtccttcaaatttaagattttcatgttttcttgttctgctagaactttaatttattgtgttggttattgttttttgttttgctagaactcaaattattgtgctggcttttattatcttatttataaaagaaacaattattcat

SEQ ID NO: 3489 - DNA, 412 bp, Gossypium hirsutum
  unsure (1)..(412): unsure at all n locations
  Clone ID: LIB3135-032-Q1-K1-B7
agttaatatagagagttcatatcataaaatgtcgaaccatagatgaggctggaatttctaaaacaacatagtcataaggtaggcacggcacagcctccaagccatgaacaaaatatacgtaactagatcgctacacaactaataaaaggataaatcaacatcaactgttattcctatagtaaaatagtcctaccatacacgctgatgatgatctcctaattgtaggttgatgagaaccttaggactgctttggggagcatctaagcttgtgcccgttggttatggaattaagaaattgcaaattatgatgaccattgtggatgatttggtgtcagttgacactctcatcgaggaacatctgacggttgaaccaatcaatgagtnatgtcagaggtgtgacattgttgcattc

SEQ ID NO: 3490 - DNA, 435 bp, Gossypium hirsutum
  Clone ID: uC-gsronu33B148b08b1
aaacttggtatttccattaaaccaacaacaacaacaaagaaccaatcacttagagttaacctataagagaaaatggtcaccaaagtctacattgtatactattccatgtatggacatgttgagaaactggcccaagagatgaagaacggagctgaatctgttgagggagcagcagccgccatttcacagtggacctggcggttaaggacaggagccaccacatggggaaaaacctcctcatagaaacttattgagtgtggaagttgagggcacacataaacctccacgacattcaggtggtaaacctccaagacactcggggggtaaaccttcacatgttgaggggttccctaccgataagcacccatgaagccattccctggtgaaaaaccattcaagggttagggaaagggagcaccttatgaaccccaacct

SEQ ID NO: 3491 - DNA, 382 bp, Gossypium hirsutum
  Clone ID: uC-gsronu33B148b09b1
cggataaatggagacggtttgttgcattcgtgaagaagatgaatgttggaaaaggagcttgtgggtgtatacacaacccgctctagctaaccaacatcatgataatgagctatccaaggggaagcctatcccaggtgagaagcgaccacaacacaagccattccctgaacaccgaccgccaatacacagtggacctggcggtaaaggacaggagccaccacatggggaaaaacctcctcatagaaacttatagagtgtggcagttgagggcacacataaaccttcacgacattcaggtggtaaaccttcaagacactcggggggtaaacctccacatgttgaggggatccataccgataaagcacccatgaagccattccct

SEQ ID NO: 3492 - DNA, 353 bp, Gossypium hirsutum
  Clone ID: LIB3585-044-P1-K1-D7
cccacgcgtccgatcagcagcgccgcttatctgcttctcttctccttctcttgcgctttcgggtaacaggaaatggcagtcacattcaacgacttgggttctgctgccggcttgaagaagctcgatgagtatctcctcactcgcagttacatctctgggtaccaagcttcaaaggatgatatcaccgtctacacagctctatctggggccccatcgtctagctatctgaatgttactcgatggtacaaacacatcgatgcccttttgaggatcttaggtgtttctgaagaaggctgtggtgtgactgttgagggatttgctcccgctgaggctgtggccactccttcaactgc

SEQ ID NO: 3493 - DNA, 370 bp, Gossypium hirsutum
  Clone ID: uC-gsflnu33B090d04b1
attgcagaatctttgacctccgaacatagaaagagctacgtagaatctatgttgatatactagacatgagatggctgagacattgaacgaccggtgtcctgctgatgtgtcgaggaaactgtgtgagtatattgttactcgcagctacatctctgggtaccaagcttcaaaggatgatattaccgtctacgcagctctatctggtgccccatcgtctagctatgtcaatgtttctcgatggtacaaacacattgatgcccttttgagaatctcaggtgtttctgaagaaggctgtggtgtgactgttgagggatttgctcctgctgaggctgttgccactcctccagttgctgattccaaggctgcagct

SEQ ID NO: 3494 - DNA, 346 bp, Gossypium hirsutum
  Clone ID: LIB3196-028-P1-M1-E5
ccttgtcccacccttccgagagagaaacgctcagactgtctctagcttacatacaccaacagggaatggcggtgacattcaacgactcgggttctgctgccgtcttgagaaagctcgatgagtatgtcctcactcgcaaatacatgtctcgtgaccaagcttcaaaggatgatatcaccgtctacacagctctatctggggccccatcgtctagctatctgaatgtttctcgatggtacaaacacatcgatgcccttttgaggatcttacgggtgtattaagaacgctgcggtgtgactgctgaaggatttttttccactgaggctgtggccactcctccaattgc

SEQ ID NO: 3495 - DNA, 343 bp, Gossypium hirsutum
  unsure (1)..(343): unsure at all n locations
  Clone ID: uC-gsronu33B039b04b1
ccttcgtgtccggcgccgctcatctgcttctcttctccttctcttgcctttccaggttccaaactctcgttcttcctccagctcctatcctttaacaggaaatggcggttacattcaacgacttgggttctgctgccggcttgaagaagctcgatgagtatctnctcactcgcagttacatctctggataccaagcttcaaaggatgatattaccgtatacacaaaaaaaaaaggggggccccttttgggggtcccagtttttcttccccgggctgggaacgaaaaagtttttattgggggccccaaaattaaattcccggcccgggttttaacaccgtgggg

SEQ ID NO: 3496 - DNA, 1002 bp, Gossypium hirsutum
  Clone ID: GOSHI-09MAY01-C4631_2
atttctctgttccatctttttattgctttcacttcaatcaaatagatagcattgctttgagctggtacttattacttttaactgtaaacagatcttaaatcattcttttaaatgaatttaatttttatttttgacgttgatgttgttaatattttctttatatttattcaataatgttactctctttcttgatttgagtgtaaaaaacaaaattaatgttattgaattttatttagatttaataaatttatagatcttaattatgtgcggtttatgggggggggtgacccatgttgataatattttgcagttttggggaactaagtagttattatgtctgcaatgagttttagttacttaggatttactccattagtaactataaatgggatttaagattttcatttgatgttaaatttcatatttggtgtcactggcgtatggcaaataatttgctctcttctcggttaaactgttcaaacctggacaatcctttccctgatccatttttaataaatctttttcattatttggtaagtttgataacttcactgactctgatatatggctggatgaaggagttgggggtagtttggttcagtttgttgtgactgaaaagaaaaaaagagaagaaaatggagttgtctgggttctccagatgagaactgatgttattgacagtagaaggaggagggttcttctcttcgtcagcgtccgggtatagcaagggctttgcccttcttctgttgggtcagaagcacgaggacaagtccatgagagtttcgccgtggaatcattaccagttggtagaccaagaacctgatcctgatcctgacctccaactggcttccatcaagaaccggctttcccgcgggtgcgcctcttttgtctgctttggtcgcacttccgccgggcttgacacaccgtcgcctttgaaagttggccctgttcaacagcaagatgtcttgccagggtcctttgcttcaaataaaagtaatgatc

SEQ ID NO: 3497 - DNA, 819 bp, Gossypium hirsutum
  Clone ID: GOSHI-09MAY01-C4631_1
ccccgcgtccgcggacgcgtgggtttttatttccccctactctaatattccctcgcgtccccccgcccgtccgttttattttcctattttgcccggccttttttcaaaatctcgtcgattaattcgtacgttcgcctcgattgaacattccggcgccgccaattttgattttcttgagtttcttcgacacacttcagatccgtttaatcgccatcagggctagtttgcttcaatttgttgtaacttgagggttgttgaaaagaaaaacaaaggtgttatctgggtgccccagatgagaagaactcatgttattgacagtagaaggaggagggttcttcagttcttcagtgtctgggtatagcaagggcttggcccttcttctcttgggtcagaaacacgaggacaagcccatgagagtttcgccgtggaatcattaccagttggtggaccaagaatctgaacctgacctgaatcaactggcttccatcaagaaccggctctcccgcgggtgcacctcttttgtctgctttggtcgcacttccgctggacttgatgccccgtcgcctttgaaagttggccctgttcaacagcaggatgtcttgccagggtcctttgcttcagataagagtaatgatcaagcaactcagcttgatgatggcaatagcgatgcaagaaaggttgttttcaaaagtagtttgaagaagcaatcacatactactcaagttcctcttgaggatggtaatgaccgtgaggtatcaggggaaaaggatggtgatatcccgagtcatacagtacgaagaaaggtgcagtggactgatg

SEQ ID NO: 3498 - DNA, 428 bp, Gossypium hirsutum
  Clone ID: LIB3165-020-P1-K1-D11
cggacgcgtgggcggacgcgtgggttcttttttcttttcttttcttttttccaccctgtttatttataatttctctctaatattccaattcctcgccgattaattcgtacgcaagtcggggtcgaacatgccggcgccgccggtttagtttcctgggcttttttttttcctttctactctccagatccgtttaatcgccatcaggagttgagggtagtttggttcagtttgttgtgactgaaaagaaaaaaagagaagaaaatggagttgtctgggttctccagatgagaactgatgttattgacagtagaaggaggagggttcttctcttcttcagcgtccgggtatagcaagggcttggcccttcttctgttgggtcagaagcacgaggacaagtccatgagagtttcgccgtggaatcattacca

SEQ ID NO: 3499 - DNA, 530 bp, Gossypium hirsutum
  Clone ID: GOSHI-09MAY01-C4141_1
cccacgcgtccgctcgctttcgtcctccttccaatctcaaaacctcgaagaaccagagaatatgggtaaatatcgaaacggttctctctcagagaactccgacgaagaaacgggaacaccatctaaacccaaaccaaaacacaaacccgactcagaatccgaagatacaaagcccagaagccacagcaaaagcgaaaaagggaaacgaccgagcaaatcacgaagaagacacgacagcagcagcggtatcagtgaagacgattcgtattcagactcagaatccgaatcggaatcccagtcggagtattcggaaacggaatcagggtattcggattccgaggaggagaggaggaggaggaagaggaagagaacggagagagaagaaagggcaaggaagaggaggaagaaagagaacggaaaggagaggagaaagatagaaaaagagagagacgaggagaggaaaagaaagaagagaaaagagaaagaaaggaaagcaaagaaaaagaaggattagttagagaaagggaaga

SEQ ID NO: 3500 - DNA, 1176 bp, Gossypium hirsutum
  Clone ID: GOSHI-09MAY01-C4131_1
cggccgcgtgggttttaataacaggatggtcacatgcagccaagagttgctcctaggttaatgaggcatccccccccacctcctctgcctaatacttaccatttattgctcacactcctatgcggccttttggcaccccaatggggtatcctgaattggcatctctttatatggtcccagctgctcctccagagtcacttagaggtttgccatttgttgcctcaatgtccccaatgtttttcccatcccctgagcctcatgacaatcagttgcatgctagtatagtgaatcagatagattattatttcagtaatgaaaatctaattaaggatacctacttgaggcagaacatggatgaccagggctgggttcctattaaattaatagccggcttcaaaaaggtttcacttttgactgataatattcagctgataacggatgctctgcaaagttcaacagttgtggaagtgcagggtgacaaagtaaggaagcggattgattggatgcgatggataatgccgccttctgttcatttccctaccatgtctggtcaggatacactagcagctcgtgttcagaatatttcattggatcagagaactgcaaaccagagtggtgcaagtaaccctgaagattctgatgctggtagaccatcatatggggacttcagtaatcagtctcagctattcaacaatgagggatcaaccgccggtgctcatggtgggccagcaagtaattgaaacgaagcaaaatctgttgatgtacgttttccttgctaaaaattcctggaagataaagagtagagaatgattttgaccccatgggttattatttgcctctcttgaaggtactggtttttgaactttgctacgatgaatcccgatttctcgtacagcaaatttaccgaattgttttcctttgttcttttccttttttacaaatggggatgttggattttcttttactatttgttattggtgatggtgggtgtttaaatctgggagaatttcgatttttattttcgaaaaaacataaaagaaaatctttggagggctttgatagcctctggttgcaggggtgaaaaaaaaaaagaaaacatacttggattgaggtctatggagaaaatggctcctgcagctgtggcagcaacagctactactgctattatttatgcct

SEQ ID NO: 3501 - DNA, 517 bp, Gossypium hirsutum
  Clone ID: LIB3583-005-P1-K1-D10
cttttcaggtttcacttttgactgataatattcagcttataacggatgctctgcaaaggtcaatgggtgtggaagtgcagggtgacaaagtaaggaagcggaccgattggatgcgatggataatgccaccttctgttcagttccctaccatttctggtcaggatacgttggctgctcgtgttcagaagatttcattggagcagagaaccgcaaaccagagtggtacaagtgaccaagaagatactaatgccagtagactgtcaggtagagcatcgtcgggagacttcaataatcagtcacagcaactcaacagtgaaggaacagctgtcggtgctcaggctggtccggcaagtaattcaacttaagctaaacttgccgttgcttgcagaaaaagttcctggaaagatagagcagagaatgattttgacaccatgggttattattttgccttgcttgaagatgttggctttttacatgttgcgacgaaatacggttcttttcgttactttgtgcgacg

SEQ ID NO: 3502 - DNA, 645 bp, Gossypium hirsutum
  Clone ID: GOSHI-09MAY01-C4011_1
ttaaaattcaaaatccaaagcataaaagtactctgtttttgctctgtttttaagtcatggtggtaatggtggctccactttgcttgctatattggctgttaatttcaacatggtggcttatggtttcaacgtcaggaatggtgtggattccattaactcattcattatcaaaaacccaattcaccactccacaccacttgcttaaaaccacctcaactcgttcagcaactcggttccgccaccatcttcaccaccgtcacaaacaagtgtcagtccctctttcacctggtagtgattatacgctttcgtttactcttggttcaccttcttcttcaactatttcactttatcttgatactggtagtgatctcggttggcttccttgttcaccatttgaatgtattttatgtgaatcgaaaacgccgccgctttctcctccgcttaatctttcttcatctgctaccgccggaccatgcaaatccttctgttgctccgacgcttattcttcttttcattcttctgacctttgggccatagcacggtgtccacttgattctattgaaatgtctgaatgttactctatttcttgtccgccgtattactatgcgtacggcgacctgcagtttaaatcggcctggtttataa

SEQ ID NO: 3503 - DNA, 1031 bp, Gossypium hirsutum
  Clone ID: GOSHI-09MAY01-C4021_1
cccacgcgtccggttttcttttctcaattaataaattcttttgggttacaagataaggatattgtttagatgcgttgaagaggtgaaaaagagaaagagagggctggatttgggagatccgatcgtagaaatttggtgttatttgaaagaaagatagttcaattggtaaattaattgaaaaatggagtcgtcgaatcaagcggagttcgattacttgttcaagttgctgatgataggagattcaggagttggaaagagtagtcttcttttaagtttcacttccgattcctttgaggaactctctcccactatcggtgttgattttaaagtgaaatacataaatgccggggataaaaaactgaagcttgcaatttgggatacagctgggcaggaaaggttcagaacattgacaagttcttactacagaggcgcacaaggggtcattatggtttatgatgtaacacggagggagacatttactaacctttctgccgtctgggccaaggaatttgaactctactcaacaaatcaagactgcatcaagatgcttgttgggaacaaagttgacaaggaaagccagagggttgtgacaaagaaagagggaatagactttgctagagagtatggttgccttttcatcgaatgcagtgctaaaacacgtgtctaacgtacagcaagtgcttcgacgagcttgtttctgaagatccttgatactccgagcctttttggctgagggggcccaaggtgtgaaaaagaacatgtttaaccagaagacaccggaagccaatgctgctacaggcgcttgctgctgatctggttcttttgtttatacactccatctcccaaatctctaaccacagcgcgtttattccctcccagttttctggtagaataattatataaacttcatttcagtttgatattgatatttcatatgaaacgtgatttcccgtgtaacatagcaccgcttaaaatcttgagctcatcaattcgatttattcatattaatcttcaaaagaaaagaatttatt

SEQ ID NO: 3504 - DNA, 457 bp, Gossypium hirsutum
  Clone ID: uC-gsflnu33B060b10b1
tcggatgaaaatgagggaaacaaacgctccaagtttcagtaactggcaagggaggtgaaaccgcagatggcgtcatcgaaacataaaggagtagagataacaattccaggactacttctctatgtctctacacgacagtatattcatattgttgctatgatcttccctctcttattctccactcactagccctccctcgacacctgattccatctttaccaccaccgtcaacggaataaccggaaggcaagtgatggaagaaggaagctatcaattaatgatacagatgagcaagaacatatcatgacattaaacaacttcttactacagaggcgcacaaggggtcattatgggttatgatgtaacacgaagggagacattcactaacttttctgaaggctgggccaaggaaattgaactctacttaacacatcaagactgcataaagatgcttgtt

SEQ ID NO: 3505 - DNA, 597 bp, Gossypium hirsutum
  unsure (1)..(597): unsure at all n locations
  Clone ID: AI726567.1
gaggttttttttttaataatttaaaggaaagtgttaaacgggttagcgcgagaaaagagaataggatcagatttcttggatgaggcagtgatttattattattattatttttaagtgagaggggatttgggagatttaatcgtaaaataattggtgaaaattgaaagaattaaattgaagcgagtgtagtaagtaaaaaaataattagaaaatggagacacagatcgattactttttcaagctactgatgataggagattcaggcgtcggaaagagtagtcttcttttaagttttaccgccggtacctttgatgaactatctcccactattggagttgactttaaggtgaaacatgttactgttggaggcaagaagctaaagcttgcaatttgggatacagctgggcaggaacgattcacaacattgacaagttcttactacagaggcgcacaaggggtcgttatggtttatgatgtaacacgaaaggaaacatttacaaatctttctgaagtatgggctaaggaattcnaactctactccacaaatcaagactgcatcaagatgcttgttggaaacaaagttgacaaggaaagcct

SEQ ID NO: 3506 - DNA, 403 bp, Gossypium hirsutum
  Clone ID: LIB3493-022-P1-M1-E10
ataatttccaggtatcggcaacagccacgctctccatttattcgccatggtgattttgcacaaaaatttttttttaatttccaggatgcttttacaagtttttctttaagaaaagaaaaggatcagatttcttggatgaggcagtgatttataattattattttttttaagtgttaggaggttttttttgttaattaatttatttttttttgtttgatttattgtatatttaggtgttttttgttattttgttattattttttttttttatttttttaaattttttgattttttttttttattttgttattttattttatttatattttgtgtgtgtgttgattgtttttttttttttattatttgtgttttttgtatttatttattatttttttttatattt

SEQ ID NO: 3507 - DNA, 480 bp, Gossypium hirsutum
  Clone ID: uC-gsronu33B157a03b1
aaccattctctctagcaaagtttattccctctttctttgttacaaccctctcactttccttgtcaactttgttcccaacaagcatcttgatgcagtcttgatttgttgagtagagttcaatttccttggcccagacttcagaaagattagtaaatgtctcccttcgtgttacatcataaactgtttaagatcaaagaaaacctcatattgtaattctccaaacaaattaagagcagaaatacatgcaaagtcataaaattgaccagaatgataaaagctaaatgttacattacagcacacttaaaagaggttagaattgaagaggcatctaatcttagtcatgtgaagatgttaaccacttatactgactacagcaaaaaaaaagctttagcagagtaaaacttttttacagataaaaaggaagtagaaaacatctaatcatttaatccaggccaaggcaatatgtaaccacagtagcta

SEQ ID NO: 3508 - DNA, 582 bp, Gossypium hirsutum
  Clone ID: LIB3828-023-Q6-K6-G10
cccagcgtccgctttgccttaataatacctgagtaggtatattataatttccaggtatcggcaacagccacgctctccatttattcccattttgattttgcacaaatttttttttttaatttccaggatgcttttacaagtttttctttaagaaaagaaaaggatcagatttcttggatgaggcagtgatttattattattattatttttaagtgagaggggatttgggagatttaatcgtaaaataattggtaaaaattgaaagaattaaattgaagcgagtgtagtaagtaaaaaaataattagaaaatggagacacagatcgattactttttcaagctactgatgataggagattcaggcgtcggaaagagtagtcttcttttaagttttaccgccggtacctttgatgaactatctcccactattggagttgactttaaggtgaaacatgttactgttggaggcaagaagctaaagcttgcaatttgggatacagctgggcaggaacgattcagaacattgacaagttcttactacagaggcgcacaaggggtcgttatggtttatgatgtaacacga

SEQ ID NO: 3509 - DNA, 501 bp, Gossypium hirsutum
  Clone ID: LIB3584-045-P1-K2-G10
tttctttctttcttttgtttttttttctgagaggtaatctcttattatattcaattttgatgtataaaataaatgctataaatatgtatgatcaaccatgatctaaacctgtgtttagatgcgttgaagaggtgaaaaagagaaagagagggctggatttgggagatccgatcgtagaaatttggtgttatttgaaagaaagatagttcaattggtaaattaattgaaaaatggagtcgtcgaatcaagcggagttcgattacttgttcaagttgctgatgataggagattcaggagttggaaagagtagtcttcttttaagtttcacttgcgattcctttgaggaactctctcccactatcggtgttgattctaaagtgaaatacataaatgccggggataaaaaactgaagcttgcaatttgggatacagctgggcaggaaaggttcagaacattgacaagtttttactacagaggcgcacaacgcgtcattatgggta

SEQ ID NO: 3510 - DNA, 242 bp, Gossypium hirsutum
  Clone ID: LIB3083-048-Q1-G1-G3
gccttttcatcgaatgtagtgctaaaacacgcgttaatgtacagcagtgcttcgacgagcttgttctgaagatcctaaatactccgacccttttggctgagggttccaaaggtgggaaaaagaacatctttaaacaaaagccaccagaactcgatgcatcggcaagcggctgttgctaataccaaatctcaagcgcggtgattcttacccacttctgaccattatttacagtatggtttttc

SEQ ID NO: 3511 - DNA, 197 bp, Gossypium hirsutum
  Clone ID: LIB3189-028-P1-K1-F1
cggacgcgtgggattttcttctcaccatttttcttttcctagaggtttagatgcgttgatcaggtgaaaaagagaaagagggctggatttgggagatccgatcgtagaaatttggtgttatttgaaagaaagatagttcaattggtaaattaatttgaaatatggagtcgtttaatcaagcgtgagttctgtttact

SEQ ID NO: 3512 - DNA, 804 bp, Gossypium hirsutum
  Clone ID: GOSHI-09MAY01-C4391_1
gtcgtctccagtacagaagcaagcagctagcagtttgctttgaattatactactataactccaccactttccaccagatttacattgcagatggcttcatcaatgctgtgggcttcaagggcggcttcttatctcaggatctctgtcttccacagaggcttttccactgttctaaaggatctgaaatatgcggattctcatgagtgggtgaaggttgagggtgactctgccactattggtattactgatcatgctcaagatcatttaggtgatgttgtgtatgttgaattacccgaagtgggagctgctgtaaagcaaggtgaaagttttggagcagttgaaagtgttaaggctactagtgatgttaattctcctgtttcaggaaaagtggttgaagttaatgatgagctcagtggctctcctgctaaggttaactcaagtccatatgaggatggatggattataaaggttgagatgaaagatgctggggagttgaggaacttgatggactcagaagaatactctaagttctgcgaggaagaagattcaaagcactgagagcggatgccctggcgatgttggatgtccggttctatgcaaagagagataaccgggaagccgactggttgagaattgtagctttcttcttgatgtttccaaactattatcagactatgtagtttaatgtccccgtatttgggttttgatttggtgtcatgtgttcttggaataaatgattggtttggggtttggaattgactgatttaactatcactagtgttccaaatttgggtttcgataagc

SEQ ID NO: 3513 - DNA, 289 bp, Gossypium hirsutum
  Clone ID: LIB3189-049-P1-K1-G11
accgaattgaagttccgagcagagccgcacccgccacgcatacgaaaaaagttagaaactctctgcagtggggaaaagaggggctccagcaccttccaccagagttacatttgaaaaggcttacgcacctcacgcgccaccacagaccgggttttacactaagaacccttgctttcacaaaagcctttccactgttctaaaagatctgaaatatgcggattctcatgagtgggtgaaggttgagggtgactctgccactattgggattactgatcatgctcaagatcat

SEQ ID NO: 3514 - DNA, 436 bp, Gossypium hirsutum
  Clone ID: GOSHI-09MAY01-C4371_1
atcccattctgatagcatgcctacaagtcctgtttccccatatagatatcaaagaccactaaatggtttctgctcaacttcttcaactagttcataccctttgcatgggaatgttagtactggggcttgttcacttccccggcaaagagggtcagattcagagggtcggttcccatcttcaccaagtgatatttgccactctgctgacttaaggagggcagcactcttgcggtctgtacagatgagaacacagccttccagtccatcaccatttgaattgccttttggaccaggccaagagaatgtgcctaatattgaagttgaggaacgaccatgctcatttatgaagtccttagttgatgatcaagaatatcagattgaggagtgttctttggtgtgtaactcagatcctgagttcagtcaagagaaatcttgc

SEQ ID NO: 3515 - DNA, 1217 bp, Gossypium hirsutum
  Clone ID: GOSHI-09MAY01-C4281_1
cccccccgcccccgccccgcgtccgcccccgcgtccgcttttatatctaagatggcttacattaataccctactcatcatgttctttgttttctgttttccttcaatggttctttccgaatcgttccgatcgattcaattgccaccgaatgtcacgggtcccgaatccattgcctttgagctggcaactggacgattttacgtcggtgtaactgatggtagaattttgcaatataacggaccaactgttggatttatggagtttggttccaccggtcgaaataggactaagacgatgtgcgatggcattactgatccggatttgggtccgatgtgtggaagaccattaggtttagggttccattacgctacgaatcagttgtatgtttgtgatgcataccttggtctcatggtgttagggtccggcagaagactagcaaccccactttcgaccggtgtagaaggcgtgccttaccgattttgcaatggtttagatgtccaccaattgtccggaaacgttttcttcaccgattccaccactaactatgatctaagaaatgcttcgaaaggattggaatcgaatgattcgacagggaggttgttaatgtataacccgagcaataatcgagttacagtgttgctaaagaaccttccaggaccagcaggggtagcagttagccaagatggattatatgctctagtctccaactacaatgctaacaatactataaggttttggctccgaggaccccgagccgacacttacgagatcattaacttccaggcaaggccaaataacatccagagaacccttgtgggtgacttttgggaggcagctgccatggtaaaacaatcgacgcaaacattggtgcctatagggcagcggatcagtggactcggcctggttcttcaaaccgtaaatttcgaacgatggtacggcaataaattgatcagtgaagtgcaggagttccgcgatgcactatacgtagcatcgccagatgtggattttataggcatctattcattttaaatgacgcgacatctattgggtttgagcttcaaatcttatcacttatgatctcgaagttagatataaaagaaaatgtatgttttacctttatattatgctgcaaaattagactgagttgggaaagatgacattcctaatatgtaataaagtgttcatttgcttttcttccagtaacaactacaactagg

SEQ ID NO: 3516 - DNA, 1022 bp, Gossypium hirsutum
  Clone ID: GOSHI-09MAY01-C4211_1
ctctttcaggcattttaacaatcattccttcttcacctacagaactcatacgacattgatgatggacttagtgacttcgtttctgaacttaggggtgccccctgccaccatgatgatgctggccttttcatggccagccttgtgctttatcaatgcatgtgaatgggtttacaacaccttatatactattgaggatatggatggcaaagttgtcataattaccggtgcttcttctggtattggagagcaaattgcatatgaatatgcaaagcggagggctaatcttgtgttggttgcgaggagagaacaacggcttcgagcaattagtgagaaagccagatatcttggcgcaaacagtgccattgtaattgctgcagatgttgttaaggaagatgattgtaggagatttgttaatgaaacggtaaacttctatgggcgtgtggatcatctggtgaatgcagcgagtttgggacataccttctacttcgatgaagttacagactcctcagtgtttcctattttgttggacataaacttttggggaaatgtttatcctacatttgtcgctcttccatacctacatcagagtaatggccgagtcattgtgaatgcatcggtggagaactggttaccgttaccaagaatgagtttgtatgctgctgcaaaagctgctcttgtgaatttctatgagaccctcagacttgaagtaaataatgatgttgggataacgattgctacacatggatggataggaggcgaaatgacaagaggaaagtttatgcttgaagagggagccgagatgcaatggaaggaagaacgagaactacaagcaagtggtggacctgtagaagaatttgcgaggttgattgtttcaggggcatgccggggcgatgcttatgtcaagtacccgagttggcacgacacattcctcctctttagggtattcgcacccaatgtacttaactggagtttccgactcctgctgtcgactcatggtacaagaagaacatccatggtgggtg

SEQ ID NO: 3517 - DNA, 691 bp, Gossypium hirsutum
  Clone ID: GOSHI-09MAY01-C4231_1
cccacgcgtccgcccacgcgtccgcccacgcgtccgcccacgccgtccgcccacgcgtccggcccaagatgaaacatgtggaatttgtaggatggcctttgatggttgttgttctgactgtaaactccctggggatgattgcccattgagtaagtctttactttgactgatcgtattgtcttttattgttgagtcgttattaaaaagagtttctatgaaattttgtgcccttaaatagttcttaccttttggtttcatgaacattatgttattcaaattcaggtatgtgtcgacacaggtaaggccgatttttctacatttttctatgtatttggaaggctctcggaggttgtatccctatatccatgtgctagacactgttacttcaagaaaaaaaaagagctggagcaccatagcgtgaatgtgtctccttttttaaaatattttcatttttctactaggacaattgtcaggacaatgctactaaaatttgctaaatggcattcatgtgcaaagaaaaatctttttgaaatcccattaatatatggtctaagattctatttggaatttgcttttctatgatgatttcattgatatatactttttaggaattacttctacttttatgagattgtagcactttgttcatgcaagaggtatgttgttccattcttcttcttgcttgatgtac

SEQ ID NO: 3518 - DNA, 480 bp, Gossypium hirsutum
  Clone ID: GOSHI-09MAY01-C5901_3
gttcctcttcccaagaccaaagctttcatgcccactttccctgcccaacatgctcaagacaggcgaatgagaagaatgctgaagagcccagatcctttgcaagagcaacgtagaaaggagttgcaacaaggggaactagggactggtggtctatttggctaagagaaaattcatccatcagtgccgtttgatcttcatgttttagaattttctcattattgttagagggccgtgtttgaggcactgatgatgttttagctggagatattggttgcctcttcctgtgcgccagatgttttgcaggttatattgttttccagctttgttcatcatataaaaatgcatctgacactgcttgcattgcaaggtgtggctatcagcctttcttcttttagacatcagtttcagctgagacttttgtaacatatttttattggaacaatgatgtaaaccttccttttatatctggttttgaatatt

SEQ ID NO: 3519 - DNA, 1547 bp, Gossypium hirsutum
  Clone ID: GOSHI-09MAY01-C5901_1
gcgagtctgatagagatgctgagaatgaaagtgactcaccggttacgccagaacctccagctcctcctttaagaagtgtgaacatgcttcagggatgtagaagtgtagatgaatttgagagattaaataagatagatgaaggtacttatggtgttgtttatagagctagggacaagaagacaggggaaattgtggcattgaagaaggtaaagatggagaaagaaagagaaggttttcctctgacctctttgagggaaataaacattcttctctcatttcatcacccatcggttgtagatgttaaagaagtagttgtagggagtaaccttgatagtatctttatggttatggaatacatggaacatgatctgaaagcgctgatggagacaatgagacaaccattcagccaaagtgaggttaaatgcctgatgcttcagctgctggagggtgtcaagtatcttcatgataactgggttctccatcgggacttgaagacatctaatctgcttttaaataaccaaggtgaattgaagatttgtgattttgggttggctcgtcagtatggaagcccattaaaaccatatactcatttggttgttactctttggtacagggctccctgaacttcttttgggagcaagacaatattccactgcaattgacatgtggtctttgggttgtattatggctgaactactatcaaaagaaccacttttcaacgggaaaactgaatttgatcaacttgacaagattttcagaactcttggcacgccaaatgagacaatatggcctggtttttcgatgttgcctggagtcaagatcaattttgtcaagcatcagtataatctattgcgcaaaaaatttccagccacgtcgttcactggcacacctgttctctctgacgcaggatttgacttactgaataaactccttacttatgatcctgagaagcgtataactgctgaagctgctcttaaccatgagtggtttcgtgaagttcctcttcccaagaccaaagctttcatgcccactttccctgcccaacatgctcaagacaggcgaatgagaagaatactgaagagcccagatcctttgcaagagcaacgtagaaaggagttgcaacaaggggaactagggactggtggtctatttggctaagagaaaattcatccatcagtgctgtttgatcttcattttttagaattttctcattattgttagagggccgtgtttgaggtgagagacatgcattcaacggaagttgcgaactttgttttcagaagatcattcttgctgttttttagcaggcactgatgatgttttagctggagatattggttgcctcttcctgtgcgccagatgttttgcaggttatattgttttccagctttgttcatcatataaaaatgcatctgacactgcttgcattgcaaggtgtggctatcagcctttttttttctagaaatcagtttcagctgagacttgtgtaacatatttttattggaacaatgatgtaaaccttccttttatatctggttttgaatatt

SEQ ID NO: 3520 - DNA, 577 bp, Gossypium hirsutum
  Clone ID: LIB3826-002-Q1-N6-E1
atggaaagatctctggtacattattttattagaaaaatgaggatttaactgtgacaactgacattatggaaagcaatcaatggcatacataatgcaccactcacctgtaccaaagagtaacaaccaaatgagtatatggttttaatgggcttccatattgacgagccaacccaaaatcacaaatcttcaattcaccttggttatttaaaagaagattagatgtcttcaagtcccgatggagaacccagttatcatgaagatacttgacaccctccagcagctgaagcatcaggcatttaacttcactttggctaaacggttgtttcatcgtctccatcagccctttcagatcatgttccatgtattccatcaccataaaaatgctatcaaggttactccctacaactacttctttaacatctacaattgatggatgatgaaatgaaagaagaatatttatttccctcagagaggtcaaaggaaaaccttctctttctttctccatctttaccttcttcaacgccacaatttccccagttttcttgtccttagctctatatacaacaccataagtacc

SEQ ID NO: 3521 - DNA, 667 bp, Gossypium hirsutum
  Clone ID: GOSHI-09MAY01-C5931_1
gggcgccacgcgtccgcttagtttcctcttagcaaagacttcagccacccacgcagcccctttaccgatccaaacaatgggacgcgtccgtacgaagactgtgaagaaatcgtctcgtcaggtaatcgagaggtactactctcgcatgacgcttgatttccacaccaacaaaaaggttatcgaagaagtagctattatcccatccaagaggctccggaacaagattgctgggttctcaacccatttgatgaaacggatccagaagggtccggttcgtggcatttctctgaagcttcaggaagaagagcgtgagcgtcgtatggattttgtccccgatgtatcggctattgctgttgattcaatagaagttgataaggaaaccattgatatgctttcacttcttggaatggccgatcttcctgggattgttaaggttgatccggttgctgttcaggttcctcaagtcgggttcggacgtggtggtggacccggaaggaggttttaagtggtgggttttccatggatatgatgggttcttaattttaagtttgatatgttttcttttgggattttgtgtttttgttgcaaccattttagttatgtctaatgctactgaaaatttattaagtttgataagaactacctttcgaaggtttttggaacgggt

SEQ ID NO: 3522 - DNA, 417 bp, Gossypium hirsutum
  unsure (1)..(417): unsure at all n locations
  Clone ID: LIB3165-034-P1-K1-A2
ggaaaggccggggcgggcgacgcgttagttaaacggtttcaaaaactttttcctcccacacatccccttaaccaatgcggccgttggtacgcgtgcgtgctgacaccnacaagaaattgtctcgtcaggtaatcgaaaggtactactctcgcatgactctcgatttccacaccaccaaaatggttatcaaataagtagctattatcccatccaagaggcttcggaacacgatagctgggttctcaacccatttgatgaaacggatccacaagggtacggttcgtggcatttctcttaagcttcacgaagaagagcgtgtgcgctgtatgtattttgtccccaatgtatcagctattgctgttgattaatttaagttgataatgaaaccattgatatgctttcacttcttggaatggg

SEQ ID NO: 3523 - DNA, 502 bp, Gossypium hirsutum
  Clone ID: GOSHI-09MAY01-C5891_1
gtatctagatgtggttgtgagtgttgcaagaaaaactgatggttgacattgggctgatctgttcaatgccgcatgaagatcaacacagttgtttgaagactgcttacaacggtgatcgtaccgcactgcagcgtgctacattcttgtaattgccaaacttgagggtcctgctgttagtcagtcttgtgctatgtgcttattgcaggcaacactagatgaattcttatatgaacttgctggagagctggtgaggttcctgtcgagatcagggagagattatgagcaggcatctgcagattctgacagacgatctcctagatgcttggcttattccctttttcgttcgagttacaggaggccgtcactcgatgaaagcacttcattcaaagaccagagggctcatattgctccagtcaagaacatattggaaaatcatgctagctatttgatgtcgggaaaggaactttccaaccttgctgcgtttgataaaggcactcaatct

SEQ ID NO: 3524 - DNA, 1308 bp, Gossypium hirsutum
  Clone ID: GOSHI-09MAY01-C5871_1
gcccccctgcaccagccgccgaattcctggggggacccacgacgccgattttctcagctcttcttttcatttgcatgcttttcatttcctcagctactccagttcttggttgtcgttcatgtcgtaaagcacatcccaaggctaagcctattaaaaagccccatcctgttaaacccccaatccatgtaaaaccaccggttacagtccctccagtcactgtcccaccagtgacagtccctccaatagtaaaaccaccagttacagtcccaccagtgactgttcctcctgtgaagccaccagttgaactccctccgattgcaaaaccacccattacagtcccaccagtgactgttcctcctgtaaagccacctgttgatctccctccaattgctaagccacccattacagtcccaccagtgactgttcctcctgtgaagccaccagttgacctccccccgattgcaaaaccgcccatcacagtccctccagtgaccctcccagtccctccagttactgtccctccagtgactgttcctcctgtaaagccaccagttgacctccctccaattgcaagtccccccatcactgtccctccagtgactgttcctcccgtgaagccaccagttgacctccctccaattgcaaaaccacccatcacagtcccaccagtgaccgtcccagtcccaccagtgactgttcctcctgtgaaaccacctatcaacctccccccagtaacagtgccaccagttactaacccaccaagtgggaaaccctgcccacctccaccatcaaccaaggccacttgccccatcgacacactgaagttgggtgcttgtgtggacctactaggaggggctgtccacgttggtgtcggtgaccctgtcgtaaatgcatgctgcccggtccttaagggactcgttgaacttgaagctgctgtgtgcttatgcaccacccttaagctcaaactcctcaatctcaagatttatgcacccattgctcttcagcttctcatcagttgtgggaaaactccccctcccggttacacttgctctctctagacctaaggttggtaggttcttatgacgaaataggacaaatgagagggagtcaccattttatcaattgaattggaaagctatgctggctaggctcttatttttaataccaattctttttttttagttatttttaaagattattgcaggtgtgttttttattattattataaaaaaacagtgttatttcgtatcagttaactcttgaattatttgtaattttatatttaaatgaatgttttgagttgttgct

SEQ ID NO: 3525 - DNA, 401 bp, Gossypium hirsutum
  Clone ID: LIB3120-028-Q1-K1-D5
gttgttggctttggagacgtatagctcataagttcacgtgatctcctttctttaagggttttgaatttttggtttctttctatttgactcactacatataatttctatatatctatatatatttcgtacttcattgcagatagatttacacattagcaatggattccactaaaatctcagctcttcttttcatttgcatgcttttcatttcctcagctactccagttcttggttgtcgttcatgtcgtaaagcacattccaaggctaagcctattaaaaagccccatcctgttaaacccccaatccatgttaaaccaccggttacagtccctccagtcactgttccaccagtgacagtcccttcaatagtaaaaccaccagttacaagtccaccagtgact

SEQ ID NO: 3526 - DNA, 557 bp, Gossypium hirsutum
  Clone ID: GOSHI-09MAY01-C5811_1
ctgcttttagtgttagtgaagttgaagcactctttgagctattcaagagcataagcagttctgtgattgatggtgggctgatcaacaaggaagagtttcaattagcactgtttcagaataggaagaaggagaacattttcgcaaatcggatttttgatttatttgacgcaaagaagaagggagtcattgattttggtgactttgttcgagcactcaatgtcttccatccaaatgtctcacaagaggacaagatgaattttgcgtttagactctatgacatggatggaacgggttttattgagcgtaacgaggtcaagcaaatggtgattgcactgttatgtgaatctgaaatgaagttagctgatgaaaccattgaggcaattcttgataagacattcttggatgcggacattaatcaggacgggaagatcgatatatctgaatggaaaaacttcgttttccgtaacccatcactgttgaaaatcatgacccttccatacctcagggatataacaacaacatttcctagctttgttttccattctgaggttgatgag

SEQ ID NO: 3527 - DNA, 495 bp, Gossypium hirsutum
  Clone ID: GOSHI-09MAY01-C5571_1
gtcaaaacacaacacttcaatccgggctgtcccgatcgaatccgttaggaaaaaagggaaagaaatggatggatcgggaggaagaggagcggataatgtattatcgaattacaagcttggaaaaacgcttggaattgggtcgtttggaaaggttaaaattgctgaacattcttcgactggttataaagttgctattaagattcttaatcggagaaagattaagaatatggagatggaggaaaaagttagaagggagattaagattttgagattgtttatgcaccctcacatcatacgactgtacgaggtcatagagacagcgacggatatctttgtggttatggaatatgtgaagtccggagaactctttgattatattgtggagaaaggaaggttgcaagaggacgaggctcgcaacttttttcagcagataatttctggggtggagtactgccacagaaatatggtggttcatcgagaccttaagcctgaaaa

SEQ ID NO: 3528 - DNA, 512 bp, Gossypium hirsutum
  Clone ID: GOSHI-09MAY01-C5501_2
tttgatctatggacagcatcgttgtggtaaaagtcgtaatgccagaggaatcattaccgcaaggcatagagggggaggtcataagcgccgttcccctacaattgattgtcgaccaagtgaaaaagacatatctggctgaaccgtagccatagaatacgaccctaatcgaaatgcatacatttgtctcatacactatggggatggtgagaagagatatattttacatcccagaggggctataattggagataccattgtttctggtacagaagttcctataaaaatgggaaatgccctacctttgaccgatatgcccttaggcacggccatacataacatagaaatcacactgggaaggggtggacaatgagctacagcagcgggtgctgttgcgaaactgattgcaaaggaggggaaatcggccacattaaaattcccttctggggaggtccgtttgaaatccaaaaactgttcagcaacagacggacaggtggggaatgttggggtgaacc

SEQ ID NO: 3529 - DNA, 861 bp, Gossypium hirsutum
  Clone ID: GOSHI-09MAY01-C5501_1
cccacgcgtccgcccacgcgtccgattcttattgagactcgaactcatagggaagaaaatttatggatggaatcaaatatgtagtagttacagacaaaagtattcggttattggtgaaaaatcaatatacttttaatgtcgaatcaggattaactaggacagaaataaagcattgggtcgaactcttctttggtgtcaaggtaatagctatgaatagtcatcgactccccggaaagggtagaagaatgggacctattatgggacatacaatgcattacaggcgtatgatcattacgcttcaaccgggttattctattccacctcttagaacgaaaagaacttaaatcaaaatacttaatagcatggcgatacatttatacaaaacttctaccccgggcacacgcaatggagccgtagacagtcaagtgaaatccaatccacgaaataatttgatctatggacagcatcgttgtggtaaaggtcgtaatgccagaggaatcattaccgcaaggcatagagggggaggtcataagcgtctataccgtaaaattgattttcgacgaaatgaaaaagacatatatggtagaatcgtaaccatagaatacgaccctaatcgaaatgcatacatttgtctcatacactatggggatggtgagaagagatatattttacatcccagaggggctataattggagataccattgtttctggtacagaagttcctataaaaatgggaaatgccctacctttgagtgcggtttgaactattgatttacgtaattggaaggaaccaattaggtttacgaccaaacctaaaaatcgatcactgatccaatttgagtacctctacaggatagacc

SEQ ID NO: 3530 - DNA, 985 bp, Gossypium hirsutum
  Clone ID: GOSHI-09MAY01-C5481_1
cccacgcgtccgatttccatcttaaatttgctgtcttttagtgttcaagtttcagctttcgaatggatgattttttccatcttcaaaagccaagtcttcattagaaatggctctttcattcgcccaacctgtgctaaaaatgtgagtttttctcgagcaattgcattgctacttgttagatatgaatctggaattgcagaaaatgaacagccgtttaagatttcttacctcataaacacaatcgggttgtctccacagtctgctttatcagtgtctaagaagctccattttgagacctctcaacaaccagacactgtgatttccttcttcaacaaccatggcttttcaagaacccagattagagacatcgttcagaaatggcctgcatctcttttatgcaaccctgagaacccccgcgtccccccacgcctccgcttttactccagaaggatttcacgttctcaacttctaagaatcttggctgcaaacccaggtgccttcagacctagtttagataactccggcatcccaaacttcaactccttcaaggaattcactcgatgcggcgatgatcaggtgtttttagcatacaagaacgattctagcattcttacgcgtaaatttcaatccgtttttgctcctaatcttgcaatcttgaaagaatccggcgtgcctgaatcaactattattgttgaacttgtccttcacccaagaatcttttcagtcaagcctgataagtttagaggaatagttgaagaagtaaagaaactgggatttgatccttcaaaacgtagtttccttacagctgttcaagcattcttacagcttagcaaatcgacatgggaaaggaagatcgatcttctaaaacaatggggttggtctaatgaagaagttgtttcagctttcgagaagtatccgaaaaccatgatgttttcagagcagaagatcagtgcgataatgagcctttttgtcgacacaatgggat

SEQ ID NO: 3531 - DNA, 519 bp, Gossypium hirsutum
  Clone ID: LIB3584-047-P1-K2-E5
atttgtttgaaataaaggtgtgttttcgtctcagtgttttgatcttaattttgcagtctttagtgttgacgtttcagttgtgaaaccaatgatttattctatcttcaaaaaccaagtcttcattagaaatggctcttggattccaccaacttgtgctaagaatgcgagttttcttcgaataatttcagcgttagttgttagatatgaatctggaatcgcagaaagtagacactggtttaagacttcttacctcataaacacaattgggctgtccccgcaatctgctgtatcagtgtctaagaagctccattttgagacctctaaacaaccagacactgtgatttccttcttagaaaaacatggcttttcaaaagcccagataagaaacatcattcagagatggcctgaatctcttttgtgcaaccctgagaaaaaccttttgcccaaacttcaattcttttactccagaaggatttcacgttttcaacttttaagaatcttggctgtaaacccaagtgt

SEQ ID NO: 3532 - DNA, 480 bp, Gossypium hirsutum
  Clone ID: GOSHI-09MAY01-C5451_2
cggacgcgtgggcggacgcgtgggcggacgcgtgggcggacgcgtccgtgagatcctaattagattcgtttaggcttcgttcaccaaccagttacattacaattgacacaaataggtaattatctttactttttattttgcagggttcctacaaacttaagatgacattatcaggtgcgggaattaaactgctaacttgcatttccttcgatttcaaaatcagttctggtgcttctgaatcttcagtctctgatagctgatcagcccaccaagtatatatatgaaatgtggactgcagtaggatgttatatcttatttattgcgaacagatctcacattctacaatattttgtacttgtattccgtattatcgttcttgtgaagatgtcatgagacaaactacgattacatggaagtcactccaatctgctgaatcatgttaacaatgttaatttcccttaatatcaaatcattttacat

SEQ ID NO: 3533 - DNA, 866 bp, Gossypium hirsutum
  Clone ID: GOSHI-09MAY01-C5451_1
gttgacgattattcattttttgataaaatccttggttttggtctctttcccataaataaatggtcattgccagttgtcagaacaataatcagcaaagacaaaacagttacttggatataatttccccttgtcaaacctaccctctgtaagcaatccgccatggacacattaacagctcgattcaagctcatcgttttgccctttctatgcatttgtttgcttttcttaccttttctccaggccactgatttcgattactgcgataataaaggtaattacgttgtaaaagtcgatggagtcgacatatcacctaatcctgtgattagcgggaaaccggccaccttcacgatctcagcttctactggtcaagctatcactggtggcaaagcggagattgacgtttacttcttcgggtttcatatccatcaagaaactcatgacctttgtgaggaaacatcttgccctattactgttggcaactttgtgctctctcacaatcaagttttacctggttttactccacctggttcctacaaacttaagatgacattatcaggtgcgggaattaaactgttaacttgcatttccttcgatttcaaaatcagttttggtgcttctgaatcttcagtctctgatagctgatcagcccaccaagtatatatatgaaatatggactgcagtaggatgttatatcttatttattgcgaacagatctcacattctacaatatattgtacttgtattccgtattatcgttcttgtgaagatgtcatgagacaaactacgattacatggaagtcactccaatctgctgaatcatgttaacaatgttaatttcccttaatataaatcatttacatgcttgt

SEQ ID NO: 3534 - DNA, 388 bp, Gossypium hirsutum
  Clone ID: LIB3166-055-P1-K1-D8
aaacccaacacgcatttacatgtcaattacgccagactcgctcatcaatggcaatgatgacatgaacatcattctcgggtccttccaagctaataactactctgtctgtattaatccttactgtattttcactgctttttcatttctcttaccctaaacactaccataccctattgcgtaacttcctaacttttcccccgaaaacacttattacctaataatattattttcgctaaaccatgtaccttcacgatctcatcttctactggtcaagctatcactggtggcaaagcggtgattgacgcttacttcttccggtttcatatccatcaagaaactcatgacctttgtgaggaaacatcttgccctattactgttggcaactttg

SEQ ID NO: 3535 - DNA, 618 bp, Gossypium hirsutum
  Clone ID: GOSHI-09MAY01-C5441_2
cccacgcgtccgctttaatgtcgtccccgcgccctgtggattcaagcatcttgcaacaactttttggctttacctcagttgatgaagcccctactcagtttgtgattcagcaatatgacaatccattatcaaagaagttcaacgatgtagtaaatgtggttcggcgccaaagatgttcctatctccgcttgacattgtgcaagaaaggggatccatcaggaatgctgttcttctcatgcatggtagaagacaagaatgcaagcggtccctcttatgtcgagtttctcgtacatattcatcggcaaatccaaatgaaaatgtcgtaatatttcaagtttgattgattcagctcagagtaccagatttttgttcggcattgcatggagcacagagcaagtagttgcatgtcagatgtcaagcatctaaaatggctcccaacttggagtttctcatacatattgagcagcaattctgagtgaaaatggggcttcttttctttccttttttttgggggggtttatgcatttatcagtttggttatgatcatccaacttttgtgatgcatttggagataagacgtatttctgatatttaggatctcaatcaattatttttttt

SEQ ID NO: 3536 - DNA, 603 bp, Gossypium hirsutum
  Clone ID: AI055714.1
ccactttctagtgaacatgtctgtgatgatggaatctatcttcttgagaattgtgaggacgctttaatatattttggaagctcagtggattcaagtatcttgcaacaactttttggctttacctcagtcgacgaagtacccactcagtttgtgatgcagcaattttccaatcctttatcaaagaacttcaatgatgtagtcaatgtgattcgccaacaaagatgctcctaccttcgtttcgcattgtgcaagaagggggatccgtcgggaatggcgttcgtatcttgcatggtagaagacaagaatgcaaatgggccatcgtatgtggagtttcttgtacatattcatcggcaaatccaaatgaaaatgtcttgataagttcaagctttctaaccacagttgcttcacaagtatgatgcactggagatcaaagctgacacaacatgtaattcatactatatcatattatttctggaccccatttgactaacaaagttctatgtaccactttgcaggaggactgatactatatgcatatttcgctttgtactaaaaaaaaaaaaaaaaaactcagggggccgtaccatcgcctatggagcgatt

SEQ ID NO: 3537 - DNA, 392 bp, Gossypium hirsutum
  Clone ID: LIB3145-054-Q1-K1-H10
gggggatccgtcgggaatggcgttcgtatcttgcatggtagaagacaagaatgcaaatgggccatcgtatgtggagtttcttgtacatattcatcggcaaatccaaatgaaaatgtcttgataagtttcaagcttcctcaacaacaggtattcaattttgatttgggattttgcatgaagaagaaagaatccgagtggcctcctgttcggagtttcttgtacatatactgtgcggcgactggagtgaaagttttacagaatgttttatgctttttacagttggcttcacaagtagtgatggcacttggagatcaaaagctgcacacaaacattgtaatttcatatcttatatcaattatttatttcctggaaccccaattttgagctaaaca

SEQ ID NO: 3538 - DNA, 935 bp, Gossypium hirsutum
  Clone ID: GOSHI-09MAY01-C5471_1
cggacgcgtgggcggacgcgtggggaaccgtcatgccaaaagcctatggagaagagctcaggcttatgacatgcttggtttagctaaagagagtttgctagatgccattctcttcataaatgaatgctcgcaatcaaatgaccccgatctctcgttgaggcaaaataaggttcctgattatgcggaacgattagtcaagaagcagatgcgtgcagcttggttatttagagaggcagctatcaaactcgggggtgtgcactgtgagggtgatgcaggtgacatgtatggccaagataccgatgactccgagtgggaaacagctagcgaaagtgatataggaaatgatggaagggatgaaatgggtgatgaggacgacgatgatagtgaatggaagaacgaagatgaaaggaaagctaaattcaagaaaccctcaatgaaagacataaagcatggattcaacgtacaactcaccgaagatgaaccgtgaactgttgaatgaccaacagcattgatgtagacagtgtagcgaaccaaagcaaccgtgatatatgttcggatttattatttcgtgttgcagagctatagcctagtcacgtttagaagttggtgtcacatctagctcagtgaagaagcaagttagaggtgtagaatctttggttttggtcattttcatttagagataaaagaactttgttttgcaagcatttcttatttgttttgttttttttttcttattttcctattgattttggtagtgttaatttcaactgtagaaagcgagagtttggagtgtagagaaccattttgtttgcagggtgtgatgaaccttttgtgagaaatcttatgccccttgtgtatataaaaacccttgaagtgggggtttttgacattggactatcatcatatatttgaatcatagtttgcccttttatgat

SEQ ID NO: 3539 - DNA, 1388 bp, Gossypium hirsutum
  Clone ID: GOSHI-09MAY01-C5431_1
ctgcatagatttgtttttgtagctcaactccccaccaagttcccaaatggcacccccacccgttcggcaacaacaagaaatcacttaccgatcaaagcttcccgatatctatatccctaagcgccttcctttacattcatattgtttccagaatctgtccaacgttgcctccaagccctgtttgatcaatggaacctcgggcaaagtctacacttacgaagaagttgaactcactgctcgccgagtcgcttcggggcttaacaagctcggcatccaacaacgccaagtgatcatgcttttgttacccaacactccggagttcgtcctctctttccttggcgcttcgttccgtggcgccattgcgacggcggctaatcctttcttcaccccggcggagatatcgaagcaggcgaaagcctcgaacgctaggcttatcatcacgctagccagctacgttgacaaagtaaaggaattcgcagaagacaacgatgtcaagatcgtatgcattgactcagtcccggagggctgtttacacttctccgagttaacccaagccgacgagaacgatcttcctgaagtcgatatcgtccccgaagacgtcgtagcgcttccttactcgtcgggaaccacggggctccccaaaggggtgatgttaacgcacaaaggtttggtcacgagcgtggcgcaacaggttgacggagaaaacccaaatttgtatttccatagcgaagatgtgatcttatgtactttgcccatgttccatatttatgccctgaactcgatcatgctctgtgggctacgtgttggggctgcgattttgatcatgcagaagttcgacatcggcctactgttggagctaatacagaaatacaaagtaaccattgctccgattgtgccaccgatagttttggccatcgctaagtcatcggaaactgaaaattacgatttgtcatcggtgaggatgctgaagtccggtgccgctccgttgggtcaagagcttgaggatgctgtgaaagtcaagtttcctggtgccaaatttggacagggttatggaatgacagaagctggaccagttctagcaatgtgtttgggatttgccaaggaaccctttgaaatgaaatccggaacttgtgggactgttgtaaggaacgcggagatgaaaatcgtcgaccccgaaaccggtttgtccttgccgcggaaccaggccggcgagatttgcattcgaggagatcagatcatgaaaggataccttaatgaccctgaggccactgctaggaccattgacaaagatggctggttacataccggagacattggttacattgacgaccatgatgaactcttcatcgtcgatcgtttgaaggaattgataaaattctaagggtttt

SEQ ID NO: 3540 - DNA, 507 bp, Gossypium hirsutum
  unsure (1)..(507): unsure at all n locations
  Clone ID: uC-gsflnu33B008d02b1
tttcacgcgtccgcccacgcgtccgtagaaagcctaaaattttaaagtttcagtatatatattttttctttgcgtctcaatttcaatctccaaaatggcaccccaagctgaattgcaacaagaagaaatcatttatcgttcaaagcttcctgatatttatatccccaaccacctccctttacattcgtattgtttccagaacatagcgaacgtcgcctccaggccctgtttgattaatgggacgacaggtaaagtttatacttacgctgaagttgagctcaccgctcgaagaattgcctctgggctcaacaagctcggcatccaacaacgccaagtgatcatgctcttgttacccaacaccccggagttcgtcttgtcgttcctcggcgcttccttccgtggcgccattgccacggctgccaacccttttttcactcgggcggaagtttcaaagcatgcgaaaggctccaacgcgaggctcattatcacgcangccagttacgttga

SEQ ID NO: 3541 - DNA, 460 bp, Gossypium hirsutum
  Clone ID: GOSHI-09MAY01-C5421_1
ccacgattgcgacaatttatatctctttctaaccctgggcaaaaatcgccgcccggagagaacgttttttcttttcttctcttttttcaaggtttttcgtccgaggcgtcggcgtcaacggcccccaacgcactgtttaacacctccttgagggatttcgcgacggagggatcggttttcgaggttgcgatcggaggtttttcgaggtggaagatgacggcggcgcgtgattttcagtgaaacagaggatgctgtatgtggaaagagtgaagtgaagccatcgttttggaggtgattttgaagaacgctttgtctcgtaaaagatggagaatagttcatatcttgttgcatctaagcacaggctcagttcctttgtctccctcattgtccggtctcctacttcctatcatccattggtagcccttgctgtgtccaagctaataatgcaagacccggggaa

SEQ ID NO: 3542 - DNA, 605 bp, Gossypium hirsutum
  Clone ID: GOSHI-09MAY01-C5761_1
cccagcgtccgcggccgcgtgggatcggtcatgagcatagcaaggttaacacatcaagcaccagccttgcaacaaatgagaactgtgatgttgaagcacaggataaatgctcttcactgaatgctgcatccgaggatgttgaagttcgtcctaatagaaactctaccttgaatgaaatttctcattctatgataagcagcagttctagttctgataactgctattcatgctttagtgaaggagatagcaatacctgctcttcaaataatggaaacttagaatcttcatcatcagattctgaagaggccagtcaacaatcagatgggagagatacttcaatctgcgttcaaaatggtttctctgagtgtcaggtgaagggaattgataaaaaagaggatgtcaatggaagcgttgctttggaaagcgaggcattgtttggacattcacctgatgggagagattcttcagtctgcattcaagatggcttctccgagtgtcaggctaaaggaatcgaaataaaacaggatgtcaatggggaggttgctttggaataccaggcattgtttgggcattcaccagactgtagaggtaacaaagtttctgga

SEQ ID NO: 3543 - DNA, 400 bp, Gossypium hirsutum
  Clone ID: GOSHI-09MAY01-C5611_2
gttgaatcaattgatagcaatggaaggcccatctctggctatggaactgagggtggaataggcattcctttatatggacctttaaaaattggcaaagccgaacctgttaatcttcaatttggtcactttggaattagtgcctggcctagtgatggtggcacaagtcgtgctgggagtgtggatgagtcgagatatgatgggactgaaaatagcagtagataccaatcttcttgctgtagctcaccgaggatgtccgatggtccagcaaaagagcttaaggaggaaaactcagtctatggcagcgatgaagaagttgatgatcaacctgaggtggacactgatgaggattttagtgatgatggtgataaagaggtccatgaagaggtaggttcagttgatg

SEQ ID NO: 3544 - DNA, 976 bp, Gossypium hirsutum
  Clone ID: GOSHI-09MAY01-C5611_1
cggacgcgtgggcggacgcgtgggcggacgcgtgggctttactctgggcttcaacctaccatgctggggagtgcttggatcctgtggctgttacagaagctaaggctaaaaaaagagcaaaaaagttggctggcatttctcagtcactgtcaaagagtgagctggctgatcgtacttcagctggcaagtctgatgcccggccagtggagagtagttctactggtactgaattgatcggtcccagacagatggcagtcgaaggattcaaggcacaaagtgagatggttattgacagtcccagcgtccgtagccaggctgattactgcgtggggaagagaggaaagagtctgtagttgtcgagggtgttcacctaagccttaattttgttatggggcttatgaagaaacacccctcaatcataccattcatgatatacattacaaatgaagacaaacacttggaaagatttgcagttcgtgcgaagtacatgactttggaccctgctaaaaataagtatgtgaagtatataaggaatatcaggacaatacaagattatctatgtaaacgagctgacaagcattttgtccccaaaataaacaacacaaatgttgacaaaagtgtggcagccatacatgcaacagttttcagttgccttcgtaggcgcgaagctggggagacactgtatgatcctataacaaatacagtcactgtcattgatgaggaataccggaatcagtgtgctgccaattcactgagctccaagggtatgtttcaattgatccacaggagtggttcttctaggcaactaatggctcttcttaacaaagatggatctgtagcgaaggcttggccagttgaatccattgatagcaatgggaggcccatctctggccatggaactgagggtgtgagttggcattccctttgatggaccttttacaaatcagttagggctgaccctgttaaatttttaatt

SEQ ID NO: 3545 - DNA, 1529 bp, Gossypium hirsutum
  Clone ID: GOSHI-09MAY01-C5171_1
cagggatgctattggagaaatcttggatggggactggcaagaaaatcttgccaatgaatcgtcccttgaagctttgccgaatgaagctggagaacattctaacctacaagaagctgatgaagcatcttatgaacattctcccccaaatgacagagaaaatttggaaggcaatccagctgtacagattgatgggcaagaatctgcttctctagttgaactatggcaggaagaggatcaagaaactgcagaagcagactggcaggaagctggcgttgagtataatgagtccatggatggtaatgaagaagcctctgacaggcaccatgaagatggaggcttgcgcgggactgcacaggattggatggaagagtcttacaatcaagaacctgttactatcagaagaacagatacattttattttcctgatgatgataatgtacacagcatggaactgagggaactgttaagcaggagaagtgtgtctactcttcttcatagtggtttccgtgagagtcttgaccagttgatacaatcatacgtggaaaggcaaaatcatgctcctgttgactgggagttggaaggaacatctccttctcctgcatctcttgagcaagacctagaacagcaaagtggggatcagaatgatggccacggggatgctgagactcctccactcacccttccttcacccaggatgccacctatgcaaccactctgggatcaggattcacaccattataattgggcatcacatgatgtgcatcaacgctttggcattgagtgggaggtcattaatgatttgaggattgacatggctaggatgcagcaaaggatgaataatatgcagaggatgctggaggcttgcatggatatgcaacttgagatacagcggtcaataagacaagaagtttctgctgcccttaaccgttcagctggttcacaagctgcaggggtgattgacgacgacaacttgccgaaggatgcttctaactgggacaatgtcaggaaaggcatctgttgtatatgctgtgaaggcaacattgattcattactgtacagatgtgggcacatgtgcacgtgctcaaaatgtgccaatgagctggtccatgttggaggaaaatgtccaatgtgtcgggcaccggtagttgaggtcattcgtgcctactcaatcctttaatatgaagagtatttatataaaaagaacaaaaggaaaacagaaacccagaatacgattttatataaaattttcatcagttctttttcttaaaaagaattctggaccactccaagtatcccattttcctcatctctcatttctttaatttaaccctttcttgggtcccttcccctgtcgtgatttgagtacataaattgagtgtatggttgaaacggaaagtgtcattatatgttactaatccttataaactttcgagtgtaaaaatcgttaattataattgatgcaaggattgatggattgtattttactttggaggatataagatcatattccccgtttttctttcctttaa

SEQ ID NO: 3546 - DNA, 1047 bp, Gossypium hirsutum
  Clone ID: GOSHI-09MAY01-C5161_1
ccccgcgtccgccccgcgtccgcccacgcgtccgcccacgcgtccggccttccctgtggaacagttgaattggtcctctcaaaacctcaaagtttgcaatacaatgctctcaattttatttttcttcaagttcgagaattatcgtggttgcaatggcatcctttcagtgtttcgtccagtcctctagacagtaaacatcatctagctattctcataaaggtccttgggggatggacagcgaggctgagggacagtatcttgagcatgtctgagcctgaactatcaaaaaccacgatcacagcttccgttgagggaccttacgggcatgaaatgccataccacttgatgtatgagaacctgattttagttgcaggtggcattgggatttcgccattcttagcgatcttaagtgatatcctccaccgcgttagcgatggaaaaccatgtctaccaagaaagattttggttgtttgggccgttaaaaagtcggatgaacttccgcttctttcaagtatcgacatggaatcaatttgcccatttttctccaacaaaataaatctcgagattgatatttatgtcactcgagaatccggaccttcaatggaagaagggaaggttcatgtggcatcgagctcttcctgccctttctcgggccgcagcatgtcgccgttggttggcactggaaacaacgtatggtctggcctatacgttattatatcaacagtcggatttatcgtgttaatggcactgttacggattttctacataaagccatacaatgtatctacctggtggtacctaggccttcttttcattgcatgcatggtcatgagtgttgttatctttggtggtcttgtgatcggtttatggcatctctgggataaaaaagcttctgcgaatgacaaagatgaagatatcgacaggataaaggttgaatctactccaagttatggacctgtggaagacaaagatttgactcaaaacaatcccgaaagttcaaccatcattcaatatggtaccagaccagacttcaaagaaatatttgca

SEQ ID NO: 3547 - DNA, 1019 bp, Gossypium hirsutum
  Clone ID: GOSHI-09MAY01-C5111_1
atccaagccccccgcccgcgcaacctcctctctgcttttgtttccagtctggcggaggcgcaaaaacctctgctcttcaaaaccattaaaatcaaaatcccaatttgcatcacatttcatccaaatctgaaatgcccaaatcaaattcatccaattcctcctcagatgaggatgtaaaagcacctaatatgtttgaaagagcaaaggaagagatagaagctgtgattcatgttgggaaaatacatccttttggtaaggaaactcatgggaagcgagatgatattaatgaaaacaccccattggatgatgtgaaagcacccaatgtgtttgaaagagtaaaggaggagtttgaggcccttgttgaaacagtccatcataaaaaagagtctcaaactcatgttgatgaaagggaccattctgacaaggaacaagcaaaacatgacaaaccagaaaatggtgtcaaggcccctaatttgattgaaagagctaaggaagagataggggccatcttgcaccatgacaaatcatcaaaccatcaccacaaagaaactcatgggaagagtaatgatatagatgaaaccaccccactaaatgaagttaaagcacctaatgtgtttgaaagggctaaagaagaaatcgaagctattgtcggaacaatccatccgaagataggatcaaatgattctggttccgaattgaaggaaggagggttcagacattgccttggaatgggattggaaaaagtatgccatccctggggcagcaagagagattaatggccagcttttgtatggtttggattcttacctatttgtttgctgaaaaaatcccatgaaaacattaagatatcgttgtaccctttgtcgatgtttgcttcgagattttggtgaatccaatgtcttctccattccttttcccgatttgattcgacgcagaggtgctcgtgtctttggaagttgcttatgttagactttgctggttgttgtttttttaatcacaatttatcccattcattgatc

SEQ ID NO: 3548 - DNA, 855 bp, Gossypium hirsutum
  Clone ID: GOSHI-09MAY01-C5051_1
acccacgcgtccagcgccacgcgttcgtggttttagatcttgttgatagtagctcttttcctttgattgagttcgtactatgttcgaggtgcataatagtttggaaaaatggaaggtatcatcgttaggagggtcatcccctcagataacagctgccttttcaatgctattgggtatgttatggaccatgacaagaccaaagcttcggaattgagacaggttatagcagcaacagtggctagcgatccgacgaaatattctgaggcatttctcggaaagccaaatgtagagtattgttcatggattctcgactcggaaaagtggggaggtgccattgagctttcaatattagcagattattatggacgtgaaatcgcagcatatgatattcagacatcccgttgtgatttgtatggtcaggaaaggaactattcggaaagagtcatgctgatctatgacggtctccactatgatgctttggctatgtctccgtttgaggatgctcccgaggagtttgatcagactatattttccgtacaaaaggatagaaccatcgggccggttgaaggcctagcactgaatctggtcaaggatcaacaaagtaagaggagatacaccgacactgccaacttcactttgcgttgtggagtatgccaaattggcgtcattggccagaaggaagctgctgagcatgcacaagcaatgggccatggaaactttcaagaatatagatgattgaaatctgagaggttggtggcattttcttaagctcagctccttcataccctacctagttcatcggacttgtatcatttggttgataaatcatcttattgaattctcggataacaaaat

SEQ ID NO: 3549 - DNA, 233 bp, Gossypium hirsutum
  Clone ID: LIB3083-012-Q1-L1-G4
attattttttaggtgatttaattcttaaaatttgcatcagatcggtggttttcggtgcataatagtttggaaaaatggaaggtatcatcgttagaagggtcatcccctcagataacagctgccttttcaatgctattgagtatgttatggaccatgacaagaccaaagcttcggaattgagacaggttatagcagcaacagtggccagcgatccgacgaaatattctgaggca

SEQ ID NO: 3550 - DNA, 934 bp, Gossypium hirsutum
  Clone ID: GOSHI-09MAY01-C5021_1
cccacgccgccgccctcgccgccgcggtcgcgcgggttcataaagagcatttgtcaaaagaaaatcccgatggttttcccgagaaatcttgccaaacaaagaaaaaaaaggaaaaatggagttatgccctacaattaagaacatccttcttttggattccgaagggaaacgtatagctgttaagtattactcagatgactggccaacgaatgctgctaaggaagcttttgagaaagctgtgtttaccaaaacccagaagactaatgctcgaactgaagctgagataacaatgtttgacaactatattgttgtatacaagttcgttcaagaccttcactttttcgttactggaggtgaaaatgaaaacgagatcatcttggccacagtgctccagggattttttgatgctgttggactcctccttagaggcactgaggacaaaaaggaggcattggagaactgggatcttattttgttgtgcctcgatgagattgttgatggcggtatcattcttgaaactgatgcaaatgtcattgccggaaaagttgatagtcatagtatggatgccggagctcctttgtccgagcagacaataactcaagcattggctactcgctcgtgaacatcttacgagatctctcctcgagtaaaatgtgtttacattgaaccaaacgagataagctcgacggtactatctttccgtaatgatactgtacttgatatgttttaggataatttttgtgccttgttttgaatgcgatagaactgaatatatacttgcggcggatgttgtttacattgatgttattgcaatgttgtgctttcttgatactacttgtcctgccatctcattgcatccaataaaaagcattcggttttgaatccgggaaaaaaaatttttattaaattattaaatttttttatataaattata

SEQ ID NO: 3551 - DNA, 725 bp, Gossypium hirsutum
  Clone ID: GOSHI-09MAY01-C5381_3
gaacatcctcttttctgaaagagattcggatgatattgatgcactgctcagctcggaagaggaagaacaagttgagtacgatgaggaagaggttagcacagcccggacctttggaaattatgaattcgacactgctgattctcgctctgctcatggctcgaaaccaaaaatagatcttgtcttcctcgtatactctgaagtcttctggtaatagcagctgttgtgaccctgaaattaaaagcgactgaaaatgaagaaaatggtgaaggttttaaggggaatcgttccgggtgctgatgagatggatactgttgctgttctcgatggagctgttaggtacctcaagtctctcaaggttgaagtacagaagctcggagttgggaatttcaaatattaagattgaacccaaatcatagtaatgaagttctcacctttgtatacctctccataactggcctctctctaatggtttgcagtctagaaataaagaagacaggtattagaatcaatatttgtgttgttgtatgcatgaactctggttgtgtaatatgagtaccaccaagtaccaagtttctagctgcctttaatatcattatggcacaagtagttgctttgaatgttattgcactagtagtttctactgtcaactctgtcttatttctgtattttacgtactttatgtttattctcagttatgaataaatgttacaagattacttcttgtt

SEQ ID NO: 3552 - DNA, 1740 bp, Gossypium hirsutum
  Clone ID: GOSHI-09MAY01-C5381_2
atcttcactccccttaattaaaactctgcacctttcttcagcgcaaatccaggggctttttcagaccagttttccctattaccttcctctcttgtttggctgcttcctgtccttcgattcactttttttgtttctctgtgtttttttttattgcaaaagacttggatttgttcttcaatagtcacttcggggttgaatcaaagtctaacaaaatgccgtggtctttcgtcaactgcgtgcgcttagttgttttctttcttgtcatactgtaattttatttgtttctggtgaatttcgattgaatttgaaaggggatagggttccttcaactttcgttcgcaattggaaaattttgggttggaggtgtgagaatgtacatttcggtaaccataaagagatatcgagcaattaaggaagttgggaaaattaaaatgagcgttggtgttattgcatactataagctagttcaagtttgtcaggcagagtatttccgtcagttgcttaagcctgttacgtagtctggtattacagaactcttggaaattgggatctgggagagtgccgttcggttgtgttatgtgtgaggctgtgatagaatggaacatctgattgtgttgatggcaaatttgggataggtagctttgacatattgtaatggcgatccagtagtttagatttttgtctcaccgtaatttagttataaatcttcttccaacttaaaagctgaataacttcacgttcaaagccaagaagcaatcttttgttgtgaacctcttgattaagtagaaatttcgatgcagagtgatcaacagttttactccccaaaagcagtgcccagacttgcagatcacgtggatgataattacattcacatgccggttccttctgcttttggtacagtttttcctccatgtgctaagccattgccacccctccatggcattgagtttcaaccctcagaggtttgtcccaagaatttcgttatcttcaatcagaatgatcatagaaaccagataatgttcaatcctgctgttgcaaacaaatttaatggtcatggattaaatgtttttgcaacttaccttgatggaaagtatgacattaaagatgttaatgatgcggaaaaagatacctcatcctctctgaaagaggattcagatgatattgatgcactactcagctcagaagaggaggaacaagaagattatgatgaggaagaagttagcacagcacggacttctggtaattatgaaagtgactctgattctcactctgcctatggctcaaaacccaagaaaaaacagctcatgttcttctactctgaaatcctctggtagcggttttggtactgaccccaaaaagcggctgaaaatgaagaaaatggttaaggttctaaggggaattgtaccaggtgctgatcagatgggtactgtagcccgtctcgatgaagctgttcggtacctcaagtctctcaaggttgaagtaaagaagcttggagttgagaatttcaagaatggagattaaactcatattctggtaatggtttcctcatctaatggaattcaagtttatcctgtattgcatacccatccttcgccgtctctctgatggtttgggttccagagataaagaagacaggcatttagaattcatgtgtgttttagtttccagttatgcatatgtattaatggtgccagtgcatgtgttgcttaaacttctgaagatatatatcatgtcccttgg

SEQ ID NO: 3553 - DNA, 1868 bp, Gossypium hirsutum
  Clone ID: GOSHI-09MAY01-C5381_1
cccacgcgtccgttcactctcttaattacctcttcatcttcattcagcgcaaatctaggggttggtttttcttatagcaccattttcccctatcccgacttcttttttggctgcttccactccaatctctcgatttattttgctagaatttattaatcactttgggggttgaactgaagataaacaaaatgccgtggtctttggtttatcgcgttcgaatggttgttttctttcttatcatactgtaatttattttgggtgaatttcaattgcatttggaattggaaggggattcaattcattcaacttagcgtcgttggatattcataaaattttggttggagaggtttgagaatgtacattgcagcaaccacaaagagatatcgtgcagttaaggaagttgggaagattaaaatgagcattggtgttattgcatactatcaattagttcaagtttgtcaggccgagtatttccgtcagttgctaaaaccagttacgtagtctagtagttagcaactcttggaaattgggatctgggggagtcttccatttggttgttttatacataggctttcaaagaatgaaatatctgatattgttgatgggaaattggggatagacagctcttgtcttgttttgatggcaatccactagttttagtctgtagtctttccgtaattatagctataaacctccttccaacttaaaaataaataattttaagttcaaagccaagttttaaacttctcgttaagtagaaaatcagatgcagagtgaccaacaattttacccccaaaaagcagtgcccatacttgcagatcaagtgggcaataattacatgcatataccagttgcatctgcttttggaccagtttttcctccatgtgcaaaacccttgccgcccctccatggcattgagtttcaaccctctgaggtttgtcccaagaactttgttattttcaatcagactgataataggaaccaagtcttgttcaacccggctatcacaaacaagtttcatggtaatggattaaatgtttttgcaaattacaatgatggaaaatatgagaggaaagatgtttatgatgtgggagaagaaacatcctcttttctgaaagaggattcggatgatattgatgcactcctcagctcggaagaggaagaacaagtcgagtatgatgaggaagaagttagcacagcccccgggacctctggtaattatgaatgtgactctgctgattctcgctctgcccatggctcgaaaccaagaaaagaacagctcttcctcgtctactctgaaatcctctgggtatagcggctgtttttttttttttttggtactgaccccaaaaagcggctgaaaatgaagaaaatggttaaggttctaaggggaattgtaccaggtgctgatcagatgggtactgtagccgttctcgatgaagctgttcggtacctcaagtctctcaaggttgaagtaaagaagctcggagttgagaatttcaagaatggagattaaactcatattctggtaatggtttcctcatctaatggaattcaagtttatcctgtattgcatacccatccttcgccgtctctctgatggtttgggttccagagataaagaagacaggcatttagaattcatgtgtgttttagtttccagttatgcatatgtattaatggtgccagtgcatgtgttgcttaaacttctgaagatcatatatcatgtcccttggaaagggagagaggttgggtggagtttggctctgtaatatgactactaagtttgtagttgccattatctttatggcactagtagctgctttgaatgttaatgaaatgtacttaaaagatattcagtattagtt

SEQ ID NO: 3554 - DNA, 571 bp, Gossypium hirsutum
  unsure (1)..(571): unsure at all n locations
  Clone ID: LIB3825-001-Q1-N6-C11
aagttggaagaagatttataactaaattacggggagacaaaaactaaactactggatcgccattacaatatgtcaaagctacctatcccaaatttgccatcaacacaggggggagggtttnncgtgccnttccccacacanaacacaaaaaaacgggactctttaagaaaccacaggcgacccctcctcttttanaagaataagaaacaggcttaagcaactgacggaaaaaaaaaaaaaaaaaaacttgaactagcttatagtatgcaataacaccaacgctcattttaattttcccaacttccttaattgctcgatatctctttatggttaccgaaatgtacatcctcacacctccaacccaaaattttccaattgcaaacgaaagttgaaggaaccgtatcccctttaaaattcaatcgaaattcaccagaaacaaataaaattacagtgtgacaagaaagaaaacaactaagcgcacgcagtggacgaaagacccggcattttgttagactttgattcaacccagaagtgactattgaagaataaaccaagtcttttgcctgccaaa

SEQ ID NO: 3555 - DNA, 539 bp, Gossypium hirsutum
  Clone ID: GOSHI-09MAY01-C5351_4
gctcattgcattggtcggacaccttactttcgagaacctgaagaccataagaccaaacatgccgctgtcggggcaactcttccttaacaaaaacattacttggttggaattccgtcaagcagtggtggaaggtcatcaaaacagacaaggtcaactccggttaaggaaaccgaaacaatccatatatacatatccggctccggattgtatgtgccaagcttaaatccctaaacctcattttatagttggtatcgtgtagcgtatcaagtcgactgtggtatcaagaatggtgttgtttagcattaaatttttgcggattgtattgagtatggaccgcagagtgggggtatggaacgtataaatcatctcagttttgttcgttgcataggtctgccggtgaagccgtctgtacaactcattttcgtgttgattattacgagaaacattgatgtattgtggaagagattttgagtgtttactttgtagtttgcaacattatatttgatttttttttttttgaaataatatatttggttttg

SEQ ID NO: 3556 - DNA, 616 bp, Gossypium hirsutum
  Clone ID: GOSHI-09MAY01-C5351_2
agaatgtcttgcctgtacttcagagcaatgggattgctgcaatttctccgttttctcaccgtttgtcttttgacaacttgccgagtgcggtcccgtggctacgttgtcaagtcaactttaaagcacttgtttttgttccgcacattcgagcacttggagatgcccttgtccatcgcctaaggtatcctcctactgaaagtccaccacttattaccgatgatctcactgggaccactgatcgaaatgtcaaacaaatgccacagaaatttgtagtggtacaccttcggtttgataaggatatggcggctcattcagcctgtgttttcggtgggggtaaagctgaaaagttggctttgcccaagtaccgacaagggatttggggaggggaagggttctcaattctcagttaccgatgagaagtgaggagcaaggtcgttgtccattgactctgaagaatggaatgtgctacattttggtttgaaatagtcccgcttatttgctccacaagttatggcgggaacaggattccacttcagactatccgagatgaaacaaagagctgccttcaagaaggtcttataagaaactattgtacacatgatcttgtgatgcttga

SEQ ID NO: 3557 - DNA, 2353 bp, Gossypium hirsutum
  Clone ID: GOSHI-09MAY01-C5351_1
agaaagtttagagagaaaaagaaaaaaagaacagaaaaagaagagagaattcatgtgatgttgggggtgctttgatttgagctttttattggttgttgattagattttgtttgtgttgcttgttttagtggtgttatcactatcaagcaagctatatcaacgtagaataaatccaaaaaaaaaaaaaactgagggaaagtgatcatcttggagatctgggtttttttttttcagcttttaatggaaaaaatgatgaggtttcagtataagcctgttagaagacaagaagccattgttgggttgtttgtgttgcttttcccagttcttttgccttgtttttttgcttcattcagccatgcttccccttcaacattcttggagtggaatgttccgaaacctcgacatttacggttactcgcgagtgccttacaacgtgaaagttctaatggagaaccgactgatctttgggctcctttggctgaccaaggttggagaccatgttttggtggatctgtaaaccccccaccgttgccccagaaatctgaaggatatcttcaggtctttcttgatggaggacttaaccagcaaagaatggggatatgtgatgcagttgccgttgctaaaatattgaatgcaacacttgtgatcccgtatctcgaagtaaatccggtttggcaagattcaagctcattcatggatatatttgatgtggatcactttattaatgtaatgaaggatgaccatctcgatcgtcaaagaactacctgatgatttctcttggagcacaagagagtattatgccaccgctattcgaccaacccgaattaaacgagcacctgttcatgcatctgcaaactggtacctcgagaatgtcttgcctgtacttcagagcaatgggattgctgcaatttctccgttttctcaccgtttgtcttttgacaacttgccgagtgaaatccagaagctacgttgtaaagtcaactttaaagcacttgtttttgttccgcacattcgagcacttggagatgcccttgtccatcgcctaaggtatcctcctactgaaagtcaaccacttattacccgggcgcgcgcgcggacccctgggcggacgcgtgggcaaatgccacagaaatttgtagtggtacaccttcggtttgataaggatatggcggctcattcggcctgtgatttcggtgggggtaaagctgaaaagctggctttggccaagtaccgacaaaggatttggggagggagggttctcaattctcagtttaccgatgaagagttgaggagtcaaggtcgttgtccgttgactcctgaagaaattggactgttgctagcagctttgggttttgataatagtacccgtctttatcttgcttcccacaaggtatatggcggggaagctaggatttccaccttacgagagctattcccgaagatggaaaacaaaaagagccttgcctcttcagaggaaagggtccttataaaaggaaaagcttcattgttagcagcagttgattactatgttggtatgcatagtgatatctttgtctcggcctctcctgggaatatgcacaatgcgttggttggacaccgaactttcgagaacatgaagaccataagaccaaacatgccattattagggcaactcttccttaacaaaaacattacttggtcggaattccgtcaagcagtggtggaaggtcatataaacagacaaggtcaactccggttaaggaaaccgaaacaatccatatatacatatccggctccggattgtatgtgccaagtttaaatccctaaacctcattttataggtatgccaagtttacgcttactatattttattgatttcattactgcaactattaattgtggcttgtattattggtatcataaataagaagcaatcccatttctctcatcaataaaaagtataacatcctactgttcttagtcggtatcgtgtagcgtatcgagtcgactgtggtatcgagaatggtgttgtttaacgttaaacttttgtggattgtatggagtatggaccgcagagtgggggtatgcaacgtataaatcatctcggttttgtgtcgttgcataggtctgccggtgaagccgtctgtacaactcattttcgtgttgattattacgagaaacattgatgtgttgtggaagagattttgagtgtttactttgtagtttgcgacattatatttgattttctttttttgaaataatatatttggtttcggtatagaagtcaaaaaaaaaaaaaaataaaaaaaaaaaaaaatctaaaattataaaataaaaaattataaattaaaaaatataaaagggggggccggtt

SEQ ID NO: 3558 - DNA, 523 bp, Gossypium hirsutum
  unsure (1)..(523): unsure at all n locations
  Clone ID: LIB3583-035-P1-K1-G7
ctctttttttatagctgttgattagattttgtttgtgtttgtttgttcgagtggttttcaccatgaatgccaaccaaagccaacagagaagaaaacaaattgaggaaagtggtcaatttggagatctgtgtttctcagctttaagggggaaaaacattatgaggtttcattaccagagccactatcatcagcctcttaagggagaagcaattgctgggttatttctgttgcttttcccagttcttttgccttgtttgtttactccattcacctatgcttccccttctacattctcggagtggaatgttattaaacctagacatttatctttactcaggagtgccttagaaggcaaaagttccaacggagagcagtccgatctttggactcctttggctgaccaagggtggagaccatgtcttgaatctgtaaataccccatcattgccacagaactctgaaggatatcttcaggtatttcttgatggtggactcaaccaagcaagaatggngatatgtgatgc

SEQ ID NO: 3559 - DNA, 426 bp, Gossypium hirsutum
  Clone ID: LIB3272-029-P1-K1-F8
caaagagttgccagatgaattctcttggagcacaagggaatattacgccactgctattcgggccaccagaattaaaagagcacctgttcatgcatctgcaaactggtatctcgaaaatgtcttgcctgtactacagagttatgggattgctgcaatttctccattctctcaccgtttgtcttttgacaacttgccaagtgagatccagcaactacgttgtaaagtcaactttaaagcacttgtttttgtcccgcacattagagcacttggagatgccattgtccatcgcctcagatatcctcctggtgaaactgaagcacttagcagtgactatctcagggtgaccactgatcaaaatgacaaacaaaggccacaaaaatttgtcgtcttacatcttcggtttgataaggatatggcagcccattc

SEQ ID NO: 3560 - DNA, 1340 bp, Gossypium hirsutum
  Clone ID: GOSHI-09MAY01-C5341_1
cccacgcgtacgccctcgcgcacgcccagacttccgaggaacaccaaaaccttcttttgttttcttcttctaatcaatggcatcttccatagctacaactctcacttcctcttcaaagctttgcaggaacacttctctcttcgagtcttccttccatggggttccaattaaaccactttcttttcatttcaaaacaaagtcttccccgtgcaacgcatccatttccatgtctgcagcatcacctccaccctatgatctgaataatttcaggtttgaccccatcaaggagtccatcgtctcacgtgagatgacacgcaggtacatgatggacatgatcacctatgctgataccgatgtggtggtcgtcggtgccggctccgccgggctctcttgtgcctatgagcttagcaagaacccctccgtacagatagctattgtcgagcagtctgttagccccggaggtggtgcctggctcggtgggcagcttttctctgccatggtagtgcggaaaccagctcatcgcttcctcgacgaactcgccattgaatatgatgaacaagacgactatgttgtgatcaagcatgcagcccttttcacatccactatcatgagcaagcttctagcccgccccaacgtgaagctgttcaacgctgtggcggcggaggacttaatagtgaaggaagggagagttggtggtgttgtgacaaactgggccctggtgtcaatgaaccatgacacacagtcctgcatggaccctaatgtgatggaggccaaggtggtggtgagctcttgtggtcatgatgggccatttggagccaccggggtgaagaggttgaaaagcattgggatgattgatagtgtgccagggatgaaggcactggatatgaatacagctgaggatgctatagtgaggctgactagggaaattgtgcctgggatgattgtcaccgggatggaagttgctgagattgatggatccccaagaatggggccaacatttggagcaatgatgatatcagggcaaaaggcagcccatcttgccctgaaatcattaggattgcctaatgcaattgatggaacacatgtgggaagcattcacccggagctgatcttggccgctgcagattccgccgagaccgctgacgcttagttgcaagggtcatagttgctaaactgctatggagataggaggaattggaataatgtgcagtcattggtaggatttggaataatctcctgtaacttagtagcaaaaccttagcattttgtagcttgttgttcttctccttgcatgccttttaattgagttctgttctctttcttctttggcttctaaaaaa

SEQ ID NO: 3561 - DNA, 301 bp, Gossypium hirsutum
  Clone ID: LIB3196-015-P1-M1-G7
cccacgcgtccgcccacgcgtccgcccacgcgtccgcatggggttccaattaagccactttcttttcatttcaaaacaaagtcttcccattgcaacgcatccatttccatgtctgcagcatcacctccaccctatgattttaataatttcaggtttgaccccatcaaggagtccatcgtctcacgtgagatgacacgcaggtacatgatggacatgatcatctatgctgataccgatgtggtggtcgtcggtgccggctccgctgggctctcttgtgcctatgagcttagcaagaacccct

SEQ ID NO: 3562 - DNA, 459 bp, Gossypium hirsutum
  Clone ID: GOSHI-09MAY01-C5371_3
ttcacgcgtccggtctctctctctttcacctctctagaaaaccctgcatttcaccttcttcactcccattttcttatttctcgaaaccccataaaccaaacgtttatccattaatattaagacccaattctcacatcattttcctttgaggaatttaaccgaaaagtttggatttcttttttgtaggatccaacccatttcaggttgttttcaatggcatcatcggacttgaaagaatcagctgccaataaccctgggcttcatactacccctgatgaagctaccaaagactacatcatgcagcaaactatgtatcgaattaaggatccaaaagtcagtcttgatttttactctcgtgtattgggcatgtcgctgcttaagagagtggatgttccagaattgaaggttaccttgtactttatgggctatgaggatgtttccaagcttcaagtgatccat

SEQ ID NO: 3563 - DNA, 947 bp, Gossypium hirsutum
  Clone ID: GOSHI-09MAY01-C5371_1
ccccgcgtccgctcgtctctctctctttcacctctctagaaaaccctgcatttcaccttcttcactcccattttcttatatctcgaaaccccataaaccaaaggatcgaacccatttcagattgtattcaatggcatcatcggacttgaaagaatcagctgccaataaccctgggcttcatactacccctgatgaagctaccaaagactacatcatgcagcaaactatgtttcgaattaaggatccaaaagccagtcttgatttttactctcgtgtgttgggcatgtcgctgcttaagagagtggatgttccagaattgaagtttaccttgtactttatgggctatgaggatgtttccaaagctccaagtgatccatacggtagaacagtttggacctttggaagggcagctaccattgaattaacacataattggggtactgaaagtgaccctgagttcaaaggatatcacaccgggaattcagaacctcgtggctttggtcatattggcatcacggtggatgatgtgaataaggcatgcgagagatttgaacgcctgggagtagaatttgtcaagaaattagatgcaggcaagatgaaagggattgcattcattaaggatcccgatggttactggattgaaatctttgatttgaaaaccattggagatgttattagccgttgttcctgagttaagcacatcttgaagcttgctcaggaaacaaggatggcatgtgaaggttttatctcattgtcttggtttcagagtatggtctatattggtcgtagtcgagacggaaattaggcatatggagttttagaccaaacaaaaaaaaaggcctgtggagtttttgttaaagcatattgtattgttgtgtgtttcttatgatatttcaaacagagtcatgcggattgttatcattgtaatggacattatcattatctct

SEQ ID NO: 3564 - DNA, 644 bp, Gossypium hirsutum
  Clone ID: AI054964.1
ctctctctctttcacctctctagaacaccctgcatttcaccttcttcactcccattttcttatatctcgaaaccccataaaccaaaggatcgaacccatttcagattgtattcaatggcatcatcggacttgaaagaatcagctgccaataaccctgggcttcatactacccctgatgaagctaccaaagactacatcatgcagcaaactatgtttcgaattaaggatccaaaagccagtcttgatttttactctcgtgtgttgggcatgtcgctgcttaagagagtggatgttccagaattgaagtttaccttgtactttatgggctatgaggatgtcttcaaagctccaagtgattccatacggtactaacaatatggacctttggatgggcagttaccattgaaaatcccatatttcgggcactgtagtgaacccgattacataggtattacacttagaattccatccccgtagctctggtctaatgtattcatgttgtctatgattacagtgctcatatatatctcatacatacatcttattaccctatttatattcatatatcattatgcatacatctatctaaccctctctatcatataattctaccttcttcgtgtgatttaaagtcactttcgccc

SEQ ID NO: 3565 - DNA, 329 bp, Gossypium hirsutum
  Clone ID: LIB3166-027-P1-K1-G9
cccacgcgtccgcccacgcgtccgcccacgcgtccggcctagccactgcttcactgccatctcttaaaatttccaaaggatccaacccatttcaggttgttttcaatggcatcatcggacttgaaagaatcagctgccaataaccctgggcttcatactacccctgatgaagctaccaaagactacatcatgcagcaaactatgtatcgaattaaggatccaaaagtcagtcttgatttttactctcgtgtattgggcatgtcgctgcttaagagagtggatgttccagaattgaagtttaccttgtactttatgggctatgaggatgt

SEQ ID NO: 3566 - DNA, 292 bp, Gossypium hirsutum
  unsure (1)..(292): unsure at all n locations
  Clone ID: LIB3825-025-Q6-N6-D1
ttcaannnatcaaagnatttnnncaatccnnagtaaccanntcgggnatccnnttaatgaatgcgnnnatccctttcattcttgcgctttgcatctanaatttcttgacnnaaattctactcccaaggcgttcaaatctcttcgcnnatgccttattcanncatcatccaccgtgatgccaatatnngaccaaagccacgaggttctgaattcccggtgtngaatatcctttngaactcagnnggtcactttcagtacccccaattatgtgnnttaattcaatggntagctg

SEQ ID NO: 3567 - DNA, 747 bp, Gossypium hirsutum
  Clone ID: GOSHI-09MAY01-C5361_1
gaacatctccttttctcttgagcccgcctctaacttgctggcgactcagtcttcacaatttcttttttgaatttattctcgcgatggggtcatcggagctgatattcagaggccatgaaactcagcctgtttccgattcctattcacccaaacccgacaaaccatgggcttccgttacccgcccgattcgttacatgctccgagagcaacgccttctcttcgtcttcctcggcattgctattaccactctcattttcaccctcttcccggcctcacgtgctacgcaacacaacttcgccgattccataacctacttccccatcgacacacagagcaagttctccaacccgcaccgactcggattcggatcgtctaacccgactggcaagatcccgttggggttaaaacgtaaaggcctgaggatcgtggtaacgggtggagccggcttcgttgggtctcacctcgtggaccggttaatagcaaggggagatagcgtgatggtggtggataacttctttactggcaggaaagaaaacgtgatgcaccatttcggtaaccccaatttcgagcttataagacacgacgtggtggagcctttgctattggaagttgaccagatctaccatttagcttgccctgcttcaccagttcattacaaattcaacccagtcaaaactatcaagacaaatgtggtggggacattgaacatgttaggactggcgaaaagagtaggtgcaaggttcttat

SEQ ID NO: 3568 - DNA, 549 bp, Gossypium hirsutum
  Clone ID: GOSHI-09MAY01-C5311_1
agagctttacaccattgaaatgaatggcgacagtacagcagcaacaacaagaacaagaacagcagatcgggtcaacggagaagagaaaaccagtgtttgtgaaagtggaccatttaaagccaggtaccaaaggccataccttaatcgctaaggtcttatcttcaaacatggtccttcaaaaaggtcgagctgcttctcaacatctccgtcaaacccgaatcgcagaatgccttatcggtgatgaaaccggcactgtcctcttcactgctcgtaatgatcaagttgagttgatgaagccaggtaataccgtaattcttcgtaatgcaaagatagatatgtttaaaggttcaatgaggctagctgttgacaaatggggtcgtatcgaggtcaccgaacctgctaacttcatcgttaaagaagacaacaatctctcccttgtcgagtactagttggttaacgttgtcgaagtagaggctggtatgaacaccaatgactagatcccaatcaagttgttacgaagttggcctaatgattcttttttctcataat

SEQ ID NO: 3569 - DNA, 743 bp, Gossypium hirsutum
  Clone ID: GOSHI-09MAY01-C5251_1
cctaaacccaatatgcggaggacggattttggtggatggcttgaacatagttgatattccagttagagagcttcgtgcacgcttggctgttgtaccccagagcccatttttatttgaagcatcattaagggacaacctagatcctctctggatgagcaacgacgagaaaatatgggatgtcttggagaaatgtcatgttaaggaggaagtagaagtggcaggaggactggaagctaaggtaaaggaagctgggacgtcattttctgttgggcaaaggcagcttctttgccttgcacgtgctcttctcaagtcttctaaggttctttgtttggacgaatgctccgcccacgcggccgcgcagacagcttcaattctacagaaaactatatccacagaatgccaaggaatgacggtgatcacaatcgcacaccgtatttcaacagttttgaatatggacaatgtatttgttctcaatcaaggaactctggtggaggaaggtaacccaaatgcgcttctacaagatgaatcctccatattttcaagctttgctaaagcgtctacaatgtaatagatggttgatctccaaactcactaaaactaccactccaaatgtaagttttaagcgggtggaaacttggaagcagctagcacaacttgttttggtagattagttcttcaatcttctgtaacatcaagttggaaaggagagtggaagagagaactacaatcgaatgtttttgttg

SEQ ID NO: 3570 - DNA, 366 bp, Gossypium hirsutum
  Clone ID: GOSHI-09MAY01-C5211_4
agtgcacactacagtactgattttgggaagagtagagagcttacttcttttccgtttttggaagccatggagtacggggcagtgcattatattttagatgtcttctaatttgctcaagttaaatgttggcctttatttaagaaattcgggatgatgtatctttaaatattacagctttcacgacaaagggttgcacaacaatgttgccataattacagcttgatatgctccaggcacttgttgtatctatggagcctagggagggccaaattcaagcttgattatgttttataagatttgtttatctagttaaaaccgagtctaattagttcgaaaatacatgaattctatttattttatccagtg

SEQ ID NO: 3571 - DNA, 677 bp, Gossypium hirsutum
  Clone ID: GOSHI-09MAY01-C5211_3
tttacttaatcagcttgatggatttgatcagcttgggaaggctaaaatgatcatggctacaaaccgccctgatgttcttgaccctgcactgcttcgtcctggacggctggacagaaagatagagatcccattgccaaatgagcagtcaagaatggaaatcctcaagattcatgctgctggcatagccaagcatggtgaaattgactacgaggctgttgtcaaacttgctgagggctttaatggtgctgatctacgaaatgtttgcacggaagctggaatgtcagcaattcgcgcagaacgtgattatgtcatccacgaagatttcatgaaggcagtgagaaaattgaatgaagccaagaaattggaatccagcgcacactacagtgccgattttgggaaagaatagagcttttctgttcttcccgaagctatcgctaatttcctcatgtcgagcactcagttcgtttatcaacatcgttagagaagtcaactatgcatttaaactttttacatagcttttcataccaaaggggttgcacacaatgttgttgagaccattgtatgaaggggcctctgcatgttataccgaattgaaatatttgaatctggattattgaatgatttttagcattagctcaggttgttatatttctatttcatttcaaatgttcaacccc

SEQ ID NO: 3572 - DNA, 1231 bp, Gossypium hirsutum
  Clone ID: GOSHI-09MAY01-C5211_1
gagaaactgacttctggaactagagtggtccttgacatgacaacgcttacaatcatgcgggctcttcgagcgtggagttgatccagttgtttacaacatgctacatgaagatcctggtaacgttagctattctgctgttggtggtttatccgcgcgtacgcgagacctgagggaatcaattgagctccctctaatgaaccccgagcttttccttagagttgggattaaacctcccaagggtgtcctcctttatggacctcctggtactggcaagacattattagccagagcaatagcaagcaatattgatgctaactttttaaaggtcgtttcaagtgcaataattgacaaatacattggagaaagtgcgaggctgataagagaaatgtttggatatgctcgtgatcaccaaccttgcatcatctttatggatgagattgatgcaatcggtggacgccgttttagtgaaggaacaagcgctgaccgtgaaatacagagaactctgatggagttacttaatcagcttgatggatttgatcagcttggaaaggttaaaatgatcatggctacaaaccgacctgatgtacttgaccctgcacttcttcgtcctgggcggctagatagaaaaatagaaattccattgccaaatgaacaatcgagaatggaaatcctcaagatccatgctgctggcattgccaagcatggtgaaattgactatgaagctgttgttaaacttgctgagggttttaatggtgctgatctacgaaatgtttgcacggaggccggaatgtcagcgattcgtgcagaacgtgattatgtaatccatgaagatttcatgaaggcagtaagaaagttgaacgaagccaagaaactggaatctagtgcacactacagtactgattttgggaaagagtagagagattacttcttttccgtttttggaagccatggagtacggggcagtgcattatattttagatgtcttctaatttgctcaagttaaatgttggcctttatttaagaaattcgggatgatgtatctttaaatattacagctttcatgacaaagggttgcacaacaatgttgccataattacaacttgatatgcaccaggcacttgtatctatggagccttgcatgttctagaaaattgaattatggagcgactcttggctttatttcagcctagcttgattaatgttttataagatttgtttatctagttaaaac

SEQ ID NO: 3573 - DNA, 631 bp, Gossypium hirsutum
  Clone ID: LIB3543-062-Q6-K6-B10
tgcagaatgatacgagaaagggggggtgggcgcgtgatcaccaaccttgcatcatctttatggatgagattgatgccattggtggacgccgtttcagtgagggaacgagtgctgatcgtgaaatacagagaacgttgatggagttacttaatcagcttgacggatttgatcagcttgggaaggttaaaatgatcatggccacaaacagacctgatgttttagatcctgcacttcttcgtcctgggcggctagaccgaaagatagagattccattgccaaatgagcaatcaagaatggagatcctcaagattcatgctgctggcattgccaagcatggtgaaatcgattatgaggctgttgttaaacttgctgagggctttaatggtgctgatctacgaaatgtttgcacggaggctggaatgtcagcaatccgtgcagagcgtgattatgtcatccatgaagatttcatgaaggcagtaagaaaattgaacgaagctaagaaactggaatcaagtgcacattacagtgccaattttgggaaagactagaggttttctgttggacagggcattataatgttggcataattacagcactctagtcatatttgtatcatggaccccttctgcat

SEQ ID NO: 3574 - DNA, 605 bp, Gossypium hirsutum
  Clone ID: GOSHI-09MAY01-C5201_6
gttgacttggattttaaattttacggttaaatgctaaaggaggagttttttaaattttattcttttcaattatggtttggcgcaaattcttagtattttatttcaattttctttaaattaattactggagatattaattaaagtttctcctccgcgtatcagcggcccggggagaggcagggaaggaagcacaaagtagaacgggaaaaatgaagctggaagtgtatgctgatcgaatgtcccaaccatctcgcgctggcatcatcttctgcaaggtgaatggtatagattatacggagcgcaaggtagatatctcaaagggggggcatttgactcctgaatttgctgaaatccatcccatgaaacagctgcctgccattggtgacggaaattttaaggtgtgttgagagccactccattcttatatatcttgcttgggcgtttcctggagttgcagatcattggtatccagctgatcttttcaagagaagtaagatgcattcggtggtgtattggcatcactccaacttacgtcgtgctgcagctacatatgttactaacactacaatattacccacgcttggccatccatcgaatcaacaacc

SEQ ID NO: 3575 - DNA, 419 bp, Gossypium hirsutum
  Clone ID: GOSHI-09MAY01-C5201_5
tccccggccgaatcccgggtcacccacgctcgatggtttcgtgctgctttggcctttgccctgtctctcttcttttgctgctgataaacgccaacagtttagggctattggagttccatttccagcttctgtatactatatttacagtgccatataactgttccctggcacagtgttctatggtgttaatgtttgaaggatttcactacacaaccaacttaagggccgatgtctatgtactatagctgatcttttcaagagaaggtagatacattcagtgttgtattggcatcactccaacttacgtcgtgctgcagctacatatgttactaacactacaatattacccacgcttggccatccatcgaatcaacaagcagctgctgaagctgagaaacttctcttctcatctttgtcaa

SEQ ID NO: 3576 - DNA, 630 bp, Gossypium hirsutum
  Clone ID: GOSHI-09MAY01-C5201_4
tagagtcctttgggttgaagggtaatggcccttttttgcggggtaggaatcacccctccatagttgatcttagccttgtttgtgagctaatgcaccttgaggttttggatgagaaggatcgtgagaggtttttgggtccatacaagaaagttcagcagtggattaagcatacaaggaatgctacgagtcctcactttgacaacgtgcataatatcctcatgaaagtcaaagaaaaactaaaaaataagccgttaatggaagcaaatcatggaggtgcgcttgacatccaaaagcgattgcgttcaagaatatgacatgtgaaagaaaactgaataaatcatggagtccccagcttttgtgttgtcttggtatgaataaattggaaatgaaaggaagtatggatgtaagccatctggcttggatgaagggtttttgaaacatttattgaaggtttcaacgaaaataagaatctttaaatcaaggtcaaaaaaaaaaaagatagaaacaaaaagaaagataaagaaaaatctaccaagtcaagcgctcgcatgataagagaaaagaatttgatgcaaaagatgctgcgtcctttttaaagaacaagcctatcattcgatcttaaaattcggg

SEQ ID NO: 3577 - DNA, 677 bp, Gossypium hirsutum
  Clone ID: GOSHI-09MAY01-C5201_2
cgaattcccgggcgcgccacgcgtacgctattttttatacatataaatgttcccttccttttgtaagataggcttttgaactcaatgatgctcgtttcaacacacatatggtgtcaatactacaataccacctatacttggccgtccattgaatccacaagtagctgctgaagctgagatggggctgtcctcatctctttcaaagctagagtccttttggctcaagggtaatgggcgttttttgctaggcaggaaccaaccatccatagcagatcttagccttgtttgcgagttaatgcaacttgaggtacctttttgtgacttgattttttgtccaaatttcaatcttttgttgttcccttctctggtggaacataatgtattgtgatataggttcaggattgtcctccttaggttacctttttccttcaagacacttcatgtgctaccactcatcaccataatcatcatccacaacaacctgagccctatttcccactacataaatcgtttcttggatccccccgttagtgtactttttaggaccgcatcctttataagcatcataaaatggggtcgcactagcgcaagttttagttatggacttgtctgcctacatttcagcaaaaaagattgtcatgtttcatctgttttaaaacagagctcaagactagtct

SEQ ID NO: 3578 - DNA, 1064 bp, Gossypium hirsutum
  Clone ID: GOSHI-09MAY01-C5201_1
accctgtataagaatctctttgctgctcagatctttgcagtaaagagcctaagaagcgggaagagccaatcagcacgggaaaatgaagctcgagggtatgctgatcgaatgtcccagccatctcgcgctgtcatcatcttctgcaaggtaaatggtatagattatacggagcgcaaggtagatatctcaaagagagagcatttgactcctgaatttgctgaaatccatcccatgaaacagctggctgccattgctgacggaaaattttaagttgtttgagagccactccattcttatatatcttgcttgtgcgtttcctggagttgcagatcattggtatccagctaatcttttcaagagaagtaagatgcattcggtgttgtattggcatcactccaacttacgtcgtgctgcagatacatatgttactaacactacaatattacccgcgcttggccatccatcgaatccacaagcagctgctgaagctgagatacttctctcctcatctctgtcaaagctagagtccttttggctcaagggtaatgggcgttttttgctaggcaggaaccaaccatccatagcagatcttagccttgtttgcgagttaatgcaacttgaggttttggatgagaaggatcgcactaggttattgggtccgcacaagaaagtgcagcaatggattgagaacacaagaaatgccacaaatcctcactttgatgaagtacatagagtgatcatgctggccaaagaaagacaacaacatcagcgattaaaggcagcaaaaaatgaaggcggatccaacatgaaaaagccgttggtttttagaatgtgagggaaaaccgtattaccaagtacttatttccagatgataagcaattattagcttgtataaacacgatacatgttttacctatggtttatactgcaagtcctatggttagatttaaactgttgtcctaactctagtatctattgttgcaaattttcattctcaaaagctgtgttgcttgatcagtatccctaatggatattccctcccgcccttgctctaagggttttgc

SEQ ID NO: 3579 - DNA, 493 bp, Gossypium hirsutum
  Clone ID: LIB3582-038-P1-K1-A9
cggacgcgtgggcttttttatctgcaagtccctttttttttctccagtcaatatatataaaggaaggaaatcgctgttggggggtctttggatttccatcatgttcaagaagacatcaagtagaaaccaaagatcgaaaggaatcaggataaaacatgtccttcagatttgtctgttactcggggtttgcttctggttaatctaccaagtcaagcgctcgcatgataagagaaaagaatttgatgcaaaagatgctaaagtctctgtgaaagaacaagccgatgatttgatcttaaaattcgggaggaaagacctacctcacgtgcaggaagcatctaagaacttcaaacacgaagaagaagaggaagaagaaaatgtgatggaggatgaaaataagcacgatgaagaacaggaagaaaaaactaagaggctagaagaagaggagcatgaaggagcaataaaacacgaagaagaggaacgggtagaaggaatc

SEQ ID NO: 3580 - DNA, 384 bp, Gossypium hirsutum
  unsure (1)..(384): unsure at all n locations
  Clone ID: uC-gsronu33B055d07b1
gtctctttgctgctcagatactcttccagggacaaacactccccaaaaccagaaggagagaccaaagaacaaaacctaaaaacttgctagaggcggcagacacaaacgtgctaggccaaaagagaagcagggaaggaagcacaaagtagaacgggaaaaatgaagctggaagtgtatgctgatcgaatgtcccaaccatctcgcgctgtcatcatcttctgcaaggtaaatggtatagattatacggagcgcaaggtagatatctcaaagagagagcatttgactcctgaatttgctgaaatccatcccatgaaacagctggctgccattgttgacgngaaatttaaggttgtttgagagccactccattcttatatatcttgc

SEQ ID NO: 3581 - DNA, 352 bp, Gossypium hirsutum
  unsure (1)..(352): unsure at all n locations
  Clone ID: LIB3147-045-Q1-K1-D2
cggacgcgtgggcggacgcgtgggcggacgcgtgggcggacgcgtgggctcaaagtatatgcagatcgaatgtctcagccatgtcgtgctgtcatcatcttctgcaaggtaaatggtatagactatgaggagatcaaagtacacatatcgaagggtcagcattcattcatgtaagtttgtcaagttttattgttttttggagttgcaatgcaaataacaaattgggatattgctaatgtgttttaaagagaattcatttgtatatgtaatttggttctaagttaattgtagggattgaacttttctttgctaaaaaaaaagaataaaaatataaaaaatatatnttatattc

SEQ ID NO: 3582 - DNA, 215 bp, Gossypium hirsutum
  Clone ID: LIB3147-045-Q1-K1-D7
tgggctcaaattatcggggtctgggagaatctggttgggagtctccttcatctatctttctcaatgttaatggtatagactatgaggagatcaaagtacacatatcgaagggtcagcattcattcatgtaagtttgtcaagttttattgctttttggagttgcaatgcaaataacaaattgggatattgttaatgtgttttatagagaattcatt

SEQ ID NO: 3583 - DNA, 1259 bp, Gossypium hirsutum
  Clone ID: GOSHI-09MAY01-C5231_1
gcagtggtaacttccctttcaatggaggggtggaaccctctctctctttccccccccggccggtatcttcccactctttaacataccccctcccccccccccaaaataaaaagctttcttctccatcttctcttccgttttcttttgcttctgccttttgaggttgcagaggaaaaagaagtttgaaaagtttcatcttttttattttttattgttttgagattgggtgatgttgtggctctaaaaagagagaaagatagatatgggttcatgtgtttcagtgcataagagctctcaagagccagcctcagccatgaaagttggactttcttttgggtctaaaacagataataacctcatcattccaccatcacctgttaaggagaaaccagttgccaatggtgactttgctttcatatctcaatcgccctatactttcaaagattttggtagtaaagaagaaacctttttcgattcccgagcatatctcgattccgattgtgaggatgatttcttcagtgtcaatggggattttactccgtctcgtggtaatacccctgttcatcatagcttctccgtcgggacaacacctcgagttagcaaggtcaccgtggaaggatcacctatgtctgttctggaaacatccccgatgggaaaaaagaagaagctcctcgaactgttccgagagagcgttagagaagaccgaaaccttacttcaaaatctgcaaatgttacccctcgcctccgctctggagctacctcactttgcagtagtgaaaggactgctaatggagatcatgataaccctatgttcaaggagaagccattaaagtctttgcaatgttgccttccaagctttgttacatgcagtagcttcaatgagaggaagaagaagatgagccctgcaatagctgtaaatgataggcctcaatatccatcaattcactagcacgtaggtcgacgaagccagattctcgacttctagaggctcgagattaagttggaagttttgttggaagtagtgaagtcgttggataatggtgatacataaatatggggattagaaggcatgtaaagaggatccaagtaaatgtttgatgtaaaactcctattaggaattttaccaactcaatcaaccataagtgaaaattttcttttcaacaagaagttagctcataaacaagtgttttgtaataaaagggcaaaagaatcaaaggaaaaatagtatatgaccctcgtaatgatatgttaagcaactg

SEQ ID NO: 3584 - DNA, 410 bp, Gossypium hirsutum
  unsure (1)..(410): unsure at all n locations
  Clone ID: LIB3148-018-Q1-K1-D9
ccgtccgcctcacgccgnttccgcccacgccgnntccggttgctcatatgtgtgacctttngnnctttcnnatatctcananntcgcgcctagtacntnnttcaaaggattgtgtggtgagtaannnagaagaaacccctttttcngnagttcccgagcattatcntnncgattcnncgattgggtgaggggattgatttctntnncagtgtcnnaatgggnngattttacctnnccgtctcnngtggtaatacccccctgttcaatcaaatagcttcnntccgtcgggaccaacacnnctcgagttagcaaggggtcactgtggaaaggatcanccaatgtcntggttcttgaaacccatctcccgatgtggaaaaaaganaagaagctcctcgaacctggttccgaga

SEQ ID NO: 3585 - DNA, 483 bp, Gossypium hirsutum
  Clone ID: GOSHI-09MAY01-C6991_1
ttcattcgtccggccacgcgtgcgatcaaagtgtagagcagtgggcaccatggtccgacgaccctccggcgacactgatcgaagacctcaaaatcaccacccaaaacgtttctcttatatttccctcccggaaaaccgagagaaaaaaatccatgttcttgtcgaacatagacaaagtgctgaatttcccggtggaaaccgtccattttttccggtcccacgaggattttccgccccatgttgcggctgagaagctgaaaaccgcattatcggagctgctagtgccgtatgatttcttagccggaaggttgaggtcgaacccggaaacaggtcggctggaaatcgactgtaactcggccggaatcggtttcgcggtggcttcaagtgattatgcgttggatgatgttggagacttgatttatcctaatccagcatttggccaactgatttgtaaaagcgtcgatagcttggaacaagatgatc

SEQ ID NO: 3586 - DNA, 968 bp, Gossypium hirsutum
  Clone ID: GOSHI-09MAY01-C6981_1
tcgcgatcttcctccattaaagctcctctctatctcccgaaaccctacccttttattgttagcgtgaacggcgccgttcggaaaggaagcgaaaccctgttttaaaatcggctgttggagatgtctccgtcgttgacaccccaccgccgccgccgcctccacctcaagatgctaaatctgaactcatttcttctttgaagcttaaattcccgcgcgtccgccctcgcctccgttgacgcctggctgcgaaccaagatgagtcgcgtgaaaagcagatgatgccgccaaggaactcgaaacggttgctggacctgtggacttattgaccgatcttgataagctgcaagggagatggaaactgatatacagcagtgcattctcgtctcgtacactcggcgggagccgtcctggacttcccactggaaggttgctccctgtaactctcggccaggtttttcagagaattgatgtcataagcaaagattttgataatatagcagaaattgaattgggagctccatggccattacctccacttgaagttactgctaccttagctcacaaatttgaaatcataggatcttcaaagatcaaaataacattcgagaaaacgagtgtgaaaactagagggaccttttttcagcttccgtcattggatgtacctcggattcccgacgctttgaggcctccatctaatccagggagcggcgactttgatgttaccttcattgatgccgatacccgaatcaccataggagatagaggtgagcttagggtttttgtcatctcataaattagtaagcacatctaatatcaaagctcgtatgcactctcattacttcatatattgtctgtatgtgtatatatcatcgggagtgacccgtaacttttgtagaattaatattttaatgtaattacgaatattatgtatgtaaattttcgaatcaatttaatagtttaatcgtgtc

SEQ ID NO: 3587 - DNA, 596 bp, Gossypium hirsutum
  Clone ID: GOSHI-09MAY01-C6971_1
tccgcccagcgtccgcggccgcgtgggttcccaaacatgtcgttactcagcagccataccatccctccccgacctttactccaccttcctccccgaaaccataactttccaatcttcaccttcaaacccattttccttcccctttctcctcccattaaaccctcaaactccgtctccaaaccccccaaatttatccctttagcttccatttctcctcccccggcaacaccctgcaaatctcccgaaatcccagctctgtccccactcgacggttcaactcgaaccctcaaaacctttttctccttggccctctctgccaccatcgtcttcaccaaaatgatccaaaattatgctctcaaaacaatctcccagaaccccaacgcactttccaccgtgggccctctcttcttcgcttccttaaaggaccgccctagcggatacctcaacacgcctttgactgtggttgcagcgggattagctaagtggcttgacatttacagtggggttttgatggttagggttttactcagttggttccctaacattccctgggaccggcagcccctttcggctattagggatctatgtgatcctta

SEQ ID NO: 3588 - DNA, 858 bp, Gossypium hirsutum
  Clone ID: GOSHI-09MAY01-C6901_1
ctccattttcactgctcacaacttcccacctttgccccctctctgtgttgcttacacataaacaatagcatagttctgtttcttctctttgcttctgctttaccctataaagattcactcacttataacactccccttctctatatcctctctgtttcttttctcgcttgatggatttcaagtattctttttccagctttaatctttcactttatgagttaagtttctgaattttaatttgcatatagattttcttgttattctgtatgattttagatctgttatggatgtctaaggctttcaagatttgatacttctttgctcatttaacaagtcacttccctgcatttttttacatctttgagttgctccatttcaaagtgggagagaagcaagtttttttttttaatcatgattaatcggggacttcaagttctatctcaaacctcttacttacaaacttggaattggttgtttcaagagagcaagggaacaaaatggagtgctgaagagaacaagtgtttcgaaaatgctctagctttatatgatacagacacacctgaccgatggtttaaagtggcagcaatggttcctggaaaaactgttgaagatgtcatcaaacagtatagagaattggaagaggatgtaagtgatatagaggcgggattgattccaattcctgggtataccactgattcttttagattggagtgggttaatgatagtcagggctttgatggaattagaaactattacactcctggtggtaaaagagggtctgggtctcgaccttctgatcatgaaggaagaaaagggtgccatggactgaaaaaaacacaggcaatttctaatgggttt

SEQ ID NO: 3589 - DNA, 427 bp, Gossypium hirsutum
  Clone ID: GOSHI-09MAY01-C6931_1
cccacgcgtccgcttttgtttagatgaaattctgtttgagtttcctttggtgaatgatcagacttagagagagagcagagtaatttgggtcaagtgtttctgggttttcacaaccatggcttcttcaatgcttagtggagcagccccaacaggggtaggatttgcgaggtccaattttcattttaggagcttgccccagaagagtttattttcttatacaaagaatcagaagactagaatggtggtaacaaccagatgcagtatatcatcctcaaggccggcttctcagcctaggttcatacaacacaagaaagaagcgttttggttttacaggtttttatcaatagtgtatgatcatatcataaaccctggtcattggactgaggatatgcgggatgaggcgcttgagcctgctgatctttattct

SEQ ID NO: 3590 - DNA, 793 bp, Gossypium hirsutum
  Clone ID: GOSHI-09MAY01-C6581_2
aatccggggcggaccaacccgtccggtttgttccggtttaaccggttttatggttcaactccattgaggaaggtatccaccacggcaatgctagcaactttggactccaaggatgtgtcttcacaaaggatgtcaataaagcaatattgatcagtgatgcaatggagacgggtacggttcagataaattctgcaccagctcgtggaccagatcatttcccatttcagggtttgaaagacagtggaataggatcacagggggttaccaacagcattaacatgatgacaaagatcaagagcacagttatcaacttaccaaccccgtcttacaccatgggttaggcatttcataaatatcagaataacaaccagggttatcttagttaagatagtatttgtgttttagagcttatttccatatgatgtttagtgaaaaaggataaaaaatggagacaagcaattaaggaagaccagttacatatgcataatatagtggctctgttatcgaatggaccaaaggttcttcgagtgatggttgtgggcttagcagagcttttaatgaacattggtttctgggtttaccctatccagtttaagcccgaaaataatcatcaaaactgacagaattggggctaaaaccagacaagtgccacttatgggtttgggttcaatgttgaaggatttcttaaaataaaacccaggcccattttttatggtataatttactctttttttgttctctgctactgtatggtataatatataattagcatacacacatgatagaattaagg

SEQ ID NO: 3591 - DNA, 1109 bp, Gossypium hirsutum
  Clone ID: GOSHI-09MAY01-C6581_1
agccattccaccattcaattaccctgtcaaccttgccgtttcaaaaatagcaccggctttaattgcaggaaactcccttgtactcaagccacctacacagggtgctgtttcagctcttcatatggtgcactgctttcacttggctggctttcccaaagggctcattagctgtgtgacagggaaaggctctgagattggtgatttccttactatgcatcctggagttaattgtataagcttcactggtggagacactggtattgctatctcaaagaaggcaggaatggtccctcttcaaatggaattgggaggaaaagatgcttgtatcgtactcgaggacgccgacttagatttggttgctgcaaacataataaaaggaggattttcttatagtggccaaagatgcactgctgttaaagttgtgttggtgatggaatctgttgctgatgttctggtggacaaagtgaaggcaaaaatcgcaaagttaacggttggaccaccggaggatgactgtgatatcactccggttgtgtcggaatcatctgcaaatttcattgaagggctggtcaaggatgccaaagagaaaggagctatattttgtcaggagtacaagagagatggcaatcttatatggccattgttgttggacaatgttcggcctgatatgaggattgcatgggaggaacctttcggcccggttttgccagttataagaatcgactccattgaggaaggaatccaccattgcaatgctagcaacttcggtctccagggatgtgtgttctctaaggatgtcaacaaagcaatattgattagtgatgcaatggagaccgggacagttcagattaattccgcaccagctcgaggaccggatcatttcccatttcagggtttgaaagatagtggaattggatcacagggagttaccaacagcattaacatgatgacaaagatcaagagcactgtcatcaatttaccaaccccatcttacactatgggttagtattgccaatcagggaatacaaacatacatacatacataaatataaattagttaaaatcttagctaagatggtaaatatgtatgtttgagaatagttgcatatgat

SEQ ID NO: 3592 - DNA, 548 bp, Gossypium hirsutum
  Clone ID: GOSHI-09MAY01-C6541_1
gtacaagaagacgtaccgatacgatgccgttttcgcccttggtttcggggctgtctatgatcagttgagggaagggtacccgagtgatgaggatcgagatgccatcttccaagcttatattaacgccttaaaagaggtccctcaacagtatagagctgatgcgcagaaattagaagaatgggcgcgagctcagacttctagttcgctagtcgagttttcatctagagatggagaggttgaagcgatacttaaagacattgcagaaagagctggtagtaaagggagtttcagttatagccgtttctttgctattgggttgtttcgtcttcttgagcttgccaatgcaactgaacctacggtgttggaaaagctctgtgcagccttaaatatcgacaaacgaagtgtggatcgtgatcttgatgtgtataggaatttgctttccaagctggttcaagctaaagagttgcttaaggagtatgtcgattgggagaagaagaatagagaagaaagatcggaatcactcaagccaatgaagccgttaagaaatg

SEQ ID NO: 3593 - DNA, 1136 bp, Gossypium hirsutum
  Clone ID: GOSHI-09MAY01-C6511_1
cccacgcgtccgaccagctcctgcttatagtatctatcctccccacgcccccgcccacgcgtccgcccacgcctccactcaccattgttccaagtttgttgtaaaccaagctagaaccagcagccaacatggcctcattagcagcctccaccgctgccgcctcccttggcgtctctgaaatgctcggtaaccctctgaatttcagtggtggagctaggtcatcggctccaacaccatccaactcatccattttcaagaccgttgctcttttctccaagaagaaggccgctcctccaaagcccaaggctgctgctgtcgccccggccgatgaagagctggctaagtggtacggtccggacagaaggattttcttgcctgaaggtctgttagacagatcggagatcccagagtacttgaacggagaagttcccggagactatggatacgatccgtttggtctgagcaagaagccagaagactttgcaaaatatcaagcatatgagttgatacacgcaaggtgggcaatgcttggtgctgcagggttcatcatccctgaagcctttaacaaatttggtgccaactgtggccccgaagccgtttggttcaagaccggagctcttctcttggacggtaacaccttgaactacttcgggaagaacatccccatcaaccttgtggtggctgtcgttgccgaagtcgtccttgttggtggtgctgaatattacagaatcatcaatggcttggatctggaggacaagcttcaccctgggggaccatttgacccactggggttagccaaggatccagaccaggctgctttgctgaaggtgaaagagataaaaaacggtagactcgcgatgttcgccatgctcggtttcttcttacaagcttatgtgaccggagaaggtccggtggagaacctttcgaagcacctgagcgatccttttggcaacaacttgctcacggtcattgctggaactgctgaaagagctcccaccctctgattttaatatctttgtcttctgattttcgccgctacttgttattgcgtttatgcattttgttgtacatcaaatcaaacttatcggataattcccgcgaactttaatcttgaaggtctcaccctcgaatttact

SEQ ID NO: 3594 - DNA, 326 bp, Gossypium hirsutum
  Clone ID: LIB3120-032-Q1-K1-E1
ctcgcgatgttcgccatgctcggtttttatctctttcaccttcagcaaagcagcctggtctggatccttggctaaaggtgaaagagataaaaaacggtagactcgcgatgttcgccatgctcggtttcttcttacaagcttatgtgaccggagaaggtccggtggagaacctttcgaagcacctgagcgatccttttggcaacaacttgctcacggtcattgctggaactgctgaaagagctcccaccctctgattttaatatctttgttttctgattttcgccgctacttgttattgcgtttatgcattttgttgtacatcaaac

SEQ ID NO: 3595 - DNA, 1295 bp, Gossypium hirsutum
  Clone ID: GOSHI-09MAY01-C6491_1
gtcaattgccaacacaaaaggagggcgaagaggtggactttagaggtgtcctgcatcgtgagggctcggttcttatgtctgtttcccttgatcacttgaaggcaccgccgcccttatacaagtcacttgcagcaaagctggtcgtaggcatgccatttaaggacttggcaacagtagactcaatcatactgcgggagcttccaccagtagatgacgctgatgctcggctggctcttaaaaggttgatagacataagcatgggtgtcattacacctttatcggaacagctaacaaagccattgccaaatgctatggctctagtaaaccttaaggaattatcaactggagcttacaagcttttgcccgaaggtacacgcttggttgtatctgtacgtggtgacgagccctatgaagagctggaaatcctgaaagacattgatgctacaatgcttcttcataatataccttttgatgaagaaaagattggtcgagtgcatgcagcaaggaggttatttgagtatctatcggagaacagtcttgatttccctgtaatccatcatattcagtttccaaatgggactcacagggatgacttagtcattaatgctggcaccaatgctggagcccttctggtggatggactcggagatggtatattgttggaagcaccagaccaagattttgatttcctcagaaacacttctttcaacttactccagggctgtagaatgaggaataccaagacggagtatgtttcatgcccatcttgtggtagaacattgtttgaccttcaagaaataagtgcacaaatacgagaaaagacgtcacacttgcctggtgtttcgattgcaattatgggttgcatcgttaatggtccgggggaaatggctgatgcagatttcggatatgttggtggtgctccaggaaaaatcgacctctatgtaggcaagactgttgtgaagcgtggaatcgcaatggagcatgcaaccgatgctctgatccaactaataaaagatcatgggcgatgggtagatcctcctgctgaagaataagtttaggaggttatagcctgtggatggaagaagcatgggtcaagggggaatcacattcccatcttcgaaccacatatagtaaataatagcggttgaagatcgtgtgggcaaaaatgattgcctcattgcaggctgcacaaattcgtatgcaatgttttgtaaaacatataaatgtttcgaattgtagacgtgactggggcgggaaaaaatatatatagttttctgtgttaagtattctgtgtt

SEQ ID NO: 3596 - DNA, 500 bp, Gossypium hirsutum
  Clone ID: GOSHI-09MAY01-C6441_1
ttccacgcgtccgcccacgcgtccgcccacgcgtgcgctccacgcgtccggttgtctccaattctttctataaaaaaaaaaatctaggaaagcatcaagaatggaggcattgaggatggaagtattttgggtgatgctgattgtgttggttgccgtatttaaggtccaaaatgtggcggcagctgaagctccggcccctagtcccacctccgatgccacaatcttcgtgccgacggtgcttgcttcccttgttgctcttgcatttgggcttcttttttaaaatgctggtgttttatgagacctataatattttttaaaattcttttctattttctacttgtgactacagttcaatgtattcatatttttgttattgttgtagtttcaatatgtaattgttgtgatttgtttcctagtgacctaataaattatttgttttcttttcatatacaagtattggatgaaaatatttgttgtatttattatctaattttcataaa

SEQ ID NO: 3597 - DNA, 750 bp, Gossypium hirsutum
  Clone ID: GOSHI-09MAY01-C6461_1
cccacgcgtccgtacagaccatccaaactcgaaacttgaacgtcgcttcttttgttagaaagacgttagtagcggaaaattttgaacgttactattaaggaaggataatgctatccttgcgcttcgctattcctaccgcgaatacattaactccgcccaagattaaaccaaaaccgggtttagtagtacaaaccgcttggaaccaaacggacctttttccttctcttcccaaacgaaatgattataagctacaagcagctaccacggacttatctgtggcgggagatataccggcggaggaggtggtggagcttccggcggagctgagcagagagttgatgccgaagcacgtagcggtgataatggacgggaacgggcggtgggctcggcagcggggattggcgacatcagcgggacacgaagccggtgtaaaggcgttgagggagctggtcgaactatgttgccagtgggggatccaggttctgactgtcttcgccttctcttacgagaactggattcgtcccaaggtggaggttgattttttgatgagtttgtttgagagagcgttgaagtctgaagtggagtcactttctagaggaggcattcgaatatctgtaataggggattcaacaaagcttcccacatcgctgcaaaagttgatcaacgaagttgaggagaccacaaaacataactccaggctccaactcattgtagccgtcagctacagtgggaaatacgacgtcgttcaag

SEQ ID NO: 3598 - DNA, 395 bp, Gossypium hirsutum
  Clone ID: GOSHI-09MAY01-C6411_1
aacaatccaaaagctcacttccgttatccaccgtctcccacctgtatcctgccacatcctcacccgatcctccgccaccttgtcctcctccaagaaggttgccgacaggatcgtcaagctcttcgccatcgacccagaaggccaaaagcgggaggttgtgggcctagccggccacagcttacttcgggccttgactaacagcgggctgatcgatccggcgtctcaccggctcgaggagattgatgcttgctccgccgaatgcgaggtcaacatcgcccaggaatggctcgagaagcttccaccccgtacctacgatgaggaatatgtgttggtaaggaattcgagcggtcgtatcttgaacaagctttccaggcttgggtgtcaagtcgtgctta

SEQ ID NO: 3599 - DNA, 397 bp, Gossypium hirsutum
  Clone ID: GOSHI-09MAY01-C6431_2
ggcagccatgaactccatcgttttgtcatgcaactttcctatctcaggcagtgggcttaatgccaagaccccctcagtgccttcagttgcttccccagttttgcctggtggtcacaagttgccaatgatcagtgcccaacaacagggtaaagtttcaggttccaaagaatcaagtggcaatgaaggaagaagagctgctatgctgtatttggcagctacccttttcaccacagcggctgcttcttctgcaaatgctggggtcattgatgattaccttgaaaagagcaaagctaacaaggagttgaatgacaagaagaggttggccacaagtggagcaaactttgcaagagcatacactgttcaatttggcacctgcaagttccctgagaactttccg

SEQ ID NO: 3600 - DNA, 749 bp, Gossypium hirsutum
  Clone ID: GOSHI-09MAY01-C6431_1
acccacgcgtccgagctaattgagctccatttccctagtaaacagagttctttttttcacagcaatggcagccatgaactccagtgttttggcatgcaactatgctatctcaggcactggatcatctgagcttaatgccaagcttgcttcagcaccatcagttgcttccccagttatgtgcggtggtcacaagttgcctgtgatcagagcccagcaggctaaattttctgattccaaaggatcaggtgccagtgaaggaagaagagctgctatgctctacttggcagctggccttttcaccacagctgttgcttcttctgcaaatgctggggtcattgacgagtaccttgaaaagagcaaagctaacaaggaattgaatgacaagaagaggttggcaacaagtggagcaaacttttccagagcatacactgttcaatttggcacttgcaagttccctgagaacttcactggctgccaggatcttgcaaagcaaaagaaagtaccattcatctctgatgatttggccttggagtgtgaagggaaggacaaatacaagtgcggttccaatgttttctggaaatggtgaagacatcccaatgtaattttctcaattttctctgtattgttgtgctatttagtgaaacaccctgaaaatgttgtggtatttgttgttaaacagaagtatggtgctgaataaactagtcaaacactttccagatggaacttgcttaattttgcagtattggttc

SEQ ID NO: 3601 - DNA, 612 bp, Gossypium hirsutum
  Clone ID: GOSHI-09MAY01-C6721_1
cccacgcgtccgctcgcattgaattctgttgggaaaaaaaaatggaagaagagaaggcggcagcttactacgatgagcttaccaggaaaggtgagggagcggccagattcaagcgaggcctcggtttctcctcttgcgatgatcaacacgatgcggttcctcaaagaggcacaacctttgtctctccatgttcatccttcctcagcagtttcgtcagggcctcgagtcctaccaccgcttccaagcttgagaaagaatctcaacttcaaccgatccaacataagctaaagaagaagccggaaagagaagctagggtttcggcgagaaccaacgtggagagagacggagataagcattcaaggaggcgaagcagaagcacgagtagggagagatactgggaaaaggatagagagagaaggaagcggagaaggagtaggtcgcctcgtagagatcggaggagtgggagtagagatcgccggaggaggagtaggtcgcctcgtaaagaagggaaattggagcggaagaagaggagcaggaatttgtcgccgcgggagtcatggaggtcaaagaggcattggacgagagaggggaaatccatgaaggagaaaaatg

SEQ ID NO: 3602 - DNA, 569 bp, Gossypium hirsutum
  Clone ID: GOSHI-09MAY01-C6651_2
gcaaaacctcctgccaaggcacatgtggaggattgtccaccagttcgatcatataggatgaacataatggctgaccagactaacagcattgaagaggtgggaatagtggatcacttttggtgaaagtgagtatggatggtgcaccatatctgaaaaaagtccctcgcgtccggtcttagagttaccaggagttatccgatgccttggctaagatgtttagctctttcactatgggtaattatggacctcaaggaatgatagattgcatgaatgaaagcaagttgatggatcttctcaacagttctgattatgtgccatgttatgaagataaagatcgcgattggatgctagttggtgatgtcccatggcagatgtttgttgactcatgcaagcgcttacgcataatgaaaggatccgatgcaattggtctcgcaccaagagcaatggcgatatgcaagagcagagcctataaacaagatcctggaattgagcaaaaggctaggagagggagccttcttattgggatgtgttttatgtttttttaatggttatatatatatatttaatat

SEQ ID NO: 3603 - DNA, 950 bp, Gossypium hirsutum
  Clone ID: GOSHI-09MAY01-C6651_1
cccacgcgtccgctcctctatttcttaacaaacatcaactccagagatcgccaaacatgctaggaactgagcatgatttgaacttcaaagagaccgagctgtgtctcggcctgcctggtggaagtggtggaggaggaggagctgccgccgccggtggtggtggtggtggtaaaaatgaagtggaaagttccccaaagaccaccgggaaaagaggctactccgagactgttgatttgaagcttaatcttcagtctaaagaaggttgcatggatctgaatcagaacctagaaaatggttcaaaagaaaagaatcatctcactgcaaaaccaccagccaaggcacaagtattgggttggccaccagttcgatcttataggaagaacattatggctaaccagaagaacaacagtgacgaaattagtgacagagctagcagtggcagtgggggtgcagcgtttgtgaaggtttgcatggatggtgcaccatatttgcgtaaagtagatttgaagatgtacaacagctaccaaaagttatccgatgccttggctaagatgttcagttccttcaccatggggagttatggatgtgaaggaatgatagacttcatgaatgagagcaagttgatggatcttctcaacagttctgattatgtgccaacctatgaagataaggatggcgactggatgctcgtgggcgatgtcccatgggagatgtttgttgaatcgtgtaaacgtttgcgcataatgaaaggatcagaggcaatagggcttgctccaagagcaatggagaaacgaccacccagagtctaaacccattcaagatcatgtagagcaaagggggcagttgtcccctacaactttgttgagatggtgtcattgtattgtattaaatatttcatgtatttggtatatatagatatatataataattttattaaaacaccccaaccc

SEQ ID NO: 3604 - DNA, 411 bp, Gossypium hirsutum
  Clone ID: LIB3148-026-Q1-K1-B7
atcggcatcaatcaaatctgatactatcttgtatattctaaaaaaaaaaaaaaaaacgggggggtctatttataataatggacctcaaagaatgatagatttcatgaatgaaagcaagttatatggaacttctcaacagttcttattatgtgccaagttatgaatataaagatggcgattggatgctagttggtgatgtcccatggcacatttttgttgactcatgcaagcgcttacgcataatgaaaggatccgaatcaattgttcattcaccatgatcaatggacaattgcatgaccttagcctaataacattatcctggaattgttcatactgctaggagagggagccttcttattgatatgtgatttatgttttttaaatgtttatatatatatatttatatttata

SEQ ID NO: 3605 - DNA, 1267 bp, Gossypium hirsutum
  Clone ID: GOSHI-09MAY01-C6641_1
aaaaaacaccccttcactgatctttgagtccaccacacaaaaatcaaccatggcagcagcagccagagtgatagccatcgccggcaactccaccgccgccgcgtcttcctgcttgcttatcaaaacaccgttcgctttacaacgctgcagcaacggacttagattcaacaacgtcagacgatcatcgaaaagattgttttcttgcaatgccatttataaccctcaggttcaaatcaaacaagaaggccaacccgaaactctcgactatagagtcttcttcgaggatacttcgggcaaaaagatttctccttggcacgatgttccattgcacttgggagatggtgtttttagcttcattgttgagatacccaaagaatcaagtgctaaaatggaggttgctactgatgaactttacactcccattaaacaggatacaaaaaagggcaagcttcgatattacccctataatataaattggaattatggattgcttccacaaacatgggaagacccatctttggcaaactctgaagttgaaggagcatttggtgataacgaccctgttgatgtcgttgagatcggtgaatcccggaggaaaatcggtgacattttccaggttaagcccctggctgctttagctatgattgatgaaggggaacttgactggaaaatggttgccatttcattagatgatccaagggcttctcttgtaaatgacattgacgacgtcgagaaacacttcccggggactctcactgctgtcagggattggtttagggactacaagatccctgatgggaaaccagccaacaaatttggcctcggcaacaaggcagcaaacaaggattatgctcttaaggttattacagagaccaacgagtcttgggctaaacttgtcaaaagatcaattcccgccggagagctttcgcttgtatgaatgctaccagaagcattagagcagcaatgctttcgatttcaaataatcatccgagtttttccccctttcgggtcctgataatagtacgaattgataccaatgcacttgtttctgcttattatttgagtaaattagtgaactccttgaacttggatagtatttcatgttcatatggttgctctggtgtggattaataagaaaaggcgtacatgggaatgactttcctctgcttttttttttttttttataaatatataaatatataatattataacataagacaatacacgaaacactcaatttcatggtccatatccaagtaaccaacac

SEQ ID NO: 3606 - DNA, 415 bp, Gossypium hirsutum
  Clone ID: GOSHI-09MAY01-C6151_1
cccacgcgtccgaaatcaaacacctttgaaatagatttgataaaagtcttgctttttttcttttcacaggtgaaagttcattagaaaatgaagaacaataacagcaatactaagctaatcctccttcatccttatatccaaaaacaaggagcgtccgccatatgatggctgctcgctttcatttccttcttcaccatagcttttcttctcactcttgtatacacccgagagtcgattactggtaaaccaactgccgccgggatcatagccgcgacagggggtggtgttgctggtgcaccaccattgtcgaccaccgtttatacacccatctccattatacttcgatatctaacaacagctgcctcatgtaatattccgagctgtagacgaagtccatgtgctccagaaatgcttc

SEQ ID NO: 3607 - DNA, 681 bp, Gossypium hirsutum
  Clone ID: GOSHI-09MAY01-C6171_2
gcgttcgccccgcgtccgcccctccaagagagcagcagcagtcgcggcggcggcagttctccccagggtctggtttctaaacaaccatcaaacagaaatgaagttcaatattgcaaatccgactactggctgccagaagaagctggaaattgacgatgaccagaaactccgagccttctttgacaagaggatctcccaagaagtcagtggtgatgcccttggcgaggagtttaagggctatgtgttcaagataatgggaggctgtgacaagcaaggttttccaatgaagcaaggagttctgactccaggccgtgttcgtcttttgcttcacagaggtactccctgcttccgtgggtatggtaggagaaatggagagcgaaggaggaagtcagttcgcggatgcattgttagtcaagatctttcagttctgaacttggttattgttaagaagggtgaaaatgatcttcctggattgaccgacactgagaagccaagaatgaggggtccaaagagagcttcgaaaatccggaagttgttcaacctctctaaggaagatgatgttcggaaatatgttaatacatatcgccgaacctttacaaccaaatctggtaaaaaagtaagcaaggctcccaaaattcagaggttggtgactccgttgaccttgcagaggaagcgtggcag

SEQ ID NO: 3608 - DNA, 977 bp, Gossypium hirsutum
  Clone ID: GOSHI-09MAY01-C6171_1
cccacgcgtccgcccaccctcaaggcttaaagctagcaagagcagagctgcggcatttcttcctcagaagacccgtcaaacagaaatgaagttcaacattgcaaatccgactactggttgccaaaaaaagctggaaattgatgatgaccagaaacttcgagccttttttgacaagaggatctcacaggaagtcagtggtgatgccctcggtgaggagtttaagggctatgtattcaagatcatgggaggctgtgataaacaaggttttccaatgaagcaaggagttctcactcctgggcgtgttcgtcttttgcttcacagaggtactccctgcttccgtgggtatggtaggagaaatggagagcgcaggaggaagtcagttcgcggatgcattgttagtcaggatctttcagttttgaacttggttattgtgaaaaagggtgaaaatgatcttcctggactgactgacactgagaagccaagaatgaggggtccaaagagagcatcaaaaatcaggaagttgttcaacctgtctaaggaggatgatgttcggaagtatgttaatacttatcgccgaacctttacaaccaaatccggtaagaaagtcagcaaggctcccaaaattcagaggttggtgactcctttgaccctgcagaggaagcgtggcagaattgcagagaagaagaagagagttgcaaaggccaaggctgatgctgctgagtaccagaagctgcttgcccagaggttgaaggagcagcgtgagcgcaggagtgagagcttagccaagaagagatccaggctctctgctgcttctaagccttccattgcagcttaactgtggtttgggcattttggtcagtagttgaatgtttgattctgaaacccgttttatattgtcgaggtcattttgattattccaatttctagagtctgccgatggtttttggggtattgttttttagtggatagtttacatg

SEQ ID NO: 3609 - DNA, 636 bp, Gossypium hirsutum
  unsure (1)..(636): unsure at all n locations
  Clone ID: LIB3543-064-Q6-K6-G1
cccacgcgtccgcttcctcaggaggacccatgcagacgaggaaatgaaggtttttntctttttctttntgaactaaatataaatagatttcaatccttttttggggtttgtttattcttttcgttttgctgattttttttctttttttttctcagttcaacattgcaaatccgactactggttgccaaaaaaagctggaaattgatgatgaccagaaacttcgagccttttttgacaagaggatctcacaggaagtcagtggtgatgccctcggtgaggagtttaagggctatgtattcaagatcatgggaggctgtgataaacaaggttttccaatgaagcaaggagttctcactcctgggcgtgttcgtcttttgcttcacagaggtactccctgcttccgtgggtatggtaggagaaatggagagcgtaggaggaagtcagttcgcggatgcattgttagtcaggatctttcagttttgaacttggttattgtgaaaaagggtgaaaatgatcttcctggactgactgacactgagaagccaagaatgaggggtccaaagagagcatcaaaaatcaggaagttgttcaacctgtctaaggaggatgatgtttcggagtatgttaatacttatc

SEQ ID NO: 3610 - DNA, 375 bp, Gossypium hirsutum
  Clone ID: LIB3166-017-P1-K1-H2
gaaaaaagtagaccggcggcagtcctcccccctttctgtgttgtagccaacaagaacacccggcacacaaaatgaagttcaacattgcaaacccaaccactggttgccaggagaagctggaaattgacgatgaccagaaactccgagccttttttgacaagaggatctcacaagaagtcagtggtgatgcccttggcgaggagtttaagggctacgtatttaagatcatgggaggctgtgacaagcaaggttttcctatgaaacaaggagttctcacacctggtcgtgttcgtctgttgcttcacagaggtactccttgcttccgtgggtatgggaggagaaatggagagcttagccaaagagagatccaggctg

SEQ ID NO: 3611 - DNA, 377 bp, Gossypium hirsutum
  unsure (1)..(377): unsure at all n locations
  Clone ID: LIB3083-102-Q1-L1-F11
ccgagctacagatcgactgcgcatttcttcctagaagagcataaacagaaatgaagttcacattgcaaatccgactactggtgcaaaaaaagctggaaattgatgatgaccagaaacttcagccttttttgacaagaggatctcacaggaagtcagggnatgccctcggtgaggagtttaagggctatgtattcaagacatgggaggctgtgataaacaaggttttcaatgaagcaaggagttctcactcctgggcgtgttcgtcttttgcttcacagagtactccctgcttccggggtatggtaggagaaatggagagcgtangaggaagtcagttcgcggatgcattgttagtcaagatctttcagttttgaact

SEQ ID NO: 3612 - DNA, 327 bp, Gossypium hirsutum
  Clone ID: LIB3584-002-P1-K1-G3
cccacgcgtccggctagcaagagcagagctgcggcatttcttcctcagaagacccatcaaagagaggtgaagttcaacattgcaaatcccactactggttgccaaaaaaagctggaaattgatgatgaccagaaacttcgagcctttttttgacaagaggatctcacaggaagtcagtggtgatgccctcggtgaggagtttaagggctatgtattcaagatcatgggaggctgatatcaacaaggttttccaatgaattaaggatatccttcactcctggccaatgttcatccttattgtttcgggggggggggggggccatgctt

SEQ ID NO: 3613 - DNA, 287 bp, Gossypium hirsutum
  Clone ID: LIB3149-035-Q1-K1-A6
gctgaataccaaaagctccttgcccaaaggttgaaggaacagcgtgagcgcaggagtgagagcttggccaagaagagatctaggctctctgctgcttctaagccatccattgcagcttaattgtaccacatacaaggattggtattttcttcggttttgaatgttgattctaaaatctcattataggttgaggtgattttgacttgacaatgcttttaagttttcatgacattatgttttggatgcttacctattcctctatttatttcatgaatttttttatattc

SEQ ID NO: 3614 - DNA, 215 bp, Gossypium hirsutum
  unsure (1)..(215): unsure at all n locations
  Clone ID: LIB3585-048-Q6-K1-C4
ccacgcgtccgagaaaattgaataatcaaaatgacctcgacaaataaaaaaatttcatcatcaaaaatcaggaagttggtcgaccggtctaatgaggatgatgttcggaactatnttaatacttatcgccgaacctttacaaccaaatccggtaagaaagtcagcaaggctcccaaaattcagaggttggtgactcctttcaccctgcataggaa

SEQ ID NO: 3615 - DNA, 423 bp, Gossypium hirsutum
  Clone ID: GOSHI-09MAY01-C6161_1
gaatctcctcttttcttggaaaaatattgcaatttttctcaaaacccaaaacaaaagagcaaagcccaatgtcacttgtctttcagaattagagagccaagtttataagcatggaagtcatctcatacaattcccctcgatgctgtaatttaaatcggagattaggtggtaaagaaaagttcaagtagacagcaagtaaagatccctttgtgtagaaaacacagaattttatgtactagagttcaatttagaagtgggtcactggttttacctaataaacatcacctgtttttgaagaatgtttatcatgggaaaggttcaaggccattcaaggctcttgaagggtttaacaatgttgatccaaaggtcttgagtgggaattataatggttatgtgggtggtagtgaagatgagatggggagg

SEQ ID NO: 3616 - DNA, 700 bp, Gossypium hirsutum
  Clone ID: GOSHI-09MAY01-C6101_3
tttttcgttgcttgattccatggggagcaaatggtggcatgtatttgaaggaggttgatcgtgttcttagaccaggtggttactgggtactttctggtccaccaatcaattggaggaacaattacaaagcatggcagcgtcccaaggaggagcttgaggaggaacagcaaaagattgaggatgttgccaaactcctttgctgggagaagaagcatgagaagggtgaaattgccatttggcaaaagagagtcaatgatgagtcttgtcgtggtagagaagatgattctcaagccaaattctgcaaggctgaagaggctaacgatgtctggtacaagaaaatggatgtgtgcgttactccataccctgatgttagtagttcgagtgaagttgctggtggggaattgaagccattcccagagaggctatttgctgtccctcctagaattgctagtggaagtgttcctggagtttcagttgagacatatgaagaggacaataacatatggaagaaacatgtcaatgcatataagaaaatcaatagacttattgactctgggaggtatcgtaatattttggatatgaatgctggattgggaggatttgctgcagctctcaactctcccaaattgtgggttatgaatgtgatgcctaccatagcagagaaagataccctgggtgtcatatatgagcgaggattaat

SEQ ID NO: 3617 - DNA, 918 bp, Gossypium hirsutum
  Clone ID: GOSHI-09MAY01-C6101_2
gctttctccacatacccaaggacgtatgatctcattcatgcacatggtctattcagtttgtacaaggacaagtaagtatacctagttaaatgtgcattccttttactttttatcattgtaatatatacaacaatttatgttgttcttttactagcactattgcattgatgggtgcaagtaggtaggtttacttttagatgtgtgcttcaattgtgtgaatacccctatgttaaacacgatcattacctattctttggtatgctcttaccattgctagagctacttggctttcgatttattacatctaggacttagatgtttaaatggaatgtttgcagatgtaatttggaagacattttattggagatggaccgaattctgcgtccagaaggtgcggttatattccgtgatgaagttgatgttctaattaaagtgaagaagataacagcaggaatgaggtgggacactaagatggtagaccatgaagacggtcccttggttcctgagaaagtattggttgcttgttagcaatattggaccgtttggggaaacacgacatctgcacagtatacagcagacggcgacaagcttaaaccgtgcatgaactgagtttgtggattatattcaattgatgaatttcccgcccgaaaatttttgccagcaggattgttttggtgggtcacaggattaggtgaactaaggatcaaactgtattcatttgtattaatttatgaacagatagctataaactatgcttccaaagtttaatgatgattgaattaatcttattttttgttttaaggtttgcatattcaaaacaaacaaacttgcaaaacaagctttttataaaaaccattgcaaaactggatactcttggaaaggattcatacaaggatagcacttttataatgcaacttt

SEQ ID NO: 3618 - DNA, 1209 bp, Gossypium hirsutum
  Clone ID: GOSHI-09MAY01-C6101_1
ggattagtagattgctgtgaaaaattgcctctgctttggcagtgtttaaagttcggacgccaatgaacatcacacctattcatgcatatcatagttcatattctaattgtgatagaaactgactcaatattgctaacaattaaagctggaacctgcaaatcacgtatcaggacttggatcctgcattttacttaatcatcttctcttgtgatgttggctaggtacaagaaaatggatgtgtgcgttactccataccctgatgttagtagttcgagtgaagttgctggtggggaattgaagccattcccagagaggctatttgctgtccctcctagaattgctagtggaagtgttcctggagtttcagttgagacatatgaagaggacaataacatatggaagaaacatgtcaatgcatataagaaaatcaatagacttattgactctgggaggtatcgtaatattttggatatgaatgctggattgggaggatctgctgcagctctcaactctcccaaattgtgggttatgaatgtgatgcctaccatagcagagaaagataccctgagtgtcatatatgagcgaggattaattggcatctatcatgactggtgtgaggctttctccacatacccaaggacgtatgatctcattcatgcacatggtctattcagtttgtacaaggacaaatgtaatttggaagacattttattggagatggaccgaattctgcgtccagaaggtgcggttatattccgtgatgaagttgatgttctaattaaagtgaagaagataacagcaggaatgaggtgggacactaagatggtagaccatgaagacggtcccttggttcctgagaaagtattggttgctgttaagcaatattggaccgttgggggaaacacgacatctgcacagtaaacagcagacggcgacaagcttaaaccgtggcatgaactgagtttgtggattatattcaattgatgaatttccagcctgaaaatttttgccagcaggattgttttggtgggtcacaggattaggtgaactaaggatcagtctgtattcatttgtattaatttatgaacagatagctataaactatgcttccaaagtttaatgatgattgaattaatcttattttttgttttccccaaccaaaacaaaaaccaaaacataaaatttctcttttaaaaaaaacaataaaaa

SEQ ID NO: 3619 - DNA, 314 bp, Gossypium hirsutum
  unsure (1)..(314): unsure at all n locations
  Clone ID: LIB3197-014-P1-M1-B10
gtggtttgggagggattctggtggagatggaccgaattcttcgtccagaaggtgcggttatattccgtgatgaagtagggggtgtggtgaggggaanangntnggtggngaatgaggtgggacactaagatggtagacttttttttttggggttgggtgcgtggggagtattggntgctgttaatcaatattggaccgctgggggaaatacgacatcggcacagtatacagcagacggcaaccccngggggggatggcatgaactgagtttgtggattatatgagtttgacatgaattgatgaatttccagcct

SEQ ID NO: 3620 - DNA, 1075 bp, Gossypium hirsutum
  Clone ID: GOSHI-09MAY01-C6131_1
aataaagctttaaaacaaatatcaaatatccccacctcacaaattccgattaaaaggcaaacacattcgcccaacacacgcacacgttcaagctccaccttcgaatctaccagagagaaaaaaaaggaaagaacttgattaaagttcataaagaaaaggctgtttttttcatctctaattcgtccaaatcaattgatttggagatgcaatccgttgttattaccccaacatactgttgcagcacccattatcaaaccctagaacgcttctcttctcgtcctaatccttccaagccatcatcaagcttatttggagctcgcgtctcggtcgcgaaagggcgtaatccgtcgcggcgttgctcatggcgttgtcttagggttcgattacctgctcttacgcgcaagctgattgtaaaggctgtggccactccaaattcagccgtggagttgccactgacagcgaagaacattgagagcgtcttggatgaagttcgaccatacctcattgcagatgggggaaatgtagcattacacgagattgatggtaatgttgtgcggttgaagctacaaggggcatgcggctcatgtccgagttcggttatgactatgaagatgggtattgagaaacgtttaatggaaaagatacctgaaattgttgcagtggagcctataactgatgaagaaactggccttgagctgaatgaagaaaatattgagaaggtacttgaagagattaggccctacctggtgggggcagcgggtggatctcttgaattagttgccattgaggagccaatagtgaaagttagaatcacgggtcctgcagcaggggtcatgactgttagagtggctgttactcaaaaattgcgagagaaaattcccaccatcgctgcggttcaacttctatgatttagattcaagaatttcgatcaacaaataatgcatttattgtcaggcatgtaaaacttgtatgaataatatgaattccatttcttggtgtatctatatctatactattctttttaacggtcttaccaacttagtggggaaattatccaaaaactatttcttttttc

SEQ ID NO: 3621 - DNA, 649 bp, Gossypium hirsutum
  Clone ID: LIB3825-021-Q1-K6-C10
cagccacaatcaccaaataaatacaaatgcagatagattccaggctaagcttgaaaaatagaaatccaatagaaacgaaaagtccacgaaaatttggaagtttagaaaggaaagagtgattaatcacaaatctatttcattattgattactatatattttgtaaaattcagaaaggaaagagatgcaggccatagttattagccctacatattgctgcaacgcccatcaatccccagaaccctcctcttctcgtcccctaactaccaagccctctagcttctttggcatccgcgtcttgctcgcgaaagggcgtaatcccgcgcggcgttgctcatggcgttgtgtgcgggtccgatcacctgctctcacgcgcaggaaagttgtaaaggctgttgccacacctgattcagccttagaattgcccctaactgctgagaatgttgagagcgtgttggatgaagttcgaccctatctgattgctgatggggggaatgtggcattacatgagattgatggtaatgttgtgcggttgaagctccaaggagcatgtggctcatgtccgagttctgttacgacaatgaagatgggtattgagaaacgtttaatggaaaagatcctgaaattgttgcagtggagcctataactgat

SEQ ID NO: 3622 - DNA, 493 bp, Gossypium hirsutum
  Clone ID: LIB3585-048-Q6-K1-G1
gaccacgcgtccgatcacccgtccacaaacccttattagtaatccaaacacattttcttactcactcacacgttcaatctctgcctggcaatctactatagataaaaaaaagcaaacaacttcattaaacatcataaataaaaggctgtttttttcatctctaattcgaccaaatcaatttatttgaagatgcaatcctatattattaccccaacatacttatgcagcacccattatcaaaccctaaaacgcttctcttcttgtcctaatccttccaagccatcatcaagcttattttgagctcgcgtctctttctctaaatgtcataatccttcttggcgtggctcatgtctttatcttatctctctattacctgcttttacacgcatgtttattttaaattctttggccacattcaaatatcaccgtgtatttgccactgacatcttataactatttatagcttctttttttaaacttaacaattacctca

SEQ ID NO: 3623 - DNA, 1244 bp, Gossypium hirsutum
  Clone ID: GOSHI-09MAY01-C6081_2
cgtggttatagatagggagcaaggcgggagggaaacgctggaggagaatgggattaaacttcatgcactttttactttaactgagatggtcaaggttttaagagctaaagggaagctggaggaagagatgggaagtttggttatgaagtttttggaggagaataagaaagtacccgtgcctaaggttgagaaagtgaggattaagtgtctggggtatcaagaaagggctaagatttctaagaatccaactgggaaaaagctgtttgagattatggttaagaaagagagtaatctctgtttggcggctgatgttgccactgctgctgagttgcttgatattgctgagaaggttggacctgaaatttgcctattgaagacccatgttgacatattccctgatttcactccagagttcggatctaagcttcgcgcgattgcagaaaaacataacttcatgatatttgaagaccgtaaatttgcagacatcggtaacacagtaacaatgcagtatgaagggggtatcttccgtattttggaatgggctgatattgttaatgctcatataatctctggtcctggaattgttgatggtttgaaattgaagggtctgcctcgtggtagggggctgttgctacttgctgaaatgagctctgctggtaaccttgccacgggggactacacagctgctgccgtaaaaattgccgaacaacactccgattttgtcatcggtttcatctcagtcaaccccgcatcttggcccggtgcacctgtaaatccagcattcattcaggcaacccctggagttcaaatggtaaagggtggcgacgccctcggccagcaatacaacaccccgtattcagtcatctttgataggggtagcgacataataatcgttggtcggggaatcattaaggcagcgaacccagcggaggcagctcgtgagtaccgtcttcaaggatgggaagcatacatggctaaatgcacttaagagggtatcttatcttttaagtatgttacgtccctaataacataagagccaaattttgttgaatctatctatgattttgcatcattggcttgttatatttgtaatacttgttgagggagatctctgggatcccattactgttttcatccttgtttgctgagggctatatatatgcaatttcttctatgtttttttcaataaattttggtaaatctgtcttaggtttgggttatatatatatataataaggttaatt

SEQ ID NO: 3624 - DNA, 1057 bp, Gossypium hirsutum
  Clone ID: GOSHI-09MAY01-C6081_1
cttcacctttgcccccactcctccactgactttcaccaccaccgtcactagcggcgccgtcacaaaatgtcgtcaacggagtctctcatcctccaactccatgaaatctctgccgttaaattcggtaacttcaagctgaaatctgggatcttctcccctatctacatagacctccgtctcatcgtctcttacccttccctcctccaccaaatctcccactccctcctctcctctctccctccccaaacacactttaacctcatatgcggtgtcccttacactgccctccctatagccacctccatctctctcgacacctccatccccatgctcatgcgccgcaaagaagtgaaagactacggaactgccaagtccatcgaaggtgtttacgaaaagggtcaagcttgtttggtggtggaagacctcgtaacgtccggtgcatcggttctcgaaacggcggcaccgcttcggtctttgggtatcaacgtaacggatgccgtcgtggttatagatagggagcaaggcgggagggaaacgctggaggagaatgggattaaacttcatgcactttttactttaactgagatggtcaaggttttaagagctaaagggaagctggaggaagagatggaaagtttggttatgaagtttttggaggagaataagaaagtacccgtgcctaaggttgagaaagtgaggattaagtgtctggggtatctagacaggcctaagatgtctacgaatccaactgggaaaaagctggttgagattatggttaagaaagagagtaatctttggagtttgatatgttgaagttgtgctgaattgttgtattcgttataagttgattttaatttgtctatagaatacattttggataatactggatccctcatgattatatatagtgtgtagtatgtgaaaatacttaatatatttaaactttgtttgaatatgtatattttactgatcgaagggatattaaatatatggtgaatgatctgtttaataggtagtattgaatatatatagatttatgatagtttctataatatgg

SEQ ID NO: 3625 - DNA, 420 bp, Gossypium hirsutum
  Clone ID: uC-gsflnu33B130f12b1
tggtctcgaaacggcggcaccgcttcggtctttgggtatcaacgtaacggatgccatcgtggttatagatagggagcaaggcgggagggaaacgttggaggagaatgggattaaacttcatgcactttttactttaactgagatggtcaaggttttaagagccaaagggaagctggaggaagagatggaaagtttgattatcaagcttaacatccacattttgacagttggcgtaattacgaataggcccgtaccgatcgcccgtttggggtttgaagaaaggtttattatttttaagaatctctctggtaaaaagctatttgagattattggtttaaaagataagtattctttgttggtgggtgatgttgccactgcttctgaattgcttgctattgctttagaaggtttgacccttaa

SEQ ID NO: 3626 - DNA, 948 bp, Gossypium hirsutum
  Clone ID: GOSHI-09MAY01-C6051_1
aaggaatcgaaatccaaagccaaaaaccttcttccaagtgttccttcgtacaccgccaaatgtacaccttcagctaccactcaatttcgccaataaacaacaatcctttcaaatgccaaaggtactagcatcattactcgatctcgtaaccctagaccgaaccgaaagagacgatggcgaagcataccgccgttggctggggtcatcaccactaccatcacttacagaaccgttggcttttggctcttctcttaatgctttcggtttcgacggtgatcgcttttttcatgagaagcgctttcgattcgtgtgatcggactgtttcaggtgctgttgatggtattggttcgtctcggcatgttattcaagtcgctgagaagcgcaccgcgccgatcgcggctgtgaagccgagtccgcttagctttatgaagtccacgcgtccgctgctggtttcgcacgagctctcgctttctggtggaccattgttgcggatggagctggcattcctattaagaagtgttggtgctgaagtttattggatgacaattatgaaaccatctgaaacagatgaagtaacatatagtttagaacataagatgttggacagaggagtacaggttatctcagctaaggggaaagaagctttagatactgctctaagagctgatttggttgttttgaacactgcatttgctgggaaatggctggatgttgttcttaagggagatgttcatcgtgttctgcctaaggtgttgtggtggatccatgaaatgcgtggccattactttaaattagactatgtaaagcattcttctcttttgtatctggtgcctatgattgattcccatgttacaacagaatactggaagaatagtactaaagaacgtttgaagtttaaaatgtccgtatccctatgtttgtttacttttgaaattgtaagtgtacttt

SEQ ID NO: 3627 - DNA, 625 bp, Gossypium hirsutum
  Clone ID: LIB3829-012-Q6-K6-G10
cggtccggccctcccggtcgacccagcgtttgccccacccttgcagaacgctggctcttggctcttctcctcatgctcactgtttcaacggttattgccttcttcatgagagccgccttcgattcgtgcgatcggaatgtttctgttgataatgttatcagctcagctcgggattccgtccaagtcgccgataagcgagccccgcagatcgctgctgcaaagccgagtccactcagtttcatgaagtccaagattgttctactggtgtcgcacgagctctcgctttctggtggaccattgttgttgatggagctagcatttctattaagaagtgttggtgctgaagttaattgggttacatttatgaaaccatctgaaactgatgaagtaatatatagtttagaacataagatgttggacagaggagtgcaggttttctccgcgtttggaaaagaagctatagatactgctctaagagctgatttggttgttttgaacacagcggttgctgggaaatgggtagattatgttcttaaggaagatattcaccgtgttctgcctaaggtgttgtggtggatccatgaaatgcgaggccattacttcaaattagagtatgtaaagcatc

SEQ ID NO: 3628 - DNA, 705 bp, Gossypium hirsutum
  Clone ID: GOSHI-09MAY01-C6071_1
ataaattcttctttataaatatttgtttatgaacgttttgttaaattcgcttttaaaaatttctgtttttagagatattataacaagaacaatcataattattgtataaatttgaattgttttggtttgatcggacgatggaggatttttcgagcagcgacgaggattattactattcgtccgatcgagattcccttgacggtttcgagaatgacgagtccgattctcagtgggtcacttccaagagtcccactacaaaggttattacaaaagaatcacttttagctgcacagagggaggatttaaggagagtaatggacatgttatctataagggaacaccatgctcgaactttactaatccattaccgatgggatgttgagaaattgcttgctgtgctcgtggagaatggaaaatcgtacttgttcgcctcggcagtgtgtttctgttgttgagggtgagcatacaggagcgtctctattgtcgttgtcatctacacccatgtgtgagatatgcattgaggagttaccggttgataagatgacgaaaatggaatgcgggcacgggttttgcaatgactgttggacggaacatttcgttgtgaaaataaatgaaggacaaagtatgcgaattatgtgcatggcgcacaaatgcaatgctgatagtgatgaatctgttgtgagaaatctagtctgtaaaacgcat

SEQ ID NO: 3629 - DNA, 835 bp, Gossypium hirsutum
  Clone ID: GOSHI-09MAY01-C6061_1
cccacgcgtccgggatatgcttgccaagaagaagatgagtttagacaattgcaggtatttgacattggatgaagcagatagactagtggatttaggctttgaagatgacattagagaagtgtttgaccattttaaggctcaaaggcaaacccttttgttctctgctaccatgcctaccaaaattcagaacttcgccagaagtgctttagtaaagccagtgactgttaatgttgggagagctggagctgcaaatcttgatgtgattcaggaggtcgagtatgtgaagcaagaagcaaagatagtctacctccttgaatgcctgcaaaagactcctccacctgttttaatattttgtgagaataaggccgacgtggatgacatccatgaatatctcctgctgaaaggagttgaagctgtggcaattcatggagggaaggaccaagaagagagagagcacgccatttcatcctttaaagctggcaagaaggatgtgttagttgcaactgatgttgcttctaaaggtttggattttcctgatattcaacacgtgatcaattatgatatgcctgcagaaattgaaaactatgtccacagaataggacgaacaggaagatgtggtaaaacgggaattgcaaccacatttataaacaagaatcaaagtgagacaaccctgcttgatttgaaacacctattgcaagaagccaaacagaggatcccgcccgtcttactgagctcagtgatccaatggaagatgtggatgcaatcaccaatgcaagtggcgtaagggtgtgcttattgtggtggattgggccatcgtatccgagattgccccaat

SEQ ID NO: 3630 - DNA, 479 bp, Gossypium hirsutum
  Clone ID: GOSHI-09MAY01-C6001_2
cgcggaagaacccccgcgacgcgcgccgccggccgccccgtccaaccaaccctgagttgcctatccccgataatgccctcttttgcgcggcgcgtaggcaaattacaaaggccgcaggatgtatcatcgccattggcaacatcaatcatagagggtagatcaaaactgttctttacggtgctgatgattgcctcgacccttttcctcatttcccgctaggtgcttttctttcgggatggtctgtgcttgtccgaacacatgcttcacacgtaaggtttgtgtttgtatgtttaggcgtgcgggtgtagtgttgctgatatgaatctttggtgattttgataagttctattaggccctgtgtttatttgggcattttaagggtattggttcagaatgttgttaatgcattgcatcaagggttccttgcttaatttattgggagcataccattcttggatattgttttcaaaaaacgacaa

SEQ ID NO: 3631 - DNA, 1635 bp, Gossypium hirsutum
  Clone ID: GOSHI-09MAY01-C6001_1
tttagattggggattggtccacccgaaatcacacggctttgaaaaaggcacttgatgccggaaaaggtttagggatgccaaatggagttcttattaatggcaaaggcccttaccgatataatgatactcttgtacctgatggcatcgagtatgaaacgattaacgtccatccagggaaaacttatcgccttcgagttcacaacgtgggaatatcgacctccttgaatttcaggattcagagccataatttacttcttgcggagagtgagggatcatatacggtgcagcagaactacactagcttagacatacatgtagggcagtcatattcgtttctgctaaccacggatcagaatgcaagtagcgattactacattgtagcaagtgccaggtttgtgaatgaatcgcagtggaaacgagttaccggtgttgccattttgcgttattctaattcgaaaggaaaggcatccggtcccctccctgatccaccgcaggatgaattcgacaaaaccttttcaatgaaccaagctagatctatcagatggaatgtatctgccagtggtgctcgcccgaacccacagggatcgtttagatatggttcgattaatgtgactgaagtttacgtcttgagaaacaaaccaccagagactattgatgggaaaagacgagcgacactcagtgggatatcctttgtcaatcctgctacaccaatccggcttgttgaccagtataagattaaaggagtatataagcttgattttcccaataaaccacttacagggccacctaaaatggaaacatctgttattaatgggacttataggggatttatggaagtcattctacagaacaatgacactaagatgcatacttatcacatgagtggatatgcatttttcgttgtcggaatggattacggtgagtggtcggagaatagcaggggcacatataataagtgggacgggattgcccgctccacaacacaggtttatcctggtgcatggactgcaatcttgatatcacttgacaacgtcggagtctggaaccttagaactgaaaacctcgactcatggtatcttggtcaagaaacatatgtcagggttgtcaatcccgaggctacaaacaaaactgagttgcctatgcccgataatgccctcttttgcggtgccctaagcaaattacaaaagccgcaggatgtatcatcgtcattggcaacatcaatcatagagggtagatcaaaactgttctttacggtgctgatgattgcctcgacccttttcctcatttcccgctaggtgcttttctttcggggtggtctgtgcttgtccgaacacatgcttcacacgtaaggtttgtgtttgtatgtttaggcgtgcgggtgtagtgttgttgatatgaatctttggtgattttgataagttctattaatttttttttccttttttgggttttggttcagaatgttgttaatgcattgcatcaagggtttccttgtttaatttattgggagcataccattcttttagtacctataatttatgtactgatgacaatgcatcaaatttaacctcatttctctcgggggaaggagaagagaggagaacaaggggagcaagggaatttctgcggccgccg

SEQ ID NO: 3632 - DNA, 462 bp, Gossypium hirsutum
  unsure (1)..(462): unsure at all n locations
  Clone ID: LIB3583-060-P1-K1-C6
gcgcccacgcgtccgcccacgcgtccgcccacgcgtncgcccacgcgtccgaccggtgttgccattttgcgtggttctagttccaaaggaaaggcagctggtcccctccctgatccgccgcaggatgaatatgacaaaaccttttcaatgaaccaagcaagatctatcagatggaatgtatctgccagtggtgctcgccctaacccacagggatcatttagatatggttcaatcaatgtgactgaaatttttgtgctaaaaaacaagccaccggtaactattgatgggaaaagacgaacaactctcagtgggatatcgtttgtcaatcctgctacacctatccggcttgctgaccagttcaaggttaagggagtatataagcttgattttccaagtagaccacttacagggccacctaaaatggagacaatcgtaatcaatggaacatttatgggatttatg

SEQ ID NO: 3633 - DNA, 893 bp, Gossypium hirsutum
  Clone ID: GOSHI-09MAY01-C6391_1
agcatctctccaattcccatggcaaccctatcctcttctccatctccctccattctctcttcctccaccgccaatcctaaaaccccttatctgaaaccgccgctcctcttcttccccaagcctctaaccaccgctctaaccaccgctttagccaccaccaccttactcctaacctcccctccctcctccattgcctctgattcatacaacgtctactacggaaccgccgccagtgccgccaactacggaggctacggtggaaactccgacaagaaagcctccgccgagtacgtctatgatgtccccgacggatggaaagagcgtttagtttccaaagttgaaaagggcaccaacgggacggacagcgaattctacaaccccaagaaaagacaagagaaagagtacttaacattcttggctgggttcaggcaattagcccccaaagacgtgattttgaacaacttggcattatcagacgtggagttgcaggatttgattgccggggccgacagcttggtctccgaggagaagaaagacgaaaatggacagctttattatgtgtacgagattgatggaattggtaagcatagtttgattgcaatcacttgcgccaagaacaagcctttatgctcatttttgttcattgcaccgggcgcctgagttggaaacgcgaatgaggacacctttaaggcacattcctttaatcccttcaaaaactgtgggatcatccgtaatccactcgtctttaattctttttgagcccttcctttctcttcccctccttctctgtttcttttaaagtaatgtttgaagcaatgctattttttttattagcaaagctattttaatctttttataaaaaaaaaaaaaaaaattcttcggcgccccgcggt

SEQ ID NO: 3634 - DNA, 343 bp, Gossypium hirsutum
  Clone ID: LIB3165-004-P1-K1-A10
attcccatggcaaccctaacctcttctccatctccctccattctctgttcctgggccgcctatcctaaaaccccttatctgaagccgccgctcctcttcttccccaagcctcttaccaccgctctaaccaccgctttagccaccaccacctttctctccctccctctccttctccgtctctttttatatatatgtatgaggcaatgccatttttatatataagcaaagccattttactctttttatatatatattttgtttgttgctctaaaaccaaaaaaagagcaaagataacaaagaaaaaaaaagacaaaaaaaaggttggcctcaagtggagcaaaat

SEQ ID NO: 3635 - DNA, 607 bp, Gossypium hirsutum
  Clone ID: GOSHI-09MAY01-C6351_1
cggaccagccaacttaagaggggacctaaattggttaggcccaagggcttttgcaaaaaaaatggtttaagctgggtccggggtgctggtagcttaatggatgaccagaaccttaactgaaaacattccgggatggggaactttgttcaatgcccgtccaggcgatggaaccgtcagtgttcttgtggcaacttttttgttcgtaattcccaacaagaagcgaaagggagagaaattgatggactggaacgaatgcaagaagctgccatggaacattattttgttactaggggctggtttcgccatagccgacggagtccagtcaagcggactcgctgatcaattatccaaaactctagattttctcgaagaggctccgtatttagctattgcccccgcggtgtgtttaatctgtgccataattaccgagtttataacatcaaatgatgctactgctacccttgtgcttccacttttgattcaaatggcaaaaaccatgcatgttcacccattactccttatggtccctggagcagtgggatcacaatttgcttttattcttgcgacggcaacaccttcgaatatcattggattcgcgacgggcata

SEQ ID NO: 3636 - DNA, 814 bp, Gossypium hirsutum
  Clone ID: GOSHI-09MAY01-C6341_1
aaacggaggaactcactaaacttaacaaacagttgaatccttatcccattcactgagtctcaacaccgagtcatcatcactcatggctatcgaggcttggtttatggatgaaagcaaagaagaccaaaggcttcctcatcgacgcaaccccaacgaacctgtttcgttggagcacttggcagagctgggagtgttgtattggcatttgaaccccaaggattacgagaacgatgaagagttgaagaagattagagaagccagaggttataattacatggatttgcttgatttatgccctgagaaagttgacaactatgaggagaaactgaggaacttttacaccgagcacatccatgctgacgaagagatacgctactgcctggaaggcagtgggtattttgatgttagggacaaggatgaccgatggattcggatttggatcaaaggaggagatcttattatattgcctgctggaatctaccatcggttcactctcgacaccagcaactatgtcaagttgatgaggttgtttttgggagaaccggtttggacagcgtataatcggccccaggaggaccaccctgcaaggaaagagtacattaaaagcttgactgagaaagttggggtgccattagctgctcattagagcctatttgttacatgaagttcccccctatatatatgcgtgcatgtatgtatgtacacgtattagtttcataagtttctcaaaggctgaacttgataaaacattatgcatctgtatatcaaaacactgaattgcatctattaatgtataaatttcatgttatttagg

SEQ ID NO: 3637 - DNA, 599 bp, Gossypium hirsutum
  Clone ID: GOSHI-09MAY01-C6301_1
cggacgcgtgggtgcaaaacttcatgctcagggtctccccaaaaaattgaaaaaaaaaaaccccaccttttttcctttcaatttgcacaacacaagcgcgcatcgtatcgacatctaaaactcaaaagagtctgtcatttcccttacttcctcaaaccagaagccatggccagcatgataatggcttcctcaaagcctgtaatctccattgctgcttcatcatccttcttttccaaacccaaactcaaacaaatcccacaactttccctcccaaaactccccaccccaaagttcttgaaaacccaacaaatcccctcactctcctccaccactctcaaatctatctccctcttcacagtcaccactttatcctttgccccaccttctcttgctgcagaaatagaaaaggccgctcttttcgatttcaacttaaccctccccatcatgatggtccagttcttgttcctcatgtttgctcttgacaaggtctactttaccccactcgggaaattcatggatgagagagatgctgccataaaggagaaacttgccagtgtgaaggacacgtctgaggaagtgaagcaacttgaagaacaagc

SEQ ID NO: 3638 - DNA, 509 bp, Gossypium hirsutum
  Clone ID: GOSHI-09MAY01-C6241_1
cccacgcgtccgagccactcaaaagttaaaaaaccttctgttttgttagcgtagcaaatagcaatacaaccatggctttggctcccaccacttatccctcctatctctgctctaacacttgctcacccttacacagagccactcaacctctcctttcttcaaccaggcatgtaggagttagattcaacagcaagtgttcagcgtctttctgcagtggcaaggagcagctaaagccatggattttggtagcgaaagcatcggaaggtgagtcccaaaccacagagcaggaagagcagcagtacgaggagtatgaggtagagattgagcagccttatgggctcaaattcagaaaaggcagagatggtgggacttacattgatgctattcagcctggtggagctgctgacaaggctggggttttcaccgttggggacaaagtacttgccaccagtgcagtgtttggaacagaaatattgccggccgccgaatatgggaggacaatgtacacc

SEQ ID NO: 3639 - DNA, 486 bp, Gossypium hirsutum
  Clone ID: GOSHI-09MAY01-C6261_1
cgtcggaaaaaaccgggcggaccaacgcgtccgcccacgcgtccgcccacgcgtccgtttggctactttgtctaggtttgttgtcagagagggcaattttcataaacatcatgccgtgtgcagaacatcatcgtctttggttccttccagaacgctacggagagctcatctggatgttagagctggcatttctttgcctgagaatggaaaaggttttgcaattcaacgtaagccaagtggtccccttgtttctcttgcagctcctgcctcgataactcctgcttcaaggggtccccaagttatctgcaatgctgctgccaatgtatccggagatattcctacaccaagtgggatgagcaagtatgagagaataattgaaactttgacaactcttttccctgtgtgggttattttgggaactattatcggcatatacaagccagctgcggtaacatggtttgagacagatcttttcactggtggact

SEQ ID NO: 3640 - DNA, 590 bp, Gossypium hirsutum
  Clone ID: GOSHI-09MAY01-C6231_1
cccacgcgtccgtaacttctttgctttctttgtattagcagcttgtgtagggggaaaaaattatgaagagggtttcctttgttgccttgtgtgtggtggcactcgcggtggtgctgttttcgggtgaaagtcgcacggcggaggcagtgacatgtaatcccgtggagcttgccccctgctcgccggcgcttacgtcgtcctcgcctccatcaagcgcttgttgcagcaagctgaaggcgcagcagccatgcctctgtggatacattaagaacccatctcttaaacagtatgtcaacagtcctaacgctaaaaaggttgcttcgacttgtggagtcccatatcctaagtgttaaatgttgcttaatggtgtatctactatctactggcagcaaataagtgattctttttgctgtcaagtactgttctgaataaaagaataatgataaaatattagattaaattaaggcaatattttacttatgttggaagaaatgataaattagtatggcttacagcttctccattgtgaaaatgttcctatatataaaaagattactataaaatactcaatgaactcacaatttctttag

SEQ ID NO: 3641 - DNA, 424 bp, Gossypium hirsutum
  Clone ID: GOSHI-09MAY01-C7981_1
gtctatatctctagctgcctctctagttgactctaccttacaaactcttcctcacctggttgcccactcatctcgtctctgccgcgtatcgaccccgcattttattttatttatctcaatgggtttttctgatattattttcatggataaattatcttaattagtttccttctaatatcattcagctaatctggaagcagattttgggggttaagagattttatctacagagaagatggtgacatctgagcaagaacatgattttgttaagtggggtttgcaactattcaatagtgatccctatgctaattgtggatattgtggtgtgttaactcaagaaaatggagagtattacaatggaaatagtttcaaggaggattaccattacgacgcgggagaatgttgtaatgtggaaaatgatgag

SEQ ID NO: 3642 - DNA, 345 bp, Gossypium hirsutum
  Clone ID: LIB3189-037-P1-K1-E10
ctgggaaatacaattccagtcagaaagaagagcaataccctacaaaatactgctacaggctacgagtgaagaagaatgaagatgccgtagccgtcacgtaacgttgactgttagtctccaccactatcacctgacggaagcaaagtaatagtaccattagtacaataccacgtgaactgaccctccttcctgaagcagattttgggggttaagagattttatctacagagaggatggtgacatctgagcaagaacacgattttgttaagtggggtttgcaactattcaatagtgatccctatgctaattggggatattgcggagtgttaactcaagaaatggaga

SEQ ID NO: 3643 - DNA, 459 bp, Gossypium hirsutum
  Clone ID: GOSHI-09MAY01-C7881_1
cttcgtttccgagagaagctcaaggctgactataaatcttatctattgctatggctactgaacaatgtgtgcgccctgttgaaaaaaccctacacgaagggaaacatgaacaccatccgagcagtggccaaactcaggttcataaggagagtaagggtgtgaatcaatcacatgggcacaaccaactgagtcatgacacacccaaaacacatgccgagtccaagaccgtgagccatggtgtccatgctcagcaacatgtggctcaaagcacggccatgcctacaacttgccatggaaagaaggaaaagaagatgaaagacacgaaggagaaagacacggacaggaaggaaaagaaagaaaagaaggaaaagaagaccgagagcatgatgaagcctgggacggagaagagtaagcacaagatgagcaaagacgacagcagcagtgacagcgactaaagag

SEQ ID NO: 3644 - DNA, 490 bp, Gossypium hirsutum
  Clone ID: GOSHI-09MAY01-C7871_1
ccacgcgtccgcccttttctacattcaagtgcgcgtgtttttttttccttcgtacaatgccacagggcaatttagaaacccttgtttccgcctgtgccggcggctcttgcgacaacaaaatcatttgcgagactttagcaaccagcgaaagtgattccgacgaccacctccacccggcggagaaacatattgaagaagaaatcccatcggatttcccgccagaatcgttttggttatccaaagacgccgagttcgactggttcgatcgtaacgctttttacgaacggaaagattcgcataaaggaaattcaggtcccaactctgcaaacctcaaccctaatcttaactcgatctccaattctcaacgcttttctctgagaaagcctaaagcttccatcatcggcttaccgaaaccgcagaagtcttgctttgtcgaaacgaagaacaggaaacctgggaacactagattgtttcctaaacggcctggctc

SEQ ID NO: 3645 - DNA, 565 bp, Gossypium hirsutum
  unsure (1)..(565): unsure at all n locations
  Clone ID: LIB3828-032-Q6-K6-G10
tgnttcccgnccacacaacgaagtggggggaacggggccacccaacaatcatttagcttctgctttcttccatcttctctaccttcaatccattgttttaagaggaaactgggagggggatttcagataaaactctctctcgccttctatacataagcgtttagaggtaattgcgggcgggggacagtggaagaaatccaactgctgttctgctaaggttgattgatggtcattatggatttaaaaggtataacttgggttggtcatgtatatcagaaatttgaagccatgtgcctagaggcagaagaaattatgtaccaggacacagttaaatatgtggaggatcaggtgcagactgtaggtgctagtgtcaaaaggttctactcagatgtaatgcaggatgtgatgcaggatttgcttctcccatcttcattggagcctgtgaaagcagtggctgcctctgacacggcaatagagaaaaatgttgggacattcaaaaagcctcaggtaggtttaaaggtggctgctgtgaaggatgagggtgagcagttaattgaagattcag

SEQ ID NO: 3646 - DNA, 423 bp, Gossypium hirsutum
  unsure (1)..(423): unsure at all n locations
  Clone ID: LIB3165-021-P1-K1-G4
cccacgcgttcgnccacgcgttcgaaaatattttgttttgggtgttnatgattcccgaccacacaacgaaatccatttaactttcccacccagcaatcatttagcttctgctntcttccatcttctctaccttcaatccattgttttaagaggaaactggaagggggatttcagataaaactctctctcgccttctatacgacacagttaaatatgtggaggatcaggtgcagactgtatgtgctagtgtcaaaaggttctactcagatgtaatgcaggatgtgatgcaagatttgcttctcccatcttcattggagcctgtgaaagcagtggctgcctctgacacggcaatagagaaaaatgttgggacattcaaaaagcctcaagtaggtataaaggtggctgctgtgaacgatgaaggtg

SEQ ID NO: 3647 - DNA, 725 bp, Gossypium hirsutum
  Clone ID: GOSHI-09MAY01-C7571_2
attcccccccgcctccccccattgactcattgctatctctctttccctctctctaatgacgcttagctctggaggatcgagtgtcgtggtgcctcggaacttccgattgctggaggagcttgagcgtggagaaaaaggtatcggagatggtactgtcagctatggaatggatgacggagatgatatttacatgcgctcttggaccggcaccattattggtcctctcaataccgtacatgaaggtcgaatctatcagctgaagctgttctgcgataaagattatccggagaagccaccgagcgtccgttttcattcaaggatcaacatggcttgtgttaaccatgacacagggctggtcgattcaaagaagttcggacttctcgcaaattggcgaagggagtatactatggaggatatattgacacagctgaaaaaggagatggctgcctcacataatcgaaagctggtccaacctcccgagggtacctacttctagctctcgaattcgtatcgatattctggatctaatttcatttgtggttatgcaatatatagtttgtaatgcttgttgatcctttataagaacaaactgtggaattggtcaaaacgcttctcgattacttctccttggcttcatgttcttgttctcaaaccggatgctgtttttctaacagaattttatccatgtttcaaaacccaaaaaaaaaaaaaaaaaaaaataaaaa

SEQ ID NO: 3648 - DNA, 918 bp, Gossypium hirsutum
  Clone ID: GOSHI-09MAY01-C7571_1
ctttccttttaccagattctcgaccccccgcggcgccttcccttttaccagattctcgactctgtctcctccatcgctctttttcatcgatcagatctcttcaaacccatctgtcaaaacaaccctccactcattccatccatgacgcttggctcaggaggatccagtgttgtggtgcctcggaacttcagattgctggaggagcttgagcgtggagaaaaaggtattggagatggtactgtcagctatggaatggatgacggagatgacatttacatgcgctcttggactggcaccattattggtcctcataatactgtacatgaaggtcgaatctatcagctgaagctgttctgtgataaagattatccagagaagccaccaagcgtccgttttcattcaagaatcaacatgacttgtgttaaccacgaaactggagtggtggaaccaaagaagtttggacttcttgcaaattggcagagggagtataccatggaggatttactgacacagctgaaaaaggagatggcagcaccacataaccgaaagctggttcaacctcccgagggtacctacttctagctctcaagattatcggacatcctggatctaagtgcatttctggtatgcaatatatagtttgtaatgcttgttgatctttaaagaaaatagtggggaatgccccaaaaagcttctccaattactttcccctggtttcatcttcattatccttttcttatcaaactctgtttaaggaatgctgtttaattaatgggactttatccgtatgtcgattattaaaaaaccccgtttgatttgggttgggggcggggtaaaaaattctgcgggccccccccgcgtgaaacccaatttcccctatattgaattgttttacccccccccctggcctccttttat

SEQ ID NO: 3649 - DNA, 264 bp, Gossypium hirsutum
  unsure (1)..(264): unsure at all n locations
  Clone ID: LIB3147-045-Q1-K1-G9
cggacgcgtggggtttgtaatgcttgttgatctttaaagaaaatagtggggaatgccccagagaagcttctccaattactttcccttggtttcatcttcattatccttttcttatcaaactctgtttaaggaatgctgtttaattaatgggactntatccgtatgtctaatataaaaaaacccgtttgatttatataatatattataattatttctaaaattatataaatattaaaaataatttataaatttataaaaattttt

SEQ ID NO: 3650 - DNA, 342 bp, Gossypium hirsutum
  Clone ID: LIB3582-009-P1-K1-E12
cccacgcgtccgcccacgcgtccgcccacgcgtccgcccacgcgtccgcccacgcgtccgcccgacgcgtgcgcgactctggctcctccatcgctctttttcatcgatcagatctcttcaaacccatctgtcaaaacaaccctccactcattccatccatgacgcttggctcaggaggatccagtgttgtggtgcctcggaacttcagattgctggaggagcttgagcgtggagaaaaaggtattggagatggtactgtcagctatggaatggatgacggagatgacatttacatgcgctcttggactggcaccattattggtcctcataatactgtacatg

SEQ ID NO: 3651 - DNA, 258 bp, Gossypium hirsutum
  Clone ID: LIB3189-039-P1-K1-G11
cttttaccagattctcgactctgtctccttcatcgctctttttcatcgatcagatctggtgagacccatctgtcaaagcaacccttcactcattccatccatgacgcttggctcatgaggatccagtgttgtggtgcctttgttctttcatattgctgtgtgtgcttgtgcttggttttattgtattttgtgtaggttctttctgcttatgtttttatcgctttatcttttttttacattgtgtgcttttattttgta

SEQ ID NO: 3652 - DNA, 256 bp, Gossypium hirsutum
  unsure (1)..(256): unsure at all n locations
  Clone ID: LIB3272-007-P1-K1-F12
ccgaccggcnncggaaaaacgggnggacccacgcgtgcgtctgtctcccctatcgctcttttgtattgatcagatctcttcaaacccatcaattcaaacagccgtccactcattccatgcatgacgcttggctcatgaggatccagtgttgtggtgcctcggaacttcagattgctggacgagcttgagcgtggagaaaaaggtattggagacggtactgtcagctatggaatggatgacggagatgacatttaca

SEQ ID NO: 3653 - DNA, 438 bp, Gossypium hirsutum
  Clone ID: GOSHI-09MAY01-C7441_1
cccacgcgtccggttgatttttctttaatttctcaattctcaattctcttctatggtggtagccaccaaaccaaagcatggctatctctctaagttcagtgttcgggtttaatttaaagtatgtctcgagatcctgtattggaggagcttcagtacttaaggccaaccccagtgtatctccctttcaaatgtatggctcggggggacgtgtacaccaaaaaagaaggggcttatgtctttcagttgaagacagagaccgactagtcgcgaatagcagcataaaggattctggtgatgctgagaagctggtttctgatgatcgagttttggccgtgaatcccccatcattggataatgaatcgcgctcccctacctctgagcctagtaatggttcaatggtttcttcaactccgatgcagaggcctcatcacctccaaa

SEQ ID NO: 3654 - DNA, 591 bp, Gossypium hirsutum
  Clone ID: GOSHI-09MAY01-C7411_2
tcggaaaaaagccttaccctcaaaagaaaaccggacgtgttcgccgtgggtctacgcgcaccccgcgcgtcccggtggtggtgttatcttcggacccaaacccagagactggtcggttaagatcaataaaaaagagaaaaggttggcgatttcgacggcgttatccagtgcggctgagaacacgatagttgttgaagatgttggggataaatttgagaaaccgaggactaaagagtttattgaggctttgaagagatggggattagacccaaagcagaaatctatggttttgatgatggaagtgccggaaactgtgaataaatcgagtcggaatattgggactttgaggatgttaacgccgaggacccttaatttgcttgatatttttgaattgcgataatttggtgttgaccccggatactgtggattatcttaatggaagatatggtgaagattatgaaggtgatactgaggatgataatgaagaatatgaagaagaagacgaacaaagcggtcaagatgagaatgttgatgcagctcaatgacctggcttttcccccttcattagcatataagccatacatatatgct

SEQ ID NO: 3655 - DNA, 849 bp, Gossypium hirsutum
  Clone ID: GOSHI-09MAY01-C7411_1
gcgcccacgcgttcgaccacgcgttcgccaaaatccaaaaaggaaaaaaaaagaagaaaaaggtcctccaaaaatggcgacttcagctactacactcacttcactttccttcttctcttcttcccttttcctctcctctccgtcccctaaactctcaacttccctttccttctctttcaaaccttcttcgaacccgtctctttccatttcttcccaactttccactctccccattttgtccttcaccggcgaaaaaatcggcgaaacttatctcgacctcaaatcagcccctcccgaaaccgctagagccgtcgttcaccgagcaatcatcactgacttacaaaacaagcgtcgtggcacagcttctacactcactcgtggtgaagtccgtggtggaggaaaaaagccttaccctcaaaagaaaaccggacgtgctcgccgtgggtctgcgcgcaccccgctccgtccgggtggtggtgttatcttcggacccaaacccagagactggtcggtttagatcaatataaaagagaaaaggttggcgatttcgacggcgttatccagtgcggctgagaacacgatagttgttgaagattttggggataaatttgagaaaccgaagactaaagagtttattgacgctttgaagagatggggattagacccaaagcagaaatctatgtttttgagatggaagtgccggaaactgtgaataatcgagtcggataatggaacctgaggatggtacgccgagacccttaattggtgaattttgatggtgatatggtgggccttcgaactgggtaattcaatgagatagggagatttaaaggtcctgtgagctataag

SEQ ID NO: 3656 - DNA, 1110 bp, Gossypium hirsutum
  Clone ID: GOSHI-09MAY01-C7751_1
gtagtagcacaggcacccaccaaatctttgcatcaaaaagaaaaagagagcttttttgaaggagcggaacttcatacatcaatacaaaaatcctcaattttcaaaaaataaaaaatatggaattcgttgttgaacaaggcaaacaaccacaccaagaatgctctactttgcttctgcctgctttgtcgattgggaatgtggggcaactagcggtggatttattagtatcatcaatgaaagcagagagaattgggtacttagatgatccctttgtgcttccttgtgttggaaatgatgcttatggccctattccttgtggtgaccttgctcttcctcttgaagcttacgagtcagcttttagtcgagttgctctcctccaacagcggtctcccgtcgttaagggacgaatggttgaatttgccaaaaacttggcaaattttgctgctgcaagtggggccgcgcgggcggtcccgcgggccggcgcggggggtggaaagtggcagaaaattgacatgtcaagtggtccgcagatttattacctatccagcataaatcccgatggaagagatgactactgtgaacaacttggatggaaaaggctgcaagaatacaatcctgctcaaagatgttggaagtaccttagcaccttagctgaaggaaatactatgctggaaagcaatttaccttttgaagatgagctggaagatgaagattattaccctagtttgccatttgcagcacttttttcttgtttgaaggccaaaggcttgaaggttacgtctttactatgctactgttcggaaggggataatatacaggatgcttttcatttggctgaggcagcatgcagacttttgggccctaatcctaatgcttttcctggtaatggaagtggtggttgggtcattcctttctcatggcacactgtttatggaccgccaccggatatgtctatcttttaggcttagatctgaccatgcttagtgaagttgacaaagctaaatctgtaatctattgtttgaaacttgagattttatgtttttattacaagaaaagtagcatgtattggccctgatggaagcaggcaacaaaaaaatgctcaactaaata

SEQ ID NO: 3657 - DNA, 469 bp, Gossypium hirsutum
  Clone ID: GOSHI-09MAY01-C7741_1
gatttctctatcctccgctcactccatatatttacaacaagctcgaatatttaaatggagatattgggttttatcttttagtttaattgaagagagaagaagcgagaggtaccagcgtccgccatggctggtttgcaaagatcagcggtgtcttttaggaggcaagggtcttcggggcttgtttgggatgacaagtttttgtcggagttgaatcaagggaaaccagaagagcagcaacaagaaggagacacgaaacagctgcagaaagaggaaccaaggcagttgcaagacagtcgtaacccagaaaagtttgacgatgttaagggtgttgcccccaccaacaccatcgaaagaaaccgatcaaatggtgaaagacgaggttaccggactggtggtaaggtatcccctgctattgacccgccttctccaaaggtttcagcttgtggtttctgcagtgctcttgggaaac

SEQ ID NO: 3658 - DNA, 511 bp, Gossypium hirsutum
  Clone ID: GOSHI-09MAY01-C7611_1
cttcccttaattactaatggaatagaacaaatattaatcctttctccgaaagaatccaccgaagaggggaggtattccaatgcaataaagttacatagtgtctatttttcgttgataaaggggtatttccatgggtttgccttggtatcgtgttcatactgtcgtattgaatgatcccggtcgcttgctttctgttcatataatgcatacggctctggttgctggttgggccggttcaatggctctatatgaattagccgtttttgatccctccgatcccgttcttgatccaatgtggagacaaggtatgttcgttatacccttcatgactcgtttaggaataaccaattcatggggcggttggagtattacaggggggactataacaaatccgggtatttggagttacgaaggtgtggccggagcacatattgtgttttctggcttgtgcttcttggcagctatctggcattgggtatattgggatctagaaattttttgtgatgacccc

SEQ ID NO: 3659 - DNA, 555 bp, Gossypium hirsutum
  Clone ID: GOSHI-09MAY01-C7621_2
gttgcttttgcgaatcagggcgatccttctcgcacatgcttgtacgctataatgccttagcaaatgccagacatgcggaactagagtcctcggacggcttcactaattatgatggtatatgtgaagggaagtgcatagcccggctatacaaatacttaagaatgaaaacctgcttgctccattcgtaatgcacacgatgacttatatctgtggactctagctagcctccgagagcctccagggcttgagacttttggagtaagcatgtcgatcatgattcaatgacaggccacgtaacctaaatatatgaagtattgctgctcatacactatttaaataaatgacctgtcactgtcttggggtgctaccaagactcgcgtggtctcttttctctttgtctttataagttaactaagctcctaaaggtgggtgcttcgcccccagagtaattgctcttaggtgtgccctgatatgtagttgctgttaattgaaaattatttatgaatactaatatatagtatacacatatacatcaaaaaaaaaaaaaaaaaaaaa

SEQ ID NO: 3660 - DNA, 693 bp, Gossypium hirsutum
  Clone ID: GOSHI-09MAY01-C7621_1
cccacgcgtccggcgaggggagtagatacaggcagcaatgagaaggagcttagtatatactccaagacagaattccggttgggacaccacgtcccaagactaccaagctcatctttcccgaatggaaagatcagccaccatgatccctggtgcccctcagtaccccgatgtccacaaggccttcaacaacaaggttgagtttccggaagaagatcagtgcactgagcggtccccaacggcaaactcccgaaagaaggttcaggtggttgagcatgcagagaccgttgatgaagccacccttgattctcaagctgatagctacatccagcagaaacacaaagcctttgaactgtgcaaatggaagaccttcaaaatgcactagagttgagacttttggagtaagcatgtcgatcatgatttaatgacaggccacgtaacctaaatatatgaagtattgctgctcatacactatttaaataaatgacctgtcactgtcttggggtgctaccaagactcgcgtgtctcttttctctgttttttataagataactaagctcttaaggtagttgcttggatagcagattattgcttttagtgtgcccgattgtagtgctgttaatgaaatatttatgatcctatattagctcccctttaccattattgtaatttaactttttttggcccctaatttat

SEQ ID NO: 3661 - DNA, 1302 bp, Gossypium hirsutum
  Clone ID: GOSHI-09MAY01-C7161_1
ctccatttctcttcgtttcggttcttcctcttttgaggattacgacaaaccacccaaactgaccccacctttcctaatcgggaaactcctctcctctgtctggatttatctggaaaatacacaacccatatcgtaaatccaaatcttgctttgttttcctcccccccaatactcatggagatggaagcctcttcagctaatcaacgcctccattttgggaagatgggatatggatgccaacattataggaggagatgcaagattcgagctccatgttgcaacgaggttttctcgtgtcgccattgccataacgaagctgtgaacctgttaagtaacccttttgacaggcacgagcttgttcgaaaagatgttaaacaagttatttgctcggtttgtgacacagagcagccggttgctcaactttgttcaaattgcggagtcaatatgggagaatacttctgtgcaatttgcatcttctttgatgatgataccgagaaggggcacttccattgccatgattgtgggatctgcagagtcggtggccgtgagaacttttttcactgcaagaagtgcgggtcttgctactctgttgccttgcgaggtaatcatacttgcgtggagaattcgatgcagcatcactgccccatatgttacgagtacctcttcgattcgttgaaagatacgactgtgatgaaatgcggtcacacgatgcactatgaatgttaccatgagatgctaaagcgtgacaaatattgctgtcccatatgctcaaagtcggtgatcgatatgtcccgagcctggaagaggatggacgaagagattgaagcgaccctaatgccggaggattaccgatataagaaggtttggattctatgcaatgactgcgacgacactaccgaggtttacttccacataatcggacagaaatgcagtcactgtagatcttacaacacccggacgatcgccccaccggaactccctcagtgatgagatcatgatcgaagaaccgaagccggtgagctcctgacttctaaaggtctgctcgttaactgtaaaagcggagatgaattcttctaatttgcatatcatgtctcgatcatctcgatccatcatcgtcattggatttgattatatgattcagtgtattattattcaaatgattgtgccatttttatgtcttccctcataaaacatttctcaggttatcggttccccatttcgggtgtgaatggttctatggttgatgtaaacgctatatgataatttgtaataataacagacatttgagaatttgatggtaat

SEQ ID NO: 3662 - DNA, 438 bp, Gossypium hirsutum
  Clone ID: LIB3148-053-Q1-K1-H8
cgaaaacatcagtcaaccgtgttttgaggagtttaaacattgaattccatcccctgcttacagtatctgttttattcaatgctacatctatttgttttgcacaataaccacacgtacttacaccactgggcagggtcttgctatgccattgcgttgcgagataatcatttgtgcgtggagaactcgatgcggcatcattgccccatatgttatgagtacctattcgattcgttgaaagatacgactgtgatgaaatgcggtcacacgatgcactgcgaatgttacgatgagatgataaagcgaaacaaatattgttgtcctatatgctcgaagtcagtgatcgatatgtctagaacctggaagaggatagacgaagagatcgaagcaactgtaatgccagaggactaccggcacatgaaggtgcgtgcatactatgat

SEQ ID NO: 3663 - DNA, 583 bp, Gossypium hirsutum
  Clone ID: GOSHI-09MAY01-C7101_1
cggactggcccggtagacccacgcgtaccgaactaacagaacgaatgctgtggaccaaataaaaatcccaagttcttttataagggctcaaaagcttataaaaagaagtccgatttcccatttccggtgtttttgttgtggtgagtgttttgatggggaaggaacagagcttagatgagacttcaaactccatttctaattctggaagtgaaagaacgcctcttttgaacaaggaggcaagtaagcaaacaaatgggcaacaagcagctgaaagtcctctgtcagaccttgagcaaggcaatgcagaagaggcagtcaatgttggattttggagagtatttgcactggcaaagccagatgcttggaagatatttgttgccacctttgcattattgatagcatccactacaaatctcttgattcctaaatatggtggaatgatcatagacattgtttcaagagatataaggacacctgaacagcaatcagaggccctggaagctgtcaagaatactgtaacatacattgtgctgatcgttgtattagggtctgtgtccgcagcactttggtcatggctcttttc

SEQ ID NO: 3664 - DNA, 1246 bp, Gossypium hirsutum
  Clone ID: GOSHI-09MAY01-C7131_1
gaccaagcgggcggtcccccgtcctattatcttccttccttttcattccttttgctatggcaggaactggggtggtcgctgtttatgggaacggcgcaatagctgaaacccacaaatcccctttctccgtcaaggttggcctagcccaaatgctccgtggcggggtgattatggatgtcgtcacccctgaccaagctcgcatcgctgaagaagctggagcctgcgccgtcatggctcttgaacgagtccccgccgacatccgagcccaaggtggcgtggcgcggatgagtgacccacaactcatcaaagaaattaagcaagctgtcaccattcccgtcatggccaaggctcgtattggccatttcgttgaggcccagatccttgaagccattggcatcgactatgttgacgagagcgaagtccttaccctcgccgacgaagaaaaccacattaacaaacataattttcggattcctttcgtctgtgggtgccggaatttgggggaagcgctccggagaatccgagaaggagccgcgatgatccgaaccaaaggagaagcggggaccgggaatgttatcgaagctgttaggcatgtcagatccgtgatgggggatattagggcccttaggaacatggatgatgatgaggttttcagcttcgctaagaaaatccagtctccctacgatttggttatgcaaacgaagcagctggggaggttgccagtggttcagttcgccgccggaggcgtggccacaccggcggatgcggcgttgatgatgcagttgggttgtgacggagtgtttgtcggatctggggttttcaagagtggtgacccggctaagcgtgcccgagctattgttcaggccgtcactcactacagtgaccccaacatgcttgcggaagttagctgtgggctcggtgaggccatggttggccttaatttgaacgataagaaggttgagcggttcgcagctcggtctgattagtaagtgaaggagggatcaagcctttggttgttgaaccaccgtcaccagtgcactgttgttccaagttatcatagttaaagtggagtctctcatacaggggatgtaattttatgcgctaaaatgttagccatctgtttcgttatctcaaattagatctttaagattgctagaaataaagtcccacactttgtctctctgcattctgctaccatactaatgtgttttttacagtgattaggctctacacaagctttgcctct

SEQ ID NO: 3665 - DNA, 817 bp, Gossypium hirsutum
  Clone ID: GOSHI-09MAY01-C7021_1
cccactcgtccgaccacgctttcttccacgcgtccgcccacgcgtccgagaaggtggccactttgatctagtcgtcaagatttacttcaaaggggtgcacccgaaattccctaacggtggcctcatgtcacaatatttggactctctccccctcagttcgtcactagacgtgaagggtcctttgggtcacatcgaatacaccggtcagggcaactttttggttcacggcaaacccaactttgccaagaaactagcaatgttagccggtgggacggcgatcacccccatttatcaactcatccaagccattttaaaagaccccaaggacgagaccgagatgtatgtcgtgtacgcaaaccgaaccgaggacgacattttgctgaaagaggagctcgacgactgggctaagaagcatgatcggttgaaagtatggtacgtcgtacaagaatctataagggaaggatggcaatagggcacaggtttcatcacggaaagtgtaatgcagggatcacatcccggagggctccagcgacacccttgcgttggcttgtgggccgccgccgatgatccagttcgccgtgcagcctaacatagagaagatgaagttttacgtcaaggattttttgctgggattttaaggaaaatttggagatgtttaaatgttttttagtcactgttctttgtcttgtattattattaatttttcccatggcatagcaaagttgttgggaaaacgatgtacatagagaaataagggtgttgtagtttgagagaaggaaaataaataataataataaatcttcttgtatcatgttct

SEQ ID NO: 3666 - DNA, 370 bp, Gossypium hirsutum
  Clone ID: LIB3166-006-P1-K1-C7
aagtgctcgggttacctgtagggaagcacatatttttgtgtgccaccattggtgataagcgttgcatgcgagcctacaccccaactagtaacattgatgaaattggccactttgatctaatcggcaagatttacttcaaaagggtgcacccgaaattcccttacggtggcctcatgtcacaatatttggactttctccccctcggttcgtcactagacgtgaagggtcctttgggtcacatcgaatacaccggtcagggcaactttttggttcacggcaaacccaagtttgccaagaaactagcaatgttagccggtgggacagtgatcacccccatttatcaactcatccaagccattttaaaagaccc

SEQ ID NO: 3667 - DNA, 413 bp, Gossypium hirsutum
  Clone ID: LIB3165-014-P1-K1-G10
ataaaatctcctcttttttttgttctttcgaatgctcctttgaaacgtggcgttgcttcgatttatgggtttatttccgattcgttcaacttgtttttagttgaaccagcattggatgatggcgtattattattccaagcttttttactcgttcctagcttcagctctgatcatattttctcttcaaatttatgggtgttttttttaatggtcggcggatcaagatccggttttgagggtgttataataaagctttgattgtctatgaagacatttcaatcatggaatgcactggtcaagaaaagaaatgctttagctgaagggggaaattgtggatttaaaatgaggcagcttccatttatgggagttatttgtacaggtatgttggtcattgtgtatagaactacggatta

SEQ ID NO: 3668 - DNA, 283 bp, Gossypium hirsutum
  unsure (1)..(283): unsure at all n locations
  Clone ID: LIB3083-072-Q1-L1-F3
ctcatcgacgatccatttctcgacanagagggctcataaaccccacaaatacaaaacctgcaaacccaganaaaaagcttaaaatccgccatggaaatgcttaaccgctaaagcanaagggtttgagggtaatataaaaaaggctttgattgtctatgaagacatttcaatcatggaatgcactggtcaagaaaagaaatgctntagctgaagcgcttccattttatgggagtatctgtaccagtatgttgttcattgcgtatagaactacggattatcaata

SEQ ID NO: 3669 - DNA, 489 bp, Gossypium hirsutum
  Clone ID: GOSHI-09MAY01-C7341_2
cccacgcgtcggcccacccgtccgcccactccccctgacttgctctgtaaccgtagaagtgattattggttgagaaatcatggggaaggacaagcataagcctgatgataagggtctgttttcacatcttgctcatggtcttagtcatggtggtcatggacaccctcctggtgcataccctccacctcctggcggatatccacctgctggagcttacccacctcaaggctatccaccagctggctaccctcctcaaggaggatacccccctcacggctatccaccatctggctatcctggtgcatcccattcagggcacggtggcatgggagcgctgcttgcaggtggtgcagcagctgccgcagctgctatgggggctcaccacgtgtctcacggtgctcatggtgctcatggtgcttatggtgctcatgggtttggtcatggtcatcatgggaagttcaaacatcatggtggtgggatgtttaagca

SEQ ID NO: 3670 - DNA, 834 bp, Gossypium hirsutum
  Clone ID: GOSHI-09MAY01-C7341_1
cggacgcgtgggatttgactttctctgtaaccttagtttgttccacagaagtgattattggttgagaaaacatggggaaggacaagcataagcctgatgataagggtctgttttcacatcttgctcatggtggtcatggacaccctcctggcggatatccaccggctggagcgtacccccctcaaggctatccaccagctggctaccctcctcaaggaggatacccccctcacggctatccaccatctggctatcctggtgcatcccattcagggcacagtggcatgggagcgctgcttgcaggtggtgcagcagctgccgcagctgctatgggggctcaccacgtgtctcatggtgctcatggtgctcatggtgcttatggtgctcatggtgcttatggtgctcatgggtttggtcatggtcatcatgggaagtttcacacatcatggtggtgggaaggttaagcatcatggggggaaattcaagcacgggaagcatgggaaatttaagcacggaaagcatggaggcggcaaattcaggaagtggaagtgatgttactgcccgcaaaagcatggagaattgggagtcaaaactgatagtgtcgaatgaatgaatgtaataataatttgacttcaactgctttgtattgaataatcacagacttgtttttctttctttttaattgttgacatataacaataacaacatttgattcaacgatctgatattatgcattaccacttacgagacataactcggaacatgtcattgtaaaccctgtttatttcaactttgaagcattgagtatttggtcaataaacctgataagttgct

SEQ ID NO: 3671 - DNA, 482 bp, Gossypium hirsutum
  Clone ID: uC-gsflnu33B090c08b1
tcgtcgtaaccttagtttgttccacagaagtgattattggttgagaaaacatggggaaggacaagcataagcctgatgataagggtctgttttcacatcttgctcatggtggtcatggacaccctcctggcggatatccaccggctggagcgtacccccctcaaggctatccaccagctggctacccttctcaaggaggatacccccctcacggctatccaccatctggctatcctggtgcatcccattcagggcacagtggcatgggagcgctgcttgcaggtggtgcagtatctgccgcagctgctatgggggctcaccacgtgcctcatggtgctcatggtgctcatggtgcttattgtgcttatggtgcttatggtgctcatgggtttgtcatgttcatcacgggacgctctactcttactgcggtgctatgttttttacttttttctcctctttctctatctctctctttctttctt

SEQ ID NO: 3672 - DNA, 417 bp, Gossypium hirsutum
  unsure (1)..(417): unsure at all n locations
  Clone ID: LIB3272-022-P1-K1-H6
acgcgtccggtctcacttgctctntnaccgaagaattgattatcnnttnnnngagggagaggtagggattatcttattcctgatcataacgctctgntttcacatcttgctcatggtcttagtcatggtggccatggacaccctcctggtgcatacccttcacctcctggcggatatccacctgctggagcttacccacctcaaggctatccaccagctggctaccctccttaaggaggatacccccctcacggctatccaccatctggctatcctggtgcatcccattcagggcacgggggcatgggaacgctgcttgcatgtggtgcaacagctgccggagcttctatgggggctcaccacgtggcttacggtgctcatggagctcatggcgcttatggtgctcatgggttttgt

SEQ ID NO: 3673 - DNA, 473 bp, Gossypium hirsutum
  Clone ID: LIB3585-032-P1-K1-A1
atggggaaggacaagcataagcctgatgataagggtctgttttcacatcttgctcatggtcttagtcatggtggtcatggacaccctcctggtgcataccctccacctcctggcggatatccacctgctggagcttacccacctcaaggctatccaccagctggctaccctcctcaaggaggatacccccctcacggctatccaccatctggctatcctggtgcatcccattcaggtaaaacttcctacataatcgtaatgtggtccaagtttgttatgttaaatgtgagatgccaataattaattaccctttttgtgtgtgtgtgtgtgtgtgtgtgtgtgcagggcacggtggcatgggagcgctgcttgcaagtggtgcagcagctgccgcagctgctatgggggctcaccacgtgtctcacggtgctcatggtgctcatggtgcttatggcgctcatgggtttggtcat

SEQ ID NO: 3674 - DNA, 366 bp, Gossypium hirsutum
  unsure (1)..(366): unsure at all n locations
  Clone ID: LIB3148-012-Q1-K1-D10
gggaaatttaagcacggaaagcatggaggcggcaaattcaggaagtggaagtgatgttagtggccgcaaaagcatggagaattgggagtcaaaactgatagtgtcgaatgaatgaatgtaataataatttgacttcaactgctttgtattgaataatcacagacttgtttttctttctttttaattgttgacatataacaataacaacatttgattcaacgatctgatatatgcattacgacttanaaaaaaaaaaaaaaaaaaaaaaaaaaaaaaaaaaaaaaaaanaaaaaaaaaaaaaaataaataataaaaaaaaaaaaattattaaaaaaaaaaaatattaaaaaggggcggccgttttaa

SEQ ID NO: 3675 - DNA, 302 bp, Gossypium hirsutum
  Clone ID: LIB3272-022-P1-K1-H5
gtctgacttgctctgtaaccgtagaagtgattattggttgagaaatcatgggggaggacaagcataagcctgatgataagggtctgttttcacatcttgctcatggtcttagtcatggtggtcatggacacccttctggtgcatacccttcaccttctggcggatattcacctgctggagcttaaccaacttaaaggtattcaacaagttgcttaccttcttaaagaagatacccccctcaacgattttcacacaatttgcttttcctgtgccttccaattaaggcaccgtggccttggaac

SEQ ID NO: 3676 - DNA, 931 bp, Gossypium hirsutum
  Clone ID: GOSHI-09MAY01-C7361_1
aaagaaagaaaaaaagcagagaatcacaataatggttgcagcagtggcagcaacagcatcatctcaactactggtatcaagttcccgctctttgtcacggctgtcaccatttcagctatgcgtatttgattccaagtccctcgtgtcatgccccagcaatggcaatggcattaacaacagtatcaagagaaggcatgttaggtgcctggctgtggggacagcaccagaggcagaaaccaagaaaagtgggttcgaaatccagacactaacaggttggttgttgaagcaagaacaggcgggtactattgatgctgagctcactattgtcctttccagcatttccatggcctgtaagcaaattgcttctttggttcaaagggctagcatttcaaacttgactggtgttcaaggagctgtcaacgttcaaggagaggatcaaaagaagctcgacgttgtttctaatgaggtgttctctaactgcttgagatcaagtggaaggacagggattatagcatcagaggaagaagatgtgccagtggcagtggaagagagttactctgggaactatattgtggtatttgaccctcttgatggatcatccaacattgatgctgctgtttcaacaggttcaatttttgggatatacagtcccaacgatgaatgcctagcagaaatagatgatgattccactcttggttcagcagaacaaagatgtgttgtgaatgtgtgccaaccagggagtaatctattagctgctggatactgcatgtactcgagctctataatctttgtgctcacgttagggaatggagtgtacgcgttcaccttggatccaatgtatggtgaattcgtgttaactcaagagaaaattcagataccaaatgccgctaaaatatatgcattcaatgaagggaattaccaattgtgggat

SEQ ID NO: 3677 - DNA, 606 bp, Gossypium hirsutum
  Clone ID: GOSHI-09MAY01-C7221_1
cccgggcgtccccgcacgcgtccggcgccctctagaattttctaattatatttccatttctctctccctcttttgtgaaatctccggcttccaaatatacccccataatctcaaaactccggcgatttaaaattctcgtttcgatcttgagatcttattatcattgccggtttctttctggaaaaacggggattaaagacgaagaggagggatagaatcggaaaaagaaaggaaatcgcatgagctggttgggaaatctgggttttacttgcttctcttcggtgaattgttccaaccattttataacgtgtcttttaatttttattcttcattactcccatcaattacctccttcgttatttaaatttgaaaaaaaatcaactgagcctttattattattggttaattctaattccaaacatattcctcccttacatcttaaatctaaatcctaatcccgatcttaatccatggagtcgtcggacaagagtaatcaccaattgcgtggaggtatttgctatccaaatggggcgaggaggcctgtaagaacaccttcagtaatcgtgattggggctggaatggctggaattgcagctgcacgtgctc

SEQ ID NO: 3678 - DNA, 658 bp, Gossypium hirsutum
  Clone ID: GOSHI-09MAY01-C1951_2
cccacgcgtccgcccacgcgtccggcagcaaattagagatatggcgaaagctgaggttgtaattgttctgtctttgttgttggtgataacagtggttgatgggttgggagggaggatgaggataaacgatgtgaagaacaacaaagaggtgcaagagcttgggaggttctcggtggaggagtataacaggcggagccaagggcggttgcgtttcagtttggccaatggtgggccgtcgacggcgttggttttctctcaagtggtgggagctgagaaacaggtggttgctgggatcaagtattatctcaagattaaagccatgcaaggtggggtaaccaagacctttgagtcagtggttttggttaaaccttgggttcaatccaaggacttgcttaatttttccccttctactcattaaaaagagaagtctttttcccttgtaatcttaattaataaagcgattgaataagaaagtatggtaattaactgcttgttataccagaaattctggggttatggtgaacatcattgattcaacgcacaaaaaatttaacatcatgtaaacatgccttgtctatcccctggattagaagcctatcacccccatgcatggcttcttaaaaccaaatgagtacccttaccttaacctttcatcttt

SEQ ID NO: 3679 - DNA, 912 bp, Gossypium hirsutum
  Clone ID: GOSHI-09MAY01-C1951_1
tttgtcccgcgcgcccgaacccaccctgccgcatccaaaaaaaaaacacaccctaaagagacaatgagaaagctgctagcctttgcctttcttttcttcttcttttgggataaaacattagctcaaatagctccggcgccgccgttaaaggtggacaacatcacttccatcctcgaaaaaggtggccaattcaccactttcatcaagctattgaaagccacacaggtggctgatcaactaaacaaccagctaagcacaccggaccctaacgacgggataacggtgtttgcaccgagtgacaacgcgttctccggactcaaacccgggacgttaaactcactttccgaccaagagaagcttcagttggttcagttccatatactcccgacgttaatgtcgacgtcgcagtttcaaaccgcgagtaaccctttgagaacccaagctggggatgttaaaggtgggaagtttccgcttaatgtgacggcggaggggaaccaagtgaatgtgacgaccggagtggtgaatgcgacggtggagaatagtgtgttttctgaccgaaggatcgcggtttatcaggtggataaggtgcttttgccgttggagatttttgggacagcgccggagccggctccggcgccggttgttccggagaatggtggtttggtttcgagtcctaaaacaccggttaagggtgctgatgcagctggtgcggtgagcttgaaatttcatgctttggcaatgggtttttcgtcatttgctgttttctgggctatttttgggggattttgattttggattttatttttgcatgcgatgcttgtgttactgtttgtaatttgtgattgtgattaaaaatatttgattttttgtttgttgatattgaaagaccccgtatttagttactattctggt

SEQ ID NO: 3680 - DNA, 431 bp, Gossypium hirsutum
  Clone ID: uC-gsronu33B014f01b1
gtgataaccacggcctatcatctcacggacgttcggaatctagcattcgctgagagtatgctccgccgccgaccatgaagggggacaacatcacttccatcctcgaaaaaggtggtcaattcaccactttcatcaagctattgaaagccacacaggtggctgatcaactaaacaaccagctaagcacaccggaccctaacgacgggatatcgggtgtttgcaccgagtgacaacgcgttctccggacttaaacccgggacgttaaaactcactttccgtccaagagaagcttcagttggtttagttccatattctccctaccgtcatgtctacgctttctatttttataccttttcttatcttcttttgtcctccttctcttggtttttattcaatacgatatttcgttatacttatctttctctcatttt

SEQ ID NO: 3681 - DNA, 390 bp, Gossypium hirsutum
  Clone ID: LIB3083-104-Q1-L1-H7
aaatagactttgaggaagctgctagcctgggcctatcatttctgcttctgttgggataaaacataaactcaaattgctccggcgccgacaataaagggggacaacatcactggcattctcaaaaaaggcggccaatacaccactttcatcaagctattgaaagccacacacgtggctgatcaactaaacagccagctaagcacaccggaccctaacgacaggttaacggagaaagcgccgagtgacagctcgaacttcggactcaaaccctggacgatgaactcactgtccgacaaagagaacactgaacgggttcaattccatatactcccgacgatgatgaaaacgaaccagactgaaacagcgagtcaccctttgagaacccaagct

SEQ ID NO: 3682 - DNA, 328 bp, Gossypium hirsutum
  Clone ID: uC-gsronu33B014f09b1
ccttgtactcattcgaaagagacgtctttttcccttggaatcttaattaataaagcgattgaataagaaagtatggtaattaactgcttgttataccagaaattctggggttatggcgaagaaccactttcatcaagctattgaaagccacacaggtggctgatcaactaaacaaccagctaagcacaccggaccctaacgactggataacggtgtttgcaccgagtgacaacgcgttctccggacttaaacccgggtcgttataactcactctccgaccaagagaagtttcagctggtctcaatttcatatacttcttacgttattg

SEQ ID NO: 3683 - DNA, 987 bp, Gossypium hirsutum
  Clone ID: GOSHI-09MAY01-C1971_1
caaaaagcagcaaactaattacaaagagatcaacaccaatggatggacagctcttccttataaagcatcttctgatattaagggaacagatagcaccatttgacatagaattttccgttacacacaaagaacttgatttctctcatgtgctggagcatctgcgacggatacttagaggtcaggcttcattatttgactggactagatcaacatcattagcaaggaccttatctccccgtgttttggaaagtcaagtagatgccaagaaggagctggagaaaagtttaaaagcaacttgcgaggagtttattatggcagtcactaagcaaattgtggatcctatgctgtcatttgttaccaaggtcacagctgtaaaagttgcattatcttctggtactcagaataaaaaagtagactcagtgatggccaagccactcaaagaacaagcctttgctgcgccagaaaaggtggctgaacttgtgcagaaggtaaattcagctattcagcaagaacttccactggtgatagcaaagatgaagctttatttacagaacccatcgacaagaacaattcttttcaaaccaattaagacgaatattgtggaagcccatattcaaggtcaatcccttttaaaaaccgagtattctccagatgaaaaaagcaccatcaacatggtgaacatacaagaactgggagcacaactcgacaatctcctctagggggctagcgaagcttattcaagtattttccctcaaccccaactcctttcaggaatttttggcgatatcgggggtcagtctggtcataaggggttattggtaggttaaaaaaaaaaaaaaaggttacgtaagggtggtttatattttccgaacattcattttggtaagttcatatctttttttcctgccccaatagctttaggtttcattctaattattttggcaattgatgtcgatcatattttttcattcaaggttaaattatttt

SEQ ID NO: 3684 - DNA, 433 bp, Gossypium hirsutum
  Clone ID: LIB3147-010-Q1-K1-F7
tcccttttaaaaaccgagtattctccagatgaaaaaagcaccatcaacatggtgaacatacgggaactggaagcacaactcgacaatctcctctagggagctagtgaagcttattcaagtatttttcctcaacccaaacacttttcagtaatttttggcgatatcgtggttcagtctgttcataaggttatattgatagataaaaaaaaaggttacgtaagatggtttaattttccgaacattcattttggtaagtccatatcttttttgcctgccccaagaccaagagcataaagttcagttcttattatcttggcagtgattgtcgatcatatttttcattcaagttaatattttcggttcatacatttctttctggttattcacccctggaagtaataagaaaacaggtagcgttatctttacaaatttg

SEQ ID NO: 3685 - DNA, 640 bp, Gossypium hirsutum
  Clone ID: GOSHI-09MAY01-C1961_5
ctcactcgtgcgcccacgcgtccgcaattatctcacacccttcatggttgaacgtctggagaaacttattcaagagaaattggaaaactctggattaacatttaaattgtactctaaaacttcaaaagagattagcttctacatgaaccaagatggcctcaccctcgccgccgagcagcatcgaggacggccgcaccttagccgactacaacatccagaaggaatccaccctccacctcgtcctccgtctcaggggtggcgccaagaagaggaagaagaagacctacaccaagcccaagaagatgaagcacaagaagaagaaggtcaagctcgccgtgctccagttctacaaggtggatgagtccgggaaggttcacaggctgaggaaagagtgtcctaatgcggagtgtggggccgggactttcatggccaatcattttgataggcactattgtggtaagggtgggctcacttacgtttaccacaaggctggtggagactgagcagcgtccgattccaccttcaggaaaaaaaaaaaagctgaaatcaatagtttatttgtatcagtatgagtcgcattaatattcgctaatattcggatctttttatatatttgtcatgctatgatactttggatatg

SEQ ID NO: 3686 - DNA, 726 bp, Gossypium hirsutum
  Clone ID: GOSHI-09MAY01-C1961_4
ttttaacccattttccgctgcttcttcagctgaggcaaaccgtagccactaagaatgcagatcttcgtgaaaaccctaacggggaagaccataaccctagaggtcgagtcttccgacaccatcgacaatgtcaaagccaagatccaagacaaagaaggcatccccccggaccaacaacgcctcatcttcgcccctctcctccgcgaagacggccgcaccctagccgactacaacatccaaaaggaatccactctccaccttgttctccgtctcaggggtggcgccaagaagaggaagaagaagacctacaccaagcctaagaagatcaagcacaagaagaagaaggtcaagctcgccgtgctccagttctacaaggtcgatgaatccggcaaggttcagaggctgaggaaagagtgccccaatgctgagtgtggggctggcactttcatggctaaccattttgataggcactattgcggtaagtgtggactcacttatgtttaccaaaaggctggtggcgattgagtttccatctttagcttgtcgatcttttgttagtatgagagacgggattttaatttccaattatcgttcgactgtttaattttttattatgttttatcatgttacgatacttgggatatgattatcaattttagcttttctgaatctaagtaagggcattttacaaaaaaaacctctaaagggatagcaaaataaaatttg

SEQ ID NO: 3687 - DNA, 749 bp, Gossypium hirsutum
  Clone ID: GOSHI-09MAY01-C1961_3
ttttctctctcccttatttagagcgggagcgggggagttctactcccatttttctttgcgcatcttcgcccatcgccaagatgcagatcttcgtcaaaaccctaacggggaagactataaccctagaggtcgagtcttcggacaccattgacaatgtcaaagctaagatccaagacggggggggcgttccacctgaccaacaacgtcttatcttcgccggcaagcaactcgaagatggccgcaccttacccgactacaacatccagaaggaatccactctacaccttgtcctccgtctcaggggaggtgcgaagaagagaaagaagaagacctacaccaagcccaagaagatcaagcacaagaagaagaaggtcaagctcgctgtcctccagttttacaaggtggatgagtccgggaaggttcagagactgagaaaagagtgccctaatgcggaatgtggcgccgggaccttcatggctaaccattttgataggcactattgcggtaagtgtgggctcacttacgtttaccagaaggctggtggggattgagtagagtccgcttctaccttcggttagtgtcctgcaaaaattgaatctatagctatttttctttacaatatgaacattagggctttgattttccgtaatcgttgaacttttttaaatttatgtatgctttattatgggatgatactttgggtatgattttggagttttgaatgatttatcaaatcagctgtttgaatc

SEQ ID NO: 3688 - DNA, 821 bp, Gossypium hirsutum
  Clone ID: GOSHI-09MAY01-C1961_2
gcgtttttccgaccccccgccccaattctgtggggcgggaccggcccggtcgacccagcgttttcttgccgcagcgtcgcccatcgtcaagatgcagatcttcgtcaaaaccctaacggggaaaaccataacccttgaggtcgagtcttctgacaccatcgacaatgtcaaagccaagatccaagacaaggaaggcatccctcccgatcaacaacgccttatcttcgccgggaagcagcttgaagacggccgcaccttagccgactacaatatccagaaggaatccactcttcacctcgtcctccgcctccgaggtggtgccaagaagaggaagaagaagacctacaccaagcccaagaagatcaagcacaagaagaagaaggtcaagctcgccgtgctccagttttacaaggtggacgagtcgggtaaggttcagaggctgagaaaagagtgtcccaatgccgagtgtggtgctggaaccttcatggctaaccattttgataggcattattgcggtaagtgtgggctcacttatgtttaccagaaggctggtggggattgagtgggataagatggatttttagttgttttcaaataatcgtattgtcatgttcttatttttgtttgtttttagtatgttataattttggggtttctattttggaattttggttgctaattgaaatgtttgaatccaaccttatgaaggtctgttctagactcactatccaatttctctttaaagttttatttcactattccaatataatcattttactatctactaacttctttccttaaactcttctctttcttctgct

SEQ ID NO: 3689 - DNA, 896 bp, Gossypium hirsutum
  Clone ID: GOSHI-09MAY01-C1961_1
gaaaaccctaattcaccttcatgtatatatataaaaccccaacagaccccggccgtccccacgcgtccgagcagaaccctccatttctctctgccaccagcggcacccaaagatgcaaatcttcgtcaaaaccctaacggggaagaccataaccctagaggttgagtcttccgacaccatcgacaatgtcaaagccaagatccaagacaaggaaggcatcccacccgaccaacagcgcctcatctttgccggcaagcagctcgaggacggccgcaccttagccgactacaacatccagaaggaatccaccctccatctcgtgctccgtcttaggggaggtgctaagaagagaaagaagaagacctacaccaagcccaagaagatcaagcacaagaagaagaaggtcaagctcgctgtgctacagttctacaaggtggatgaatcgggtaaggttcagaggctgaggaaagagtgtcctaatgctgagtgtggtgctggaactttcatggctaaccatttcgataggcactattgcggtaagtgtggactcacttatgtttaccagaaggctggtggagattaagtagggctcgtgcaaaagatggatcttttagggtttttccaatatgggttttaggttttaaattttcagtaatcgtcggattttgtttagtcgaatgatgtttgttgtgtttgaatatgttataatacttgggctatatgatttggagttttgattatcaattcagctgtttgaatcaacataagttaattcttccttatgttgtttgattgatgattatatttatatgccttgtattttttgctattttggtctctgggtattgggtatgcttaatgtttgtaaaatgattttactatttttgctgatcact

SEQ ID NO: 3690 - DNA, 447 bp, Gossypium hirsutum
  unsure (1)..(447): unsure at all n locations
  Clone ID: LIB3543-043-Q6-K6-F4
aacacaacaanaacaagtcaagctcgctgtgctacagttctacaaggtggatgaatcgggtaaggttcagaggctgaggaaagatgccctaatgctgagtgtggtgcatggaactttcatggctaaccatttcgataggcactattgcggtaagtgtggactcacttatgtttaccagaaggctggtggagattaagtagggctcgtgcaaaaaaggatcttttagggtttttccaatatgggttttaggttttaaattttcagtaatcgtcggattttgtttaatcgaatgatttttgttgagtttgaatatgttataatacttgggctatatgatttggagtttggattatcaaaaataacttaaaatacagaagccacttaatttcctttcagtttgaattgtaccgcaaatgtaattcttctgacagggggcatccactttaa

SEQ ID NO: 3691 - DNA, 420 bp, Gossypium hirsutum
  Clone ID: LIB3165-014-P1-K1-B4
gccgaaccctcaatttttttctgcaaccagcggtacccaaagatgcaaatcttcgtcaaagccctaacggggaagaccataaccctagaggttgagtcttccgacaccatcgacaatgtcaaagccaagatccaagacaaggaaggcatccgacccgaccaacagcgccttatctttgccggcaagcagctcgaggacggccgcaccttagccgactacaacatccagaaggaatccaccctccatctcgtgctccgtcttaggggaggtgctaagaagagaaagaagaagacctacaccaagcccaagaagatcaagcacaagaagaagaaggtcaagctcgctgtgctacagttctacaaggtgctaagaagagaaagaagaagacctacaccaagcccaagaagatcaagcacaaga

SEQ ID NO: 3692 - DNA, 230 bp, Gossypium hirsutum
  Clone ID: LIB3148-041-Q1-K1-B3
acccttcctccaacccttccgaaattttgtccgaacccattgttgcaagccggtttttgttgcgtcaaagagtgtgtgactcgctctacaatttcaaaaccaatatccaagacaaggaatgcatccctccagatcaacaacaccttatcttcgccgggaagcatcttgaatacagccgcaccttatcccactacaatatccagaaggaatccactcttcacctcatcctc

SEQ ID NO: 3693 - DNA, 788 bp, Gossypium hirsutum
  Clone ID: GOSHI-09MAY01-C1911_2
ctagttttagattcatatatattctgctttggagcttttgcagccttgtttaacgtgtctatttcggagccttttgttcaggtgatggtcttaaaatcaactcaaaatttcaactgagcgtgttttccgcactacaggaacttctgctcttttaaaactcaccaaccaaagccggatgatttcggatttattgattcaatttcaatcgagaaattggtggttctcgggtcactggtgtgagaaccaaaagtgtaacaaggattccactgtggttctacgaggaagtactgatagtatattggatgatcttaaagagctgttgatgatcgactgaacacatataaggcaatgtgcagggacagtcgaatggtacctggagctgcagctactgaaattgagttggctaggagattgaaagagttctccttcaaggaaacagggtgatctatttttttttctacgttttacttccttactacaaagtatcatcctgcatattgtgtgttacacctacatcctttatgtcgttaacacacattagtcttatatttttcatttatcatttatgtttcatctctctgttagggatctaatataattcttgaaatttatagtagatttggataagtattagaagaggctactagttctaaaattgatgttatgcaattggatcagatgccattgccaaggttgcttgaagttttgaaatggtaccaaggaaccctagcagagaatgctggtctcaatccaatggatatcatatcttaagctgtatgaaaaacatg

SEQ ID NO: 3694 - DNA, 1676 bp, Gossypium hirsutum
  Clone ID: GOSHI-09MAY01-C1911_1
gcgggtaaggctcagcaagaggaaattggtgatggggctaatttgacaatttcttttgccggagagcttctccaaaatgctgaggagcttgttaggactggcttgcatccgagtgagataatcagtggatatactaaagcgattactaaaacacttgagattttggaggagcttgtagagaaaggttctgaaactatggatgtacggaataaagagcaagttgttactcgaatgaaagctgctggggctagcaaacaacatggactggaagacatattgtcttccctcatagctgatgcttgcatccaagtctgccccaagaaccctgcaaattttgatgttgataatgtccgtgtgtcaaagcttgttggagggggtttgcataattgtacaattgttagagggatggttttaaaaggtgatgctgtgggaagtataaagcgtatggagaaggcaaaggtggctgtgtttgccagtggcgttgattcatctgccactgaaacaaaaggaactgtattgattcactcagctgagcagctagagaattattctaaaactgaagaagctaaggttgaggaactcatcaaagcagttgctgattctggtgccaaagttattgtcagtggaggagctgttggtgaaatggcattacatttctgtgaacgttacaagttaatggtcttgaaaatcagctcaaaatttgaactgaggcgtttttgccgcactacgggaacttctgctcttttaaaactcagccaaccaaagccggatgatttgggatttgttgattcaatttcagtcgaggaaattggtggttctcgggtcactgttgtgagaagcgaagaaggtggtaacaagattgccactgtggttctacgaggaagtactgatagtatattggatgatcttgaaagagctgttgatgatggagtgaacacatataaggcaatgtgcagggacagtcgaatggtacctggagctgcagctactgaaattgagttggctagaagattgaaagagttctccttcaaggaaacaggattggatcagtatgccattgccaagtttgctgaaagttttgaaatggtaccaagaaccctagcagagaatgctggtctcaatccaatggatatcatatctaagctgtatgaaaaacatgcatccggaaataccaaagtgggtattgacttggggggaggtgactctgaggatggtgtttgcaaagatgtgtcaaccctgaatatttgggatctttatgtcaccaagtttttcgctctcaaatatgctgctgatgctgcctgcactgttctacgggttgatcagattataatggcaaaaccagctggaggtcctggaaggagagagcagcctgcagggatggatgaggactaagtcttctgatctgcaacatgatatgccattcctttctttttttctcatcagggctggttcggactttgttaggcatcttcggagatgctaaaaaccctttgaaacaaagttttgcttttgttttgaaaattgttatggttctgtgttttctgttttgtgctaatcaattctgtaatttttccatcagtaaatgtgatgaatgttgcttcccttgacaattgacattctgttagatcccgagttctcatattaatttcatcatctgcgcgaaatgattcatattc

SEQ ID NO: 3695 - DNA, 334 bp, Gossypium hirsutum
  Clone ID: LIB3583-041-P1-K1-A6
cccacgcgtccgcccacgcgtccgcccacgcgtccgcccacgcgtccggattataatggcaaaaccagctggaggtcctggaaggagagagcagcctgcacgaatggatgaggactaagtcttctaatctgcaacatgatatgccattcctttctttttttctcatcagggctggttcggactttgttaggcatcttcggagatgctaaaaaccctttgaaacaaagttttgcttttgttttgaaaattgttatggttctgtgttttccgttttgtgctaatcaattctgtaatttttccatcagtaaatgtgatgaatgttgcttcctttgac

SEQ ID NO: 3696 - DNA, 1250 bp, Gossypium hirsutum
  Clone ID: GOSHI-09MAY01-C1901_2
gtattttattcatgtttgtatttactggttcgatattctgatagaagctttggcaattatctttagggcatacccatgtggcagaagcactaaaagtaccagttcatatatttttcactatgccatggacgccaacaagtgaatttccgcatcctttgtcccgtgtgaagcaacctgctggatatcgactttcatatcagattgttgactcaatgatttggctcgggatacgggacatgatcaatgatcttagaaagaaaaagctgaagctgcgaccagtcacatatttgagtggttcccaaggctctgattccgatgtgccacatggatatatgtggagtccacaccttgttcctaaaccaaaagattggggacctaagattgacgttgtaggattttgctttcttgatcttgcaacaaattatgaacccccagaatcacttgtaaagtggcttgaagctggtgctgagcctatttatattggatttggtagccttcctgttcaagaacctgaaagaatgacccaaattatcgtcgatgcattggagcaaactgggcagaggggtatcattaataaaggctggggtggccttggtagcttggcagaatccaaggactctgtttacttattggacaacgtccctcatgattggctattcttgcaatgcatggctgtggttcaccatggtggtgccggaacaacagctgccggtcttaaagctgcgtgcccaacgaccattgtgccattttttggtgatcaacctttctggggagatcgagtgcatgctagaggagtgggacctgcaccaattccgattgatgaattctcacttcccaagctgattgatgcaataaaattcatgctaaacccaaaggttaaagagagagctgttgaacttgccaaggcaatggagaatgaggatggggtgagtggagcggtaaaagcattttttaagcatcttcctcgcaagaagccagaactggagccatcactggagccaccatctagtctgttctccattagtcggtgttttggttgttcgtgaatctggtatgcctgtttgtttcttccttttaagttgttttaagttaaatgtgttctgcagcccttgttgccgtcttattacctgagtctatctaaacatcatgaattctcatccctacttcgagaaatctacttattttaacagttaaagccacattttagcgtacaacataaatttgcattcatctcaaaggttaaaaataaa

SEQ ID NO: 3697 - DNA, 797 bp, Gossypium hirsutum
  Clone ID: GOSHI-09MAY01-C1901_1
cccacgcgtccgaaaaaatttggtgcctttggtttcatttcatgtccatctgccttctgttccacacattttgtcctaaattttagtgcccgactaccattgtaccgttctttggtgatcaacctttctggggagagcgggtgcatgccagaggagtgggacctccacccatcccagttgacgaattctcacttcccaagttggttggtgcaataaaattcatgctagatccaaaggtgaaggagagggccaatgaacttgccaaggcaatggagaatgaggatggggtgactggagcagtaaaagcatttcttaagcatcttcatcacaagaagccggagcgcgagccatcactggtgcaatccagtctattctccatcagtagatgtttcagatgttcatgaatcttgtatgtatgcttgtgtcttcctcgttgtgcgtgccatgcagtgtccatggtgttttacttcctaatctgaaacccaacgttcatgaatccgtccctcttttcatatccccatcccagctgcaattgttttaacagtcgagacacgttttagtgtgaaaaacaaaatttcattcgtctccaaggttgaaggcccattgtttttagtctttgagctacgatctatgtaggtttgagtcttccattcgtcttttaaaaacatgacgccattcctgttttgtatgcttgaaataaatgagtattactcaaaattgtgatatttttttcgaatttgttatgaggtaattatttattaaaagtacagtccctttataaggtgacttaataattt

SEQ ID NO: 3698 - DNA, 673 bp, Gossypium hirsutum
  Clone ID: AI728593.1
gacgttgtaggattttgctttcttgatcttgcaacaaattatgaacccccagaatcacttgtaaagtggcttgaagctggtgctgagcctatttatattggatttggtagccttcctgttcaagaacctgaaagaatgacccaaataatcgtgaatgcattggagcaaacaggacagagaggtatcattaataaaggctggggtggccttgggaatttggcagaacccaaggactttgtgtacatattggacaatgtccctcatgattggctatttttgcgatgcaaggccgtggttcatcatggaggtgctggaacaactgctgctggtcttaaagctgcggtgcatgccagaggagtgggacctccgcccatcccagttgacgaattctcacttcccaagttggttggtgcaataaaattcatgctagatccaaaggtgaaggagaaggccaaaaaacttgccaaggcaatggaaaatgaagatggggtgactggagcagtaaaagcatttcttaagcatcttaatcacaagaagccggagagcgagccatcaccggtgcaatccggtctattctccatcattaaatgtttcagatgttcgtgaatcttgtatgtatgcttgtgtcttcctcgttgtgcgtgtcatgcagtgtccatggtgttttctttct

SEQ ID NO: 3699 - DNA, 332 bp, Gossypium hirsutum
  Clone ID: LIB3165-011-P1-K1-D11
accacgcgtccgcccacgcgtgcgggagatccaaaagttcttacgggttatatgggaaaaaataagggctttttgccatcaaacccttctgagatttctattcagcgaaatcaaatgaaggaaattatctactctctacttcctgcttgcaaagaacctgatcctgattctggtattccttttaaggcagatgcaatcattgcaaatcctccagcatacgggcatacccatgtggcagaagcactaaaagtaccagttcatatattcttcactatgccatggacgccaacaagtgaatttccgcatcctttggcccgtgtgaagcaacctgc

SEQ ID NO: 3700 - DNA, 717 bp, Gossypium hirsutum
  Clone ID: GOSHI-09MAY01-C1921_1
cggacgcgtgggcggacgcgtggggaaaatagctgcaagtgcagacattccaatgttggtgtgtggggattttaattcagttcctgggagtgctccccattcacttctccctcgcggccgggtagatccactgcatccagaattattggtagatcctcttgcgattttgcgtcctcacagcaagttgactcatcagttgccactggttagtgcctactcaccctttgcgagaggtgttggtcttggtttggaacatcagagaagaaaaatggacatcacaactaatgaacctttattcacaaattgcacaagagattttatcggcaccctggattacatattctacaccgcggattctttaacagtggaggcattattggaactcttggatgaggatagcttgaggaaagacactgcccttccttctccagagtggtcctctgatcatatagcactgttagctgaattccggttccagacaaggcctagacgttaacacttttaaggtcatgaagatggccaagaaaatgactcttgagaagcccgaggatacaagataaaggtatttgtaagaatgatagatcaagctccctgtgttttttaaggtaaattctctttgattgagggatctttgctttgatctatctgctttgtaatatgtcaaacacctttgtttcatagaaaaaatgattactttttttttttttttgggcaaaa

SEQ ID NO: 3701 - DNA, 518 bp, Gossypium hirsutum
  Clone ID: LIB3829-014-Q6-N6-G12
gcaattatcagagtaccagctttcatttccccgagaccccaaaatggaagaacttagaagtacagttcattgattatactgaaccgctggacccatcatatttctattgaaaggggaaaaaattatgaaaatgaaaaggcataacaatgatttttctatgaaacagagctgtgtgacaacatattacaaagcagcagatcacggcaaggatccctcaatgagatgccttgaaaaacaaatgcggaggcatgatctacccattcttacaattttaccttttatatctatccatcagctgctcttctctcgccccatcttccaacacctaaacaaccaacaatctttcactacacctccggcaatttcatgttctgcacatacacttaaagtgtcagcgtctaggcctaggcacacaccgaaattcagctaacagagctatatgatcagaggaccactctggagaaggaagtgctgtatcttttctcaagctatcctcatccaagagttccaataatgac

SEQ ID NO: 3702 - DNA, 709 bp, Gossypium hirsutum
  Clone ID: GOSHI-09MAY01-C1881_10
cggacgcgtgggcggacgcgtgggcgggattacccgctgtgtttaagcatatcaataagcggaggacgaagcgattgctttgactgatagttctgttaatcttgagaacattgctgcccgaattatcgctgaagttttgggtcctgaaaggtacggccgggttcgatttcaaggatctggtgttaccccgacccaatattttggatccggctcccagcaatacatgccttccgggagtcaagctcaagctgaagttcagaggttaagagaccagatagctcagatgcaagcgagcccagttgagcaaattgccgaggttcaaagaaaatatgaagcgctccagcaataacttagagtggaggcagcagtagaaggaggcagcggcagcagcgagggagtcagaggcagcagcaatagcagcagatgtttcaacagtacgaagagctccagctccagctctcagtaaatgatgcagatgtttcaacagtcgcaaaagccgccatcttaaacattagttttctccttgtaaaaatgtttttaacattgtcactgttaggattttaacccgattaagcaacgaacaagaaaatagcgaaataaattgagatattgaacacgcccacatataaaataaaaaaaaagggatgtttaaaaaaaaaaaataaataatccacttgggtttgggataggaaaatgaaaaaagcctttt

SEQ ID NO: 3703 - DNA, 1615 bp, Gossypium hirsutum
  Clone ID: GOSHI-09MAY01-C1881_9
ccgggtcgaccagcgtcgggctaaggctgtactgcaggtcggtcagatagcaatggccgaacttttaatactcttcattaccactcgagactagaaccaatcaaactcaaaactactcaaatccagaagtctagaaagcagaggaaaaagcgtagaagaagattacgagatttaagtattgtccagaatactccaaattcggaagaagcaaatagtgaacagcagatagttgttggatcttcaaatgtgccggagacacttaacgagcctatagaattttaaactgaaagtggtgggacgcgcagaggtcgaggacgtaagctgcttaaaaatttatacgacttaaatcctgtctagcgtgtcaaagtaagtagaaacaatcatggtcagcctgttggatctgaagctcgacttttagcaggctatttggacattatatcacgaaatgctaatatgttacccatcaactacgaatcatgacatcacatgcttgatagcaacaaaaatcaaactctctataatattaaggagatatttgctttagaggtctccaatgactatatcaagaaggcattgggtaaaaattggagagaccataaaagcactttgaaaaaactatatttgaagaaagacataagccttgaagaaaaaattgagaaatgtcctgccgggaatgttgaggtaccaatgggaagatgcggttagattctgcaattcgaagaaaggagatgtattacgtatttccaaactcttatatatagtgtttactatatacctaataataatttcattatgtaggaccgtgagcgagttggaacaagcagcagagcaaaaacaaaaattcacgcacacggcaggggttgagaagttttgcttctgtagctgaggccgaggtattataattttattaattctttcaaatattaataactttctaatattaaataatatttttactactatattgtaagaagtcaaatctggacaaaaagttggacgccttcagctttttgagattacacataggaagaaagatggatctcctatgactcctgaagctgcagaaattatggagaaactaaaggagaagaaggcggagtacgaagcgattgcttccagtgagagttctgttcatcttgaagacattgataaccagattattgctaaagttttgggtcctgaaaggtatggtcgggttagatttcaaggatcttttattaacccaatccaatattttggatccagctcacggcaatacatgccttcggcgagtcaggcgcaagctgaagtgcagaggttaaaagaccagatggctcagatgcaagtgaccacaattgaggttcaaaagaaatatgaagaactccgctgcaacttaaagcagaggcagcagcgagggaagcagaggcggccgcgagggaagcaaagcagagcacaaagtacgatgaactccaacagcagctttagaatacgatgaagatgtttcatcaatcgtgacatccaccgtcataatgtactatataaatatttttatcattttaactttttaacatttttggtaaaataatatgaatgatattgtatttattgatatgaatattattccttgcggttattt

SEQ ID NO: 3704 - DNA, 847 bp, Gossypium hirsutum
  Clone ID: GOSHI-09MAY01-C1881_7
cttgaggaaaaattgagagatgtcctaccgggaatgctgaggtaccaatggggggatgctgttagattctggaattcaaagaaaggagaggaccgtgagcgagttggaacaagcagcagacaaaaacaaaaattcacgcatacggcagggtcgagaaattttgcttctgtagctgaggccgaggaaatctcttccggtaaaaaagttggatgccttcagctttttgagattacacataagaagaaagatagatcttctatgacatccgaagcttgagaaattattgagaaactaaaggagaagaaggcggagtatgaagcgattgcttcgactgattagttctgttaatcttgagaacatttgatatcagaattatcactgtagttttgggtcctgaaaggtacggtcggattcgatttcaaggatctggtgttaccccgacctaatattttggattcggctcccagcaatacatgccttccgggagtcaagctcaagctgaagttcagaggttaagagatcagatagctcagatacaagtgaacatggttgagcaaattgtcgaggtttaaaaaaaatatgaagaactccagcaacaacttagagcggaggcagcagagaaggaggcagcggcagcagcgagagaggcagagcagagtagaaagtacgatgagctccagctacagcttcagcatatgatgcagatgtttcagcagtcgcaaaagccgccatcttagacattagttttctcgttgtaagaatatttttaacattgtcatatttaacattattgtaagaatattttgagttatactttatttattaattacattatacttctttcgtt

SEQ ID NO: 3705 - DNA, 1278 bp, Gossypium hirsutum
  Clone ID: GOSHI-09MAY01-C1881_5
cccacgcgtccggtggaagaaaagaagtatttactattgttgttatttcttactaaaattttaactattttatgtgttgcaggaaaaatgcctagaagaagattaagagatctaagtattgtacagaatactacaaattcggaagaagtaagtactgaacagcagacagttgttggatcttcaagcgtgctggagacacttgacgagtctgtggaatttcaaactgaaaatggtcggacgtgcagaggtcgaggacgtacgctcctaacagatttatataacttaaattctgtcgagcgtgtcaaagtaactagaaacagccatggtcagcctgttggataagaagctcgacttttagcaggctatttgggcattatatcacgaaatgccaatatgttgcccatcaactacgaatcatgacatcacatgcttgatagcaacaaaaatcaaactctctataatattaaggagaggtttgctttagaggtctctgatgcctatatcaagaaggcattgggtaaaaaatggagagaccataaaagcactttgaaaaaactatattttaagaaagacataagcctcgaagaaaaattgagaaatgtcccgccgggaatgctgaggtaccaatgggaagatgcggttagattttggaattcgaagaaaggagaggaccgtgagcgagttggaacaagcagcaggcaaaaacaaaaattcacgcacacggcagggtcgagaagttttgcttctgtagctgaggccgaggaagtcaaatctggtcaaaagttggacgccttcagctttttgagattacgcataggaagaaagatggatctcctatgacatccgaagctggagaaattatggagaaactaaaggagaagaaggcggaatatgaagcgactgcttcgactgatagttctgttaatcttgagaacattgataacagaattatcactgaagttttgggtcctgaaaggtacggtcgggttcgatttcaaggatctggtgttaccccgacccaatattttggatccggctcccagcaatacatgccttccggaagtcaagctcaagctgaagttcagaggttaagagaccagatagctcagatgcaagcaaacacggttgagcaaattgccgaggttcaacgaaaatatgaagaactccagcaacaacttagagcggaggcagcagagagggaagcagagcagagcaaaaagtacgatgacctccagctacagcttcagtagatgatgcatatgtttcagcagtcgcaaa

SEQ ID NO: 3706 - DNA, 936 bp, Gossypium hirsutum
  Clone ID: GOSHI-09MAY01-C1881_4
atgtggatgaagatatttacgaataatgatgtagtaagattttacaattttttaattatatgtaatattataattttaatctttgtcatgttagggggttaactattttatatgtactactattgttgtaatttgttactaaaactttaattattttatgtgtattgcaggaaaaatgcgtagaagaagagtacgacccccgcgtccggtccagaatactccaaattcgaaagaagcaaatagtgaacagcagacagttgttggatcttcgaatgtgctggagacacttgacgggcctgcagaatttcaaactgaaagtggtgggacgcgcagaggtcgaggacgtacgctgcttaaagatttatacgacttaaatcctgtcgagcgtgtcaaagtaagtagaaacagtcatggtcagcctgttggatctgaagctcgacttttagcaggctatttgggcattatagcacgaaatgccaatatgttgcccatcaactacgaatcatggcatcacatgcctgatagcaacaaaaatcaagctctcgataatattaaggagagatttgctttagaggtctccgatgactatatcaagaaggcattgggtaaaaaatggagagaccataaaagcactttgaaaaaactatattttaagaaagacataagccttgaagaaaaattgagaaatgtcccgccgggaatgctgaggtaccaatgggaagatgcggttagattctggaattcaaagaaagggagatggaccgtgagcgagttggaacaagcagcaagcaaaaactaaaatttacgcacacggtaaggtcgagaagttttgcttctgtagctgaggctgaggtattatgaatctattaattctatcaaatattaataacttctactattaaataatatttttactactatattgtagaagtctcg

SEQ ID NO: 3707 - DNA, 714 bp, Gossypium hirsutum
  Clone ID: GOSHI-09MAY01-C1881_2
cttttggttaagaatttgtttccctgccttagagtgttaattgtcaccaattcctggatgtcctttacatctaaatttatcaaacctgttttttggtttgcagttgggcagcccaggtgtctggtcaagagttactagatcagaggcaatatgtgcaaaataatgaaaatgagtggggagtgtcagaaattcttataaaaattctctctggcaaaaatgtgaaggcatagcatgaaaattttggctctaatttagttgtataatgatcctgctatttttattcattgattggtcaattctgtacccccgcgcccgaataaatatatacatatatatatatatgatcttgccaaagtcagatatagcctttggccaaagaaatgaggtcaacttaatccaagggcagatgtgtgtttagatcttgaatatgtttgagttacagaattcattgctgccaaatatgtcttgtatagttccaattttatcatatctatcagcagtaatgttgtatcaagttcattccccttttattttctttcaactgctctatcagttaccactcgagatctaagaaaccaaattcaaactacaaatactactcaaatacacagaaagcctagataaccagaagccttgtcaagcatcaaatggctatctgttacttcttgtacattgcagtgcagcttcatgaacttttctagaaatacaaggtgc

SEQ ID NO: 3708 - DNA, 1816 bp, Gossypium hirsutum
  Clone ID: GOSHI-09MAY01-C1881_1
tccgccccgcgtccgcccaaacaacccattgccgtctccctctctctttttcgtcgacagcaagcaaagataagggatttcattttgaaatcaaacccgattggaggctacctttggcgagtccatcaaatcaaggaactctcatttacttgttcttttgaaccctagactttagcatgctgacattgatgcagccatcaatccaggaaacagtggaggtactctgttagattcgaagggaatttgattggaattaatgcggctatattcacacagacaggtacatcagctggtgtaggatttgctatcccgtcatccactgtgctcaagattgtacctcagctgatcaaatttggcaaagaaaaagcgtagaagaagattacgagatgtaagtattgtccagaatactccaaattcggaagaaggaaatagtgaacagcagacagttgttggatcttcgaatgtgccggagacacttgatgagcctgaagaatttcaaactggaagtggtgggacgcgcagagttcgaggacgtacgctgctttagagatttatatgacttagatcttgtcgagcgtgttaaagtaattagaaatactcatggccagcctgttggatctgaagctcgacttttatcaggctatttgggcatttttgcacgaaatgccaatatgttgcccatcaactacgaatcatggcatcacatgcctgctagcaacgaaaatcaagctctcgctaatattaagaagtctccgatgattatatcaagaaggcattaggtaaaagatggagagacaataaaagcactttaaagaaataatattttaagcaagacataagcctcaaggaaaaattgagaaatgtcccgccgggaatgctgaggtatcaatggaaagatgcggttagattttggaattcaaagaaaggagaggaagtcaaatacccttccgcgaacacccggacaaaaagttggacgccttcagctttttgagattacgcataggaagaaagatggatctcctatgacatccgaagctggagaaattatggagaaactaaaggagaagaaggcggaatatgaagcgattgcttcgagtgatagttctgttaatcttgagaacattgataacagaattatcactgaagttttgggtcctgaaaggtacggtcgggttcgatttcaaggatctggtgttaccccgacccaatattttggatccggctcccagcaatacatgccttccggaagtcaagctcaagctgaagttcagaggttaagagaccagatagctcagatgcaagcgaacacggttgagcaaattgccgaggttcaacgaaaatatgaagaactccagcaacaacttagagcggaggcagcagagagggaggcagcggctgcagcgagagaggcagaggcacgagcgatggtagcagaacagagcaaaaagtacgatgacctccagctacagcttcagcagatgatgcatatgtttcaacaatcgcaaaagccgccgtcttagacattagttttcttattgtaagaatgtttttaagttttgtcacgtttaacattattgtaagaatattttaaattatactttatttattaattatatcatatatctttagttgaatttgaagtcactataaaaaaaaaaaaaaaaaaaaaaaaaaaaaaaaaaaaaaaaaaaaaaaaaaaaaaaaaaaaaaaaaaaaagaaaagaaaagaagacgacacagaaacaaagaagcttgggggtggatgttattgaagtactaatttttacttcgttggtctgcccagtgtgagcttttt

SEQ ID NO: 3709 - DNA, 566 bp, Gossypium hirsutum
  Clone ID: LIB3825-012-Q1-K6-F5
cctaaacccaaaatttccccaatcaaaccctttgccgtctccctctctcttttcgatcgacagcaagcagaaagataagggatttcattttgaaatcaaacccgattgaaggctacctttggcgagtccatcaaatcaaggaactctcatttacttgttcttttgaaccctagactttagcatgctgacattggtaatcttagattgttgtgcttctctctctttttggggttttggggctatttgggtttttgaaatttcgaaatgtgatttagggttctgaactatgtaactaaaatattagtgttcatcttagttttataactgctagcagtaagtttatctacttgcatctgaacgaaaatcaaataaacagtgatgcatggaggtcatgttgcttgtatggataattaggatttgtggacttcgaaaattatgtttatgaaatgtgtcatgtctggctaatattacattttggttgcaaaattttcttaatatgttgtaagctctgtattcacaaattagctcttcttttgagtggttcctacatttccttgctttctggt

SEQ ID NO: 3710 - DNA, 630 bp, Gossypium hirsutum
  unsure (1)..(630): unsure at all n locations
  Clone ID: LIB3543-066-Q6-K6-A6
tccgaaaaccctaactttttcaccagggggctgtntgggggtgcccaacttttttccctatctactgcactgccgttgccatcaaaagtcctctgttgtaccgccgtcgccgtcgccatcgccgtcgaaagccctctactacatcgccgtcgaaagtcctctgttgcatcaccgtggacggggggggtggaccatcgtaaacagcaacccagagacagcaacctcatctggagaaattaaaggaaaaagggcggagtatgaagcaattgctttaagcgatagttctattaatctgaacaaaattgataaccgaattattactgaagttttaggtcctgaaaggtatggttgggttcaatttcaaggatcttttgttaacccaacccaatattttggatccagctcgtaacaatacatgccttcggcgaatcaggctcaagctgaagttcagaggttaagagaccaaatgactcagatgcaagtgagcacagttgaacaaattgctcaacttaaagcggaggaagcattgggagaagcagaggctcaaagaaaatatgatgaactctagctacaacttaaagcggaggcagtagcgagggaagtagaggcaagcaaaaaatatgacgaact

SEQ ID NO: 3711 - DNA, 524 bp, Gossypium hirsutum
  Clone ID: LIB3543-021-Q1-K1-H8
aataaaactaataagggctttgccttcccttgaaggacttcttatcttccatgaaatggttatcaagttgcttaaatcaaattccttgaagttgtgttagtagatcatagttttttctatcaggtttagattatggcattacatattttgtcttgacagacatcatgatgatgctatttttattcattgattgatcaattctataactcaaaacatgcatacatacatacatatatatatatatgatcttgccaaagtcagatatagtctttggccaaagaaatgaggtcaacttaatccaagggcagatgtgtgtttagatcttgaatatgttttagttacagaattcattgttgccaaatatatcttgtatagttccaattttatcatatttatcagcagtaatgttgtatcaagttcattcccctcttattttctttcaattgctctatcaattaccactcaagatctaagaaactaaatacaaactacaaatactactcaaatacacagaaagcctagat

SEQ ID NO: 3712 - DNA, 613 bp, Gossypium hirsutum
  Clone ID: LIB3825-014-Q1-K6-F4
atatcagtttagtttaagagcctacctaatttgtagcaatagcagcaatataaagacgatttgccaactgcttcaaactggatgagaaggtgtggagaatgatatagatgtagatgacagcacttcagtagaggaagtctgaatcaatttggtcgctgtactaaaagattatcttcagttggaattgttggcttgggcaagatcggatcagcaatagcaaaaagagccgaagctttcaactgctctatcagttaccactcgagatctaagaaaccaaatacaaagtacaaatactactcaaatacaaagcctagataaccaaaaggaaaaatgcttagaagaagattacgagatttaagtattgtccaaaatactccaaattccaaagaaggaaatagtgaacagcagacagttgttggatctttgaatgtgccagagacactcatggtcagcctgttggatctgaagctcgacttttagcaggctatttgggcattttagcatgaaatgcaaatatgtttcccatcaactacgaatcatggcatcacatgcctgatagcaacaaaaatcaggctctcgctaatattaaggagagatttgctttagaagtctc

SEQ ID NO: 3713 - DNA, 541 bp, Gossypium hirsutum
  Clone ID: LIB3829-015-Q1-N6-H3
aactaaagatatatgatataattaataaatatagtttaaaatattcttacaataatgttaaacatgacaaagttaaaaacattcttacaataagaaaactaatgtctaagatggcggcttttgcgattgctgaaacatctgcatcatctgctgaaactgtagctggaggtcaaagtactttttgctctgctctgctgccatcgctgctgcctctgcctctctcgctcgtgcctctgcctccctcgctgctgccgctgcctctctcgctactgtcgctgcctccttttttgctgcctccgctctaagttgttgctagagttcttcatattttcattgaacctcagcaatttgctcaaccgtgtccgcttgcatctgagttatctagtctcttaacctctgaacttcagcttgagcttgactttcggaaagcatgtattgctgggagccggatccaaaatattgggtcggggtaacactagatccttgaaatctaacccgatcgtacctttcaagacccaaaacttcagtgataattttgtta

SEQ ID NO: 3714 - DNA, 408 bp, Gossypium hirsutum
  Clone ID: LIB3135-029-Q1-K1-B5
cccacgcgtacgcccacgcgttcgaccacgcgtccgcccacgcgttcggattgagcaaggggtcgaggttcaacgaaaatatgaagaactctagcagcaacttagagcagaggcagcagagagggaggcagcggcagcagcgagagaggcagcggtagtaacaaacgtggcagaggcacgagctaaggaggcagaggcagcagcgatggcagcagagcagagcaaaaagtatgatgacctccagctacagcttcagcagatgatgcagatgtttcagcaatcgcaaaagccaccatcttagacattagttttctcattgtaataatgtttttaattttgtcacgtataacattattgtaagaatattttaaattatactttattaagtaataatatcatataactttc

SEQ ID NO: 3715 - DNA, 1045 bp, Gossypium hirsutum
  Clone ID: GOSHI-09MAY01-C1871_1
caaaaccctaatccctcatgtttttcctcgcttggccgacgaaagaaccaaaaccttagccattttgattctcatcggatctaaccgaaaaactcacactcatcaccatgacaccactgtatttgatgattggcgatgaatatatgcccctcttttacaccgtttgaaaccacaactcatggattaccgattttaactttgaaatcccataccgccccccgggcgcgacgaaggagatagggactccgacggtgtattttcgatggtaaacccttcctcctctgtatttttatgcgaaaacaaaaatatacaggacaaaaaaaaaggcaaatcgcaaaaactaaagaaaaaaaatcaccttctaatttttttggattgcttttcttgtatttcgtttgcctattttcaatgtgtgtgtaaaaaatttacaatggcagtattcttggctttatagccgaaacagagtaaaaaccgaaaaaagaaaatacaaatcgattggttctgcctctttgctgtgctgttgttgtctgtttctttgcaggtacggagccccgttggagcggtggtacgtggcgcttgacgtggggcgtacgggggctgtgtgctggaggctgctgaagcgttagaggctaagggctgcggcgctaggaaaccctaggtttccgtttggctgaacctaggtctaggttttgggccattgggccttttaggcattgggttatttgattgggctaggttgttttgtaaatgggcttgtaactgggctattgggtctgatatgtaatggactgataattagattttttattatttggttttttttatattttgtattttggttcttctttgggcctaggcaaaaatggcccattacaattattattttattggattctaaaaataaatgacatcaatttaaactgaaagattttcttttacttccagaaaaaaagaataaaaataccgaagaacaaaaagagcaaaatggagcgattcacattaaacgaacaaaccttaaattagtttaatttccaaaccatataac

SEQ ID NO: 3716 - DNA, 444 bp, Gossypium hirsutum
  unsure (1)..(444): unsure at all n locations
  Clone ID: LIB3189-041-P1-K1-G1
gtccgtttctttaatatccagtgtgcgtaacattataaacgatcaaatctcttggctttatagccgaagggatgaaaatgataaagataataaaaaaatacagtattctttttttgtttttgttttgttgtgcgttcgtcactttttacaagtatggggtgtgtgtggcgcgtgtaccagggctgtgtgctggcatacggaggcgatgtgctggaggctgctgaaatgctggaggttgtacgacgctggaggctaggggctgcggtgctaaggaaaccctaggattctgtttggctgaacctangtctaggttttgggccactgggacttttaggcattgggttatttgattgggctaggttgttttgtaaatgggcttgtaactgggctattgggtctgatattgtaatggactaataattggactttttattaattgggttt

SEQ ID NO: 3717 - DNA, 924 bp, Gossypium hirsutum
  Clone ID: GOSHI-09MAY01-C1831_1
aaagagggaaaaagaaattacagttttcgtgttgggttcggcattttagagagagtcgttggctgagatccgagttttgcgagaaaattaaagggaagggtactagtagttgaggcgaagctgaagctaatacaaaacagcggcaatttctgatttcagccctccgacacttcatccagattctgctcaatttctccgtttgattgaggattgggccaatcaaaacatcctataggtatctaaatcttctttatttacatttttggatctgcgccattgctattgcaatgtcccttttatccagattgcgatgtatcactgtggatgttactgggactctcatagcttataaaggggagcttggtgattactactgcatggcagccaaatctgttgggttgccatgccccgactataaacgcgtgcatcaaggtttcaagcttgcgtatacagagatggtgaacaagtatccgtgttttgggtttgcagcaaaaatgcctaacattgtttggtggaaaacttgtgttagagattcatttgtcagagcaggatacgagtacgatgaggagacatttgagaagatatttagacgcatatatgcttcctttggctcatccgcaccctatacggtatttccggactcacaacccttcctgagatgggctcgtgaaaagggtattaaagtggggattataagcaatgctgaatatcggtaccaagatgtgattcttccagccttgggtttgaaccagggaacagagtgggactttggtgtgttctctggtcttgaaggtgtagagaaaccagacccccggatctacgagattgctcttcaaagggctggaaatattgctccagaagagactctgcacgtcggtgacagcatgcgcaaaagattatgtaccagcaaggagtggggggatg

SEQ ID NO: 3718 - DNA, 1632 bp, Gossypium hirsutum
  Clone ID: GOSHI-09MAY01-C1821_1
gagtgatgatggaaccagtgctgaagcgatggctgaaagtggtgctatagaggccctcttagaacttctcagatctcaccagtgtgaggaaacagctgcaagactgctggaagtattactcaataatgtgaagatcagagaaacaaaagtaactaatactgcaattgtaccactatcccaatatctattggatcctcaaacgccaagctcagcaggcaaggcttttggcaacattggctcttggtgacctttttcagaatgaggcacttgctcgaagtgctgatgctgtttcagcttgtcgtgctcttgttaatgtgcttgaagaccaaccaacagaagaaatgaaagtggtagccatatgtgctctgcagaatcttgtaatgtatagccgatcaaataagagagcagttgctgaggctggtggtgttcaggttgtattggatctaataggttcaagtgatccagatacatccattcaagctgctatgtttgttaaacttctattttctaacaataccattcaagagtatgcttctagtgaaacagtacgagccataactgctgctattgaaaaggatttatgggccagtggaactgtcaatgaggagtatctaaaagctctaaattctttatttagcaacttcccacgtttgagagcaactgagcctgcaacacttagcattccccatttggttacatccctcaaaacaggttccgaggcaactcaagaagctgctttggatggtctttttctgctgaggcaagcttggtcagcgtgcccggctgaagtttctagagctcaatcagttgctgctgcagatgcaattccattgctgcagtacttaatccagtctggcccacctagatttcaggagaaggcagaatttctgttgcagtgcttacctgggacattggtggttataatcaagcgtggtaacaatatgaagcaatcagtaggaaacccaagtgtctattgcaaacttactcttggcaacactccacctcggcagaccaagattgtatcaactggtcctaatccagagtggggtgaaagttttgcgtggacttttgagagtcctccaaaaggccagaagctgcacatatcttgcaagaacaagagcaaaatggggaagagttcctttggaaaagttacaatccaaattgatcgagttgtaatgcttggatcggtagctggtgagtacacgttattgcctcaaagtaaaagcgggccatcacggaatttggaaatcgaattccagtggtctaacaagtgaagaaggtgagagagataattatcaccattattattattattactattattatttttcccggaaatttgatgattgatcaagtagggaacatacgttttggtttttccaattttatatcataatattacagtgtacatagtcttccggtgattttgacgtgtgtagaaatgttttattgtttcaaaaatagtgatttgtgaaagtattcatttaatttgtaatctgatttttcctttgcatttatttctgtagaggacacaggctatttttgctttgtaattctttgttggtgtgtgctttgtcaaatttgagagcaaaataaggatatcttgaattcaacttatgttttcatgtaaaa

SEQ ID NO: 3719 - DNA, 737 bp, Gossypium hirsutum
  Clone ID: GOSHI-09MAY01-C1581_1
cgtcccgtaaaaaccctatgatagaaaatcccatcttatcttttgtttcttatctctgtgagtccctgtttgtttcttacccgcctttcaggctcacccatatcttcttcttcttcaacaagtgttcttttcccctttcagtaacgcacaatctttaattaaatgctctccacaattctctcacctttataataatgcactgggttgtctacgcttgtatttttatattagtgagaagttcttgttcttacattgtttgtaatgttttcatgttttttgtgttttcccctttgatgggtagcttttgttgttgttgtgcttttcagtgaattctacgatttttattgtctgtcggaaatggcctctgttcttaggtttaggaaactatgctatgtagagtcagcggttaagtgtacttcagtggggtatgaatcttttgagattgatgaaaaactcgacaagaaggaagaggatgtcctttctgctaacaactttgccttggaaatcaacaagaagagaaaacaacctaagaggcaaccaaaagaatggaggtgcttagattcttgctgttggattattggttacctttgcaccacttggtggctccttttgttctgctaccactgcttgccggttacattgcttcgggttcctgaattaccaggccccggagtgaggcttaagcgtgaaggcttgacggcccttcaccctgtcgttttagtccctggcattgtcac

SEQ ID NO: 3720 - DNA, 1317 bp, Gossypium hirsutum
  Clone ID: GOSHI-09MAY01-C1571_1
aagccccttatatatcacccttaatatcacccttccttcctcgaaaacctccaaaactagtacaacaatggctctgatttccagtaacagctatattccctctttcaatctccaaatcttcatcttcctgttccttacagcaaaacccatttcctcttttgcccattcagcccttgacaacaaccccagctttgatccccacatttccctctttggtgatgcaagggttgaagatggaagctccgatgtgcagctcacgcgtcctcacgcgcctagttccgggcttctattgctagacaagccattgaagctcacaatggaaaacaatgtgggtcaaccggtgtcgttttcaactgagttttccttttctatagctcccggtaattgtgatggattagcttttgtgcttattcctaatggtttccacacaagatttcagggccaagggtcttttggtctttctggtgaaaatatattccttggtattgaatttgatacaaagaaagatgatgataaagctggaaactttaatgcaaatcatgtaagcattgatattcatggtgttgaatctgttaaacttagcaatttgtcatctctgaatttagtgttgaacagtgggaatgtcttgaaatcttgggttgattatgattcgagttccaaacttttacaagttagattaagcaaattagatgaaaataggcctttgaatccaattctagcataccatattgatttggtagaaatgtggggcaatcatgatgtttttcttggtataatatcaacaactagtgatgaatcttcacaaattagtagcaatgttaatgttcattcatggagattcagggtaaatgttgttccaagttggatgcattcattgcctgctgatccaagaagttacatggataacaaggatagtgaggaaactagggaagaaaaggggaagttttgtgctttgccaattctcgctaggttgattttcgctactggatgtggtgccttgtttgcgttcatgatgctggttatgtgggtgattttcgttagtaggcacacggtattccccgtcaagtatcaacccagtcatgaagatttcaggtatgagaaagtcaatgtggtggtggagaaggaagatcaatgcaataaggttaaaccatggagtcttataaaggttatgaatcgaatttcgtatagttgttgatctttgtagaagacgtaatgagctattcaacaaaactatgtacgccatcatcatgcatagctgcgtgtagcatcgtaatgcaatgtactcatgtacattgctgtcagcatatgctgaacatt

SEQ ID NO: 3721 - DNA, 494 bp, Gossypium hirsutum
  Clone ID: uC-gsflmaxxa090f02b1
ggggcgggggcggggtatccggggcgacccacgacgccgcccattttttcgcaaaacccatttcctcttttgccgagggggcctttgacaacaaccggggctttgatccccacatttccctctttggggatgcaagggttgaagatggaagctccgatgtgcagctcacgcgtcctcacgcgcctagttccgggcttctattgctagacaagccattgaagctcacaatggaaaacaatgtgggtcaaccggggtcgtattcaactgagttttacttttctatagctcccggtgattgtgatggataagctattgagctcattcctaatgggatacacacaagagatccgggccaagggtctcatggtcatgatggcgaaaagatattgcttggcattgcatttgatacaaagaacgatgatgataaagctggaaactttaatgcagatcatgtaagcattgatattcatggtgttgaatctgctaaacttagc

SEQ ID NO: 3722 - DNA, 595 bp, Gossypium hirsutum
  Clone ID: GOSHI-09MAY01-C1511_2
gaccacgcgtgcgaaggctgatatgaatacggtgtgagatacgtaacaatctatgcctccatcattgaaaatatcaagcgaagtcctgaggagagttcaatcattaatggacttgatgctaaagaagattcaagagatactcaagaaacagagcattgtcaaccgctatggtgttagagttatattttcagggaacctgaaactcttcagtgaaccagttaggttgccagcggagagagctatgcttgccactgctaagaactccaaggcagtcttgtccatttgcgttgcctacacttccactaatgagatcatgcatgctgttcaacaatcttgtgaagaaaaatgggatgaaattactctactgaattcaagtggagcaggttatggcttaatcagccttggagggtatcaacaggatgaaatgcatcaccttataaaacttactgatatcgtgaagcatatgtatatggcagctgcactctgaccctgctatcataaatacgtacttcttggtgagacacgtttgagcaattttcttttatggcagagtgcaaactgctatttatactcgccttcggttctttggccggag

SEQ ID NO: 3723 - DNA, 790 bp, Gossypium hirsutum
  Clone ID: GOSHI-09MAY01-C1511_1
tatacactactatagggaaactggtgcgcctgcggtacctgtccaaaattcccactcgacccacacttccgacgatttcatatatgataacatcttcatcggcaaaggatcctctggactcgcgagtcatatcaccgaattcatctcattactatagtccagatcctaatactccccacgcgcccgcccgcgcgtccgcggagagagctatgcttgccactgctaagaactccaacgcagtcttgtccatttgtgttgcctacacttccactaatgagatcatgcatgctgttcaagaatcttgtgaagaaaaatgggatgaaattactctactgaattcaagtggagcaggttatggcttaatcagccttggagggtatgaacaggatgaaatggatcaccttataaaacttactgatatcgagaagcatatgtatatggcagctgcacctgaccctgatatcataatacgtacttctggtgagacacgtttgagcaattttcttttatggcagagtgcaaactgctatttatactccccttccgttctttggcccggagattggttttcgtcaatttctgtggcccctattgaattttcagccaattcatttttacttggacaagctaaagaagcagtcataaaagcttccttgataatgatatgctagaattaaaagatagaaaatacaaaactgataggagaaattaagagagttttatgggaaatttgtgagaactttggtttttagttcggattttgtttgaatatccatctcgtactcttttg

SEQ ID NO: 3724 - DNA, 389 bp, Gossypium hirsutum
  Clone ID: LIB3493-032-P1-M1-H7
cgaccgtgggaaagcctgatacatctttagatgaggggaattgctaactgggatttctaatccatttgctgtaaataatcacatccttgtgcgtctatggccagaatatatggtgctttatctcaagatattgtctgtctgtgttgctcacttcatttagacatcatctggaagaatttggaaaaaaatggatgaattactctactgaattaagtggacaagttatggttaatcagccttggagggtatgaacaggatgaaatggatcaccttataaaacttactgatatcgagaagcatatgtatatgggagctgcacctgacccttatattataatacgtacttctggtgagacaacgttggacaaattttttttatggcagaatgc

SEQ ID NO: 3725 - DNA, 646 bp, Gossypium hirsutum
  Clone ID: GOSHI-09MAY01-C1501_1
attcgcttcatctttttatttctattcatcgtctttccccatctttatatttctctcttcattcctgcttttgagtttacgattgaagtaaagaaagatcgataatggcgggtggaggagtaattggcgtcggcggcggcggcggcggcgacggcaggaagccgtaccccgggaaccttactccttacgtcactataacatgtattgttgcagccatggggggtctgattttcggttatgatattgggatttctggtggggtgacgactatgacgccattccttcaaaagttcttccgaaaagtgtgggagaagaaggaagctgataagtcgactaaccagtattgtcaatacgatagccaaaccctgacgatgttcacatcgtcgctgtatttggccgctcttttgtcttccttggtagcctccaccgtcacccggaggcttggaaggaaattgtccatgctctttggtggtctacttttcttcgccggagctcttatcaatggatttgccaaagctgtttggatgttgattgttggtagaatgttgcttggtttcggtgtcggattcgccaatcagtcagtgcccctctacctctcagaattggcaccctacaaatatagaggagcattgaacattgggttcca

SEQ ID NO: 3726 - DNA, 551 bp, Gossypium hirsutum
  Clone ID: GOSHI-09MAY01-C1451_15
atcgatgatggccctcttactgaacatgagtcagtcggaatgcttgtatggcgttacatgtcatgagatgcttcaaattggagatgtcaggtggctccagaaacagcccaatgatgacctcaaaaacatggaagctattcctcccattgatgcactcaaccctaccgagttcaatggacccggtgttggcattcacgaacatcatgttgtcccaaaaggttccgaaattgggactcttggttttggttttgaacgtggtcctgaaaaatgggggtcttctggatgttccggtaatggttatcctggtgggttcgttcctaccattgcctcaaattaccagaggtcccatgatttccacggatcccccaggtccctcaaatccctcaaattccactatatacccacggagcccactagttccacataatcccactaatgccaggacaggcgggatgtgagagtggggtgtgttgccgccacggttgccgaggaacttgacctgagtgatgacgggccaggtgcgcataaggattttgacagccttaagctgt

SEQ ID NO: 3727 - DNA, 663 bp, Gossypium hirsutum
  Clone ID: GOSHI-09MAY01-C1451_13
attcaaacaatattattatttaaataaagtttcgttatcatcaactgattttacagtacaaagcacaaacatgaagaaactttttgagggattctcctgtctttgcatatcagagagataattaataaataaacaaagcataggaagtcctaaaaggggaggataaaacacaagtagataggatctgaaattagtaacagaagcatatgtttaggagccttaggagatggtggtccaagttgaagaaaacaaagcaatgggctgcaagaacaggatgaactgaagggacatgttgaagataacatcactggcagtagctgcaattgttctaaatccacctgccacacacccgtctgtaataaaatctgcaatcttaattctgtcggggtttttatctgtacccttcagttcgggtgttaggttgctccaggaacagcccaatgatgaccccaaaaacatggacgctattcctcccattgatgcactcaaccctaccgagttgaatggacccggtgttggcattcacgcagatcatgttggcccattaggggctgtggtgggtacccgtggtggcgggctctgaggctcgacaccggaaactactcatggggaagtgaggctgtgacttcgtagaccaggattttggatgtggtgtacaatgca

SEQ ID NO: 3728 - DNA, 689 bp, Gossypium hirsutum
  Clone ID: GOSHI-09MAY01-C1451_12
ccggaaagattatttctttaatccggggcaggacatgacggtgggcacatcctggaactattgagaccagagacagttgaatcactcttttatttgtggcgcttaactggtaataagacatatcaagagtggggttggaatatatttcaggcatgccacgcgtccgcccggatagaatctggatatgttggactgaaggatgttaacactggtgtaaaagacaacaagatgcaaagtttttttcttgcagagacgctgaaatatctttatcttcttttctcaccacctaccgtcatcccattggatgagtgggtattcaacacagaagcgcaccctttgcgaatcgttaaccgcaatgatgcaaatcttgcagcattggaagggcaacataaaccctgtgatcaaaatacgaagcaggaaaactggtcgattgggtggtaattaggatttgtttccagtttattgttccttgctgaactatgagattttaatcctcaaatagacgacaagccttactttataatgataccattttaagatgaaataccggggaagggttgggttgtcgtctttttaattatacccaaataagaagtaatgttgttgccgaagggtttgctataaaaccctccttgggcaaaaagggtttttttgaagaataaatggccccaaccaatattcgttttgcc

SEQ ID NO: 3729 - DNA, 606 bp, Gossypium hirsutum
  Clone ID: GOSHI-09MAY01-C1451_11
ctgataaagttgttcttctggatgttccggtaattgtaatcctggtggtttcgttctaccatttcctcaaattccagatatcccaagaattccagaaatcccacaaatcccccagatcccacaaatcccacaaattcccctaatcccacagatcccacaagtcccacagatcccacaagtcccaaaaatcccactaatgccaggacagtcgggatgtgagagtggagagtggtgggacttgtgctgagtgtggtcagcccaggtgcgcatcaggatgttgccaggctgaaactgtaaagagcaaagggatagaagaggttatggccagtgaacccagtcccccaaagtagagagatgatcccatattaagatgaaataacgaggaagagttggttgtcgtcttattaattatccaaaataagaagtaatgatgttgcagaagggtttgctataaaatcctccttggccaaaaagagtaattatgaagaataaatagctcaaaacaatattcgatttgcaatatcctaaagttccttgaatcttgttttgtagccatatgtaattaatgcatgtgcatgctaatatatatgtttttctttgttatat

SEQ ID NO: 3730 - DNA, 646 bp, Gossypium hirsutum
  Clone ID: GOSHI-09MAY01-C1451_10
taaccaaagcttaggaagtactaaaagtggaggataaaacacaagtagataggatctgagattagtaccagaagcatatgtataggagccttaggagatggtggtccaagttgaagaaaacaaagcaatgggcagcaagaacaggatgaactgaagggatatgttgaagataacatcactggcagtagctgcaattgttctagatccacctgatgttgatgagttgctgcctggggtatcatttgaatggggtggtaaaccttgaggtgaaccagatggagatattgaaattacagcaggtccatcagcagctttgcagttgctctcaggtggggttttgacatggcaaagttgagggagtgcaagggcaagtgtctggtttacttccacacccagtgatgaacctccaccactgagggccatgcaaaggcaatgtggctgtaattgaacaacgttagcaagctgtgagcagcatggaacagatggggttgaggaggttccagtcacataatcaacgcatggagccatcgtgattagcacactggtgcagtctgattgagccatggttccagtccatagcaaagttaccatgaccaaggctagaccctgcacaagggttatcttccctcaacgccggacgcgtggg

SEQ ID NO: 3731 - DNA, 1032 bp, Gossypium hirsutum
  Clone ID: GOSHI-09MAY01-C1451_9
cccacgcgtccgcccacgcttcctttttcttcttcacagatttgcttcaaccccctcccgctcttccccctgctaaaaggcttgagctttcagccaaaatgggtatttctcgtgattcgatgcacaagaggcgtgccacaggtggcaaaaagaaggcttggaggaagaagagaaagtatgagcttggaaggcaaccagcaaacacaaagttgtcaagcaacaagacagtcaggaggattagggttcgtggtggaaatgtgaagtggcgcgctctgaggctcgacactggaaactactcatggggaagtgaagctgtgactcgtaaaaccagaatattggatgtggtctacaatgcatctaacaatgagcttgttcgtactcaaactttggtgaagagtgctattgttcaagttgatgctgctccattcaagcaatggtatctccagcactatggtgtcgaccttggtcgcaagaagaaaacacttgcagcagctaccaagaaagatggagaggaaggtgaaactgttgctgaggaggcgaagaagagcaaacatgtcttaaggaagttggaaaagcgtcagcagaaccgcaagctcgacccacatattgaggatcaattcagtagtggtcgtttactggcttgtatctcttcacggcctggtcagtgcggccgtgctgacgggtatatcttggaaggcaaagaactggagttctacatgaagaagatccagagaaggaagggaaagggagctgcctaaagttttgttacttgagatttcatatttcagaccaaatgtccctttttttaacctttctttcaccattttcaggagattttgagattgtgatagtggttacacttttagtatgaattttcaagtagtgaagttgtgtcttaattcaacagtattatcatataccttgagctgcatgttttttttgtacttggaatttagttgatatttaacttaatataaatggcagcctgttttgggaatttgtattaaaaaaaaaacaaaaaaaaaaactcga

SEQ ID NO: 3732 - DNA, 943 bp, Gossypium hirsutum
  Clone ID: GOSHI-09MAY01-C1451_8
agcgcccgcaccgcactcccaccctcgcctcagtctcttctgggatttgcttcaacagacaacccccccccaaaaaaaacccttgaactttttccgcagtcaaaatgggtatttctcgtgattcgatgcacaagaggcgtgccactggaggtaaaaagaaggcttggaggaagaagagaaagtatgagcttggaaggcaaccagcaaacacaaagctttcaagcaacaagacagttagaaggattagggttcgtggtggaaatgtcaagtggcgtgctctcaggctcgacactggaaactactcgtggggaagtgaggctatgactcgtaagacccgaattttggatgtggtgtacaatgcatccaacaatgagttggttcgtactcaaactctggttaagagtgctattgttcaagttgatgctgcaccattcaagcagtggtatctccagcactatggtgtcgacattggtcgcaagaagaaaacagcagccaagaaagaaggagaggaaggtgaaactggcactgaggaggtgaagaagagcaaccatgtcttgaggaagctggagaaacgacaacagaatcgcaagctcgatccacatatcgaggatcaatttgcaagtggtcgtttgttggcttgtatctcttcaaggcctggtcagtgtggccgcgctgatgggtatatcttggaaggcaaagagctggaattctacatgaagaagatccagagaaagaaggggaagggagctgcctaaaaattttgttatgtgagcttttaacatatcatgtcagaatctcctctctgctacttttatctttttacaggacattcaagattgtattagtttttgaactttttagtttgaatgtcaactagtgggttggtgtgtaatggtgaacaatataatatttgtgtttgaattttgatattcttgaactttat

SEQ ID NO: 3733 - DNA, 966 bp, Gossypium hirsutum
  Clone ID: GOSHI-09MAY01-C1451_7
cccacgcgtccgcccacgcccccgcttgttgcttccctttttttaaaaaaataaaaaataaaaatcccattaaggcttgaactgttcttcagccaaaatgggtatttctcgtgattcaatgcacaagaggcgtgccactggtggcaaaaagaaggcttggaggaagaagagaaagtatgagcttggaaggcaacctgctaacacaaagctgtcaagcaacaagacagtcaggaggattagggttcgtggtgggaatgtgaagtggcgtgctctgaggctcgacaccggaaactactcatggggaagtgaggctgtgactcgtaagaccaggattttggatgtggtgtacaatgcatccaacaatgagctggttcgcactcaaactctggtgaagagtgctattgttcaagttgatgctgctccattcaagcagtggtatctccagcactatggcattgacattggtcgcaagaagaaatcagctgcagccaagaaagaaggagaggaaggtgaaactgctactgaggaggtgaagaaaagcaaccatgtattgaggaagctggagaagcgtcaacaaaatcgcgcgcttgacccacatattgaggaacaatttggcagtggtcgtctgttggcttgtatctcttcacggcctggtcaatgtggccgtgcagatggttacatcttggagggcaaagagctggagttctacatgaagaagatccagagaaagaaggggaagggagctgcttaaaaaattattgcatagttttcagcattcatatcagaatgccgcccttagggtttgcctttcacatttccagaacatttaaagttgtgttagcattgaacttttaatctggatccctgagagttattatttttgtattggaatttagattatctttgaactttataaatgcagcttattttggttggtaaagatgcagatcttctgcttttattttt

SEQ ID NO: 3734 - DNA, 881 bp, Gossypium hirsutum
  Clone ID: GOSHI-09MAY01-C1451_5
cggtccctcttctttgagattttgcttcagcactctaaggcccctgccaagccaaaatgggtatttctcgtgattccatgcacaagaggcgtgccactggtggcaaaaagaaggcttggaggaagaagagaaagtatgagcttggaaggcaacctgcaaacacaaagctatccagcaacaagacggtcaggaggattagggtccgaggtggaaatgtgaagtggcgtgccttgaggcttgacacaggaaactactcctggggaagtgaggctgtgactcgtaagaccagaattttggatgtggtgtacaatgcgtctaacaatgagttggttcgtacacaaactctggtgaagagtgctattgttcaagtcgatgctgctccattcaagcaatggtatctccagcactatggtgttgacattggccgcaagaagaaagcagcagcaggagccaagaaagaaggagaggaaggtgaaactgctactgaggaagtgaagaagagcaaccatgtcttgaggaagctggagaaacgtcagcagagtcgcacacttgacccccatatcgaggagcaatttggtagtggtcgtttactggcttgcatctcttcacggcctggtcaatgcggccgtgctgatggatatatcttggagggcaaagagctggagttttacatgaagaagatgcagagaaagagggggaagggagctgcctaaaattttgttgcttttgagtatttcatcattaagatcaaaatgtccttttttttttgcctttcaccatttgagaacatttgaaattgtgttagttttgagctttttttttttagtttgaatattaattattgtgtacttttatatacttgcatgttattttttgtactt

SEQ ID NO: 3735 - DNA, 1422 bp, Gossypium hirsutum
  Clone ID: GOSHI-09MAY01-C1451_4
tccaaaccgaccccccccccccccccccagaaaaaagaggttgtctccaaaaattaagatctcaatatattattcttcgtcgttctcctttacagatttccttttaagtttgtttttccccccttagtttaaaagatgtcatcaagtgaagagccattctcacaagtgcaggcacggttagctgtgcttgcagctcatttagcagctcctgattgctcctccaacaacctcaattcttctgtcctcgagccatggtgcgtgtcggctcagaacggtggctctgttggcctttcattaaccatcatcgacgagcgaaccgggaagaagtaccaggtccctgtctccagcgaaggcactatcagagctaccgatttaaaaaagataacaacagggaaaggtgataaggggcttaaagtttatgatccgggttacttgaatacagctccggttcggtcgtcgatttcttatatagacggtgatgaagggattcttagatacagagggtatccaattgaagaactggctgagagttccactttcttggaagtggcatacctcttaatgtatgggaatttgccttctgaaagtcagttagcagactgggaatttgctgttagccagcattcagctgtgccgcaagggattctggacattatacaatcaatgcctcatgatgctcatccaatgggtgtacttgtcagtgcaatgagtgctctttctgtttttcaccctgatgccaatcctgctcttagaggccaagaaatttataagtcgaaacaagtgagagacaagcaaatagctcgcattattggaaaggcaccaaccattgctgctgcagcttatttgaggatggcaggaaggcctccggttcttccttccagcaccctttcttatgctgagaactttctctatatgctagattcaatgggcaaccggtcttataagcccaaccctcggggagctcgccggctggccactctttttatactacatgcggaacatgaaatgaactgttccacagctgctgcccggcatcttgcatcaggtggagttgatgtatacactgctctagctggagctgttggagcactatatggtcctcttcatggtggagccaacgaggctgtgctcaagatgcttggtgagattggaacactagagaacattccagagttcattgaaggtgtcaaaaacaggaagcggaaaatgtctggttttggccaccgcgtatacaaaaactatgatccacgggccaaggtgataaagaaattggcagaggaagttttttctattggtggccgggatccacttattgaggtagctattagtttggagaaggccgcattatctgacgaatattttatcaagaggaagctttatccaaatgttgatttctattctgggttaatataccgggccatg

SEQ ID NO: 3736 - DNA, 689 bp, Gossypium hirsutum
  Clone ID: GOSHI-09MAY01-C1451_3
gggttgtggtgggacttgtgctgagtgtggtcagcccaggtgcgcatcaggatgttgccaggctgaaactgtaaagagcaaaggtgataaagaaattggcagaggaagttttttctattgttggccgggatccacttattgaggtagctattagtttggagaaggccgcattatctgacgaatattttatcaagaggaagctttatccaaatgttgatttctattctgggttaatataccgggccatgggatttccaccagagttcttcactgtgttatttgcaatccctcgaatggctgggtacttggcacactggcgtgagtctctagatgatcccgatacaaagataataagaccccagcaggtttataccggtgtatggctacggcattatatgccactcaaggagcgcatggcgttgaatgatgcagacaagcttactcaagtatccatatcaaatgcctcgagacggcgactggctggttcgggggtttaggctttactgttatattataacatcaccaagtgaaataaaatggcaaacgggccgtatatgtatctctgctaaaataaatttactacccttgtcaatggctttctgcttgaaaactgtatgcttttgagctgacataatgcaatttgccccttatcttgttggacctattgttgatgggatccatgtcttgtt

SEQ ID NO: 3737 - DNA, 1082 bp, Gossypium hirsutum
  Clone ID: GOSHI-09MAY01-C1451_2
aaaaaaaagagaggcgtctgtaataaatctgcatcttattctgtccgtgctgtaataaaatcgccactcttaattctgtcggtgtttttatctgtacgcttcagttcgggtgttaggttgctccttcacgcgtccgcccacccatccctttcaaacgaaaaaaagagagatggcgtctgtaataaaatctgcaatcttaattctgtcggtgtttttatctgtacgcttcagttcgggtgttaggttgctccaggaacagcccaatgatgaccccaaaaacatggacgctattcctcccattgatgcactcaaccctaccgagttgaatggacccggtgttggcattcacgaagatcatgttgtcccaaaaggtgctgaaattggtactcttggttttggttttgaaggtggtcctgataaatgttgttcttctggatgttccggtaattgtaatcctggtggtttcgttctaccatttcctcaaattccagaaatcccaagaattccagaaatcccacaaatcccacagatcccacaaatcccacaaattccactaatcccacagatcccacaagtcccacagatcccacaagtcccaaaaatcccactaatgccaggacagtcgggatgtgagagtggagagtgttgccgtcagggttgtggtgggacttgtgctgagtgtggtcagcccaggtgcgcatcaggatgttgccaggctgaaactgtaaagagcaaagggatagaagaggttatggacagtgaacccagtccaccaaagtagagagatgataccatattaagatgaaataacgaggaagagttggttgtcgtcttattaattatacaaaataagaagtaatgatgttgcagaagggtttgctataaaatcctcttggacaaaaagagtaattatgaagaataaatagctcaaaacaatattcgatttgcaatatcctaaagttccttgaatcttgttttgtagccatatgtaattaatgcatgtgcatgctaatatatatgattttctttgttatataaatttctgctaaaaccttcaactcgctcttttccttttttttaag

SEQ ID NO: 3738 - DNA, 1160 bp, Gossypium hirsutum
  Clone ID: GOSHI-09MAY01-C1451_1
cccacgcgtccgataaaatagtggtcggatctgtgatgtctggccgtactacaaataaggtatggatcctgacttgcgtagaaagccaccatagcctcttttgccataccaaagtttatttcttcagggttggaacagtatctgttggtatacgtttagaatacaatacagtcaaatgaatggattgctacatttgccccatttaaaaagaaaaaaagagagatggcgtctgtaataaaatctgcaatcttaattctgtcggtgtttttatctgtacgcttcagttcgggtgttaggttgctccaggaacagcccaatgatgaccccaaaaacatggacgctattcctcccattgatgcactcaaccctaccgagttgaatggacccggtgttggcattcacgaagatcatgttgtcccaaaaggttccgaaattggtactcttggttttggttttgaaggtggtcctgaaaaatgttgttcttctggatgttccggtaattgtaatcctggtggtttcgttctaccatttcctcaaattccagaaatcccaagaattccacagatcccacagatcccacaaatcccacaaattccactaatcccacagatcccacaagtcccacaaatcccactaatgccaggacagtcgggatgtgagagtggggagtgttgccgtcagggttgcggtgggacttgtgctgagtgtggtcagcccaggtgcgcatcaggatgttgccaggctgaaactgtaaagagcaaagggatagaagaggttatggacagtgaacccagtccaccaaagtagggagatgataccatattaagatgaaataatgaggaagagttggttgtcgtcgtattaattatacaaaataagaagtaatgatgttgcagaagggcttgctataaaatcctgttggataaaaagagtaattatgaagaataaatagctcaaaacaatatttgatttacaatatcctaaagttccttgaatcttgttttgtagccatatgtaattaatgcatgtacatgctaatatatatgattttctttgctatataaatttctgctaaaaccttcaacacgctacgatctggtaaaatccatcgaattcctattaaaataataagaaagaaacatgaaattattttcaagggt

SEQ ID NO: 3739 - DNA, 371 bp, Gossypium hirsutum
  Clone ID: LIB3146-033-Q1-K1-A5
cccttttgcaggctggtgcttctttggaatctcttgctaaaggtactaagaactcaatgggcttgtcaacaattgcactgaattgcacagaaagtagctattagtttggagaaggccgcattatctgacgaatattttattaagaggaagctttatccaaatgttgatttctattttgggttaatatatcgggccatgggatttccaccagagttcttcactgtgttatttgcaatccctcgaatggctgggtacttggcacactggcacgagtctctagatgatcccgatacaaagataataagaccccaacagcaaaaattgtgagagtgaaagaaggggaaagaagatgaaagcaaaaagggaacttg

SEQ ID NO: 3740 - DNA, 521 bp, Gossypium hirsutum
  Clone ID: LIB3829-036-Q1-K6-F2
gccgccgtcgccaccaccaccaccaccatcaacaacaagtttggtcacactccctcttcttccatgtttaaaggtggcaatgtgaagtggcgtgccttgaggcttgacacaggaaactactcctggggaagtgaggctgtgacttgtaagaccagaattttggatgtggtgtacaatgcgtctaacaatgagttggttcgtacacaaactctggtgaagagtgctattgttcaagtcgatgctgctccattcaagcaatggtatctccagcactatggtgttgacattggtcgcaagaagaaagcagcagcaggagccaagaaagaaggagaggaaggtgaaactgctactgaggaagtgaagaagagcagccatgtcttgaggaagctggagaaacgtcagcagagtcgcacacttgacccccatatcgaggagcaatttggtagtggtcgtttactggcttgcatctcttcacggcctggtcaatgcggccgtgctgatggatatatcttggagggcaa

SEQ ID NO: 3741 - DNA, 574 bp, Gossypium hirsutum
  Clone ID: LIB3825-029-Q6-N6-B2
atataaaagtacacaataattaatattcaaactaaaaaaaaaaaactcaaaactaacacaatttcaaatgttctcaaatggtgaaaggcaaaaaaaaaggacattttgatcttaatgatgaaatactcaaaagcaacaaaattttaggcagctcccttccccctctttctctgcatcttcttcatgtaaaactccagctctttgccctccaagatatatccatcagcacggccgcattgaccaggccgtgaagagatgcaagccagtaaacgaccactaccaaattgctcctcgatatgggggtcaagtgtgcgactctgctgacgtttctccagcttcctcaagacatggctgctcttcttcacttcctcagtagcagtttcaccttcctatagataaatggaggattaaaagaagaaccatacacatcattacctccctctattttagggactagataaaattagtcctattgttaaatggatcaatttaatctctgtaattttaaaaaagtcaaataggactgaattgtaacagagctaacatttactgtttaaaaagtgaccatttgcac

SEQ ID NO: 3742 - DNA, 557 bp, Gossypium hirsutum
  Clone ID: uC-gsflmaxxa096g04b1
aagcttcaaaccgacccccccccccgcccccctaggggaatgtttgtagactgctttcattaacatctcaatatattactcttcgcgggtctcctttagagatttccttttaaggtggattttccccccttagtttaaaagatgtcatcaaatgatagaacccttctcacaagtgcacgcacggtgagctgtgctaccgtgccatttggcagctcctgattgctcctgcaacaaccttgatgcttgtgcactcgagccatggtgcgtgtcggctcagaacggcggctctgttggcctttcattaaccatcatcgacgaagcgaaccgggaagaagtaccaggtccctgtctccagcgaaggcactatcacagcttccgatttcaaaaagatgacaacagggaaaggtgataaggggcttaaagtttatgatccgggttacttgaatacagctccggttcggtcgttcatttcttatatagactgtgatgaagggattcttagatacagggggtatccaattgaagaactggctgagagttccattttcttggaaggg

SEQ ID NO: 3743 - DNA, 402 bp, Gossypium hirsutum
  unsure (1)..(402): unsure at all n locations
  Clone ID: LIB3166-028-P1-K1-C5
ggaaanaacggggcggccacgcgtccgtgcttaaacagacccccccccaaattttttcccttgaactttttccgcagtcaaacgccgtatttctcgtggttcgatgcacaagaggcgtgccactggaggtaaaaagaaggcttggaggaagaagagaaagtatgagcttggaaggcaaccagcaaacacaaagctatcaagcaacaagacagttaggaggattagggttcgtggtggaaatgtcaagtggcgtgctctgaggctcgacactggaaactactcgtggggaagtgaggccgtgactcgtaagaccagaattttggatgtggtgtacaatgcatccaacaatgagttggttcgtactcaaactctggttaagagtgctattgttcaagttgatgc

SEQ ID NO: 3744 - DNA, 307 bp, Gossypium hirsutum
  Clone ID: LIB3148-042-Q1-K1-F6
cttcctttcaaaccctagcttccttcttctttgttattttgcttcagcactctaaagccgcgggaagccaaaatgggtatttctcgtcattccatgcacaagaggcgtgccactggtggcaaaaagaaggcttggaggaagaagagaaagtatgagcttggaaggcaacctgcaaacacaaagctatccatcaacaagacagtcaggaggattagggtttctaagtggcaatgttaagtggcgtgccttgaggcttgacacatgagtggagctattgaaacctggaaacttttgtgacaatactctt

SEQ ID NO: 3745 - DNA, 477 bp, Gossypium hirsutum
  unsure (1)..(477): unsure at all n locations
  Clone ID: LIB3493-003-P1-M1-C12
agatgcaaagtttttttcttgcagagacgctgaaatatctttatcttgttttctcaccacctaccgtcatcccattggatgagtgggtattcaacacagaagcgcaccctttacgaatcgttaaccgcaatgatgcaaatcttgcagcattggaagggcaacataaacctgtgatcaaaatacgaagcaggaaaactggtcgattgggtggtaattaggatttgtttccagtttattgttccttgctgaactatgagattttaatcctcaaatagacgacaagccttactntataatgatatcatttcttgaaatggatagaagagtgactctctagtttctaacagagaagcgtgcagctcgaccaaatccttcattccaggttagtgtaaactggtgtatcattatattcacgtggattgaaatggcctgtatgctatcaatttacctttttaaaatggatatttagcataaagc

SEQ ID NO: 3746 - DNA, 477 bp, Gossypium hirsutum
  Clone ID: uC-gsronu33B149f05b1
cctactcgtccgcccacgcgtccgcccacgcgtgcgcccactcgtccgcagctaccaagaaagaaggagaggaaggtgaaactgttgctgaggaggcaaagaagagcaaccatgtcttaaggaagttggaaaagcgtcagcagaaccgcaagcttgacccacatattgaggatcaattcagtagtggtcgtttactggcttgtatctcttcacggcctggtcagtgcggccgtgctgacgggtatatcttggaaggcaaagaactagagttctacatgaagaagatccagagaaggaagggaaagggagctgcctaaagttttgttacttgagatatcatatttcagaccaaatgtcccttttttaacctttctttcatcattttcagtagattttgagattgtgatagcggctacacatttagtatgaatcttcaagtagtgaagttgtgtcgtaattcaacagtattatcatata

SEQ ID NO: 3747 - DNA, 243 bp, Gossypium hirsutum
  Clone ID: uC-gsflmaxxa098a06b1
cccatgcttccgcccacacgtccacccacccttgtggggctttttcaccccccatgggggttacaaacctaattctgtccgtgttattatctgaacgcttcacttcaataagtcatgttgcctccaggaacaacccaatgatgaccccaaaaacatggacgctattcctaccattgatgcactcaaccctaccaaatcgaatggacccgcccttggcattcaccaatatcatgttatcccaaa

SEQ ID NO: 3748 - DNA, 424 bp, Gossypium hirsutum
  Clone ID: LIB3146-044-Q1-K1-H2
cggacgcgtgggcggacgcgtgggcggacgcgtggggaaatcccaagaattccagaaatccgacaaaggccacagatcccacaaatcccacaaattccactaatcccacagatcccacaagtcccacagatcccacaagtcccaaaaatcccactaatgccaggacagtcgggatgtgagagtggagagtgttgccgtcagggttgtggtgggacttgtgctgagtgtggtcagcccaggtgcgcatcaggatgttgccaggctgaaactgtaaagagcaaagggatagaagaggttatggacagtgaacccagtccaccaaagtagagagatgataccatattaagatgaaataacgaggaagagttggttgtcgtcttattaattatacaaaataagaagtaatgatgttgcagaagggttt

SEQ ID NO: 3749 - DNA, 254 bp, Gossypium hirsutum
  Clone ID: LIB3493-049-P1-M1-A4
ctcacacatactctgacatcttaggggtcggcgtgtttttatctggaatcttcacttcgggtgttaggttgctccagtaacagtccaatcatgacctcaaaaacatggacgctattcctcccattgatgcactcaaccctaccgacttcaatgtacccaatgttgacattcaccaaaatcatccttttccaaaagaaaccttaattgctacttaaatgtatggacacggaagagagttttgatcaatgcattta

SEQ ID NO: 3750 - DNA, 232 bp, Gossypium hirsutum
  Clone ID: LIB3145-028-Q1-K1-B6
gctgcttaaaaatttattgcatgagttttcagctttcatatcagaatgccgccctgagtttttgcctttcacatttccagaacatttaaaattgtgttagcattgaacttttaatctggatccctgagagatatttattctgtattggaactaagagaatgcttaaagcttgataagactaataaccatttgcttatttagattgactcctttgttggaaacaccccggata

SEQ ID NO: 3751 - DNA, 635 bp, Gossypium hirsutum
  Clone ID: GOSHI-09MAY01-C1441_1
aagaaaatgaaaaacacggttccttcagcttctccttgttcttccaagtcccttcctcctactcctcctccaccttaccaatcccctcttttcactcctactcaagaatgtgaaagggaagaacaagaagaaggtacaccaagtgtgacgacggataaagggctgacgccgaagcacctcccaacacccctccatgacaaaaccactagaaaacccaacgctaggaaacgttcggaatctggtggtggtgatggagatggctcggtttcttgcaacaagtgtaggccaaattctagggagaagatctccgtggttcctttggacaacaacaatggagttaacaagcattccttttccatgccaagtcctaatgggattttcaagtccattttccattctttaacaaggaagagtcctaaatcaactgatatgtctacagacagagaagaacaatggaaaattgctgctgctgaactctcacacaagcttattcaagctacgaggaagagagatgaagcattaatgggaagcttcgaggttaaaatattccatggctgaaacttgagaagaagcttaacaagctttggagtttattggccacgaatttggaagtctggttctagatgaatggttac

SEQ ID NO: 3752 - DNA, 714 bp, Gossypium hirsutum
  Clone ID: GOSHI-09MAY01-C1471_1
cggccgcgtgggcggacgcgtgttgtctgaagtttacttgttagctaaatcttgcagtaaccaaactatgagtagaggtgggagctacggaggcggccaaagttccttgggctacctctttggtgatgatgagcagcaaagtgcaccaactgtgacaccacctatccagcccccatatgggatagatgttaccgcagagatgcccccagctcccagtaaatcaagttcaaagaaccaggaagagaaaaacttcagcaacaccaacaattaccaagggctcaaggacagaattcagggaactttataactgatcgcccatcaacaaaagttaaatcggttcctggtggagattcatctctgggttacctgtttggtgagaagtaatgcttcctcctttataagtttaagtatattgcctgattgcctgattgcctgcagttctcaatagtatgtctgcagtagtactgctggctaaataatggattcagttcccctatcagtgttgaacttgcagtgctccgtctactactatattagcatgatgtggtattaagcttttcataaattaatctgccagagaagtggatttcagtaatgaagcatacaggtaaaacaatgtatggttttacttttaccagatttgtataataagcagaagttcaagttcctgccaatgcgtttaatatacatattaaccttgagcagtgcactaag

SEQ ID NO: 3753 - DNA, 644 bp, Gossypium hirsutum
  unsure (1)..(644): unsure at all n locations
  Clone ID: LIB3585-024-P1-K1-D6
cccacgcgtccgcccacgcgtccgagggtttttattccctttctttctttcccttgtctgaagtttacttgttagctaaatcctgcagtaaccaaaactatgagtagaggtgggagctacggaggcggccaaagttccttgggctacctctttggtgatgatgagcagcaaagtgcaccaactgtggcaccacctatccagccctcatatgggatagatgttaccgcagagatgcccccagctcccaataaatcaagttcaaagaaccagaaagagaaaaacttcagcaacaccaacaattaccatagggctcaaggacagaattcagggaacttcataactgatcgcccatcaacaaaagttaagtcggttcctggtggagattcatctctgggttacctgtttggtgagaagtaatgcttcctcctttataagtttaagtatattgcctgattgcctgcagttctcaatagtatgtctgcagtagtactgctggctaaataatggattcagttcccctatcagtgttgaacttgcagtgcttcgtctactactatattagcatgatgtggaataagcttttcataaataatctgccagagaagtggatttcagtnatgaagcatacagggtaaacaatgtat

SEQ ID NO: 3754 - DNA, 1691 bp, Gossypium hirsutum
  Clone ID: GOSHI-09MAY01-C1411_1
gtgcctcaagtcatggggtgggctttgttgcagatattcgacgaatgaatgttgctcttactcgtgctagaagggctttgtgggttatgggtaatgccagtgctctggtgcaatcagatgactgggcagccttaattgctgatgccaaagctaggaattgttatatggacatggattctctccccaaggacttcacaaaagacttgctccccaaagaattttcagggccaaggggactttactctccatcacagggtaaggcttctaatatgagaggtttaaggtctgctggaccaagacatagatcacttgatatgcacatggaatccaggtcaggaacaccatcagaggatgaagataagtcaggcacaactgtaatttctaggaatgggaattatcggccatttaagtcgccactggatacttttttggatgattttcatccgtcaggtgacaaatctagagaggcctggcaatatggtatactgaagaagcaaaattctgctggtacaatggggaaaagagagtcctaggcattggttgttgtctacgaactgttttggctcatggcggtccgtggagcagaactttatttataatccttgcattgaaatttatggagctcttagctccatgagtattgaaacaatttgttggaagttggtgccagacttgtgtctgataattgccctaagatgaacaagttgagagggatttgcatgggtcaccagtgaaattttgccagtctgccatgttgattcctgctaggaagtggatgatctggggggtaggatgtatgagatcaaaccctagatccacccaccaaacaggcttcgaaggagttgaatgctggcattaagggttgtgccgccctacaatatccctttgcttgataattgattgttgcaatctgctattacttggatgaaggctttaatcgatacagtggggcagtcatctcaaattttggtgctctttgactcatccttttccgcaatacactgaatgcatgaccgactctgggggtgtgaattcttttggatctgtcaaatttgaaggtacatccctcgcgtccgcaaatgcttgcaaaatgtcagaggacgagtggcgattcttgagcgggtgtgctttgcagaatcctaagaatcagcctctatcaaagttgccgtatatattctttgaacatggagatgcacttcggtgataactttttagttctgcaggatacgggttggttaaccaagtaccctcgcctccgcccccgcggccgattttccttgggtctttaaaccaaaagacttggatagaaataggacacacctccaaaattctgtatagagaagtaagactcctaaaagggtacagaattgtgcgaggaactctcatctagctgactttgtgtatacagcttcaggtggaaccaaagaattctttctcagctgcgaaaaacctcagctgctgttttttttttttaaaacttgaaaaccatcaaataatggcccaaggttttaaactataccttttgttttattttcctgtgatgagatgtacttttcctcagattgccattacttaaaagtaatgcgggggatacaatttatgtagcgatgaacatatccgtacatgattcaatttattatcttaaaagttctctcaagtctataaccaggcatgagtaagaacaactcaaa

SEQ ID NO: 3755 - DNA, 436 bp, Gossypium hirsutum
  unsure (1)..(436): unsure at all n locations
  Clone ID: LIB3585-023-P1-K1-G1
gggatatatatattaatactgtagatgctttccagggccaggaacgtgatgttattattatgtcttgtgtccgtgcctcaagtcatggggtgggctttgttgcagatattcgacgaatgaatgttgctcttactcgtgctagaagggctntgtgggttatgggtaatgccagtgctctggtacaatcagatgactgggcagccttaattgctgatgccaaagctaggaattgttatatggacatggattctctccccaaggacttcacaaaagacttgctccccaaagaattttcagggccaaggggactttactctccatcacagggtcaggaacaccatcagaggatgaagataagtcaggcacaactgtaatttctaggaatgggaattatcggccatttaagtcgccactggatacttttttggatgatttt

SEQ ID NO: 3756 - DNA, 583 bp, Gossypium hirsutum
  Clone ID: GOSHI-09MAY01-C1401_4
cccacgcccccgcgtccccccccccgtccggattgttttaaggaggaaattgcagctcatgatgtacaatagacatgtataggatcatgtttgataggaggtttgaaagtgaggatgatcctttgtttgttaagctcaaggctttaaatggagaaagaagtagattagcacaaagctttgagtacaactatggtgattttatccccattttgaggccattcttgagagggtatttgaagttatgcaaggaagtgaaggaaatcagattgcagcttttcagggaccaattccttgaggagaggaagaagcttgcaaccacaaaaagaattgacaacaatgctttgaaatgtgccattgatcacattcttgatgctcaacgaaagggagagatcaatgaagacaatgttctttacattgttgagaatatcaatgttgctgctattgaaacaaccttatggtcaattgaatggggcattgctgagcttgtgaaccatcccgagatccagcagaaactccgcaacgaaatcgacaccgtactaagacccggcgtgcaggttaccgaacccgacacccataagctttc

SEQ ID NO: 3757 - DNA, 1012 bp, Gossypium hirsutum
  Clone ID: GOSHI-09MAY01-C1401_3
ccacaattcatcgtcatggacctcctcttcctagagaaagttctcatctctcttttcttcaccatcatctttgctatcttagtctctaaacttcgtggcaagcgctttaaactcccccctggcccccttcccatcccggttttcggcaactggctccaagtcggcgatgacttgaaccaccgcaacctcacagacttagccaagaagttcggtgacatcttcttgctccggatgggacaacgtaacctcgtggttgtctcttccccagagctagccaaagaagttttgcacacccaaggagttgagttcggttccaggacaaggaatgtcgtgtttgatatcttcacggggaaaggacaggacatggttttcaccgtgtacggtgagcactggcgcaagatgagaaggatcatgaccgtccctttcttcaccaacaaggtcgtgcaacagtacagacatggatgggaagccgaggttgccagtgtggttgaagacgtgaagaagaacccagaagcggccaccaatgggattgttttaaggaggagattgcagctcatgatgtacaataacatgtataggatcatgtttgataggaggtttgaaagtgaggatgatcctttgtttgttaagctcaaggctttgaatggagaaaggagtagattagcacaaagctttgagtacaactatggtgattttatccccattttgaggccattcttgagagggtatttgaagttatgcaaggaagtgaaggaaatgagattgcagcttttcagggaccatttccttgaggagaggaagaagcttgcgagcacaaaaagaactgacaacaatgctttgaaatgtgccattgatcacattcttgatgctcaacggaagggagaaatcaatgaagacaatgttctttacatggctgagatcatgtgctgtatgaaacaactatgtcaatgatgggcatgctgactgtgaccatcgagatcacgaactcgacgaatgacccgcttgaccggtg

SEQ ID NO: 3758 - DNA, 1278 bp, Gossypium hirsutum
  Clone ID: GOSHI-09MAY01-C1401_1
tttattggctaaccaccatgcattcacaaggatcttactctctgcagggatgtcatacgtgggtggatcctttgtttgctaagctcaaggctttaaatggagaaagaagtagattagcacaaagctttgagtacaactatggtgattttatccccattttgaggccattcttgagagggtatttgaagttatgcaaggaagtgaaggaaatcagattgcagcttttcagggaccaattccttgaggagaggaagaagcttgcaaccacaaaaagaattgacaacaatgctttgaaatgtgccattgatcacattcttgatgctcaacgaaagggagagatcaatgaagacaatgttctttacattgttgagaatatcaatgttgctgctattgaaacaaccttatggtcaattgaatggggcattgctgagcttgtgaaccatcccgagatccagcagaaactccgcaacgaaatcgacaccgtactaggacccggcgtgcaggttaccgaacccgacacccataagcttccatatctgcaggcagtgatcaaggagactctcaggctccgaatggccatccctctactagtcccacacatgaacctccatgatgcaaagcttggtgggtatgacatccctgcagagagtaagatccttgtgaatgcatggtggttagccaacaacccggctcactggaagaacccagaagagttccggcccgaaaggtttttcgaggaggaatcgaaggtagaagcaaatgggaatgacttcaggtatcttccatttggtgttggaaggaggagctgtccagggattattttggcactgccaatcctagggatcacattgggacgtttggtgcagaattttgagctattgcctccaaaggggcagtctaagcttgatacatcggagaaaggtggacagttcagtctgcatattctgaagcattcaaccattgttgcaaagccaaggatgatttgatttaacaagtctttcgaaaatatgaacttgcatttagctttgttgggtattaatttgtaacatccatgcatgcacgcattgtttgataaaatcaatctcttcataaagcttttatgtattgatattttagttttcatggtgtggaaacacagacccgatcatggtcaaatatgttttggagatgagcatcaattggttcagttctataatttgattactaagtgcaagtaggctaaacttaatagacaacttttcctatatatctatcatatagtaagtcaaattactttgt

SEQ ID NO: 3759 - DNA, 623 bp, Gossypium hirsutum
  unsure (1)..(623): unsure at all n locations
  Clone ID: LIB3831-001-Q1-K6-D5
ggtacgagaaagtagtttgatatgtatatacatatatgtgttagtacttggtcaaataccaaatctggttgactcaagaagtttcatattgatgattacatacagctattgaaacaaccttatggtcaattgaatggggcattgctgagcttgtgaaccatcccgagatccagcagaaactccgcaacgaaatcgacaccgtactaggacccggcgtgcaggttaccgaacccgacacccataagcttccatatctgcaggcagtgatcaaggagactctcaggctccgaatggccatccctctactagtcccacacatgaacctccatgatgcaaagcttggtgggtatgacatccctgcagagagtaagatccttgtgaatgcatggtggttagccaataacccggctcactggaagaacccagaagagttccggcccgaaaggttttttgaggaggaatcgaaggtagaagccaatgggaatgacttcaggtatcttccatttggtgttggaaggaggagctgtccagggattattttggcactgccaatccnagggatcacattggngacgtttggtgcangattntgagctattgcctncaaaggggcagtctaagct

SEQ ID NO: 3760 - DNA, 487 bp, Gossypium hirsutum
  unsure (1)..(487): unsure at all n locations
  Clone ID: LIB3493-039-P1-M1-B6
aaaaaaaaaagaagagagaaaaggagagggagctccggcgcgggggatatccggccagggggcatgtcatcggccgatcatcggctcgtagccggcgtcggtgcgggccaccgtacacggtggccgaaaaatcgaaaaggtgcagagggcaagcgatgaggggatggtggcgtactgcaggcactggtggccggcgcaagatgtcacacgagtgcttggggcggctaacctacggtatctagggtcagtgataatggcgggggtctagggcacactcatgctctataagtccatgcttatgctagtcccacacatgaacctacatgatgcaaagcttggtgggtatgacatccctgcagagagtaagatccttgtgaatgcatggtggttagccaacaacccggctcactggaagaacccagaagagtnccggcccgaaaggtttttcgaggaggaatccaaggttgaagccaatgggaatgacttc

SEQ ID NO: 3761 - DNA, 619 bp, Gossypium hirsutum
  Clone ID: GOSHI-09MAY01-C1421_1
cggacgcgtgggccctctctcaaagattccccaaaggctaagatcaccaagcagggcagcaacaacaaaccccacaaagtcaccctcccatttctctttctcttcattcaaagacattgatgctatcctcaaagaagaagaagaacaacaagtcctctatcctcaatcccctaaaagaccctccattttccaccgtgtcaagctctccaccaccgtcttacgcgcctggtcctcctccaaccgccgtccacttactctccccaacgctgaccaacgcgtcgttgtttacctcaccagcctccgtgtcgttcgaaaaacctttgaagattgcaagaccgttcgatcaatccttagaggactcaatgttcccatcgacgaacgagatgtgtcattggattctagtttcttagacgagttacaagggaccattgggcgtaacaaaagtttcacccttcccttggtgttcatcggcggaacgtatatcggccgagcagaggaagtgaaacgattacatgaatgtggtgaactgaagaagatgatcggtgggttaccgtcggtggttgggtcaagtgtgtgtaatttatgtgaagggttgagatttattctttgtccacaatgg

SEQ ID NO: 3762 - DNA, 645 bp, Gossypium hirsutum
  Clone ID: GOSHI-09MAY01-C1791_1
catttatgtgcttcctccgtcttctttacctatttcgtcctttcaaagcttcgaagcaaatccacacactccaccctcattacatgactcgtacctctttaatggcggacttaactcgcattatttgttgccggatttctaccatctgtttatctgagcccttctcatgtcctgattttaagtcctaacccctctgctaccttcggtgacaccattcctatcattcgcatcgaccctaacgaccacactaggtccgatcatattcagatgagtattttctctatattttaacccttctattgctagggaataggccactaagtttgcttgtctacttgcatgttgaaatctacaagagataaagttccttctcattcgttttgcatcagaaataaaggcccttatattttatctatcttcatcttatctttgtattttccaaaatatagataacgcatcgccttcaatttcaactcgtaagaaaccagattctgccctaaatctccctacttggacgcatgcgagagcctcggctgcatagcgtcgaagttaatttttacattcaatccttccggaggtttccaattttccttttgtactgagttcacagggaccatctatagccctaccttgaccaatctgctt

SEQ ID NO: 3763 - DNA, 403 bp, Gossypium hirsutum
  Clone ID: GOSHI-09MAY01-C1781_7
cccacgcgtccgcccacgcgtccgcccacgcggccgaacatattgatctcagagcggcgctgcacagcttgccgataacccatcactcctatattcatctttcagcataaacgatgtcttcggttggcgaagctgcttgctcttatgctgctttgattctctatgatgatggcatccccatcaccgtatcctttatgcaaataatttagggttgtatgatttattattcaatttttttaattctttgataggattattggaaaataggaatttgattattgctgttgagagattcccaatttgtatgggaacataggtatctttttttctttggggggggggtctttaactgtcattaataggctgagaagattgccgcgctagttaaagctgccaatgtctc

SEQ ID NO: 3764 - DNA, 398 bp, Gossypium hirsutum
  Clone ID: GOSHI-09MAY01-C1781_6
cttgctttcagaaaggtgttcgaagtccctgatttcgcctctcagtggaaaagatgtcttcagccggcgaagctgcttgctcttacgccgcattgattctctatgatgatggcatccccatcactgctgagaagattgcaactctagtcaaagctgcaaatgtctctgttgaatcttattggccaagcttgtttgctaagctttttgaaaagtgtaacattgaggatctcataaccaatgttggtgctgccggtgctggtgccgcagttgctgcagctgcacctgttgcagctggtgctggtgggggagcctgctgcttcacctcctgccgaggggacgaaagattggagagccagaggaagagagcgatgatgatatgggattcagcttatttgatt

SEQ ID NO: 3765 - DNA, 484 bp, Gossypium hirsutum
  Clone ID: GOSHI-09MAY01-C1781_4
tcttcgcgtccccgcggctgccccacgcccccgcactcctatattcatctttcagcataaacgatgtcttcggttggcgaagctgcttgctcgtatgctgcttcgatgctccatgacgatggcatccccatcaccgctgagaagattgccgcgctagttaaagctgccaatgtctctgttgagtcttattggccaagcttgtttgctaagccttttgagaagtgcgacattgagaatctcataaccaatgttggtgctgctgctggtggtgctccggtcgccgcagctgcacctgttgcagctgctggtggaggcggtcctgctgcccctgctcctgcagaggaaaagaagaaggaggaaccagaggaagagagtgatgatgatatgggattcagtttgtttgattaggaactccttttagtatgtgattcagtcgattacgggtttagtgtattaagcatgacactaacgctcttgagtttta

SEQ ID NO: 3766 - DNA, 625 bp, Gossypium hirsutum
  Clone ID: GOSHI-09MAY01-C1781_3
agaaaaagaatgagagttttgtcatatgagttcttttccttaaccatggtttataggctgagaagatttctacactagttaaagctgcaaatgtctctgttgaatcctactggccaagcttgttcgctaagctttttgagaagtgcaacattgaggatctcataaccaatgttggagctggtggtggtggtgccccagtagctgcagctgcacctgttgctgctggcggaggagccggtgctgctgctccacctcctgctgaggaaaagaaggaagaaccggaggaagagagtgatgacgatatgggattcagtttgtttgattaggtgtgttttggtcaattactagttatatcacatgaaggtagtaacgcttttagagttgtattgctattggtatttgcatgttgattagaaatattacgtttttgttgaatgaaagttgacactaagtagctctttctttgtgatctgtttttttgaatcttcctatatatagaagtattatagattctagaccaataattattaaaaaataaaaaataaaaaaaaaaattaaaaaataaaacataaaaaattatataataattaaataataaaataaattttaatataaaaaataaagg

SEQ ID NO: 3767 - DNA, 639 bp, Gossypium hirsutum
  Clone ID: GOSHI-09MAY01-C1781_2
cggacgcgtccccctgtcagaactttgaagagcggctgctcagattttgcctatttctcagatttttctctcagtttgaaacgatgtctacggctggcgaagctgcttgttcttacgctgctttaattctctatgatgatggcattcccatcaccgctgagaaaattgcaacaattgttaaagctgcaaatgtctcggttgaatcttattggccaagcttgtttgcaaagcttttcgaaaagtgcaacattgaggatcttataaccaatgttggtgctggtggtgctggtgctccagttgccgcagctgcacctgttgctgctggtggtggtggtggtgccgctgctccacctcctgctgaggaaaagaagaaggaagaaccagaggaagagagtgatgacgatatgggattcagtttgtttgattagaagttcctttcagtgcttgatttggttgattactgttttaatgcattaaagctgtgacagtagttgttgaggtttcttggtattattagtatttgtctgcttttgagtaaaaactttctttttgagttgtatgtttgaatcttctatatataaaagttttctagaccaatttttgcccaaaaaaaaaaaaaaaaaaaaattctgcgggcgc

SEQ ID NO: 3768 - DNA, 695 bp, Gossypium hirsutum
  Clone ID: GOSHI-09MAY01-C1781_1
gggcggcgctgcacagcttccccaagaacccatcattctcagattttctctcagtgtttaatagtgaaacgatgtccactgtcggagaagctgcttgctcttacgctgctcttattctttatgatgatggcatccccatcaccgctgagaagatttctacactagttaaagctgcaaatgtctctgttgaatcctactggccaagcttgttcgctaagctttttgagaagtgcaacattgaggatctcataaccaatgttggagctggtggtggtggtgccccagtagctgcagctgcacctgttgctgctggcggaggagccggtgctgctgctccacctcctgctgaggaaaagaaggaagaaccggaggaagagagtgatgacgatatgggattcagtttgtttgattaggtgtgttttggtcaattactagttatatcacatgaaggtagtaacgcttttagagttgtattgctattggtatttgcatgttgattagaaatattacgtttttgttgaatgaaagttgacactaagtagctctttctttgtgatctgtttttttgaatcttcctatatatagaagtattatagattctagaccatataaaatgtattaacagctaccttttttttttattcatttttaaaaatctttattttttattatttcttatttttatttacttttct

SEQ ID NO: 3769 - DNA, 466 bp, Gossypium hirsutum
  Clone ID: uC-gsronu33B110a03b1
tttaaaaagggctttcggttatggaaagaatgatagattctctatgtgtatgggaatattggcttgcttgtttgtttgtttaattatagctaataggctgagaagattgcaactctagtcaaagctgcaaatgtctctgttgaatcttattggccaagcttgtttgctaagctttttgaaaagtgtaacattgaggatctcataaccaatgttggtgctgccggtgctggtgccccagttgctgcagctgcacctgttgcagctggtctggtgggtggaagctgctgctccacctcctgccgaggagacgaagaaggaagagccagaggaagagagcgatgatgatatgggattcagtttatttgattaggagctcctttcagtttatgaattcgttgattactggttcattgcagtaagctatgacagtagttacctattgagctttattgattctggtatatgt

SEQ ID NO: 3770 - DNA, 252 bp, Gossypium hirsutum
  Clone ID: uC-gsflnu33B071a09b1
tttcccacgcgtccgtggaggagaatttgaagaagacctcctgctgaggaaaagaagaaggaagaaccggaggaagagagtgatgacgatatgggattcagtttgttcgattaggtgtgttttggtcaattactagttatataacattaaggtagtgactcttttagagttgtattgctattggtatttgcatgttaattagaaatattacgtttttgttgaatgaagttgacactaagtagctctttcttt

SEQ ID NO: 3771 - DNA, 926 bp, Gossypium hirsutum
  Clone ID: GOSHI-09MAY01-C1751_1
cgcccgctagtgctccaacttatcaggtaactgaagaatctgttgttgtgtgtgatatcataaacctctccaatggagattgaccctaaacctgattctgaaaatgacgccctcgttctcgttaagcaaggagctgaagctagagttttcgagtccgtattcgctggaaaaaggtccatcatcaaagaacgcttctccaagaaatacaggcaccctgctcttgattctaagctcactctcaagcgtttaaacgcggaagctaggtgcatgaccaaggctcgacggcttggcgttttaactccggttctttacgccgtcgaccctgtgatccataccctgactttcgagtacgtcgaaggcccttccgttaaagatgtttttctcggaattgggtcaacaggcgtctttcaagagcgtttaactgatatcgccacccaaattggcgacgcgattggcaaattacacgacggtggactcgtccatggtgacctcaccacttcaaatatgttgatcagaaacggaactaataagctcgcccttatcgattttggtcttagctttacatcaccccttccaggagacaaagctggtgacttgtatgtactggaacgacccctgatttcaatgcattcttcctgtgggaatgtgatggagcttatccttgctgcatccaagaaatcctcaaaccagtggttttcccccttgaccaagctagctcaagtgcgccaaaggggccccaagcgaccaatggttggatgacccccctctttgagaaatctgttaaagattttgttttaatcccatggaaaaaggtggttaaggatttagggtctttatgttgtgatggtttctgtatattgccattgtaatgcccccgttttgacccttggacttgatcatggtggccaattccaggatttttttcc

SEQ ID NO: 3772 - DNA, 722 bp, Gossypium hirsutum
  Clone ID: GOSHI-09MAY01-C1761_1
gcgcctcagcgcgcgtccacgcatacgcacacgcctacgtcgatgctactgtaaagtgctaaacccatttctgttcttttccttttttgttgttcattttttttcctgtgagaagtaaaagagagattccagaaagctgaattatgggttgttgtcaatcatcttttcaaacagagactcacccagaaaaagaccagacccaacaacaacaggagccacagaaccttagccaatcaagtccgggtgccgtacccgacccggctgttgctaatggagtcccttctttctcagagttctccttggctgacctgaaagcggccaccaataatttcagttcagataacatagtttctgaaagtggggaaaaggctcctaaccttgtttataaaggtcgtttgaagaacaggaaatggattgctgttaagaagtttactaagatggcttggcctgaccccaaacagtttgcggaggaagcttggggagtagggaagttgagacacaagaggctggcaaatttgatagggtattgctgtgatggagatgaaaggctgcttgttgctgagtacatgatcaatgacactcttgctaagcatttgtttcactgggaaaatcaaaccatcgagtgggcaatgcggttaagagtagcttcctgcattgctgaggctttagattattggagtagtgagggccatccattataccatgatctaaatgcttacagg

SEQ ID NO: 3773 - DNA, 467 bp, Gossypium hirsutum
  Clone ID: LIB3582-050-P1-K1-A8
cgagcagctcttaaaacgagtaatagcgagagacgggagcccaaatagattctactcttaagttctaaacccatttttgttcttttccttttttgttgttcattttttttcctgtgagaagtaaaagagagattccagaaagctgaattatgggttgttgtcaatcatcttttcaaacagagggtcacccagaaaaagaccagacccaacaacaacaggagccacagaaccttagccaatcaagtccgggtgccgtagccgacccggctgttactaatggagtcccttctttctcagagttctccttggctgacctgaaagcggccaccaataatttcagttcagataacatcgtttctgaaagtggggaaaaggctcctaaccttgtttataaaggtcgtttgaagaacaggaaatggattgctgttaagaagtttactaagagtggctgggcctgaccccaaaca

SEQ ID NO: 3774 - DNA, 196 bp, Gossypium hirsutum
  Clone ID: GOSHI-09MAY01-C1711_12
gaatgttcaattaagtgtgctctttttttcttttttggttttccctttttagcattttaagttgaatgttctttaagatatttgaccatttaattatatgtgttctaaaaatgctacataaagtttatccacttttcctcactcttttgcactttatttatgcttttcatagttttgagttttacaggcaaaaaaa

SEQ ID NO: 3775 - DNA, 530 bp, Gossypium hirsutum
  Clone ID: GOSHI-09MAY01-C1711_6
tggagatatggaccagaatacgcgtgatgtcatcatgcgggaattccgttctggttcttcccgtgttctcatcactaccgatctgttagcccgtggtattgacgtgcagcaagtctcccttgtcataaactacgatctgcccactcaaccagaaaactacctcccccgaatcggacgaagtggtaggttcgggagaaaaggtgttgccataaactttgtgactgtagatgatgaaagaatgctgtttgatatccagaagttctacaatgttgtcatcgaggagctgccatcgaatgtcgcggatctcctttgatgagagattacgttttctgaaggttgtcagaggcgagcgctttcattgtttgaatgtccaattaagtgtgctctttttttcttttttggttttccctttttagcattttaagttgaatgttctctttaaaatatttgcccatttaattatgtgttctaaaaatgctacataaagtttatccactttcccccactcttttgccctttaaaaaacccac

SEQ ID NO: 3776 - DNA, 829 bp, Gossypium hirsutum
  Clone ID: GOSHI-09MAY01-C1711_5
tttgttttccttagccctagagatcacttggaagcgggttttaaaacctgtgagggttttttataaacgctactaactaaccctagtagggtatcaagcagttttatgtcattgttgaataggaagagtggaagctggttacactttgcgatctttatgaaacactggccattacccaaagtgtcattttcgtgaacacaaggcgcatggttgactggctaactgacaagatgcgaagccctcacctcacagtgtctgccacccatggagacatggaccagaatactcgtgacgttatcatgcgtgaattccgctctggttcatctcgtgttctcatcaccaccgatctccttgctcgaggtattgacgtgcagcaagtctctctagtcataaactatgatctgcctactcaaccagaaaactacctccaccgtattggtcgaagtggaaggtttgggagaaaaggtgtggccatcaactttgtgactacagatgatgagaggatgctttttgacatccaaaagttctataatgtggtcattgaggagctgccatcaaacgttgctgatctcctttgatgagattagacaccctttttgaatattgttgaggcaaggtgttttgttgttttggcaagtttcttatttttctccctatctagcgtcttaagttaaatgttcttaaacatatctgccccttgaacccagttttgcccacccctttgtggtgggtttaatatgttatttctagtttttatccaccagtagggtttttgagttgtatgtcccccttttctagttataatataaaatcatggaaggcctttctt

SEQ ID NO: 3777 - DNA, 645 bp, Gossypium hirsutum
  Clone ID: GOSHI-09MAY01-C1711_4
cccagcgtccgtgctttgctgcgctgcgcgcgcgggcaacacttctctcctctctcaaaactccgcggcgcagatccgaggagtttgggaaaccctatctctctctaaatatcaaccgaaaaagctctcaaaaaactaccctttcttccccccccctctctctctctcactttctctcattctctttctttccagcctttctacactctttttttccccatcgctcctactgttttcatctgcttcaagtcatggcaggtttggcaccggaaggatcccaatttgatgctcgccaatatgatcagaaaatgactgagttgctccaaactgatggagatgattttttcacgagttatgatgaagtttatgacagttttgatgcaatgggacttcaagagaatcttctgaggggtatctatgcgtatggttttgagaagccttctgcaattcaacaacgaggtattgttccattttgcaagggtcttgatgttattcagcaagcacagtccggaactgggaagacagcaactttctgctctggaattctacaacaacttgattatgctatggtccaatgccaggctctggttttggcacccaccagggagttggcacaacagattgagaaagtgatgcgggcacttg

SEQ ID NO: 3778 - DNA, 651 bp, Gossypium hirsutum
  Clone ID: GOSHI-09MAY01-C1711_3
tagaaaaggcctttttgttttgctttgcttatcatcatcaaatacactttcttcttcttctcttcatattggttttttcccttagcactccacgacacagatccgaggagttggggaaaaccctcacacaaattctctctctaaatcttaaccgagaaggtctccaaaaaagactaccctttttgcccatttactctccttattcaacaaattcagcatcacatcccccaaaatagtcgcttttttatctcttgctctcttcatctgcttcaagtcatggctggtgtagcacccgaaggatcccaattcgatgctcgtcaatttgatcagaaaatgagtgatttgctccaaacggacggagatgatgttttcacttcttatgatgaagtttatgacagtttcgatgcaatgggacttcaagagaaccttctgaggggcatctatgcatatggttttgagaagccctcagcgattcagcaaagaggaattgttccattctgcaagggtctcgatgtgatacaacaggcacagtctgggaccggaaagacagcgactttttgctctggaattttgcagcaacttgattacggtatagtccaatgccaggctctggttttggcacccactagggagttggctcaacagatcgag

SEQ ID NO: 3779 - DNA, 891 bp, Gossypium hirsutum
  Clone ID: GOSHI-09MAY01-C1711_2
cgatggttttgagaaaagccttctgctttttaagcaaaagaaggaattgtacccaattttgcaaggggtcttggatgtgaattcaacaggcccaatcccggacctggaaaaacagcgactttttgctctggattctccaacacttgactatgctgtagtccaatgccaggctctgttttggcacccacgagggagttgcacaacagattgagaagtcatgcgagcacttggtgattaccttggtgttaaggtccatgcttgtgttggtgggactagtgttcgcgaggatcagcgcattcttcaaagtggtgttcatgttgttgtcggtactcccggtcgtgtcttcgacatgttgagaaggcagtcactccgtccagattatatcaagatgtttgtcttggatgaggctgatgagatgctctcccgtggttttaaggatcagatctatgacatcttccagcttcttccgggcaagattcaggttggggtattttctgctacaatgccacccgaagccctagagatcactcggaagttcatgaataaacctgtgagaattttggttaagcgcgacgaactaaccctggagggtatcaagcagttttatgtgaatgttgaaaaggaagagtggaagctcgaaacactctgcgatctctatgaaacactggccattacccaagtgtcattttcgtgaacacgaggcgcaaggttgactggctaactgacaaaatgcgaagtcgagacacacagtttctgcccccatggagatatggccaaatagcgtgatgcatatgcggaatccgtctggtctccgtgtctcatataccactgtaccgtgtatgactgcacagttcctgtataacttgactgcactaacgaaactactcccga

SEQ ID NO: 3780 - DNA, 1643 bp, Gossypium hirsutum
  Clone ID: GOSHI-09MAY01-C1711_1
tcggggttatttatattttatagttgaaagggttatataaaaacctaagggaggaacaattccaagcacttaacctttcccgccctgttattttgccttttcgctatcgtctttgcctatcaactccacggcgcagatccgaggagtctctatttttcaatccaaacaacccctctaaacactctcttcttttattgctcctactcttccagtcatggcaggcttggcaccagaaggatcccaatttgatgctcgtcaatatgaccagaaaatgactgagctgctccagactgatggagatgactttttcacaagttatgatgaagtttatgacagttttgatgcaatgggacttcaagagaaccttctgaggggtatctatgcatatggttttgagaagccttctgccattcagcaaagaggaattgtaccattttgcaagggtcttgatgtgattcaacaggcacaatccggaactgggaaaacagcgactttctgctctggaattctacagcaacttgattatgctatagtccaatgccaggctctggttttggcacccactagggagttggctcaacagatcgagaaggtgatgcgggcacttggtgattaccttggtgtgaaggtccacgcttgtgttggtgggactagtgttcgcgaggatcagcgaattcttcaaagtggtgttcatgttgttgttggtactcctggtcgtgtcttcgacatgttgagaaggcaatcactccgtccagattatattaagatgtttgtcttggatgaggctgatgaaatgctctcccgtggttttaaggatcagatctatgacatcttccagctgcttccagccaagattcaggttggagtattttctgccacaatgccacctgaagcccttgagatcactaggaagttcatgaacaaacctgtgagaattttggttaagcgtgatgagctaaccctggagggtatcaagcagttttatgtgaatgttgaaaaggaagagtggaagcttgaaactctttgtgatctctatgagacccttgccattacccagagtgtcattttcgtgaacacaaggcgcaaggttgactggctaactgacaagatgcgaagccgtgaccacacagtttctgccacccatggagacatggaccagaacactcgtgacatcatcatgcgtgaattccgctctggttcttctcgtgttctcatcacaactgatctccttgctcgtggtattgatgtgcagcaagtgtctctagtcataaactatgatctgccgactcaaccagaaaactacctccaccgtatcggacgaagtggaaggtttggaaggaaaggtgttgccattaactttgtgactaatgatgacgagagaatgctgtatgacatccagaagttctacaatgtgatcattgaggagctgccgtcaaacgtcgctgatctcctttgatgagattaccttttttggaagattatttgaggcaaagggttttgttgttttgcaagtcctattttaacgtgcgcttttcttgtttctttctttatttttttttcttcctttctagtttcttaagttaatgttgttcttaaaaacatatttgaccattttaatgatatggttcctgcacattttctag

SEQ ID NO: 3781 - DNA, 545 bp, Gossypium hirsutum
  Clone ID: LIB3584-007-P1-K1-A11
cccggttcgcccagcgctgccccgcgtccgggaagcttgagagacgggggggggggggtacgagaccctagccattacccagagtgtcatttttgtgaataccaggcgtaaggtcgactggttaactgacaagatgcgaagccgtgaccacacagtgtctgccacccatggagacatggaccagaatactcgtgagggggggggggggaattcctctctggttcatctcgtgttctcatcaccaccgatctccttgctcgaggtattgacgtgcagcaagtctctctagtcataaactatgatctgcctactcaaccagaaaactacctccaccgtattggtcgaagtggaaggtttgggagaaaaggtgtggccatcaactttgtgactaccgatgatgagaggatgctttttgacatccaaaagttctatattgtggtcattgaggagctgccatcaaacgttgctgatctcctttgttgagattagacaccctttttgaatattgttgtggcacggtgttttgttggtttggcccgtttctt

SEQ ID NO: 3782 - DNA, 450 bp, Gossypium hirsutum
  Clone ID: LIB3585-067-P1-K1-H12
cggacgcgtgggcggacgcgtgggcggacgcgtgggctttgacatgttgagaaggcagtcacttcgtcctgattatatcaagatgtttgtcttggatgaggctgatgagatgctttcccgtggttttaaggatcagatctatgatatcttccagctgcttccagccaagattcaggttggagtgttttctgccacaatgccgccggaggccctcgagattactaggaaatttatgaataagcctgtgagaattttggtaaagcgtgatgagctaaccctggagggtatcaagcagttttatgtgaatgttgaaaaggaagagtggaagcttgaaactctgtgtgatctttacgagaccctagccattacccagagtgtcatttttgtgaataccaggcgtaaggtcgactggttaactgacaagatgcgaagccgtgaccacacagtgtc

SEQ ID NO: 3783 - DNA, 403 bp, Gossypium hirsutum
  Clone ID: uC-gsflmaxxa009f09b1
cttcttctcttcatattggttttttcccttagcactccacgacacagatccgaggagttggggaaaaccctcacacaaattctatatctaaatcttaaccgagcaagtctccaaaaaagactactaacttggcatattgacaaaattcacagtgaggcttcagtcgagaaaaatgccaaagaaataaaggattacattgaggaaatttattggggttccaagaaacgcgttttgcttcttggacatagcaaaggtggcgtagatgcagcggctgctttatctatctattggtctgacttgaaagataaagttgctgggttggcaatagcacagagtccgtatggtggaagccctatagcttcagatatcttgagagaaggtcaactcggtgattatggtaata

SEQ ID NO: 3784 - DNA, 396 bp, Gossypium hirsutum
  Clone ID: uC-gsflmaxxa009e01b1
tcccacgcgtccgcctttttatggttctctataatttggccaaatcatgacatctcttgtggttggcgcgaacactctcttgttgtctaaaaccgaacctagactgaccgcaaaaaagactaccctttttgcccatttactctccttattcaacaaattcggcatcacatcccccaaaatagtcgcttttttatctcttgctctcttcatctgcttcaagtcatggctggtgtagcacccgaaggatcccaattcgatgctcgtcaatttgatcagaaaatgagtgatttgctccaaacggatggagatgatgttttcacttcttatgatgaagtttatgacagttttgatgcaatgggacttcaagagaaccttctgaggggcatctatgcatat

SEQ ID NO: 3785 - DNA, 220 bp, Gossypium hirsutum
  unsure (1)..(220): unsure at all n locations
  Clone ID: LIB3197-005-P1-M1-B10
tcttcttcatctcttcatattggttntttgggggancactccacggcggcgagggccggtgaatttagttaatccctcacacaaattctctctctaaatcttaaccaataatgtctccaaaaaagactaccctttttgcccatttactctccttattcaacaaatacggcatcacattccaaaatatattcgctttttttatattcttgcttttttcatt

SEQ ID NO: 3786 - DNA, 903 bp, Gossypium hirsutum
  Clone ID: GOSHI-09MAY01-C1691_2
ggctcttccaccgagaaaaaacaagcagctgctatgttgccggtagttcaaaaacagcatcagcttttggtgactttgcttctttgcatgctgctgctatggaggccctccctatatcttggataagcttttcaatcaatatgtggctatcatactttctgtgacttttgttctagcttttggtgaggttattccacaagcaatatgcactagatatggacttgctgtaggtgcaaaccttgcaggtcttgtgtggattttaatgattatttgctatccaatagcttatcccattggaaaggttctggattgggtactggggcataatgaagcactatttaggcgcgctcaactaaaagcccttgtctccatccatagccaggaggctggaaagggaggtgagctcactcatgatgagaccaccattattagtggagcactagatttgactgaaaagacggctgaggaggctatgacacctatagaatcaactttctctttagatgtcaattcaaagctggactgggaaggcaatgggtaagatcctcgctcgtggtcatagccgagtcccggtctactcggggaatcccaaaaacattattggacttttgctggtgaaaagccttctaactgtgcgtccagaaactgagacaccagtcagtgctgtttccatccgtagaattccaagggttccatctgacatgcctttgtatgatatattgaatgagtttcaaaagggcagcagtcatatggcagctgttgttagaggcaactctaagaatgcttctgctacagttgatggagaaaaaagtgaagaaaacaatagagtctccaatgcagcagaatcccaactgactactcctttgcttcccaaacaagacgagaagccagagtccggaactg

SEQ ID NO: 3787 - DNA, 1112 bp, Gossypium hirsutum
  Clone ID: GOSHI-09MAY01-C1691_1
cttccgttaattctctttctgggactcctgtaattgaaagttgaaaaagccacgatgcatccgataaatgcggttttggcggcgaggatgctatttaacacggcggcctcggtcagtgaatccgtcggagaagggattccgttcggatctccatggtggtttatctacgccgggatttcttgttttttagtacttttcgcggggatgatgtcgggtctcaccctcggactgatgtcgcttggtctcgtcgaactcgaaattcttcaacggagcggcactttcaccgagaaaaaacaagcagctgctattttgccggttgttcaaaaacagcatcagcttttggtgactttgcttccttgcaatgccgctgctatggaggttctggattgggtactggggcataatgaagcgctatttaggcgggctcaactaaaagcccttgtctccatccatagccaggaggctggaaaaggaggtgagctcacacatgatgaaacaacaattattagtggagcactagatttgactgaaaagactgctgaggaggctatgacacctatagaatcaactttctctttagatgtcaattcaaagttggactgggaggcaatgggtaagatcctcgctcgtggtcatagccgagtccctgtctactcagggaatcccaaaaatattattggacttctgctggtgaaaagccttctcactgtacgccctgaaactgagacacctgtcagtgctgtttccatccgaagaattccaagggttccagctgatatgcctctctatgatattctgaatgagtttcaaaagggcagcagtcatatggcagctgttgtgaaggctaaaggaaaaaataagaaccttcctccgactgttgacggactgaagtctgaagaaaacaaagtctccagtgcagatacccagctgactactcctctgctatccaagctggatgagaagccagagagcattgtagttgacgttgataagttgtcaagacctaccaatacaagcaggctagatgctgtgacaaatggattgtctgtcacatcagaggacattgaagatggtgaagtgattgggattatcaccctagaagatgttttcga

SEQ ID NO: 3788 - DNA, 378 bp, Gossypium hirsutum
  Clone ID: LIB3166-043-P1-K1-D8
aaagactgcctagatgcaataagcatgtgcctgatcaaatgcaccttgctgaaagggtttgaggcacttttgtgtttgacactaaagtgcaatgcctgggcacatgcctagacaacactaatgcctatacagttttgtcttctcattttggtggtttaacaggccattagaacggatgaagcactgaagttatatatgttttccaggttctggattgggtactggggcataatgaagcactatttaggcgcgctcaactaaaagcccttgtctccatccatagccaggaggctggaaaaggaggtgagctcacacatgatgaaacaacaattattagtggagcactagatttgactgaaaagactgctgaggaggcta

SEQ ID NO: 3789 - DNA, 832 bp, Gossypium hirsutum
  Clone ID: GOSHI-09MAY01-C1641_2
cccacgcgtccgaattgtttgtgaatacgtccaatcatatgtttataatgagccttttaatgctgagccaccgcgttcggctttagtttcctcttatgtgactccggtggagttgtttttcaagagaaatcatggaccaatccctctagttgatgacatagagagatattgtgtcgatataaacggtttaattgaaactccgaaaaagctttatttcagagatatcaggatgctaccaaaatacaacgtcactgccactttacagtgtgcaggtaataggaggactgccatgagcattaccagaaaagtgaaaggagttggctgggatgtttcggctattggaaacgctgtctggggtggtgccaaattggctgatattcttgaacttattggggttccgaagttgacaagttgcactcagagtggaggaaaacacattgaatttgtgagcgttgataagtgtgaggaggaaaacggaggtccatacaaggcatcgattccacttagtcaggccacaaaccctgaagcagatgttttacttgcttatgagatgaatggagaagtaagcaacttctctcttatgatcatattctttcccacactcgggaaaaccagaactcaaactgaactcaacaagtatgctaaaatggttgcatcttttataaaaatataaaaaatgaactattatcttgctatctttgccaaagcctctcaacagggatcatggttacccgttgagagtaattgtaccaggtgttataggtgctcgttccgtcaagtgggctgattctatcaatataatagcagaaaaaatgccaagggatttttcatg

SEQ ID NO: 3790 - DNA, 966 bp, Gossypium hirsutum
  Clone ID: GOSHI-09MAY01-C1641_1
cgccggttcaactttgatagcttcagtttttgagtttttcagggaaccctagaagaaggggaaatgccaggaataaagggaccctctgattattcacaagaacccccacgccatccttctcttcaaatcaactccaaggtgcccttcaatgccgagccgccgcgttctgctttagcttcctcttatgtgactcctgttgatttgttctacaagagaaatcatggaccaatccccctagtcgatgacatagagagatattgtgtcgatatatgcggtttaattggaactccaaaaaagctgtatatgagagatgtaaggatgctgccaaaatacaatgtcactgccactttacagtgtgcaggtaataggaggacagccatgagcaaaactagaaaagtgagaggagttggctgggatgtttctgctatagggaatgctgtctggggtggtgccaaattggctgatgtacttgaactcattgggataccaaagttgacatgtagcactcagtctggtggaaaacacgtagaatttgtgagcattgataagtgtaaggaggagaatgggggcccgtacaaggcatcgattccacttagtcaggccactaaccctgaagcagatgttttacttgcttatgagatgaatggagagagcctctcatcagggatcatggttacccgttgagagtaattgtaccaggtgttataggtgctcgttccgtcaagtggctggattctatcaatataaatagcagaagaattgccagggatttttcatgcaaaaggactacaagatgcttccaccatcggtggattggggtatcatcaattggaataccatgaagccacaaatggattttccagttcagtccgtgatttgctctttggaagatatgcattctataaaaccgggaatggtaagaattagcggatatgcagtaatcaggaggtggctgtggaattgaac

SEQ ID NO: 3791 - DNA, 431 bp, Gossypium hirsutum
  Clone ID: LIB3582-009-P1-K1-C11
cccacgcgtccgcccacgcgtccggtggtccttctgattattcacaagaaccgtcccgccatccttgtcttcatatcaacgccaaggagccttttaatgctgagccaccgcgttcggctttagtttcctcttatgtgactccggtggagttgtttttcaagagaaatcatggaccaatccctctagttgatgacatagagagatattgtgtcgatataagcggtttaattgaaactccgaaaaagctttatttcagagatatcaggatgctaccaaaatacaatgtcactgccactttacagtgtgcaggtaataggaggactgccatgagcattaccagaaaagtgaaaggagttggctgggatgtttcggctattggaaacgctgtctggggtggtgccaaattggctgatattcttgaacttattggg

SEQ ID NO: 3792 - DNA, 423 bp, Gossypium hirsutum
  unsure (1)..(423): unsure at all n locations
  Clone ID: LIB3583-042-Q6-K7-D5
gngtaattgtaccaggtgttataggtgctcgttccgtcaagtggctggattctatcaatataatagcagaagaatgccaggttgaaggatgtttctgcttcgtgttaaacttgatttatcgtttccgcattgccctctgatcagtttccatttacaaccttgtagggatttttcatgcaaaaggactacaagatgtttccaccatcggtggattggggtaacatcagttggaataccaggaagccacaaatggatttcccagttcagtccgtgatttgttctttggaagatgcgcagtcgataaaaccaggaaaggtaagaattagtggatatgcagtattaggaggttgncgtggaattgaacgggtagattatttattgatgggggaaaaaatggggggagaggagttggttttagaaaat

SEQ ID NO: 3793 - DNA, 680 bp, Gossypium hirsutum
  Clone ID: GOSHI-09MAY01-C1671_1
gcaaaagtaataatcaaacctccattctccgctgttttccatttttcaatggaaccctaaagactaatccctcaaacctcaccaatttcatcccatggaaaacttctcctactcttcttatcctgaatccggcgattcttcgcctcgttccagagaaattgaatggcgaaaatcaatcatgggacgagtcgccctccctcaatgctactaataataatgttaattataaggttaagtttatgtgcagctatgggggcaaaatccaaccgcgttcccacgataaccagctcgcttatgttggtggagataccaaaatcctcgtcgttgatcgcaacatcaagttctctgctatcatggccaagttatcttctctttacggtggggattctgaggtttgtttcaagtatcagcttcccggtgaagatctcgacgctttaatttccgttaccagtgatgaagatctggagcatatgatgatggaatatgaccggttgcatcgttcctttgccaaaccggcccggttgaggttgtttctattcccgttgaattcgccgttggtggcgtcaggatttgaagggagtgaaccgaagtccgataggcaatggttcattgacgcattgaattcggtgcagattcagaatctcgatgcctcttcccctcctactgtggcggttctggcg

SEQ ID NO: 3794 - DNA, 846 bp, Gossypium hirsutum
  Clone ID: GOSHI-09MAY01-C1661_2
cccacgcgtccggaaagagaggcacaaggagacatctgaagatctttcttcaaaattcttgaatctgcgggttgtctcacttgaggtattgttaatctcagttttaatagcagctattttaaggtacagtcttggaataagaatttccttaacttcttgcacccacctggggggtttaagaaccagtcagaactgctttaaataccatgatatcttgtcccatttgattctttgcattgaaatttatctgataatcttgttttagggaagctcttggggttgccactatcttttatttgcactttttgtctagcgcacggagtgaaaatacttcagtagtgctgcctcaagtcactctatgtcatgatgaatgctatgtatttatttgctatacaattatttgcccaccctctgcgccacctcatgacgagcaaagcttcatttcactaggctgatggcatattacgtaatccttttatctgacattttgttcatttattattagctgccacagcaggagaattcatttgattgtggtctgttcttactccactatctggagctctttttagctgaagctccttctaacttcaatccattcaaaataaccaagttctccaactttcttaatttggattggttcccacctactgaagcatcaaaatcctggtgcagcagtgaacgagttagatgtggattccaaaatggttgagaacatggagtctcaagataataaaactgtgtcatcagatcaaactctcggtacggtgctgaaccagttggatcgggattccgacatgattgagaatgaggctagttgtgatgaagtgcaaacaattattgacg

SEQ ID NO: 3795 - DNA, 1083 bp, Gossypium hirsutum
  Clone ID: GOSHI-09MAY01-C1661_1
gttattgaaaataacccgattgaggatagtgtagttctgattgaaaaacgggatacagatcaggaacaatctgagtcagtagaaaatgttgagtgtctgaagaaaggtttcatgcccgcctccattgaggtgctggagacttctatcaccgatgtccctggagcttctgaggacactgacaagattcatgataaaactggagatgcagatcttccttcgaaagctcactcgtctgttgtgttgcatcaaaatcctggtgcagcagtgaacgagttagatgtggatcccgaaatggttgagaacatggagtcccaagataataaaactgtgtcatcagatcaaactcttggtacggtgctgaaccagttggatcgggattccaacctgattgaaaacgaggctagttgtgatgaagtgcaaacaattattgacgacctaccgtctaaagataactcaatgttattatcagatcaaaatcctagtatggtggctgaagcattgaatcaagattctgaagtggctgaaaacaaggaggctattgtcaatgattctcttgcagagttatctgagcaaccggcagcaaagaggatgcaacaattgaatcaagattctgaagtggctgaaaacaaggaggctatcgtcaatgattctcttgcagaattatctgagcaaccggcagcaaagaggatgcaacaattgaatcaagattctgaagtggctgaaaacaaggaggccatcattgtcaatgattctctggcagagttatccgagcaaccagcagcaaagaggatgcggctttcgccatcccttgaggaggaagtggactcctaggcagcctgtcaaagagggcattttgtttatgcaagtagaagtaggacaggatgaatttttcttacaccttatgatgctaggaacccaaatctaagtgaaatagtatttgtttgtaatttgagctatgaaggtgggacagcaattgagtagttttggatacatttcttgctttcatagctaaatcatacaagaactaacgaaattccctgcctaccaaattatacagtattaaattcagaaaatttagattgg

SEQ ID NO: 3796 - DNA, 475 bp, Gossypium hirsutum
  Clone ID: LIB3543-022-Q1-K1-C8
cccacgcgtccggcggtttgtctcacttgagctgccacagcaggagaattcatttgattgtggtctgttcttactccactatctggagctctttttagctgaagctccttctaacttcaatccattcaaaataaccaagttctccaactttcttaatttggattggttcccacctactgaagcatctctaaagcgcactctcatccagaagttaatctttgaactcctagagatccgttctcgggaaatgagttcatctgattgcagtgatgaacctcattcctctagatttccagaagagattgaaaatggaggtgtggagtttgttccaaagagtgtcagcccagaagtggcttgtcatgggaatttaaattcccaagcgagccaagggattgaaatgactctgttagcatcatcttctatgagaaatgtggagactgttaatgattctggcttggttcttagggagttcttt

SEQ ID NO: 3797 - DNA, 1227 bp, Gossypium hirsutum
  Clone ID: GOSHI-09MAY01-C1611_1
caatctgaaaacgctttggaaaaatcgccgtcgcgtggcatctgacattacttgttaaagactattccagattcccaaggagagcttcttagccgagcctattgattatccactctaacctctccattttccatcttcaaccttctatttccttcaatctggttctctcacactatccatctccttcaatttttctgcatattcggggactcttcctatgaggtaaacttccttcttgcttttcattgtttcgattgcaatgaaatgtgctagacgatttgctgttcttggagtatattcaaaactgtatttttgagttttaagcgagatctgttgaatatcatgtatatacgcccctatcaatgacttatcttggctctttgttctgcacttcttgattattgttaatgaatccccttcaatgataatgtttccccatttcatgtccatgccgagttgagttgcacttctacacgcgattgcctcagcaacaaaggctgaggcgacttgattgtggatttccgagcatgccaagagaacctttccttcgctgttcctggccacaattccgagtgccgcatgagaagatctcacatcatatgcagcatcaaagttgatcttcacaaactgatcagattgcccataaagtgcagcagaaaaccctacactggactggattactctgttcaaagacccagactagccactctgggaactccaaattatattcagacagaaaaatctggcatgctaattctccccatactgatactgaaaccgggcattctctaaataagtgattcatcgtctgtgtcccactcccacacctcgggcagattgtaatgtttgtcaatcttctttgttgcatgtttgcccgtaaaggaagatagttccatgttactttccatactgttatttttatttttgaaggtaggttaagtagccatagttttttatagaagctcttgtagtcggtttgtaactcataagctctaggatcttcatccaaactttgtaatagtttataggcactacgaactgcatactcacccgaaggctcaccgctccatgccagaagatcatcgtgaggctcaactgcataggggtgtgcataattcgggtaaaaccgaaaaaattcggttaaccgaccgaattctgttaatcggtcggttaactgaattttttcggtcgggggtcggttaatttttttatgattttttggttaac

SEQ ID NO: 3798 - DNA, 418 bp, Gossypium hirsutum
  Clone ID: uC-gsflnu33B146a02b1
gcatgctccataaagtgcagcagaaaatcctacatttgactgtattactctgctcaaagacccagactagccactctgggaactccaaattatattcagatagaaaaatctggcatgctaattctccccatactgatactgaaaccgggcattctataaataagtgattcatcattctctgtcccactcccacaccttgggcaaattgtaatgtttgtcaatttcctttgttgcatgtctgcccgtaaaggaagatagttccatgtttactttcaaaatatataatttttataaaatctctttaatatttacaaattatctataattaattaacttattaatttctgtgtggctcttactctattaattaatttacttttctccaattatactctttatctctttttctttttaccac

SEQ ID NO: 3799 - DNA, 189 bp, Gossypium hirsutum
  Clone ID: LIB3196-030-P1-M1-G3
ataagctctaggatcttcatccaaactttgtaatagtttataggcactacgaactgtatactcacccgaaggctcaccgctccatgccagaagatcatcgtgaggctcaactgccagtggaatgcgaagaatcctatcagctacttcttctggaaaggtagactcaatcaactcttttttccacagtcg

SEQ ID NO: 3800 - DNA, 1058 bp, Gossypium hirsutum
  Clone ID: GOSHI-09MAY01-C1631_1
caaaaaagtaaaaaagagatcggaaatggcgaccaattcaatgaacttggaagatataccgtctgaatcggtgatgagtgagcttcttcgccgtatgaaatgcgcctccaagccagataagcgtctcatcctcattggtccaccgggatcgggaaaaggtactcaatctccaataattaaggatgagtactgcctgtgtcacttggccactggtgatatgctgagagctgctgttgctgctaaaacccctctcggtatcaaggccaaggaggctatggataagggtgaacttgtttccgatgacttagttgttggcattattgatgaagcaatgaagaaaccttcatgtaaaaaaggtttcattctcgatggatttccgaggactgtaggccaagcacagaagcttgatgacatgcttggaaagcaaggagtcaaaattgataaggtgcttgattttgcgattgatgatgcagtcttggaggagcggattactggtcgttggatccaccctgctagcggtaggacctatcatacgaaatttgcacctcctaaagttcccggccttgatgatgtgaccggggaacctttggtgcagcgaaaagatgatactgcagcagttctcaagtcaaggcttgatgcatttcacaagcaaacccaaccggtgattgattattattccgagaagggaatagtcgcaaagcttcatgcggaaaagcctcagaaagaggttacggacgaagttaagaaagtactttcatgacgaaaccctcattacggacgagattcgtataaggtgatttacacatgaacattggttcttttgcaaacagggaccccccaaaaaattgagaaatttcatggatttttactcgtgtttcgagtacacattcggattcattgttatgccattgctttttttggcccaaatatcagctgttgtttgttcaagtattggtgatgattatgatacttgaaataatgatatacttatagattgacaactgattactaattaatgtattattaccactcaaatggttttttgtaaataatttttt

SEQ ID NO: 3801 - DNA, 752 bp, Gossypium hirsutum
  Clone ID: GOSHI-09MAY01-C1621_1
ggaagctatttaaacgatgatgatttcaatgatctccatgatcatgacgataccgatgacgatgatgatgagggggaatatgatggcactgatgctggtgatgtggatgcctttgattttcatgatcattctgaggatggggaggatgataatgacgcgagtgttgaactcgatccggctgatttttcgagtgacgaggcttatgctagagcacttcaggatgctgaagaaagagaagtggctgctagattgttggccttagctgggattaatgatggaggaactgttaccttagaggatcatggacacggtggtaactctcaggatacttgggaggaagttgatcccgatgagctttcatacgaggaactccttgcactcgctgaagtagttggaaccgagagcaggggcctttcagctgattcaattgcctccttgccttcactgatattcaaggcaggaaatagtcaaactggaaccaatgattcgtgcgtcatttgccgtgtagactacgaggatggtgactccttaacagcactttcttgcaaacattcatatcatcccgagtgcataaacaattggttgaaaataaacaaggtctgccctgtttgtagtgcccaggtctcgacctaatggcaacgtgactgcttggtttttaatatgcagaatgtgtcttcccttttggatgggaaagaaaataatttgggatcagtcttctttagtaacttttggtgtgaaaccacctttggaat

SEQ ID NO: 3802 - DNA, 681 bp, Gossypium hirsutum
  Clone ID: GOSHI-09MAY01-C1151_1
atttaaagagagtggttgataagattgtcgagttcatactcagaaatggtagacagtttgaagcagttcttgttgaacaagatgtcaagcatgggaggttccctttcctgttgccatccaatctatatcatccatattatttagaagctcttcaaaaagctgaaaagtcaaagttacctggtaaaggattcatttctgagaagcatgattcatctggccgtggggtagagaagaaagctgcttcatcccgagaaagtgatagtgcatctcttggatctgacataccatataattcagataggaaagggaagtttaaaatggtaatcagcaaatcaaagaaggatggacaagatcccccttcttccaaagctacccagccacaaatcggagttaatgtggatgcagctgccgcagctgctattcttcaggctgccacaagaggcattaagaaaccaaatttagagattctttcgaagacatcattaaatggtagcagtcaggtcccatctagtgaggatgggcatgtcccaagttctggccaggttgctaatgctattgcaaagacggcagctattgcagctgcaagtgaggctgattcgtccgaggcatgttgcacaaaagaagagaaactgaaagctgaacgaattaaacgggcaaagatgtttgcagccctgataaaaa

SEQ ID NO: 3803 - DNA, 535 bp, Gossypium hirsutum
  Clone ID: LIB3829-027-Q6-N6-B2
gatcttgaacggtacttcctctttgatcgacgttcattatgatgaataccagaattcatcttttcatttttgtcacaagtatcgatatccattgcacctgagctgccttccctttcttttacagaaaggcttccaccctcagcacccgaaccacaaacccctaactcaggtggttcggcagataagccacgcaatgattcggttttaagtggtgcagaaccactttttatcaaggctgcaaacatctttgcccgttttaatcgttcagctttcagtttttcttcttttgtcaaacatgcctcggacgaatcagcctcacttgcagctgcaatagctgctgtctttgcaatagcattagcaacctgaccagaaacactcggctcgcctttctgaccagaacttgggacatgcccatcctcactagttgggacctgactgctaccatttaatgatgtcttcgaaagaatctctaaatttggtttcttaatgcctcttgtggcagcctgaagaatagcagctgcggcagctgcatcca

SEQ ID NO: 3804 - DNA, 580 bp, Gossypium hirsutum
  Clone ID: GOSHI-09MAY01-C1141_1
cccacgcgttcgcccacgcgtgcggccacgcgttcgaccacgcgtccgcccacgcgttcgaaaacttcgaaaatcaaaccgtacggtatttttgagagagcgaaagaagcaaagctcccacatagtgaaaaggattctcttttctatcttcttcttcttcttcttagcaaattgcagctctcgattgagctcttttcgatctttctagaacattccatttatctccgtggaaccttccattttctttttttggttgatttttttttccggcgaagtcggtaaggttattattgttctacggacccccctcgcccccacccacacaatcaaatcccgtttcgatggagttgtacggtcgtaacccgactcgtaatgggtctcaatccggttatcaacccgaatggagccccgctgggcccgaaactggactggaagaatcgaggtggcaattgtcggtgaggggcgtcgaatcgtacccggaacggctcggggtgactgattgtgtatactacatgcgaacggtgttctgtggttaccgctatagttgccgttacaatcatccccgcaaccgtgccgcggt

SEQ ID NO: 3805 - DNA, 629 bp, Gossypium hirsutum
  Clone ID: GOSHI-09MAY01-C1161_1
acccgcgcgcgccgcgaacagaagcaaaaatttaattattatagtttttaaaaatcatgaaaacttaacttcacaaccccttcctttttcttttgtgggtgtggtcacccttctttccccatcaattgtccactcttcttccaccttttattaacaacctttttttttttattattgatcccaaatccacttccctcaattttcctttgccccctataccacttccccttgcttttctttcaatttccttcacatcaatctctctggttccccttttcgaatctccgatgcttcttgctctagattatccatcctccgttcttgttccccttcaaatctctctaactgcgaccaatgtgcctgggaatgtggcgtcaccaaacacccactcaaactcttccatgactgcggaccaacccgccaacttcccgagcaaggctgccaacctgatgtcctgggttacctccaaaatttcttctttaaaatgggctttcaagttgaatgggacgaagctcaagactcttacttctctagctgccgagactgtaaattgaagaacggcatttgcggcttcaattcctccgacccaaacaaaccgttcctttgtttccaagccaaagccaccattt

SEQ ID NO: 3806 - DNA, 681 bp, Gossypium hirsutum
  Clone ID: GOSHI-09MAY01-C1121_1
atggtgacgagcaatggaaaacgtatccgaatagtcaatgatacagcagaagatgtcctgagcgagaccttatatggagatagtgttagacttcaacaggtcttagctgatttcttgttgatatcagttaattttacaccaaatggaggccaactactagttgtagctaacttgaccaaagatcaattaggacagtctgttcaccttgcacatttggagctcaggataacacatgcaggtggcggagtacctgaagcaatgctgaaccaaatgtttggaaatgaggaagacgcatcagaggagggtatcagtttgctcatcagccggaagttggtaaaactcatgaatggagatatcctgtacttgagggaagcaggcagggcgacgttcattgtgacagttgaacttgctgcagcaaatggtccagattccagaacctaactgactttggtggatatgatttgacaatggtgctgtacagttaacgagaagttttgggtgtttgacaatgtaatttgcaaaagcctgtgggttttatttgttgaatgagttgcactttcataagatgtctgttcttccaaggctgcagtaaaaggtgctcattaagttttgtgaacttattgttgagtgttgccaggccgactggtacttgggaaattgtaacatgtaattgtttcagtg

SEQ ID NO: 3807 - DNA, 625 bp, Gossypium hirsutum
  Clone ID: GOSHI-09MAY01-C1091_3
ctaaattctactaccttacatagttttaatttagtattcttcaaatcctttaaaagaattctcaaacttcttcataaatttcattaaaccggccacgccccccgccctcgcgtcccggtctcttccctagggatctgaaaaaaaaaatgtcgtcaaatggaactgacaactcggctgctaagaagcctccaagtccttctcctttgagattttccaagttttttcagtccaacatgagaattcttgttactggtggagctggattcattggctcccatttagtggataaattgatggagaatgaaaagaatgaggttattgtcgtcgataactactttaccggcacaaaggacaatctcaagaaatggatcggacatccgagatttgagctcattcgtcatgatgtcactgagcccgtgctcattgaggttgatcagatctaccatcttgcttgcccggtttcgccaatcttttacaaatacaatcctgttaagacaataaagacgaatgtgatcggtacattgaacatgttgggtctggcaaagcgtgtcggagcaaggattttacttacctcaactttagagggttatggagaacccttggaacatccccagactgagagcta

SEQ ID NO: 3808 - DNA, 1311 bp, Gossypium hirsutum
  Clone ID: GOSHI-09MAY01-C1091_1
ctcaaacttcttcataaattccacccggccgggccaagcctccgtgttgtttggctttgttttccttgtaggatctgaaaaagaatgtcggcaaatggaactgacaactcaacttctaagaagcctccaagtccttctcctttgagattttccaagttttttcagtccaacatgagaattcttgttactggtggagctggattcattggctcccatttagtggataaattgatggagaatgaaaagaatgaggttattgtcgtcgacaactactttaccggcacaaaggacaatctcaagaaatggattggacatccgagattcgagcttattcgtcacgatgtcaccgagccgttgctcattgaggttgatcagatctaccatcttgcttgcccggcttcgccaatcttttacaaatacaatcctgttaagacaataaagacgaatgtgatcggtacattgaacatgttgggtctggcaaagcgtgtcggagcaaggattttacttacctcaacttcagaggtttatggagatcccttggaacatccccagaccgagagctattggggaaatgttaaccctatcggagttcgaagctgctacgatgagggaaaacgagtggctgaaactttgatgttcgattaccataggcagcatggcatagagattcgaattgctcggatcttcaacacttatggaccacgcatgaacattgatgatggtcgtgttgttagcaatttcatagctcaagcactccgcaatgagcctttgactgttcaattacctggaacacagacaaggagtttctgttatgtttccgacatggttgacggcttaatccgacttatggaaggagagaacaccggaccaatcaatatcgggaatccaggtgaattcaccatgctcgagcttgcagaatccgtgaaggagcttatcaatcctgaggtgaagatatcgatggtggaaaacactcctgatgatccccgacaaaggaagccggacataaccaaagcaaaagaggtgctcggatgggagccaaaggtgaagttgcgtgacgggcttccgcttatggaggaggatttccgtctgaggctcggggttccaaagaagaactgattgaaagctattttgcagcaacagaagttacaaatataaagtgctattgcttcttttcctttttataatcaaattccaatatgcttatcttcaatgcataataatggcagcaatggagttattttggattttgtttttaatgttttttgaacgatatttgagttaaatggaacacaatttttgcctttcattaaa

SEQ ID NO: 3809 - DNA, 549 bp, Gossypium hirsutum
  Clone ID: uC-gsronu33B157g01b1
acgcggccggcgatttttttagggtgaaactccgatgttacgctgaccttaggcaagtatggctataaggttcgagttggtcggatcttcatcactcatggtccacgcatgaacattgatgatggtcgtgtcgttagcaatttcatatgctcaggcactccgaacagagcgtgtgactgatgaatcacctgaaacacagacacggagatggtgatatgatgccgacatggcatgacggctgactccgactaatggaaggagagaccaccggagcaatcaatatggggaatcgctgtgacttcaccatgctcgcgcttgcagaatccgcgaaggagcttatcgatcctgaggtgaagatatcgatggtggaaaacactcccgatgatccacgacaaggaagacgcacataaccaatgcagaagaggcgctcggatgggagccacaggtgaagatgcgtgacgggctaacgcttatggaggatgattttcgtaaagggctcgtggtccaaagaagaactgattgaagtgattaacagcaaccgagtttcaa

SEQ ID NO: 3810 - DNA, 507 bp, Gossypium hirsutum
  Clone ID: LIB3585-040-P1-K1-C4
gcgaccacacgtacgcccacgcgtccgaaaaaaaatcgagcatatattcgtatccgacataacatgttggggattatgtgcagtccaacatgagaattcttgttactggtggagctggattcattggctcccatttagtggataaattgatggagaatgaaaagaatgaggttattgtcgtcaacaactactttaccggcacaaaggacaatctcaagaaatggattggacatccgagattcgagcttattcgtcacgatgtcaccaagccgttgctcattgaagttgatcagatctaccatcttgcttgcccggcttcgccaatcttttacaaatacaatcctgttaagacaataaagacgaatgtgatcggtacattgaacatgttgggtctggcaaagcgtgtcagagcaaggattttacttacctcaacttcagaggtttatggagatcccttggaacatccccagaccgagagctattgcggaaatgttaaccctatcggag

SEQ ID NO: 3811 - DNA, 394 bp, Gossypium hirsutum
  Clone ID: LIB3197-031-Q1-M1-A6
cgggattccaggtgaattcaccatgctcgagctggcggaatccttgaaggagctaatcgatcctgaggtgaaaatatctttggtggaaaacactcccgatgatccccgacaaaggaggccggacataaccaaaacaaaagaggtgctcggatgggacccaaaggtaaagttgcgtgacgggcttcgcttatgaggaggatttcgtcagagctcgggtcccaaaaagactgattgaagttttttacagcacagaagttcaatataagactatgcttttttcttctatataaatccaattttatttcatcatataatgcgaatgagtatttgatttgtttatgttttgacatttgataatgacacatttgcttaaaaaaaaaagcgcgttaagtca

SEQ ID NO: 3812 - DNA, 387 bp, Gossypium hirsutum
  Clone ID: LIB3197-040-Q1-M1-G5
atttttgtatatattagtccataatctctccatgtgagcaataggaaaattttgagtgttgtttggctttgttttctctgtaggatctgaaaaaaaaaatgtcgtcaaatggaactgacaactcaacttctaagaagcctccaagtccttctcctttgagattttccaagttttttcagcccaacatgagaattcttgttactgggggagctggattcattggctcccatttagtggataaattgatggagaatgaaaagaatgaggttattgtcgtcgataactactttaccggcacaaaggacaatctcaagaaatggatcggacatccgagatttgagctcattcgtcatgatgtcactgagccgttgctcattgaggttgatc

SEQ ID NO: 3813 - DNA, 1192 bp, Gossypium hirsutum
  Clone ID: GOSHI-09MAY01-C1081_1
taaaattttatctcagtttaacaggggcagcagtgccatgcaacattatgtggcaacccgtccaatgttcattgatgtagaaatcatgaattcagacaccagattagttcttggcgaccagggttctcaagctagtcctagcaatgtcgctcgtgggctttcttcattatacaaagaaatcacagatactgtgcgcaaagaagcagcaacaattatggcagtattcccgtctcctaatgatgttatgtcaattttagttcagcgagttttggagcagagagttactgctcttttagacaaattattagtgaagccatctcttgtgaatcctcctcccatggaggaaggcggacttttattgtatttgagaatgctagctgtggcatatgagaagacccaggaacttgctagagagctacgagccgttggatgtggtgatttggatgttgaaggtctcacagagtctctattttcatctcacatggatgaatatcctgaacatgaacaagcatctctcggacaactgtatcaagcaaagttggatgaactgcgtgctgaaaaccagaatgtttctgattcaactggaactatagggcgctctaaaggggcttcagtggcttcttcgcatcagcaaatatctgttgcagttgtgacagagtttgtacggtggaatgaagaagcattaaccagatgcactttattttcgtctcagcctgcaacacttgcagccaatgtaaaagcagtgttcacttgcctacttgaccaagtcagccaatatattactgatggactggaacgggctagagatagcttgactgaggctgcagccatgagggaaaggtttgtgctaggtacaaatcttagtagaagggtggctgctgcagctgcttctgcggcagaagctgcagcagctgctggtgagagcagtttcagatctttcatggttgctgtacagcgttgtggcagtagcgtggccatagttcagcaatactttgcaaattctatatctcggctcttattgcctgttgatggtgctcatgctgcttcttgtgaagaaatggctgcagcaatgtctagtgcagagggtgctgcttataaagggcttcagcaatgcattgaaactgtgatggctgaggttgaacgattattatcagctgaacaaaaggcaacggagtacccgtcacctgatgat

SEQ ID NO: 3814 - DNA, 1226 bp, Gossypium hirsutum
  Clone ID: GOSHI-09MAY01-C1051_1
ccccgcgtccgccccccgtcccgtgggggaaagtaggtgacgacagaagagggttgtggaattgggaagccgaagaagaagctactgcgattgcgattgccaactcattcttccgtcatgggcaactgtggcactagagaggaatctgacgttgttactcatgctcaagttcagcagctccacaaccacatcttatccgacaagaagcttactcaaagtcagagccagactcagaatcgtaccctctcagatctgagcgacttcgaggattccaggaaaaatgcgcttctctatacccacattattgccttcactttattcgagcttgagactattaccaagagcttccgttctgactatattctcggggaaggtggcttcggaacagtctataaaggttatattgacgagaatgtgcgggtcggtctcaaatctcttcctgtcgctgtcaaggtcctcaacaaggagggccttcagggtcaccgcgaatggcttactgaggtcaacttcctcggccagctcaggcatcccaatctggttaagctgatcggctattgttgtgaggatgatcacaggctacttgtatacgaattcatgttccgtggtagccttgagaaccacctttttcgaaagccacctgtccccacatcctgcgccattccgatgttgatccctgcccatatgtgtttcttctttccctgtctttctatttcattagtattgcaaatacatttcctttcctgctgctaagtgctaacttgttctcatcaactaggctcttaattttgttatctactttaaaatatgtagttaatgcattgcttccaccctttatatgacagacttctttagcgtggagcatcttaacttacttgatgtagctccttgggttatgaacccaaactggtactatcagaatattgaatcttttaggaaaatattgactgatccacctagtgcatggctcatcgcatgatggatttcataatctgtcataagcaccactttcttggtatgtaacggttttatccaattggcggtttactgcttcaaaaggttgaaggccatggcactttttgcacgagtgttttttagaagtggtcaaatatcaatgacccctgtgtgtattaccacgggaaacaggtatcactgattatttatctgaagactggcgcggacactaagcttgcaatgcaaatgttagccctttttaagcgacgggacag

SEQ ID NO: 3815 - DNA, 532 bp, Gossypium hirsutum
  unsure (1)..(532): unsure at all n locations
  Clone ID: LIB3585-019-P1-K1-C11
aaccacatcttatccgacaagaagcttactcaaagtcagagccagactcagaatcgtaccctgggagatctgagcgacttcgaggattccaggaaaaatgcgcttctctatacccacattattgccttcactttattcgagcttgagactattaccaagagcttccgttctgactatattctcggggaaggtggcttcggaacagtctataaaggttatattgacgagaatgtgcgggtcggtctcaaatctcttcctgtcgctgtcaaggtcctcaacaaggagggccttcagggtcaccgcgaatggcttactgaggtcaacttcctcggccagctcaggcatcccaatctggttaagctgatcggctattgttgtgaggatgatcacaggctacttgtatacgaattcatgttccgtggtagccttgagaaccacctttttcgaaaggcaactgcacctttatcctgggcgaaaagaatgatgattgctctaggagctgctaaagggcttgctttnctacacaatgctg

SEQ ID NO: 3816 - DNA, 1231 bp, Gossypium hirsutum
  Clone ID: GOSHI-09MAY01-C1071_1
tgttgtagccaactccttgttccgtccacccaaacccatcctcccccataaacaccaccctcttcaacccatctccagtcactccctacccaaatccccactcaattccaccttccttaaaccccatttttcccactcagattcttgcagattccgattgattgccgcagcttcccttggggaaaccgatgcctcctcagacgagccccttcctttggtcggtgaagactctgccgccttcgatttggggacccaaaacattgtttcttgggtttattttactattattttgggtgttgttctttttgttcttgatgttatctggattgataattctactggttttggaaaagcttttattgatgctgtttcgaccctctccgacagccatgagattgtaatgttggccctcattctcatatttgccactgtccatatggcttggctactttcgggaaattgggcgagaagatctggggaaaacgtgcataccgtgtcctatttgctggcgtatcccttccgttggctgttagcacagttgtgtacttcatcaaccacaggtataatggagtgcagttatggcagcttcaaaatggtcctggagtccatcaacttgtttggctctcgaattttatttccttctttttcctatatcctcctacctttaatctattagaggtagcagctgttgaacagccgaaagtgcatctgtgggaaactggcatcatgagaatcacccggcatccacagatggtagggcaggtaatctggtgcttggcccacacaatttggattggaaactctgtagctgttgcagcctccgttggtttgatcggacatcatctatttggcgtatggaatggtgataggagactagctgtacgacatggggaggcttttgaagttgtaaagaagcgaacaagcatcatcccttttgcagcaatcctcgatggccgccaaaaattgcctaaaagattactacaaagaattcattcgattgccctatttggctatcactgcaatgacactaggtgcatattttctgcatccggtaatgcaggcagctagtttccggctccattggtagcgcaacaggctttattaaacaaaacttgtatataaagacagacaaaactggcatattgaagttgagatcatggatacataggtaaaagcatgtatgctttgttgtaatttgcaaatctgtaaatgatacttcttagatgccatc

SEQ ID NO: 3817 - DNA, 642 bp, Gossypium hirsutum
  Clone ID: LIB3828-014-Q1-K6-A2
gttgtagccaactccttgttccgtccacccaaacccatcctcccccataaacaccaccctcttcaacccatctccagtcactccctacccaaatccccactcaattccaccttccttaaaccccatttttcccactcagattcttgcagattccgattgattgccgcagcttcccttggggaaaccgatgcctcctcagacgagccccttcctttggtcggtgaagactctgccgccttcgatttggggacccaaaacattgtttcttgggtttattttactattattttgggtgttgttctttttgttcttgatgttatctggattgataattctactggttttggaaaagcttttattgatgctgtttcgaccctctccgacagccatgagattgtaatgttggccctcattctcatatttgccactgtccatagtggcttggctagctttcgggacatgggcgagaagatcttgggaaaacgtgcataccgtgttctatttgctggcgtatcccttccgttggctgttagcacagttgtgagttcgaaatttattacactggatgatggcactctcatctagagttgattttgtgggacatgatgtcttgtggctttagtttgaaattcatggcctctc

SEQ ID NO: 3818 - DNA, 249 bp, Gossypium hirsutum
  Clone ID: uC-gsflnu33B075a06b1
tcgtcagctccgtccacccaaacccatcctagcccataaacacctacctcttcaaccgacctacagccactgggtagcgaaatcgccgctgaatgtcaactaactcaaaccacattggtcgcacccagataggagcagagtgcgatttatcgccccagcgttcccttggggaaaccgatgcctcctcagacgagccccttcctttggtaggcgaagactctgccgccttcgatttggggacccaaaaca

SEQ ID NO: 3819 - DNA, 776 bp, Gossypium hirsutum
  Clone ID: GOSHI-09MAY01-C1061_1
attttctctcatgttttttggggagaagagttggacacatttggatgtctcaatgataccagtgataaccgtggggagttctttttattctacagctaccacactgtttccggggtccggtgttgattgcgctggtggctggtaaagctgcacaaacatttgagcgcacagatccttcactcttgctccatcgcgttctaagcaaacttagaggtatatatgagtccaaagggtgtagatgtacctgaccctatacagacaatttgtacaagatggggaaatgatcccttttcatatggttcatactctcatgttagggtacagtcatccggcggggtttatgatatactggcgagaatgtataggcaataggttgttttttgctggtgaagccacaactcggcaatatccagccaccatgcatggtgcctatttgagtgggttaagggaagcttcgcgtattctccgtgccacaagaggtcgccaaaactactttaggaggtctgtgcagcggaatgttggaccaagcagtgatcaattgggtgatctgttcaagatgcctgatctagtatttgggaagttctcttttgtgttcaatccattaacagaggaccctaaatcattggggattttgagaattacttttgataattgcacagatgatatgaggaaggtgctggaaaaaagctgtggcccccaatcgaatcaatcattgcagctgtacgcagcattgtcccgtgaacaggcacatgagctacaaatggtaactggagaag

SEQ ID NO: 3820 - DNA, 1413 bp, Gossypium hirsutum
  Clone ID: GOSHI-09MAY01-C1001_1
atacacttttattggttgttgatatcaaataaaaaacttgatatttcttgccaccattatcttccatgatcacagtttgttaatgtccctaagtaacatcttcatttattattctctttgttttcttctcatcctttccctctatataaacccattctcaacctccctccgccccccgtccgcgccccccctccgccccgcgtcaacaaaatcatgaggagcatttgtgttgtgcttgttatctctttgcctttccttctcggcattgcccagggtttcgatttccacgacaatgatttagcgtcggaggatagtttgtgggatctatacgagcgctggcggagccaccacacggtttccaggagtctcgacgagaaacatcggaggttcaatgtgttcaagcagaatgttttgcatgttcacaacaccaacaacaaggacaaaccttacaagttgaagatcaacaagtttgctgatatgaccaaccacgaatttaggaatgcttacgctagttccaagattaaacatcataagatgttccaaggacagtcccgtggcgccgggagtttcatgtacgagaacgtcgaccgtgtcccgccgtccgttgattggcgacagaaaggtgccgtcactgctgttaaggatcaaggccagtgtggtagttgctgggcattttcaacagttgtagcggttgagggaatcaatcaaattaaaaccaataaattagtatcattatcggagcaagaattgatagattgcgacactgaagaaaaccaaggttgcaatggtggtttaatggacattgcattcaatttcattaaaaagaaaggtgggatcactactgagtccaattacccttaccaagctaatgatggaagttgcgatgctgccaaggtgaattctccggcagtggctatcgatgggcacgagaatgtgccagctaacgacgaggatgctctgcttaaagctgttgcaaaccagccggtttcagtggctattgatgctgggagtatggatttccagttctactccgagggggtattcacgggagaatgtgggacagagctgaaccatggggtagcagcagtggggtatggaacaaccttggatggaaccaagtactggatagtgaagaactcatggggagcggaatggggtgagaaaggttacataaggatggaacgtgggatcagagacaaacaaggactgtgtggtatagcaatggaggcttcatatcccatcaagaactcatcttctaatcctactggaccttcatattctcccaaggatgaactctaaacataaattatagctttcctttcaaatgtgttgttttttctgtgtttccaaaagttgtatcacgcaacatatgatcatgattgaataatcaataatatacttcaatttggtttc

SEQ ID NO: 3821 - DNA, 576 bp, Gossypium hirsutum
  Clone ID: LIB3543-038-Q1-K1-H1
atctctaatatttctgagaggggcttgagtcaactaaggagaaatctgaattgaaacaagtctcagttaagagcaccgttgatgaagcagcagttgggttaaatcatcccacagcaggtcaaagaacttctgttaagcaccttgatgatccttctttgaagccgtctgattttgggcgagttgagaaggatgaaaacaagaatgtgggaaatcacactaaggggcataaccaacctttggtgtgggcagagaacccaactagagcaatttccagtgtgccgcctgctgcttctgtatgcagctctgagcatggagacatacttattgatattaacgaccggtttccccgtgaccttctgtctgatatattctcaaaagcaagaatgtcccagaacctctatggtatcagtccattctctggtgatggagctggactgagcttaaacatggagaatcatgaactctaagcataaattatagctttcctttcaaatgtgttgttttttctgtgtttccaaaagttgtatcacgcaacatatgatcatgattgaataatcaataatatacttcaatttg

SEQ ID NO: 3822 - DNA, 622 bp, Gossypium hirsutum
  Clone ID: LIB3543-030-Q1-K6-F8
gcgttcgcccagcgtccgccccgcgtccggcccgcgtccgcccacgcgtccgcccacgcgtccgcccacgcgtccggttcacaacaccaacaacaaggacaaaccttacaagttgaagatcaacaagtttgctgatatgaccaaccacgaatttaggaatgcttacgctagttccaagattaaacatcataagatgttccaaggacagtcccgtggcgccgggagtttcatgtacgagaacgtcgaccgtgtcccgccgtccgttgattggcgacagaaaggtgccgtcactgctgttaaggatcaaggccagtgtggtagttgctgggcattttcaacagttgtagcagttgagggaatcaatcaaattaaaaccaataaattagtatcattatcggagcaagaattgatagattgcgacactgaagaaaaccaaggttgcaatggtggtttaatggacattgcattcgatttcattaagaagaaaggtgggatcactactgagtccaattacccttaccaagctaatgatggaagttgcgatgctgccaaggtgaattctccggcagtggctatcgatgggcacgagaatgtgccagctaacgacgaggatgctctgctt

SEQ ID NO: 3823 - DNA, 385 bp, Gossypium hirsutum
  Clone ID: LIB3145-048-Q1-K1-D5
gtcgatatcaaataaaaaactttatgtttcttctccaccattatcttccatgctcacagtttggttatgtccctaagtaacatcttcatttatcattctttttgttttcttctcatcctttccctctatataaacccattctcaacctctctccattcccataactttttctctcttcttatcacatcaacaaaatcatgaggagcatttgtgttgtgcttgttatctctttgcctttccttctcggcattgcccagggtttcgatttccacgacaatgatttaacgtccgaggatagtttgtgggatctatacgagcgctggcggagccaccacacggtttccaggagtcttgacgagaaacatcggaggttcaatgtgttcaa

SEQ ID NO: 3824 - DNA, 383 bp, Gossypium hirsutum
  Clone ID: LIB3166-036-P1-K1-C4
ttgatattaacgaccggtttccccgtgaccttctgtctgatatattctcaaaaggaagaatgtcccagaacctctatgatatcagtccattctctggtgatggagctggactgagcttaaacatggagaatcatgaacctaagcattggtcatactttcgtaatttggctcaagatgagtttgttagaaaggatgtttccctcatggatcaggatcatctgggtttctcatctccacttacaaatattgaagttggggctccaattgattatagctatccacctttgaaatctgctggtggagttgccttagctcaaattaagccagacatcatttttgatgaggacattaggcaagagtcagtttctgttgctgctactaac

SEQ ID NO: 3825 - DNA, 1277 bp, Gossypium hirsutum
  Clone ID: GOSHI-09MAY01-C1381_1
gtttaggagctctagtgccactgtgctaaagcctggtaggaataaaatcacctttcctttaccacctcaaaaacctggatcatatgtcctcggagttcttactggacacattggacacttgacttttagatctcacagattctccaaggcaggtccagcagatagtgatgatttcatgagctatgagaaaacaacccggcctgtcttgaaggtttccaaaccaagacctctggttgatctatctgctgctatatcatctgccttgctgattaaagaagctcagtggattggaattatagcgcaaccaataaactactccttgaatggtgctgtcatgcatattgatactggtccaggtctgaagattgaagatgcgcattccatcgagatggagacctacataaatgctgctcaaatttccactgatatggcaaactctggtgatgctaggaaagatgataatgaaaactttgagcagctaagtctcctcgatggtaaaatagagtttccagattgggccagtaatgtgacctcaattctttggattcctattcgtgctattgatgataagcttgcaagggggtcatcttcaggggccccgcagaaacaaagtatcgtggatggaatgcggacagtggctttgaaacttgagtttggaatatcaaacaaccagatctatgaccaaacaatagctttgcatttcaccaaccctttccatgtgagcacacgtgttgcagatcaatgcaatgatggtactttgcttttgcaggtaacactgcactcccaggtgaaggccacattgactgtcaatgatgcttggcttgatcttcaagatggatttgttcatgctggacaagatgatggaagaccagtttccggctttttcccactcgtcatatctccaacttcaagagcaggactcctattccgtgtatgcttggggaatggaacagctctagatgaaaataaggctcaaccagagagcatattaaacatcagctatagaattgctggtgataggaccattggggcacacccacctgtggctgcaaaatcgaatgaaattgagggtactagtcaggatttaatcttccggagtgctctaattttgcaacggcctgttcttgatccatgcctggctgttgggtttctacctcttccttctgatggtctacgggtcgggcaacttgttaccatgaaatggagggttgagaggttgaaagacatcgaggagagcaggttcctcaccaatgatgatgtgctatatgaagtgaatc

SEQ ID NO: 3826 - DNA, 1335 bp, Gossypium hirsutum
  Clone ID: GOSHI-09MAY01-C1351_1
atcttcttgttaatcatgcctcttctttaggtttaaacttattcttgggcgaccctggtttttattgtttgagttttgaatttcctttttttggggggcttcgcttttattgcagaattttgaaatagaaaagaggaaatggggattgatttgaggcaagtagtggccggtattctcactctcaccatgtttgtgatgcttggtcaaatgatcaaaagagaccattttgattctctccaagataaacttcctggagaagctcaggatgttcaagttgataatgccaatgttattgagaaggatggccttgtaaagccttcgaaggggagcaaagggccttggatgaaggacagtcaagagctaaaaccatgttggagcaggaccacttttgatggaatagagcagtcaagagggtatgttactttctcattgactaatggtccagaataccatgtctctcagatggctgatgccgtagtagtagcaaggtacctagcggcagcacttgtacttccggatattagaggaagcagacctggtgacgaaagaaactttaaagatatttatgatgttgagaagttcatgaaaagcctcgatggggttgtcaaagtagtgaagcaactacccaatgaaatatcaattcgggatcttgctgctgtgaaggttcccaatagggtcaccgaagatcacattgtggaaaatgtacaaccaatttttaaatcaaagggaaacataaggcttgctacctacttccctactgtaaatatgagaaaaactacacaaaagagtagtgttgattcagtctcatgtttgggaatgtttggaactttagagttgcaaccagaggtcagtgaagttgttgattcaatgattgaacagcttagaactttgagtcgcaaatcagatggcctgtttatagcagtggacttgagggttgatgtattggagaataagaattgtcatggtagtggtactaatgtagcaaaaagttgttataatgcacaggagattgctttgtttttgaggaaggtcggatttgataccgataccactatatacctgactcaatcaaagtgggataacagccttagtgtcctcaaggatatctttcctaaaacatacacaaaggaaaacattatgccagaagaaaaaaaagggagttcttgaatttgaaagttcaaaactggaaaagttataaatttctacatatgttccaaaagtgatgtttttgtcccaccttatcttgtctgttttatgccaatgtagctggcaaaagaatacctttagggaaacctcaaatcctcgttccaccgatataccgggtacatctgcacc

SEQ ID NO: 3827 - DNA, 567 bp, Gossypium hirsutum
  unsure (1)..(567): unsure at all n locations
  Clone ID: AI055278.1
gtaaagccttcgaaggggagcaaagggccttggatgaaggacagtcaagagctaaaaccatgttggagcaggaccacttttggtttgttaacttcacttaactccctgaaaaatgatcatttggtttagaaatttttctttacatgtatcattattccgatgtctccattgtcactgtgtattgacggtaaaaaatgtaattaaatgtttctctttaattgatggagctttgacttggcttacagatggaatanagcagtagagggttatgttactttctaattgctnatggtccagataccatgtcttcaggttctgggatctgtntaagtttaaaagtttcaaataaatcttgngctggcgcttttttatcttggctctctcacaaaaggggagaccaagtaagtgtgttaaaagccctaaccattaattgtgggaaatacccttacctataattgaaatacctttatcaacggtgcctggtaacttatactttaaggagtaatgatgtatatggtcnattccaattcatattctgagtcttatgaacgactgttatcatgggan

SEQ ID NO: 3828 - DNA, 1303 bp, Gossypium hirsutum
  Clone ID: GOSHI-09MAY01-C1341_1
tcgtccgcgcctccctttcggtttcagtttgaggcaaccattttataattcgactgtccagagagttggaaccatgtctttagtaaggtctgccgaaccagctactgcgtcatgtagaaatacgaatctctattcaatacaggatagcagtgatagtactggcatggccattcgaatgtttggttctgataagcataagcctgtttatgttatggattcttacagcagcgagagctacgaaaagtacttccttgattctcctacagatgagcttatacattcatctagttctggaatttctggaagttcggttcgcctacaagatgtctcttcttgccagataagagattactcggaaatccaaagcccagatacgctagactctgattcggataagatgaaactgaagcttcaagaactggagagagctctgcttgctgataatgacgttgatggggatgatgacatgtttggcactggtctaagcatggaagtagatggtgagtggtctgatcctatcaggatgggttctcatcacgactcgccaaaggagtcatcatcctcgggtacttatctcgatagcgttagtggtgacaaagaggtttcacatgtgtcatctcagactcctaaagcaaatgctgattgaatgtgctgctatactccccgcgcgtcccattgaaaaagcttcagccataataaatgagcttcgccagaaggtctcgattcaaggagatccgccccagagaattgcagcctacatggtcgaaggccttgcagctcgcatggcagcatccggaaaatatctttacaaagctttaagatgcaaagagcccccttcttctgataggcttgcagcaatgcaaatcctctttgaagtgtgcccttgtttcaagtttggatttatggcagcaaatggtgcaattattgaggcatttaaaggtgagaaaagagtacatataatagattttgatataagtcaaggtagtcaatatattacactgattcaaacaatagctaagctgccgggtaagccacctcatttgaggttaaccggagttgatgaccctgagtcagtccaacgtcttaatggaggcctcgaaattgtcggactaagacttgagaagctagcacaaatactcggtgtacctttcgagtttcgagcagttccctcgaggacttcacttgttgctccatctatgctggattgcaagccggcccaaccacttatagtgaactttgcatttctactccaccacatgcctgatgagagtgtttcaacgatcaatcagcgggatcagcttct

SEQ ID NO: 3829 - DNA, 1268 bp, Gossypium hirsutum
  Clone ID: GOSHI-09MAY01-C1371_1
cggcccgacccacgcgtccgtgatgattcgtttagatccccgcgtccgattaagaaggaaccaatcggcgagtgattttagaggagggagttatcataatggtggtagaacgggaggtgctccggtgaggtcgaagtccacggaggatatgtacacgagatctcaattggaagcctcggcggccaataaggagagcttttttgcgaggaaaatggcggagaacgaatccaggcctgaaggtttaccaccttctcaaggagggaaatatgttgggtttggatcgactcccatgcctacccaaaggattaataatagttctcagggtgacgtgttctctgttgtttctcaggggattgggaggttatctctggtagctgcatccgctgcaaatgttgtccaagcagggacgaaggagttcacctccaaggttaaggagggtggctatgatgccagggttaatgaaacggttggtgttgtcactgcaaagacaagtgaaattggccagaagacttggggcatgatgaaaggagtcatggcaatagcttcacagaaggttgaggaatacactaaagatggcatgaactggaaaaatgatggtaactggcaacgaaacgatagcgagaagaatggatattatcaggagtttaaacaggagaataagggatggaattctacttctggtggacaaacctcctctggtgtaaattataattcttataactcaaattcttgggatgattgggacacaaaagacaataggaaggaacatactacaaaagtgactgcttctcatagcaatgatggttgggctggttgggatgaccccaaggatgatggatatgatagtttctataatggtgcatctgataaaaatgccgttggtcgtaatggaaaatcagatgccgcatggactggtggaggctttctttaaggttggtgaacttgaactacatttatgagaatcgtacccacaaacggtaatttagagcacaatggattcctcaagggataatgatattaaatttcatgaagttcgtataccttttagcagtttacccctttttcttatgtatctatctttgaaattttcacaaagtaatatctggagcaactttcatgtttgagagtagttttatcatatttgtaaaactgtggctaagtgtccaattggaaagcagtatttgtgagtgtgaaacttagtatcatttgttcttcttcatcatgattttcttttagtcctgtaataaacaaagggcgcgtacgcgtga

SEQ ID NO: 3830 - DNA, 370 bp, Gossypium hirsutum
  Clone ID: LIB3145-018-Q1-K1-G12
ggtaatttatagcacaatggattcctcaagggataatgatattaaatttcatgaagttcgtatagcgttttagcagtttacccctttttcttatgtatctatctttgaaattttcacaaagtaatatctggagcaactttcatgtttgagagtagttttatcatatttgtaaaactgtggctaagtgtccaattggaaagcagtatttgtgagtgtgaaaaaaaaaaaaaaattttattattataattaaaaaaaaataataaaattttttttatttataaataattatattattaacttggtcggccgtttaaagaatccattttttttttttttcttcatgcaacataattttttttttttgggggcc

SEQ ID NO: 3831 - DNA, 695 bp, Gossypium hirsutum
  Clone ID: GOSHI-09MAY01-C1241_2
caaaagtgtgcgtcgagcttaaaaaacatcttgtcacagcaagctatgtcgatgactccatgttaatgatggatgaaaaggccaagaatgctggcattacaattcttggtgaaatgggtttggaccctggaatagatcatatgatggcaatgaagatgataaaccaagcgcatctcaaaaagggcaaaataatgtctttcacttcctagtgtggtgggatcccatctccagcagctgcaaataatccattggcatataaattcagttggaatcctgccggagctattaaagcaggacgaaatcctgccacgtacaaatctcagggtgaaacagtacatgtaaatggggatgacctctatgattcggctgggagatttcggatacctgatcttacagcttttgcattggagtgccttcctaatcgtaactcgttaacttatggggatctgtatgggatcggacatgaagcatccacaatattccgtggaactctccgctatgaaggttttagtgagataatggccacacttgtaagaattggtatattcaatgctgaaactcatccacttctcaaacatgaaggtcgaccaacatttagaaatttcctttgtgagcttctgaaaattgatactgaagacatgaatgaagttgtagttggggaaaaaagatagccggaaggatcctagaacttggac

SEQ ID NO: 3832 - DNA, 622 bp, Gossypium hirsutum
  Clone ID: GOSHI-09MAY01-C1241_1
aattgaagggccgacccaagcgacccgtgcgcccacgcgtccgcggacgcgtgggttgaaatttccttcgtgagcttctgaaaattggtactaaagacatgaatgaagttgtagttggggaaaaaaaagatagccgaaaggatcctagaacttggacattgcaaggagccaggagttgctgtaaaggctgccaaaacgattgtgtttttgggactaaacgaacagacaggaatcccggtttcgtgccaaagcgcatttgctgtaacatgtcatcgaatggaagaaaggctaacatactctaacacagaacaggatatggttttgttgcaccatgaagtggaagtagatttccctgatagcaaacagaccgagcgccataccgcgactttactggaattcgggaaggctaagaatggaaaaatgatatctgctatggcccttactgttggcgttccagtagcaattggagctctgcttttaattgtaaacaagatcaaaacaagaggtgtattgaggcctattgttcctgaagtttatctaccagctttggaaattgctcaagcctatggtatcaaactgatggagaaaaccgagtgaccaccatttctcaagatatctatga

SEQ ID NO: 3833 - DNA, 515 bp, Gossypium hirsutum
  Clone ID: GOSHI-09MAY01-C1261_5
cggattccgggtcgacggcgcgtccgattttggtgggacgacgacagctgcaattggagggctaagcagccgtgaattgtctgttcccctcgaccagaaccaccgtgagttgaaggctgagatagccacacatccgctctacgaccagcttttaactgctcacgtctcttgtctccgtgttgctaccacaatcgaacagttgcctttgatcgatgcacagttagcacagtgtcataatgttcttaggtcctatgcttcacagcatccccaacatggccactccctttcaccccatcacagacaagacctcgacaacttcttggcacaatatttgataatgctgtgtaggttcaaagaagagcttcaacaacatgtgagagtcgatgccgttgaagctgtcatggcttgccgtgaaatcgaaaataacttacatgctctcactggagtaaccttgggtgaaagtacgggtgcaacaatgtccgatgatgaagatgaacttgcaatggacttttctt

SEQ ID NO: 3834 - DNA, 1393 bp, Gossypium hirsutum
  Clone ID: GOSHI-09MAY01-C1261_2
tttctttctttcccttgtggtcctttatatatatatatatatcaaaaacccttctttttctctttagaagaaaacccactttttttgtttgttgttgttgggtaaaagccaaaaaaaaaaaatgcaagaaccaggtgggttaggcatgatgagtagtggtggcggaagtgaaacgattggagggttaagtagcggtgaagtgtcagttaccggtgaccagaaccgtcatctcaaggcggagatagctacacatccactttatgagcaacttttagcagctcatgtgtcttgtcttcgtgttgctacaccgattgatcagttgtctttgattgatgcacagttagcggagtcgcataacattttgagatcctatgcttcacaacaacaaggtcactctttatcaccacatgaaagacaagagcttgataacttcttggcacaatatttgatagtgttgtgtactttcaaagaacagcttcaacaacatgtcagagtccatgccgttgaagctgtcatggcttgccgtgaaattgaaaataacttacaagcgctcactggagtaaccttgggtgaaggcacaggtgcaacaatgtcagacgatgaggatgaactgcaaatggacttctccatggatcaatctgggcccgaaggccatgatttaatgggttttggtcccttacttcccacagaatctgaaagatctttaatggagagggttcgtcaggagctcaagattgaactcaaacagggtttcaaatcaagaatcgaggatgtgagggaggaaattttacggaaaagaagggctgggaaattaccaggtgacaccactacggtgctaaagaactggtggcaacaacactcaaagtggccatacccaactgaagatgataaggccaaacttgtggaggaaacaggattgcagctaaagcaaatcaacaactggttcatcaaccagaggaagcgtaactggcatagcaactctcaatctgtcacctctttaaagtcgaagcgaaaacggtagaggtgaataaattcaatgagaaatggagaagaagaaagtttgagcatgttgatgtcaacttcttgcggtaaatagctgtgggctaacattttgtgaaggtaaagtgggaagtgaggtggtttcaagaaacctaagtacatagattgagttttatatggcttacatgttgtttagtgtgtagagtggattcgagtttctaacaaagtaaacatactatcagacctcattattgtgatgtatgtctctaatttctaatattcgcttatggaaaatttactagttgtgatgtgatgtgagccgttgctacgattcatgattgaatcttgtgtagtctcccatccatatatatatctatcctttcatcaaaaaaca

SEQ ID NO: 3835 - DNA, 1023 bp, Gossypium hirsutum
  Clone ID: GOSHI-09MAY01-C1261_1
cccaccgtccgagaacaccccctccgacatatagcagtggagggtgcagaaaatcttgtctcagatcccgatatactcacaccattaacctcatataaacattatttctctttcttccaataagaacacacacacacactccacaatataggctctgatcaccttacttcactctcaactttcaaccacaagggtctttctttgtggtccttaactacttgattgatgatcatttctatatacatatatcaataccacctttttttcctttctttactccctttttcagttttcctctaatacgttatttatatatagggggggttgtggttccgagaaatgcaagaaccagggttaggtatgatgagtagtggtggtgggagtggtggaattggagggttaagcagcggagaagtgtcggtttccggtgagcagaaccgacagctgaaggctgagatagctgttcatccgctatatgagcagctattagcagctcatgtttcttgtctccgtgttgctacgccaatcgatcagttgcctttgattgatgcacagttagcacagtctcataaccttcttagatcctatgcttcacagcatcaacatggtcactctctatcaccccatgaaagacaagagcttgacaacttcttggcacaatatttgatagtgctgtgtactttcaaagaacagcttcaacaacatgtcagagtccatgccgttgaagctgtcatggcttgccgtgaaattgaaaataacttacaagcgctcactggagtaaccttgggtgaaggcacaggtgcaacaatgtcagaagatgaggatgaactgcaaatggacttttttttggatcaatctgggcccgacggccatgatttaatgggttttggtccttacttcccacagaatctgaaaggatctttaatggataggggtcgtcaagtagctcaagattgacctttaccgggctttcaaatcagattgtgattttagaggaatttaccctataggcttgaaattcct

SEQ ID NO: 3836 - DNA, 562 bp, Gossypium hirsutum
  unsure (1)..(562): unsure at all n locations
  Clone ID: LIB3830-001-Q1-N6-E11
gaaacaaacagagattctgacactaagaatgcgagtttacttggttagaaacttcaaccaaaacacttatatgtgtaagcaacataaaactcattaccattacaacctatatactggtttttttaaaagaaaaaactccaacttcccaaattctttttttcaccttcacaaaatgttagcccacaattatttacccncccccccaacagcctacatgataagctgtaccaccatcaacacgttggaactcgatgtctaccttttacacttggacttcaaggaggtgaccgactgggaattgctgtgccaattgcgcttcctttggttgatgaaccagttgttgatttgctttagttgcaatccagtttcctccacaagtttggccttgtcatcttcagttgggtatggccactttgagtgttgttgccaccagttcttgagcactgtagtggtgtcacctggtaattttccagcccttcttttgcgtaatatttcctccctcacatcctcaatttttgatttgaaaccctgtttgagttcaatcttgagctcttgacgaacc

SEQ ID NO: 3837 - DNA, 499 bp, Gossypium hirsutum
  Clone ID: LIB3585-036-P1-K1-F8
ggacaagagtcccctctatttttatagatgctttttcccttatttaaaaatacaattgaaagaaaaattaaaaaaaaataaattcatctcttatttttcatttttggctgactgtatgtattacttttcctattttgtaggagtaaccttgggtgaaggcacaggtgcaacaatgtcagacgatgaggatgaacttcaaatggacttctccatggatcaatctgggcccgaaggccatgatttaatgggttttggtcccttacttcccacagaatctgaaagatctttaatggagagggttcgtcaagagctcaagattgaactcaaacaggtgctttttattattttatcgagataagtcaatatgaaaattttgatatttaaatccaaatattttgaaaacgaaaattgactcaaaccgaaatcactcgaatcagattaaatcaatccaacaacaattaacatagattatttttatgtctgaacagggtttcaaatc

SEQ ID NO: 3838 - DNA, 446 bp, Gossypium hirsutum
  unsure (1)..(446): unsure at all n locations
  Clone ID: LIB3829-023-Q6-K6-F3
tttgttnnngttgttgtttgggtgggggggggggggaggggaaaaaatacaaaaaccaggtgggttaggtatgatgagtagtggtgggggaagtgaaacgattggagggttaagtagcggtgaagtgtcagttaccggtgaccagattttttttttttttgcggagatagctacacatgtggtgggggggggacttttancanctcatttntnttnttttnntgttgctacaccgattgatcagttgtctttgattgatgcacagttagcggagtcgnataacattttgagatcctatgcttgacaacaacaaggtgactgtttatgaccacatgaaagacaagagcttgataacttcttggnacattatttgatagngttgtgtgctttgaaagaacatgttcaacagcattttatattccatgccgttggatctgttattgttt

SEQ ID NO: 3839 - DNA, 637 bp, Gossypium hirsutum
  Clone ID: GOSHI-09MAY01-C1211_1
ttgagagaaacgcaaatggaagaaaagggaaagaagaagaagcaaaaacatgaacaccccaatgataaaaccacaaaaccaacctcagaattctcattcaaaccaagttccgaagtgaaaggtctaagattcggcggcctgttcatagttaaatccttcacaatccgacgagcaaagccactggaactactcaagctcctcgatttcaccccaccatcacacaaaccccccaacaacaaaatccctttcccttcaaccacagcttttctgccaaccaatttcaccatcttagctcaccaagcttggcacacactcactttgggtctaggcaccaagaaatcgaaggtgcttttgttcgctttcgaatcggaagccatgaaaatcgcggtggataagatttggccaaatgagatcccgcttggtgaagtgaataagaagctgataaggggattgaaagggtgcgaaatggcgaggtttaagttcacgaaagggcgcttaacattctatgtttatgcagctagaggtaatgggcatgtcggtttttcgttgtgctgatgatttgaggatcgtttcgcaatctgttgttgaactcaatgatgtcttggatcatactgctatgcttgctatgcctaatcag

SEQ ID NO: 3840 - DNA, 799 bp, Gossypium hirsutum
  Clone ID: GOSHI-09MAY01-C1221_1
gcaagacaccgatcaacagcagcgggcaatgagtatggtaacaacaatatataactatcccagcccacgttttatctcttcaccgaaaagaaaaaccacgtataggagggaacagccgcaggatctgagatacaacggctgaaagtcggcaaatactaacatataaagagtctccatgggatctctggacctaagctcaggatcagaagttgttaccattcatgttaatgaagcaaaaaacttactgcagtcaggctaccgttacatcgatgtcaggacagtggaagaattcgagaagggacatgtggaagcagcgaatattcttaacatcccatacttgttcatcacaccagaaggtagggtgaagaatcctgagttcttgaaggaggtttcatctctctgcaaggaggaagatcgtctcatagtgggctgccaaagtggggcgagatcccttgctgcaaccgctgatcttcttaaaattggttttaagaatgtgcacgacatgggaggaggttatcttgcttgggtggagaacgggcatcctataaaaatggaggaacctaagaaggtacaggagcctgcaatagtagaagacaagccaaatgaagagctgtgaatggtgactgtttgtttgccagttgttgtcatcttgttcgccttgctgcaattctagtaacttataatgccgcatgtaattttcaacaggggacctgcaaatttactattatttcccccttctatctctatggatttgacccctccttaatttgcaaccgcatatgttaaattattaatgaaa

SEQ ID NO: 3841 - DNA, 401 bp, Gossypium hirsutum
  Clone ID: LIB3147-046-Q1-K1-E3
aggaagtgtagttggtgcaaaactttgatatgggtgtttcttttgttgtcttcccttggtgtttctttcttttttctcttatatattttagctcaggatcagaagttgttaccattcatgttaatgaagcaaaaaacttgctgcagtcaggctaccgttacatcgatgtcaggacagtggaagaattcgagaagggacatgtggaagcagagaatattcttaacatcccatacttgttcatcacaccagaaggtagggtgaagaatcctgagttcttgaaggaggtttcatctctttgcaaggaggatgatcgtctcatagtgggctgccaaagtggggtgagatcccttgctgcaaccgctgatcttcttaaaattggttttaagaatgtgcacgacatg

SEQ ID NO: 3842 - DNA, 938 bp, Gossypium hirsutum
  Clone ID: GOSHI-09MAY01-C2981_1
gtgaattgttgtgcttttgtgttgtccaccatccatatagaataaagtgtaattttctccttaacaatgccatagacaaagttttgttacttacgcagagaagggaaaaataccttgtagctgctgcagttcgctttgttcgcactattctctctcgtcatgatgaacatttgataagtcactttgtcaagtacagccttctcaaatcaattgtagatgcttttgttgctaacggtaatacgttacaatgtgctgaattctgcagtcttggaactttttgaatatatccgcatggaaaacctgaaattattggttaaacatatagttgattcattttggaatcagttggtaaggtttgagcacttgccttctcttcagtcgttcaaagtcaaatacaagcagttcttggaaaattgtggacccgaaatgaatgttaatgcaccggacccaagaaaacggattgatgagcgtgctttggagaaagaagaggaagactattttaatgaggagagtgatgaagaggatacaacatctggatctcatcctgagaaagtgcaatctcagcctgttttatccaatggagttgctgtcagctgcccatcgtcatgccctagatctggtgggcttgttgactatgatgatgacgatgaagactacagaccacctccaaggaaacagactgaaaactcggaggatgatgaaggaagcatggagtcccttggcttgaagcgtaagttgactcctaaggaaaaggaacctgggctagctaagaagcagcgtttgggtaaaagctctaaaccaagagatagtgtatttgcggctttgtgttcaaccctaagccaggcagtgctgcctagtaagaaaaccgcaaatgccatgcatttatctactcaatcaggtgaggagaatcatattgaaaaggaatctggcagtcccag

SEQ ID NO: 3843 - DNA, 2299 bp, Gossypium hirsutum
  Clone ID: GOSHI-09MAY01-C2971_1
ggcctgcccatgagcatggtcttgccaggtgttgttgggtttaaactattaggaaagttgagggatggtgtgacagctaccgatttagtgttgacagttactcaaatgctgaggaagcatggggttgttggcaagtttgtcgaattctatggggaaggcatgagtgaattgtcattagcagaccgtgcaactattgccaacatgtctcctgagtatggtgcaaccatggggtttttccctgtggatcatgtcaccctgcaatatctgcaattgactggcaggagtgaggagactattgcaatgatagaatcttatttacgggccaataacatgtttgtggactacaatgagcctcagattgagaaagtgtactcttcctacctgcaattgaaacttgaggaagttgaaccatgtatatcagggcccaagaggcctcatgatcgagttcctctgaaagaaatgaaagcggattggcaggcatgcttagacaacagggttggatttaagggatttgctataccaaaggaatctcaggataaggctgcaaagttttcatttcatgggactccagcagaattgaggcatggagatgtggttatagctgctattactagttgcacaaatacttcaaatcctagtgtgatgcttggagctgctctggtagcaaagaaggcctgtgaattaggattggaggtcaagccatggatcaagacaagtctggctccaggttctggggttgtaaccaaatacttgcagaagagcggcttgcagaggtatttgaatcagttagggtttcatataggtggatatggatgcactacatgtattgggaattccggagatattgatgaatctgtggcatctgctatctctgaaaatgatatggttgctgcagctgtgttgtcaggaaacagaaactttgaaggacgtgtacaccctttgacaagggctgactatcttgcttctcctccggcttgttgttgcctatgctcttgctggcactgtagatattgattctgaggcagcacccattggtacagggaaagatggaaaaaagatctttgtcagggatatttggccttctagtgaagaagtggctaatgttgttcaatcaagtgtgctgcctgatatgtttaaagctacatatgaagcaatcaccaaaggaaatcccatgtggaatcagttacctgtaccctctggtagcctttatgcgtggagcccaacatcaacttacatccatgagccaccctactttaaggacatgaccatgtcacctccaggtccacatggagcgaaggatgcctactgcttgcttaactgtggagatagtatcacaactgatcacatctcccccgctggtagcagccacagtgatagccctgcagccaaatttctactggagcatggggttaatagaagagatttcaactcttatggaagtcggcgtggtaatgatgaaattatggccaggggtacttttgcaaatatccgacttgtgaacaaactattgaaaggagaagttgggcctaaaacaattcatatccccactggagagaaactatctgtgtatgatgctgccatgaggtacaagactgcacgacaggataccataattttggcaggtgctgaatacgggagtggaagttctcgagactgggctgcaaaaggtccaatgttattgggtgtaaaagcagtcattgccaagagttttgagcgaattcaccgtagtaatttggtgggcatgggcatcattcccctatgtttcaagtctggagaggatgctgacactcttggattgactggccatgagcgctacacaattgatcttccaagctgtgtgagcgaaattcgacctggccaagacgtgacagtggctacagacagtggcaggtcattcacctgcactgtacgatttgatacagaggtggaactggcatatttcaaccacggaggcattctgcagtatgtcatcaggaacttgatcggcgcaaaacagtgattaggctgtgtagtgtatggttgcggagtttgacgaaatatttcataaccgtggttgctgcacatttaaatggggtttgtgaactgaaactattaagtttgcagcaaaagtttaaattgaataaaaaaattggaaacagaggtgggttgggattgaaggcaaggcaatgccagtttcagataatagaaaatgcagacatgaattttgttaaaccaagatgtgctgattacattagatgatgaccaattcatggatatatatatataaaataaaaaaatatattataacacgagactagtt

SEQ ID NO: 3844 - DNA, 413 bp, Gossypium hirsutum
  Clone ID: LIB3148-010-Q1-K1-E2
gggtgtaaaagcagtcattgccaagttttttgagcgaattcaccgtagtaatttggtgggcatgggcatcattcccctatgtttcaagtctggagaggatgctgacactcttggattgactggccatgagcgctacacaattgatctttcaagctgtgtgagctaaattcgacctggccaagacgtcacattggctacagactgttgcaagtcattcacctgcacaatccgatttgttacacaggtgtatctttcatatttcaaccacttatgcatcactttttttttttattaataagtcctttttttttttaaacattttttaacttttttgttaattttttatttttttataggtttctccacctttttttcattatctatttatcccctttccttttttttttcttttt

SEQ ID NO: 3845 - DNA, 1081 bp, Gossypium hirsutum
  Clone ID: GOSHI-09MAY01-C2931_2
gttgaagcggaaaatcttgagagagaaagtaaagcaaaaatcataaataaataaaaaatggagatgagtgagagatcggaaaattttagggttttcgattttcccttttgaagttttttttcattgattaaaagactttctctcttcgtctccgatttgttgaattttaccccttcttatcagtgaattcaacgtgcttctttttttaaaagcttcgattttttttccggtgaatttcttttctccgaccgcttgtttcgtcggtaatagcagctgaaaatcaacggttggtccttttccgatcatgggttatcccaaattttaccagaaggtcattttttgaatcaaaatcggattttttccgattataaaattttttgagctttttagcctgtttatttaatttaaaaaatgggctttcttttttgaagtagaaaattttgcaatttttgagctaagagaaaaagggtcataaacagtggactttaaggggggaaagaacagtgatattagaaaaaggcttgtttgattggataaatttctctctttttttttccccttttttcaaaaaaggaagaatctgaagagaaagacaatttgtttgagcttaatttacaagcttttgactttaattatgattgaaaaaattgttggattcatttaatatctttccaaaattttgtcctaatttttgaaactcaattgaccatttcctaattgagtgtctaactgcaaaacaatggagttctaagttgttcaaacatggcagtttccttccctggttttccatggtggtttggtgtaatagtggaaataaggagaaacagcttgtttcaaatggatctttcttaaattcttctgattggggtttaggtttacgagagcctgaaactgttaaattcccacaaaatagcctcaactaaaggaaaccaaatgcaaggtatgaagacgagagtggtgataagatatgacctgtgatgtcatcaatgtgtcattattgattgatagatgtcagatgtcatggtggagacacatgctgttatgtgaaatatatggtctggtgtcatttaactgtgaagac

SEQ ID NO: 3846 - DNA, 863 bp, Gossypium hirsutum
  Clone ID: AI054788.1
gaaagagaaaatcttgagagagaaagtaaagcaaaaatcataaaatcaaaaaaacaaaaaaatggagatgagtgagagatcgtaaaattttagggttttcgattttcccttttgaagtttttttcattgattaaaagactttctctcttcgtctccgatttgttgaaatttaccccttttttatcattgaattcaacgtgctttttttttctttttaaaagcttcgatttttttgttgttttcttccggtgaaattcttttctccgaccgcttgtttcgtcagtaatagcggctgaaaatcaacggttgatgcttttccgatcatgggttatcccgattttaccagaaggtcattttttgaatcaaaatcggattttttccaattctcaaaatttttgagctttttagctgtttatgtaatttaaaatatgggttatgtttattgtagtaaaaaatattgcactttttagagcttagaaataaatgggcctttaacagtggactttaaggagggaaaattaacaattgacttgacatcataactggtatggattggttaaattctaatttatatgtatcccttatttaataattggaatatgctgttagaatgatattagctgtaactttataattgaggtgtaataatattgatggttaatattgtgaatatttcattgttgtcgaaattttgcatttttaagtcaatttcacatactatgggtattattcgatattataataatatgtattcgttagtacgttaatatgtcactatatttaatttttgtataaagtatttgttattttaaatgagtgaatatttggtattaatataatatgtaatttgtataggacttaag

SEQ ID NO: 3847 - DNA, 250 bp, Gossypium hirsutum
  Clone ID: LIB3493-012-P1-M1-B7
gaaacagcttgtttcaaatggatcttccttaaattcttctgattggggtttaggtttacgagagcatgaaactgttaaattcccaacaaaaatagcctcaactaaaggaaaaccaaattggcaaggtaatgaagaaaggagagtggttgataaagaatatgaccttgtgatggttccatcagatggtgtgcatttatctggatatgaatcagatgcgccagactggtccattgggtgggaagaaccacat

SEQ ID NO: 3848 - DNA, 478 bp, Gossypium hirsutum
  Clone ID: GOSHI-09MAY01-C2921_2
accgggaacggaccgggctcgacccacgcccgtccgcgtgaccggccgggtccgtaaccccggggcggcccctcccgtccgaaggctgcagctacccgctgatgcgaaccaatcaaggttgcttgcaccatcaaggaccaatgtgtctgtctcaggtcctcccagagcgtttctaagggccttcggtttggagcctgttggtgctaggctcacctgctctttgcaaactgacctcaaggacttggctcagacgtgtgttgatgctaccaagctcgctggtttcgctcttgctacatctgctcttgttgtctcgggagcaagcgctgaaggagttccaaagcggctaacctacgatgaaatccaaagcacgacatacatggaagtcaaaggaacaggaactgctaaccagtgcccaaccatcgatggtggtgtcgactcttttgccttcaagcctggcaaatactacgccaagaagttc

SEQ ID NO: 3849 - DNA, 1400 bp, Gossypium hirsutum
  Clone ID: GOSHI-09MAY01-C2921_1
gatcggaagggccggggccgcccgcacgggcccccaaatttcccctacgctctcactaaaacaactctctcttctttgttttccaatagttcgtaacaatgtcggtctcacttcaagctgcagctaccctgatgcaaccaatcaaggttgctgcaccatcaaggaccaatgtgctgctcaggtcctcccagagcgtttctaaggccttcggtttggagcctgttggtgctaggctcacctgctctttgcaaactgacctcaaggacttggctcagacgtgtgttgatgctaccaagctcgctggtttcgctcttgctacatctgctcttgttgtctcgggagcaagcgctgaaggagttccaaagcggctaacctacgatgaaatccaaagcaagacatacatggaagtcaaaggaacaggaactgctaaccagtgcccaaccatcgatggtggtgtcgactcttttgccttcaagcctggcaaatactacgccaagaagttctgcttggagcccacttccttcactgtcaaggctgagggtgttaacaagaatgcccctcctgagttccaaaacaccaagctcatgacccgtttaacctacacccttgacgaaatcgagggccctttcgaggtatccaccgatggcaccgtcaaattcgaggagaaagatgggattgattatgctgccgtcacagttcagcttcctggtggtgagcgtgtgcctttcctgttcaccatcaagcaattggttgcatcaggcaaacctgatagctttggaggagacttccttgtaccatcctaccgtggctcatctttcttggacccaaagggaaggggtggctcaaccggttacgataatgcagtggccttgcctgctggaggaagaggggatgaggaagagctagccaaggagaacaacaagagtgctgcatcttcatcagggaaaatcaccttgagcgtcacaaagagcaagccggagaccggtgaagttatcggtgtgttcgagagccttcagccatctgacactgacttgggtgccaagactccaaaggatgtcaagatcactggtgtctggtatgctcagcttgattcataaacaagtcttgtatgaatttgtttattctcggctgagattttgtaatttttaaacaagtgttgctaaactttgcagtaatccactgagaaacccttatcttctttgtatgttactatgttggcttcttataataattttctaagcttctactacaaacccgttacttttgatcaaagcactgggaatcctggaaactaaataatctcactctcattaaggagtttgaatgtaaatgatcaataaacggccttggttcttccgtgcaagtggtggtaaaaccatggcttcaagtacttcaacatc

SEQ ID NO: 3850 - DNA, 347 bp, Gossypium hirsutum
  unsure (1)..(347): unsure at all n locations
  Clone ID: LIB3120-023-Q1-K1-C6
tgattgcatacataaggatcatatacgatccgtgatctgaacaaatatagcacaatgactgggttgctttgaaaggagctagctgctccangagtttcaaagcggataacctacgctgaaatccaaaacaagacatacatggacgtcaaaggaacaggaactgataaccagtgcccaaccatcgatggtggtgtcgactatattgccttcaagcctgacaaatactacgccatgaagatctgcttggagcccacttacttcactgtcaagggtgagggggttaccaagaatgccccttctgagttccaaaacaccaacctcatgacccggttaacctacacctttga

SEQ ID NO: 3851 - DNA, 2028 bp, Gossypium hirsutum
  Clone ID: GOSHI-09MAY01-C2891_1
cattttctccactttcttctatattgctctcccttttttaacttccaacaaaaaccaaaaaccccaatttaacgcccccaccccttgttttccttttccatgaccaaattctagcaaaaaaatgaagagagatcatcaagaaatttctgggagtggttcaaatccagctgagagttcatccattaaagggaaattatgggaagaagatccagatgctggtggcatggacgacgagttattagctgttttgggttacaaagttcggtcatcagatatggcggatgtagctcaaaaattggaaatgttggagaaagttatgggtactgctcaagaagatgggatttcacagcttggtgatactgttcattttaatccttcagatctatctggttgggttcaaaatttgttgatcgagttcaacggttcaacaacaacaccagatcccaatttcaacgatgattctgagtacgatcttagagcaataccaggggtcgccgcttacccaccggtgaaatcggatccgggtctagaaaatacccggaaacgagctaaaactgagtcgtcgtcatcatcatcttcaacaactactcgtcctgttgtgttgattgactcacaagaagctggggttcgactcgttcatacattaatggcttgtgctgaagctgttcaacaagataatcttaaactagctgatgcattagtgaaacatattgggttacttgcttcatcacaaactggtgctatgagaaaagttgctacttattttgctgaagctgttagctcgaagaatttatagaattttcccaccagattcacttgatccatcatataatgataagttacaaatgcccttctatgaaacttgtccttatttgaaatttgctcattttacagctaatcaagccatattggaagctttttcaatggctaatagagttcatgttattgattttgggctaaaacaaggtatgcaatggccagctttaatgcaagcacttgcattaagacccggtggaccaccggcgtttcgattgaccggaattggaccacctcaaccggatgatactgatgcgttgcaacaagtggggtggaagctagctgaattggccgaacgcatcgggatcgaattcgagtttcggggattcgtggctaatagtttagccgatctcgaacccgaaatgctcgatattcgtcctcccgagattgaagtagtagcggtgaacgctgttttcgagcttcatcccttgttagctcgaccgggtgggatcgaaaaagttgtttcctctattaaagcgatgaaacccaagattgtcacggttgttgaacaagaagcgaatcacaacggtccggttttcttagaccgttttactgaagctctccattattattctacccttttcgactcgttggaaggttcaggggtggcgccagcgagtcaagacctggctatgtccgagttatacttaggaagacagatttgtaacgtggttgcttgtgaagggatggaccgagttgaacgacacgagccgctgactcagtggagaactcggatggaaacggccgggtttagccctgttcatttgggttccaatgcttataaacaagctagtatgttgttggccctcttcgccagcggcgatgggtatagagtggaggagaataatgggtgtttaatgcttgggtggcatacaaggccacttatcgccacctcggcttggcgactcgctggtactgagtcaggtagtgagttaactcaggagctgagttgagaaaaagtaaaaaacctgttgaaaagaataagtggggtctatcttttaactgagttgcagaatgtacgagtgaatgaaaaaaatgagggtaaattaaaaaccagtccaagtgtgtaattctagtttttctttgtctatttttttcccactttttagtattgtttttagtttcttttagggtagattttttttttaatggggagcctttgtaattttcaaggttggatctaatgtgaaggcacatctttttattactaat

SEQ ID NO: 3852 - DNA, 487 bp, Gossypium hirsutum
  Clone ID: uC-gsronu33B041b12b1
ttccttgttgaacgacacgtgccgctgactcagtggagaactcggatggaaacggccggttttagccctgttcatttgtattccaatgctttattactatgcttgttttttttgtttattctttttttttatgttatattttcttttatttctttatttattctctttatattttaaattttttttttttattcctttatttttcttttttattttattttttctatctttttattatttttttttttttcttcttttattttttattattatttttttttttctatttttcttttttatctcctcatcttttttcctataatttttttctcttatttatttattttaatattcttatgttatctttttgtctttattttatattattttttctttacttatcactttttattttatatttattaattgtttactttttttttttattcttctatttttattttctattatattttttatttttttt

SEQ ID NO: 3853 - DNA, 440 bp, Gossypium hirsutum
  Clone ID: uC-gsflnu33B094h01b1
ttcttcttcgccagcggcgatgggtatagagtggaggagaattatgggtgtttaatgcttgggtggcatacaaggccacttatcgccacctcgggctgggcgactcgcttgtacttgatcaggtagtgagttaactaaggagctgagttgagaaaaggtaaaaaacctgttgaaaagaataagtgggggcttttttttacctggatttgcaaatggcccagtgaatgaaaaaattgggggtaatttaaaaacccggccccagggggtaatccaggttttctcttggctaattttttccccctttttaaaataggtttttgggcccttttagggggaaattttttttttaatggggggcccctttatatttttaaggggggggttcacttggggggggcttctttttttttaaaaaaaaaaaaaagggggcccgcttttta

SEQ ID NO: 3854 - DNA, 320 bp, Gossypium hirsutum
  Clone ID: uC-gsronu33B086e12b1
aatgtatgcaatggccagctttaatgcaagcacttgcattaagacccggtggaccaccggcgtttcgattgaccggaattggaccacctcaaccggatgatactgatgcgttgcaacaagtggggtggaagctagctgaattggccgaacgcattgggatcgaattctagttttggggatttttggctaattattttagttaatcttattacttttatttgttttatttttttacttctctttttttgatgaattatttttttttattttctttttctttctctatttcattctcttttaattctcttttttttattata

SEQ ID NO: 3855 - DNA, 693 bp, Gossypium hirsutum
  Clone ID: GOSHI-09MAY01-C2851_3
attttctaacacttttgcatttgcttctttctttttcacaccagatctggggatccaggctatggctgaaaaggtgacgataatggtgctgaaggtcgaccttcagtgtagtaaatgttacaagaaggtcaagaaagtgctctgtaaattccctcaaatacgagaccagatatacgatgaaaaggctaatacggtgaccatcacggtggtatgctgtagcccggagaagatcagggacaagttatgttacaaaggtggtggatccatcaagagcattgagctcaagtcgccggcgaaacccaaggaatcggagaagaaacccgacaaacctaaagaagccgagaagccgaaagaagctgagaagaagccggaaaaacccaaagaagctgagaagaagccggaaaaacccaaagaagctgagaagaaagccggaaaaacccaaagaaccggaaaaacccaaagcacctgctcctgggaagagaccgcgagagcccaaagacggtgagacgaaaccggatgtacctagagaggtggcgaagcagcagaatgttgcggcaccttctcctttaccgccgatgacgtatgcagttgggtatacttgctccgaaggttattataatggttatggtggaggacctagctattatggtggaccaccccaacaaccgttcccatattacgagacttacggta

SEQ ID NO: 3856 - DNA, 1021 bp, Gossypium hirsutum
  Clone ID: GOSHI-09MAY01-C2851_2
tggtgcgcctgcatggtgccgccgcgccataattgcctcgaattttctaacacctttgcatttgcatctttctttttcacaccagatctggggatccaagctatggctgaaaaggtgacgataatggtgctgaaggtcgaccttcagtgtagtaaatgttacaagaaggtcaagaaagtgctctgtaaataccctcaaatacgagaccagatgtacgatgaaaaggctaatacggtgaccatcacggtggtatgctgtagccctgagaagatcagggacaagttatgttacaaaggtggtggatccatcaagagcattgaactcaagtcggcggcgaaacccaaggaaccggagaagaaacccgacaaaccaaaagaagctgagaagaagccggaaaaacccaaagaagctgagaagaaaccggaaaaacccaaagaagcagctgagaagaaaccggaaaaacccaaagaagctgagaagaaaccggaaaagcccaaagacggtgagaagaaaccggagaagcctaaagaggcggcggcggagaaaaagcctgataaaccgaaagaggcagcggctgcgccgccacagaaggttgcggaacctgctgcagctgctcctttaccaccgatggcgtatgcagttgggtatacttgctccgaaggttattataatggctatggtggaggacctagctattatggtggaccaccccaacaaccgttcccatgttacgagacttacggtaggcccgtttatgacagctggggcggcggcggcggtggctactacaggtacggcgggcgtacaggtgaatgttttagtgaagaaaacccaacaggttgctcgatcatgtaaaaaaccgcgggaatttgctgctgaaagcaatatatagctgaatttgatatactggaatagtaataataaattctcttgttactggtgtatgaatctggggggagcattttgtggattttatttatttctagtttattgagttataaaaggcgaaagatcattaaca

SEQ ID NO: 3857 - DNA, 1309 bp, Gossypium hirsutum
  Clone ID: GOSHI-09MAY01-C2851_1
gggtccagcttggctgaaaggttcctaaaatctcatcctttttctcttcaacatttaaatccgatgcccatttctttttctttttttaatttcttttattgtttttcatgctcctctgtttccaattcctctttgtctctgttaaccagattcgttagctaatgctaataattcatgtaaagtttttcttttgtaggtgacgataatggggtgctgaagggtcgacccttcagtgcagggaaatgttacaagaaggtcaagaaagtgctctgtaaattccctcaaatacgagaccagatatacgatgaaaagactaatacggtgaccatcaaggtggtatgctgtagcccggagaagatcagggacaagttatgttacaaaggtggtggatccatcaagagcattgagctcaagtcgccggcgaagcccaaggaaccggagaagaaacccgacaaacctaaagaagccgagaaggcgaaagaagctgggaagaaaccgccaaagcccaaagacggtggtgagacgaaaccggatatacctagagaggtggcgtcgcagcagaaggttgcggcacctgctcctttaccgccgatgacgtatgcagttgggtataattgctccgagggttattataatggctatggtggaggacctacctattatggtggaccaccccaacaaccgttcccatgttacgagacttacggtaggcctgtttatgacagctggggcggcggcggcggctactaccggtacggcggccgtaccggtgattgtgttagtgaagaaaacccacaaggttgctcgatcatgtaaaaaaaccgcgggaatttgctactgaaagcaatatatacctgaattcgatatacatagtgtaatagtaataataaattctcttgtttactggtgtatgaatctgggggagtcattttgtggatttttatttatttctagttttattgagtttataaaagtcgtaaagatcattaacaaggttggtggcgttggttgtggcggcgacaacggctgcggtagtggtggtggccgtgtgctccaggcttgcaaaaagtttgtttaccatagttttaaaatttaataaataaaaatgatgtatctttttatctgtcagagtcttttgtttttaattaaaaaaaaaaaaaaaaaaaaaaaaaaaaaaaaaaaaaaaaaaaaaaaaaaaaaaaaaaaaaaaaaaaaaaaaaaaaaaaaaaaaaagggggggccgttttaaaggatccaagtttacgtacccgtgcttgcaaacgaataactttttttttggggcccctaa

SEQ ID NO: 3858 - DNA, 502 bp, Gossypium hirsutum
  Clone ID: GOSHI-09MAY01-C2861_1
caaatccatcccatttggctgctgggttatcggttcgttgcgttttgtttagctctcgcaaccattgtgttaaaaatcatcaccaatggaggtcgcatattttactattatactcagtggacttttactttggttacagtttattttgggttcggaacattgctctctatttacgggtgttaccagcatcataaaatgagtagctgcggttctaatggacagcatgttaagttagataccgagcaaggatactacacacctttaactaatagaaaagatgctgatgtacggagaaaagccttaaatctgcaggaacaatgcgatgtttcacaagctgcaggcgtcattaattatctatttcaagttatattccagatgaatgcttgagcagggatgcttactgacctcatttattggtgccttatttttccgtttcttaccatcgaagattatgcattgaattttatgaccgtgaacatgcatacactcaatggcatctact

SEQ ID NO: 3859 - DNA, 909 bp, Gossypium hirsutum
  Clone ID: GOSHI-09MAY01-C2811_2
gttcttatggatgagtttcatcatgtatctactgcttttttggaactcgaaaaaggttatcaggaggcaattgaggatattacgtaaagaatgggtgcaggaatggcaaaattgatgggcggaggggttgaaacagtcggtgattatgatgaatattgtcactatgtagcaggactcgtggggttaggtctttccaaacttttccatgcatgcggtacagaagatttggctcctgatactctctccaattcaatgggtttatttcttcagaaaacaaatataatccgagattatctcgaggatatcaatgagataccaaagtcacgtatgttttggcctcgtcaaatttggggtaaatatgtcaacaaacttgaggacttgaaatacgaggaaaactcagtcaaggcagtgcagtgcttgaatgacatggtcactaatgctttaatacatgtggatgattgcctaaaatacatgtctgctttacgtgatcctgcaatctttcgattttgtgctatccctcaggtcatggctatcggaacactagccttatgctacaacaacatcgaagtcttcagaggcgtagtgaaaatgaggcgtggtctcactgcgaaagtcattgaccgaaccaacacgatggctgatgtctatggtgctttctatgatttttcttgtatgttgaaagctaaggtcgacaaaaacgatccttgtgcacaaaaaacatcgagcagacttgattcgatcctcaagacttgcagggactcaggggtcctgaatgaaaggaaatcttacattattccaaatcagaccaatttcacttccacttctggctgcctcgctttttcattttcctggccatttctttggctaatccaggacccaatgagccaaattaactagaccatgctttcc

SEQ ID NO: 3860 - DNA, 1017 bp, Gossypium hirsutum
  Clone ID: GOSHI-09MAY01-C2811_1
cccacgcgtccccaaaaccaagcatcatttcagttaaaactatataaaaaaagctccaattagtatcttccagtataaaatccaagaacctcaattcctctctttgaaagtgtacgatttaaacatatacccagattttaattttgttgatttgggtttgatttgaagagagaataaaaatcttttcaatggggagtttaggagctcttgtgaaacacccagatgatttttatccattgttgaagctgaaaatggcttcaaggcatgccgagagacagatcccatcagagcctcactgggctttttgtttctctatgcttcacaaagtatctcgtagttttgctctcgttattcaacagctcgacatcgagcttaaaaacgctgtctgcatattttatttggttcttcgagctcttgatactgttgaggatgacactagtgtggcaacagatatcaaagttcctattcttaaagaattttatcgtcatatatatgatcctgattggcacttttcgtgcggtacgaagaactacaaagttcttatggatgagtttcatcatatatctactgcttttttggaactcgaaaaaggttatcaggaggcaattgaggatattacgaaaagaatgggtgcaggaatggcaaaatttatttgcaaagaggttgaaacagttgatgactacgatgaatattgtcactatgtagcaggactcgtgggattaggtctttccaaacttttccatgcatgcggtacagaagatttggctcccgatactctctccaattcaatggggttatttcttcagaaaacacatataatccgagattatctcggggatatcaatgagataccaaagtcgcgtatgttttggcctcgtcaaatgtggggtaattttgccaactatcctgaggacttgagatatgaggaaaactgtcaagcatgcagcttatgctgatctagttatacactgaattctaaaatgttgctactgactcatttcattggattctcgagag

SEQ ID NO: 3861 - DNA, 629 bp, Gossypium hirsutum
  Clone ID: GOSHI-09MAY01-C2801_1
cttcaatttctgccaaagttgagtgcccttattatgaaagatgaaggaattggtccagcaacaacatcaacattggcgtccgtctgccaccttttcccatcttaaggaaattacgatagtcagctgcccaggtatgaagacgttgcttccacattggttgcttccaaacctccaaagcctggaagacatacacgtgggggcttgtagtcagctagtagaaatattgggagcagcaacatcaaaagttgaagaaaaagggagtgatgcattaatcaaattccatcttcccaaattgagagtactgagactgtggatgttaccaaatttgaagagcatttgcggcaaaagtggagtgatggtttgtgattctctccaagttatcatagtttttggagattgtgataaactgaagagaattcctccatttgttccccttgttggcaatgggcagccatttgcatatgctccaccttctcttaccatcacgtcaggcacagaatggtgggaatcgttggagtgggatgaccatccaaactttaaaaatgttcttcaacccctttggaagcttttaagttatccaacttatccaacttatccaagatgctggagactgttataaactgaagaga

SEQ ID NO: 3862 - DNA, 694 bp, Gossypium hirsutum
  Clone ID: GOSHI-09MAY01-C2831_1
agcgagttgagtgagtgagtgactcatctgatcgtctaccatccggtacacactaacctaaagtctggtgaagcagcaccataggcaaccatcaccgatgatgagccgccgtgttttctcgaatctcttcttcttccttttctctcagatcttatccttcgctttcaatcctctccaatcaaacaatcctcaactcctacaggatgtaattgagaagattgctttgaagcagaaatgggagccggaagggcttaatttttcaaaactggaattgagtaaggttaggttcgggactggcaaaagatgcgagttccggatccgatttggaaaaactcatctgctcttcaaattccccgacgaagtttcttccttgaaaaagtttaccaaacgaagtagcaacgattttcttgattttgtcaatgaaattaattcctcggccgtactcgagccttttacaatggaaggtcccttcgagttacgcctctctcccggtcaccaagcttccctcctctttccgctgaacacttcacatactgatctgaaacgagtccttgttggtcatggcatcactttacaagtaaatggagctcaagagatctctcttttccatacgtttaatctcggtttaccggcaaatgaaaatggtgtcaaggagaagagtagtggatattggcccttctcgcattcattctgt

SEQ ID NO: 3863 - DNA, 2068 bp, Gossypium hirsutum
  Clone ID: GOSHI-09MAY01-C2581_1
ttctacgcgtccgcccacccggccgccctcgcgtccgccctcgcccaataagaaaccaaagaaaacctttgttaaaccaaaaatggctctcaccaactcctccattcttcccaccaactccatccttcaatctcagccatcaacgccgttctctaaggctaagccattgtctgtccttcggatctccgccgtccattcttctgactcgcctaagaaccccgtcgtctccgacaaatccgtcaagcagcccgctactgctccactcgccgctaccaaatctgctaccgcgcccaccactgctccaccgaagaatgcggttcctgggaaatggaccgtggatagctggaagtcgaagaaggctttgcagttgccggagtatccggatcaggcggagctcgagtcggttctcaagactcttgatgctttccctccgattgtcttcgctggagaggctcggagtcttgaggagaagctcggggaagccgccatgggaaacgcttttctgttacaaggcggagattgtgccgagagtttcaaagagttcaacgctaataacatccgtgacactttccggatccttcttcagatgggtgccgttttgatgtttggtggtcaaatgcctgttatcaaggtgggaagaatggctgggcaatttgcgaagccgagatcggacccattcgaggaaaagaatggagtgaagctgccaagttatagaggagataatgtcaacggggattccttcgatgaaaagtctaggatccctgatccccaaagaatgattagagcttactgtcaatcagcagctactttgaatcttttgagagcctttgctactggaggttatgctgctatgcaaagggttactcagtggaatttggatttcaccgaacacagtgagcagggggataggtaccgtgaactagctagtcgtgtggatgaggcccttggattcatggctgcagctggacttacagttgaccatcctatcatgacaacaactgaattctggacttcccatgagtgcttgctcttaccttacgaacagtcacttacccggcttgattctacttctggccgttactatgattgttctgctcatttcctgtgggtcggggaacgaacaagacagttggatggtgctcatgttgagtttttgagaggagttgctaatccccttggaattaaggtgagcgataagatggatccgaatgaactagtaaagctgattgaaattttgaaccctcagaacaaagctggaaggattacagttatcacaagaatgggtgctgagaatatgagagtgaagcttccccatctaattagggcagtgcgtcgtgctgggcaaattgtcacttgggtcagtgaccctatgcatggaaacaccatcaaggctccttgtggtctcaaaactcgccccttcgattccataagggctgaagtgagagctttctttgacgtgcacgagcaagagggaagtcatcctggaggagttcatctagagatgactggacagaatgtgacagaatgcatcgggggatcccggactgttacattcgatgacttgggttcacgctaccatacccactgtgaccctcgtttgaatgcctcccaatctcttgagctcgccttcattatcgccgagcgcctcagaaagaggaggatcaactcacagcaactgcaaccactaatcacagggctgtaaagtggtggtcaaggatcctgccgctagccttttaccaaaaatatgtttgtcccccgtttttttcccctcgcttaagttgttattggcattattaatattttttttagtttgggattcttgagttatgtggtgtattgtatgtgcatactggatggaaacgtacggatatgagaggaataaaaaagaagaagctatggctgaattctaaataccaagatccccctggtcatgccgatgataaaagaattgatgttttcaaatgaaagaagaggggttacttttgcttcacctattgacttcctgttccgacaagtataaatattactatatcctatggaaaatatgttttgtgacagatatttaaaa

SEQ ID NO: 3864 - DNA, 487 bp, Gossypium hirsutum
  Clone ID: LIB3584-048-P1-K2-C7
acgcgctccattccacgcgatacgatggttctagatcgccggcggacactcgtagatgatgcaaccgtcattccttcgatgaaaagtctaggatccctgatccccaaagaatgattagagcttactgtcaatcagcagctactttgaatcttttgagagcttttgctactggaggttatgctgctatgcaaagggttactcagtggaatttggatttcaccgaacacagagagcagggagataggtaccgtgaactagctagtcgtgtggatgaggccctcggattcatggctgcagctggacttacagttgaccatcctatcatgacaacaactgaattctggacttcccatgagtgcttgctcttaccttacgaacagtcacttacccggcttgattctacttcaggccgttactatgattgttctgctcatttcctgtgggtcggggaacgaacaagacagttggatggtgctcatgttgagtt

SEQ ID NO: 3865 - DNA, 607 bp, Gossypium hirsutum
  Clone ID: LIB3831-001-Q1-K6-F5
gcccataaaaaaccaagaaacctttgttaaaccaaaaaggctctcaccaactcctccattcttcccaccaactccatccttcaatctcagccatcaacgccgttctctaaggctaagccattgtctgtccttcggatctccgccgtccattcttctgactcgcctaagaaccccgtcgtctccgacaaatccgtcaagcagcccgctactgctccactcgctgctaccaaatctgctaccgcgcccaccactgctccaccgaagaatgctgttcctgggaaatggaccgtggatagctggaagtcgaagaaggctttgcagttgccggagtatccggatcaggcggagctcgagtcttgaggagaagctcggggaagccgccatgggaaacgcttttctgttacaaggcggagattgtgccgagagtttcaaagagttcaacgctaataacattcgtgacactttccggatccttcttcagatgggtgccgttttgatgtttggtggtcaaatgcctgttatcaaggtgggaagaatggctgggcaatttgcgaagccgagatcggacccattcgaggaaaagaatggagtgaagctgccgagttac

SEQ ID NO: 3866 - DNA, 453 bp, Gossypium hirsutum
  Clone ID: LIB3585-067-P1-K1-G7
gttttgcatcttttaaccgtggttttgttgagtaaaaaaaattgtaattttatatgccatttttaatggatgtcgcgtcgattattgttgctgttagtttttattcttaatataagaatccacaagctttaaccttggatttttctcagttgctttctacatcatctgtttttgacatgtgaataaaagatagattctccactcattgttactctgacatggacatcacatgtttttcctcttgaagataattttcgataaggttaaagttttcaaatttgtttaccctttccggcatgtggcaggtaccgtgaactagctagtcgtgtggatgaggcccttggattcatggctgcagctggacttacagttgaccatcctatcatgacaacaactgaattctggactttccatgagtgcttgctcttaccttacgaacaggcacttacccgg

SEQ ID NO: 3867 - DNA, 577 bp, Gossypium hirsutum
  Clone ID: GOSHI-09MAY01-C2551_1
gcgttcgtggaaaagctctccagacttacatatggagcatgtgaagctaattgctagtgctgaagaagctcatagatcggtggaggaactccaatcaaaagctaaggaactagaggatgtgattgagaggcaaagaatcatgatactggagggatgctgaagagaaacgagaagctataaggcagcgtggcgtctccctggatcattaccgtgatgggtatcactggcttcggcaagcatttatggggcaaaagagagttccagttttgactacatgaatatgcggtgctacataatgtctccttttacttgggtgcttggatattttgtggtgggtccccatattatctcagttgtccctgcgggtggctttgtcatctcctgcttggttaatgaggataccgaaaacaggaggtgcattttagacagaatatgataggtttgctcacaaatactagcgccaagatgatgcgctggaatgttgggatccaggtgcattttaaacagagaatatgacagttttgcattttaacatttggttgtccaatatgctttgagacttcccggtcaatcaatc

SEQ ID NO: 3868 - DNA, 600 bp, Gossypium hirsutum
  Clone ID: GOSHI-09MAY01-C2541_1
caagcagcctccagaggaagtagccaactcgccgtgccggccgccccaaccccaacagcaacggtcctcaaaacatggcgagagaataaagcagcagaaatcaaggatttccagattgtggttgcagataaaggagaagggaagaagcaacagttggccccaaagagaagttctaacaaagacaggcacaccaaagtggggggaggaggtagaaggataaggatgcctgctttatgtgctgctagaatctttcagttgaccagggaattgggtcacaagtctgatggggaaaccatacagtggctgttacaacaagctgaaccatccataattgccgccactgggagcggaacaattccagcatcagctttggctgcagctgggggctcagtttcacagcctggggcctctctatcagcagggttgctccatatgatggatgttttaggggggtccagtttggggtctgggagcagtcggacctgttggcctttggttggtggcattttgggaagtccccatcttgtggcgtccgggttttggccccccctctgttgttttggtttttcctccttcttctgtccctcttcccctcttttt

SEQ ID NO: 3869 - DNA, 795 bp, Gossypium hirsutum
  Clone ID: GOSHI-09MAY01-C2571_3
cccggtcgaccacgcgtccgctctctctctctctctcactatctctgtctcatggattctctttctctctttggtaccgccgctctatgagccgggtgtatgtactggttcgattgctttttagaccccacatagcagatcgtcaagccagctgaccatcactccggcggaagcatttccgctgcaaacggtatacactacatcaactactaccgaccactatgttgctccccactggacaaccttaccgtccataaagtgcataacttctgcgaccctaatcacaatcgatatactaagatatacgaatgagtgtaaggtcaatgcgtccattggttttttttcagcagctggcatctaaacatataagctatgcagagcagaatgaaaagcttaattttgcgtatgcttgtcttagcttaattagatatacgaagttgactaaacaacttgtttcattccttcccttgcttgtttgtcataaatggttgcttatatacatatgtatatatacaagccatcattcaacgtacatgctgcaaattgcgttttatattctggtttatctccttccttagaggagaaatgccaacgagacttctcttgcatgtaacctcgtaatcctcatccaaaagctttcactttctctgggaggaagagtagagcaggaaattagtgtgttttaaatgtcataaaatttgatacaatagttaaatattatatgattagacatcgataattattatatgtattgatacatttgttagaaattagtgaactaatagttgatgcact

SEQ ID NO: 3870 - DNA, 671 bp, Gossypium hirsutum
  Clone ID: GOSHI-09MAY01-C2571_2
gagaagctgctttaaactgctgccttgaagagctagaagcaaaaaataatgaaacattactacttggaaagaaggtcaaagagttggaagataaactgcaagtagctgtgaagggtggtggaagttcagccgaattgaaggatggagtagaggtgaagtccagagatattgatggattaacattttcagcatcatcaaaacggaagagcaagaaaaagttggaagcagcttcagtgcaagctgcatcctcttcatcaactcctacccaccacgaggttgcttcgcccttgaccaccttaaagttcattttgggtatagcttttgtgtccgtaatcatcggtgttattctaggaaagcgttattagtgtaagtttttcgtgtttattggtttttctttgcagcttgcgtctaaacatataagctatgcagagcagaatgaaaagcttaattttgtgtatgcttttcttagcttagttagatttaggaagttgactaaagaacttgtttcattccttcccttgcttgtttgtcataacatggttggttatatacatatgtatatatacaagccatcattcaacgtgcatgctgcaaatgcgttttatattctggtttatctcaaatattaattttaaatattttataattttttatatatattttattttata

SEQ ID NO: 3871 - DNA, 643 bp, Gossypium hirsutum
  Clone ID: GOSHI-09MAY01-C2571_1
gcttctgaagggcgagagagtttcagtctcagatttcttcacttaatgggagggagaataacctgctcaataaaaccacatcaggataccaaagaacgatacttcaatctgcaatattacccagcttcaagagcccaattggaaaatgagaaagagaagaaagaacaatctcgcatactcgtgccaaagagcttgaaaatctcaaggtgtgagaatcgcagagagttccgggccgcagaactcgtgccaaagatacttgaagaacagttggtgagaaccttgaaactcaattaaaacaagcggttcaaatagctgcccaaagtcaggctgaccatgcacgagatctaggcgatagagatgctatcgataaacaaaaagaggcggaacgagaagctgctttaaactgctgccttgaagagcttgatgcaaaaaataaggaaacattactacttggaaagaaggtcatagagttggaagataaactgcaagtagctggcaagggtggtgggagttcacccgaattgaaggatggagtagaggtgaagtccagagatattcgttggattaacattttcattagtatcataatggcgtatccatatatatttggaatttgtttaagtgatagctactatccttttta

SEQ ID NO: 3872 - DNA, 524 bp, Gossypium hirsutum
  unsure (1)..(524): unsure at all n locations
  Clone ID: LIB3584-035-P1-K1-F9
gttggaagataaactgcaagtagctgcgaagggtggtggaagttcagccgaattgaaggatggagtagaggtgaaatccaaagatattgatggattaacattttcagcaccatcaaaacggaagagcaagaaaaagttggaagcagcttcagtgcaagctgcatcctcttcatcaactcctaccaaccacgaggttgcttcgcccttgaccaccttaaagttcatttttggtgtagcttttgtgtccgtaatcatcggtgttattctaggaaagcgttattagtgtaagttttttgtgtttattggtttttctttgcagcttgcgtctaaacatataagctatgcagagcagaatgaaaagcttaattttgtgtatgcttttcttagcttagtaagatttaggaagttgactaaagaacttgtttcattccttcccttgcttgtttgtcataacatggttggatatatacatatgtatacaagtcatcattcaaggtgcattctgcnnaaaaaaaaatanaaaa

SEQ ID NO: 3873 - DNA, 319 bp, Gossypium hirsutum
  unsure (1)..(319): unsure at all n locations
  Clone ID: LIB3145-016-Q1-K1-E4
tgcagatggagcatatggttgagcagctttccaaacttgaaagaaaggtatatatgtatatgtacatgtacatgtatatgtatatgtattattaactttgtgttttctagatatcatcatgcttgtattctttgtatacacaggaagagtagagcaggaaattagtgtgttttaaatgtcataaaatttgatacaatagttaaatattatatgattagacatcgatgaanaaaaaaaaaaaaaaaaaaaaaaaataaaaaaaaaaataaataaaaatgataaaaaaaaataatattaaaaaaacttctatcaagaatgg

SEQ ID NO: 3874 - DNA, 656 bp, Gossypium hirsutum
  Clone ID: GOSHI-09MAY01-C2511_1
ctttcgcgttcgcccacgcgtccgggctgagcgaatttgcggtttgttagttcgtgtgtgaaacaggtaataaaaggaaaaaaacgatgggtgttttcacatttgtgtgcaggagcaaaggcggtgagtggtctgccaagcagttggagggagagattgagagctctgctgcttccacttacgagctccagcggaaacttgtccaggccgccaccgcctgcgactcctctggtggtgtcacctcctctttctctgtcgttacccctaattctgccgttttccaggtggttattggaggtgctgtaggcggagccttcatcgggggtggaggagctgctgccgctccggctggaggcgctgccgctgccgctgaagctcctgcagctgaggagaaaaaggaagagaaagaggagagtgatgacgatatgggattctctctctttgattaagctcctttactgccttactgcctgtttagatcttagcaagttgttacattttcatttttcatttatgcgtgaattagactatcttgggtgacattgggctcttttcctagttaggagaagccatttttcaggataaaattgacaatattatgagtatgttttttggcataaaaaaaaaaaaaaaaagtcgtcgcggccgttcaagtc

SEQ ID NO: 3875 - DNA, 268 bp, Gossypium hirsutum
  Clone ID: LIB3147-004-Q1-K1-E8
ctcctttactgccttactgcctgtttagatcttagcaagttgttacattttcatttttcatgtatgcgtgaattagactatcttgggtgacattgggctcttttcctagttaggagaagccatttttcaggataaaatcgacaatattatgagtatgtcttttgaaaaacaccttgatcgtaagggaggagtgaagcgtatcagtcggcttagtatatgaggaaacccgtggagttctcaagaatcttctaaaagggcggccctctct

SEQ ID NO: 3876 - DNA, 921 bp, Gossypium hirsutum
  Clone ID: GOSHI-09MAY01-C2531_1
tgcaaatgcaagtcagtacgagtagcatgcaactcaggacaacaccgagaacaatcagaatgcggatcagaacgagcacaatgctgctccaagtaacactgagaacaatgagaatgcgggtcagaacgagaacaatgccactccaagtaacaccgacaacaatgagaatgcaggtcagagacgagaacaatgtgactcagagcaacactgacaacagcaacagcaacaacaacaacgaaaatgcaagtcaaaacgagaacaatgctgctcagagcagtaacaacaatgaaaatgcaagtcaggatgagaacaatgcatctcagagcttcaccgacaccaccaacaacaatgaaaatgcaagtcagaacgaaaacaatgcttctcagagctacaccgacaccaccaccaacgagagcaacgatgccattcagaccaataccaacagcaacgaaaactcaagtccaaatgagaacaatgccgttcaggcctccaataacgaaaatgcaggtcagaacgagaacgagaacaatgctactcacagcttcaacgacagcaacgggagcagcaattacgacacaaatacagatggaaacacccagaataatcccgacacttcttcaacgaatcaagaagtaaaagaaggtgaaaccggtttgggaactttgccaggtaccacaacaagtgagggaaataaaagtgagaatgcagctgcagaatgaaatttataatggtttgtgatttcagtatatgaactaattactgtcactaaatttttgtttttcttctttcctgatatgggatcgggaaactgtatgttcctggttacttgtgcctttgttgtcatattagtgctgaaaatttttatattattttgtacttgtagatttctagttataataattgaagttccccagttttcat

SEQ ID NO: 3877 - DNA, 448 bp, Gossypium hirsutum
  unsure (1)..(448): unsure at all n locations
  Clone ID: LIB3189-048-P1-K1-E1
aaacgattcaagttcaaatgaaaatgctgcacagagcaacaccaacaacaatgaaaacaataacaatgggaatgcgggtcaggacgggaagaatgccactcanagtaacactgacaacaatgaaaatgtgggtcagaatgagaacaatgctgctcagagcaacactgagaacaatgaaaatgcgggtcagaatgagagcaatgcaactcagagcaacactgagaacaatgagaatgcgggtcagaacgagaaaaatgctgctccaagtgacgctgagaacaatgagaatgtgggtcagaacgagaacaatgccgctccaagtaacactgagaacaatgagaatgcgggtcagaacgagaacaatgctgcttcgagtgacaccgacaacaatgagaatgcaggtcagaacgagaacaatgcgactcagagcaacaccggcggaaacaac

SEQ ID NO: 3878 - DNA, 945 bp, Gossypium hirsutum
  Clone ID: GOSHI-09MAY01-C2521_1
ccccgcgtccgctcaaagctggttttgataaaggaaataagaagagggagggtagctcggctgctggtggtggggatgataatgatgaagggaagggtcgtaaattggagaatgggaactccaacggtaagaattttgagattgacgaacctaggatgacagctgctgtaaatggtaaagaaaatactagttccaattttagtgcttttgatgtaagtaagctccagaaaaggactaaaggtggaaagaaaactgacactgtagttaataagggttccaaggtggaccctaagaaaaagttacaaagggcaatagagtttgggatgatgcacctccagggacaaaattggacttcactgatccagtggatggaaatggaaatgagaagatggaggttgttccagcaagtcaaggtgaaagtatgatggatgtagaagagattatcagcagcgatagtggaggtgaggaagatgacaatgtgcagaaggatagcaagcctgaagctacgaaaaagggctggttttcctccatgttccagagtatcgctggaaaggcaaatttggagaagggagacctggaaccggctttgaaggctctgaaggataggcttatgaccaagaatgtggctgaggagatagcagagaagctttgtgaatcagtatctgcaagtcttgaagggaaaaaattggcctcattcacaagggtctcttcaacagtgcaggctgcaatggaagaagcccttgttcgtattttaactcctcggcgctccattgacatactgagggatgtgcatgctgccaaggaacagagaaagccgtatgttgttgtctttgttggagttaatggagttgggaaatcaacacatctagccaaggtcgcttactggcttctgcagcataatgtcagtgttatgatggctgcttgtgatacattccgatctgttgc

SEQ ID NO: 3879 - DNA, 602 bp, Gossypium hirsutum
  Clone ID: GOSHI-09MAY01-C2491_2
gcggaaaagaaaagaaagaaaaatacagaaaaagaagcatatatggcaagcgaggcggcggtggaagttaacgccatatcggcggcggcgccagaggcggcagcaacaacaggggcagagaagcaaccacataagctcgagagaaagtggaccttttggtttgataaccaatcagggcctaaacaaggcgccgcttggggtacctctctacgcaaggtttacacatttgacaccgtagaagaattttggtgtttgtatgatcaaatattcaagcccagcaagttgcccgggaatgctgacttccacttgtttaaggccggaattgagcccaaatgggaagatcccgagtgtgctagtggaggaaagtggtctgtcactagcaacagaaaggctaatctcgagaatatgtggcttgaaaccttgatggcattgatcggggagcaattcgatgaggcggatgagatttgcggtgtagttgccaccgtacgcccaaggctggacaaacttgcattatggaccaagacggcaacgaacgaagctgctcagatgggcatcgggaggaagtggaaggagatcattggcggcaacgacaaaattactta

SEQ ID NO: 3880 - DNA, 960 bp, Gossypium hirsutum
  Clone ID: GOSHI-09MAY01-C2491_1
cggacgcgtgggcgctcgctccacttcctcttcaataggctttaggaaggggaaagtagaaacaaagaaaacatatggcaagtgaggcggcggaggaagctaacgtccctgcagcggctgcggcggaagcacccacaacagggaccgagaagcaaccacataagcttgaaagaaagtggaccttttggtttgataaccaatcaaagcctaaacaaggcgctgcttggggttcctctttacgcaaagtttacacttttgacactgtagaagaattttggtgtttgtatgatcaaatattcaagcctagcaagttgcctggaaatgctgatttccacttgtttaaggctggaattgagcccaaatgggaagatcctgagtgtgctaatggaggaaaatggtctgtcactagcaacagaaaggctaatcttgagaacatgtggcttgaaagtttgatggcattgatcggggagcaatttgatgaggcagatgagatttgtggtgtagttgccagtgttcgccaaaggcaggacaaacttgcattgtggaccaagactgcaacgaatgaggctgctcagatgggtattggaaggaagtggaaggagatcattgacatcaatgataaaattacatatagcttccatgacgactctcgaagggaaagatcagcaaaaggtcgatacaatgtttgaaccatttgcaggtttctttgttcagcagtgtactctttatttgttacctattttgcatgtgagtttatgttatgtgataccaccaacaatcaagttccatgttagagacagttttgatattttaacacattgagaattttaccctattccttggatacttaatttgctgaatctcatagcatatgatgattctgggggccattagaattatgtacttggcaatgtttttggtgcttaacttggaaggttgaactagtttcagtttgagtcc

SEQ ID NO: 3881 - DNA, 337 bp, Gossypium hirsutum
  Clone ID: LIB3196-020-P1-M1-G6
cccacgcgtccgagaaagaacatctatggcaagcgaggcggctgtggaagttaacgccatatcggcggcggcgccagaggcggcaacaacaacaggggcagagaagcaaccacataagctcgagagaaagtggaccttttggtttgataaccaaacagggcataaacaaggcgccgattggggtacctctctacgcaaggtttacacatttgacaccgcagaagaatgctggtgtttgcatgatcaactattcaagcccaccacggtggccaaaaatactgactatcagttgtgcaaggccgggaacgggcccaaatgggcagatcccctgtgtgct

SEQ ID NO: 3882 - DNA, 682 bp, Gossypium hirsutum
  Clone ID: GOSHI-09MAY01-C2441_3
gggctaagacatatagaaagcattgcttagagatttttttttttcaccatggctcatacccgccggttaaatctattgtctctcgtcttattccccttcctcctcaggaggagagggaactaaaggagaccttgcaggaaataattggacaggggaagcaggttaagctggaacagaagatcgatcctagtattcttggtgggcttgtcgtagagtttgagcaaaaggtatttgacatgtccattaagactagggcacgacagatggagaggttcttgcgtgagcctatcaactttggttccctctgaaggatgttataaccgccaagtgaccatttcagtttccttgtgcaccaattgggttattccgagaactgcaaagaataattaatggtctttttgttttgcctctgttttcttctactcttgacattatatgatggaatgcatccattcacaataaaagaaactttctcggcatttattattttttatctgggaaaattactaaaataccgtttgtatggctttttgtgtatggttgctttgacttatatgatggaatgcatccattcacaataaaagaaactttctcggcatttatttttttttatcataaatggcccaggtatttaaaaaaaaaaaaaaaaaaaaaaaaaaaaaaaaaaaaaaaaaaaaaaaat

SEQ ID NO: 3883 - DNA, 948 bp, Gossypium hirsutum
  Clone ID: GOSHI-09MAY01-C2441_1
cggccccgtcgccagaatcaacgtaagaattagggttgtgtttagaaatggcggtggcagcgcgcttcagatccactctccctctctttcacaggcttttgagatccgattccctgccttctcacactcccagagctactcttcaccgaactctactttgccccgagctgtcgaggaaatattctacttctctgaagaaggacgagaatgttaaggtgcctttggctttgtttggtggatctggaaactatgcatctgcactgtaccttgcagccgtaaaaggaaatgctctggacaaggttgagtctgaacttcttgaccttgttcaggcatcaaaaaacagtcaattgttttctcaattcactaaggacttgtcagtacctgcagagacacgggtcaaagccattaatgagatatgtgggcaagctaaattttcagatcttacaaagaactttttagttatactagctgagaatggaaggctaagacatatagaaagcattgcaaagagatttgtggagttgaccatggctcataagggagaagtgaaagctattgtcacaagtgttattccccttccttctcaggaggagaaggaactaaaggagacgttgcaggaaataattggacaggggaagcaggttaagctggaacagaagatcgatcctagtattcttggtgggcttgtcgtaaagtttgagcaaaaggtatttgacatgtccattaagactagggcacgacagatggagagggttttgcgtgagcctataactttggttccctttgaggatattataaccggccagtggacattaagtttcttggcaccattgggtatttcggaactgcaaagaaattatggcttttggtttgccctgtttctttactttgcattttggaggaagctcctttcaataaaaaatttttggttttttttactaatttaaa

SEQ ID NO: 3884 - DNA, 592 bp, Gossypium hirsutum
  Clone ID: LIB3829-028-Q6-K6-B11
gcgttcgattatctcgaccggttcttatcaagccaaccctaccgcaaaataagacatgggttcttcgacttattgctatctcttgcgtctctttggctgccaagatgaacagaacagatttctctctcgccgagtttcagggcgatggaggtttcatgtttgatgcacgaacaatagagaggatggaatttttaatattgggagcactaaaatggcggatgcgttcaattactcctttctcttttatctcctttttcattccatttttgaagctcaaagaccctgcattaaggcaagccctcaaagcccgagctgttgaaatcatcttcaaagctcaaactgtaacaaagcttttagagttcaagccatcgataattgcagcgtcggcatttctctttgcctcccatgaactgttcccattgcaattcccctgctatcacaaagcaattcccagagctgctcttcaccgaactctactttgtcccgaactgtcgaggaaatattccacttctccgaagaaggacgagaatgttaaggtgcctttggctttgtttggtggatctggaaactatgcatctgcactgtaccttgc

SEQ ID NO: 3885 - DNA, 520 bp, Gossypium hirsutum
  unsure (1)..(520): unsure at all n locations
  Clone ID: LIB3145-016-Q1-K1-A10
ccgtccgattaggggttgggtgtttagaaaaatgggcggnntggcagcgccgcccttcagaatccacntnnctccctnnatctttgcacacggccccttttgagaatcacgatnnntccctgcncnnttctcnnacactccnnccagagctacntnncttcaccgaacctcnttactttgccccgagcctgtcgaggggaaatattctacnnttctctgaagaaagggacgacgaatgttaaggtgccctttggnctttgtttgggtggggatctggaaaccctatgcatactgcacctgtnnaccttgcagccgtaaaaaggaaatggctctggacaagggttgagtctgaacttcttggaccttgttcaggcatcaaaaaacagtcaattgttttctcaattcactaaagacttgtcagtacctgcagagacacgggtcaaagccattaatgagatatgtgggcaagctaaattttcagatcttacaaagaactttttagttatactagctgagaatg

SEQ ID NO: 3886 - DNA, 1034 bp, Gossypium hirsutum
  Clone ID: GOSHI-09MAY01-C2471_1
ctctctttgatttctttgtcgtaattccaccatgtctgtcatttgagaggctgctctttctgcgtttttggagctgttgtctggcaagttggttgactctgtactcaactttgtagccggtcacaggcaagtccaccagcaactcgagcagtggcaatccatattacccgagatcaaagcagtgttgaaccgtacagaggagaagcagatcaagggcgaggacgatggtgtgaagaattggttggacgatctccaagacttagcttacgatgtggatgacatcttggacgagttcgcttaccaacagttacatctcaagctccaaaaacctcaatctcaagccagcactagtaaggtacagaagctcattcctacctgctgtactggtactaatttctccccaacctcttttaagttcaatactaagatgatttcaaagataaaagaaatcaccagtagactgaatcgtttcaaacataaaagaaatcaccagtagactgaaatcgtttcaaacataaaagaaatcaccagtagactgaatcgtttcaaacacttgaagaagtagtttggggttgagtgagatcatgtctcaaggtgcaacttccaagggaaagaaactcaggctgcaaccaacttccttgatggatggagctgtggagtatgttggtagagccaatgagaagcaagatatggttgagttgctcaaaattaacaactcagatggagtttgcgtcctttccatcgttggcatgggagggatgggggaaaacagctcttgctcagctggtttacaatgatcccagctatggatttaaattgcgggccgattccggtatggcggccactatatagtgggagcgggcgtcgtcgaaaccgtacagctgaaaatagcgtatgaaacgagcacaccgatgcggtgatcgtggcgcatttatggtacgaccatgcgtaaacaggcactatctgttattccgtatgaaataaaaaaaaatcactcttaacaaatcatgaatcatgacaaggatttcctactg

SEQ ID NO: 3887 - DNA, 1412 bp, Gossypium hirsutum
  Clone ID: GOSHI-09MAY01-C2461_1
cggacgcgtgcgaaaaaaattagtgaattttgagtggattgttcttggatccaattttttggagattacagagaaaaaaagattgatttgcaaatacacaatacgaataatcgcgatgggtttcaagatatttgtggtggcgatgatggtgggttccatcgcagcggctcagatttcattagcatccaccgtgcctgcttttctatgggctcctggtttctctagcgttgaatcgaaggaatctgtaaattatcagatcaagtctccaaaggatctagctaactctgttctctctcaagggggatggtctgacttactgtgctccgagaggaaaaatgagcgccctgttgatctcgccgttgtttttgttggtagagagttgcactcttcagatgttgcagggaacaaacatgcagatccggctcttttgaacttgcttaaggactcttttaccaagtccaacttctcaatggcatttccatatgtagctacttctgaggaggaaacaatggagaatttgttggtttcaagttttaaggaagcctgtgcccacggtttgggagttgctaatgttgcaattttggaatcgtgctctatagagggtggagatttccagaaacttgcaaacttgcattcagtccatgatcatctagttaaaaggatggaaaagagaacaaagggggagactgatctggttgtcctatgccatggaggctttcagtctctgaaagagcttgaccaaccattcccacagagtgagattttgactgaagtcatgagttctgtggagcaatctggggcaaaatatgcagccctttatgtttctgacccttttaagtccatccactatcccggttatagagagcttgaaaggtttcttgctgatgatactgcaaagaatggttcagccagtcccaaagtctgcgatgaggtttgccagctaaaatcatcactccttgagggagttttagttggaattgtgttgcttttaatcttagtatcaggcctttgctgcatgatgggcattgatactccaacaagattcgaggcaccccaagaaaattgatctgtctttttggtacaacctagcatctttatgttgtaataaggcttctgtccttatggtatctacaaattggttctttgaaactgcacaagatcatccatgacgtgaaacaagcaccacaagcttggcatctagagctaagtagtttccttctgcaatatgattaagaacccagttccatatgtttgtttattcatctatgttaaggatcccaccccaattttatttcttggtttatgtgaattatcttgtagccctaggaagtaataataataaaatgatgttcagtcttttctggcaccaattgtctcttatattagtcttaaaaaatcatggtctttgaatt

SEQ ID NO: 3888 - DNA, 627 bp, Gossypium hirsutum
  unsure (1)..(627): unsure at all n locations
  Clone ID: LIB3829-032-Q6-N6-D3
tttttttaaaatttggatggaatccttaacatagatgaataaacaaacatatgaaactgagttcttaatcatattgcagaaggaaactacttagctatagatgccaagcttgtggtgcttgtttcacgtcatggatgatcttgtgcagtttcaaagaaccaatttgtagataccataaggacagaagccttattacaacctaaagatgctaggttgtacccnaaagacagatcaattttcttggggtgcctcgaatcttgttggagtgtctatgcccatcatgcngcaaaggcctggtgcctgggtttggagcgcccccgtttccactaaaactccctctcggcgggatgattttagctgggcaaccctctcgccgactttggggaattgggtgagcccttcttttgggggttcctctgcgcggagaaccttttcgtcccttcttttaccggggataggggggtggggcttgaggggggggggggggcgtgtggggggggggtttttgtggtccccgactgcgtcggcgtcgctcgctggcgtgggggcggggatgtggagccttttggggcgtgggtggggccggggtctttggtgggggctgggggggcgggccgtggggggtgg

SEQ ID NO: 3889 - DNA, 444 bp, Gossypium hirsutum
  unsure (1)..(444): unsure at all n locations
  Clone ID: LIB3584-020-P1-K1-F7
cccacgcgtccgcccacgcgtccgcccacgcgtccgngagttctgnggagcaatctggggcagggtatgcagccctttatgtttccgatccctttaagtccatccactatcccggttatagagagctcgaaaggtttcttgctgatgatactgcaaagaatggttcagccagtcccaaagtctgcgatgaggtttgcaagctaaaatcatcactccttgagggagttttagttgtaagtctttgtctttgccctccacatttctgatacctctaatctaacaacaatgcttttccattatgagtgttctgatatggttatatggatttggaaatgcattcttattgtttcagtgtttactaatcctttcttggattcaaaaagctattgtagtcacgaatgttgtgaatgggtcatatggattttcaaattgcctttttttttt

SEQ ID NO: 3890 - DNA, 940 bp, Gossypium hirsutum
  Clone ID: GOSHI-09MAY01-C2411_1
cggacgcgtgggtaaaatccccctctatattctctctctctctccttctctgcctaaacccaaattattaaaacagtcgtcgtctgcaaccgacaccaatgtccaccgcagttccacccgttatccctgtctcctccgtgcaatccgtcgaatcccaaccgcccgctgccagccccgcctttctctctttcgtttcccgtctcaatgaatcccttcgcaacggcctctcccagcgccgtccttgggctgagctcgttgaccgttccgccttctccaagcccgagtcattctctgatgctctcgttcgcgtccgcaagaactactcgtatttccgagtcaattacctgtctgtgatcggtctcatccttgccttttcccttctttcccatccgttttcccttctccttctcctcggactcctctgctcctggatcttcctctacctcttccgccccgctgatcagcctctcatcctatttggccgtacattctccgatcgcgagaccctcggctttctcatcatcttcagcgtcttcgttgtctttctcactaccggtggatctcttcttatttctgctctcatggttggagtcggactcgtctgtgcccacggcgcctttagggcccctgaggatctcttcttggacgaacaagaacaagtatccaccggtttcttgtcctttctaggtggtgctgccaccaatgccgccgttgccgctgcccctgctgttgccgctcgtgtctgaatccgatccacggttccgcctctttgaatcttttcctcttggattacagtaatggttcacatgtcattgattcaatttcagttttttctttaagaacaataaaattcctattggggaatttatagctgtagtttattttttacgaattagagtttatattaacatttgtggaatgtatatggatctcgtttatt

SEQ ID NO: 3891 - DNA, 363 bp, Gossypium hirsutum
  Clone ID: LIB3196-012-P1-M1-F1
attctctctctctctctcttcctctccccttctctgcctaaaccaaattaaaacaattgtctccaaccgacaccaatgtccaccgcagttccacccgttattcctgtctcctccgtgcaatccgtcgaatcccaaccgcccgttgccagccccgcctttctctctttcgtttcccgtctcaatgaattccttcgcaacggcctcttccagcgccgtccttgggctgagctcgttgaccgttccgccttctccaagcccgagtcattctctgatgctctcgttcgcgtccgcaagaactactcgtatttccgagtcaattacctgttggggatcggtctcatccttgccttttgccttttttcc

SEQ ID NO: 3892 - DNA, 1429 bp, Gossypium hirsutum
  Clone ID: GOSHI-09MAY01-C2401_1
agccgttttattgcttcccgctccgccgttcacagccatatttttgggcgctaaggttctcatcaagctctgctcgtctttggtttgtactcagcacattacatatctgtgaaaatgaagaagaaaatgatagctattggtttcgaaggatcggccaacaagatcggtatcggtgttgtaacattagacggcaccattttatcgaacccacgtcacacctacattactccacccggccaaggtttccttccacgtgaaactgctcaacaccatctccaacatgtgctcccattggttaaatcggctttaaaaacagctgagattacccccgatgaaatcgactgtatttgttacactaagggtccgggtatgggtgcaccattacaagtgtccgcaattgtcgttcggattctttcactgctatggaagaagcccgttgttgcggttaatcactgtgttgcgcatattgagatgggaaggattgttactggggccgatgatcctgttgtgttgtatgttagcggtgggaatactcaggttattgcgtatagtgaaggacgatatagaatcttcggagagactattgatattgctgttgggaattgcttggatcggtttgctcgtgttttaaccctttcgaacgatccaagtcctggatataacatcgagcagctagcaaagaaaggtgaaaaatttatcgatcttccatacgtggtcaaagggatggatgtttcatttagtggaatattgagctacatcgaagctactgccgaggagaagctaaaaaataacgaatgcacccctgcggatttatgctactcccttcaggaaactctatttgcaatgcttgtggagattacggaacgagcaatggctcattgtgactcgaaagatgttcttattgttggtggtgtgggttgcaatgagcggttacaagagatgatgcgaataatgtgttccgaacgaggtgggagattgtttgcaactgatgacaggtactgcatcgacaatggagcgatgatagcatatacaggtctccttgcctttgctcatgggtactcaacaccactcgaggagtcaacattcacccaacggtttcgtactgatgaggtgcacgcaatctggagagagaaacaagagtcgggtgacttgagtggtcttccggatggaggaatctaaatgcaagttgctattaaggtttcaatgattgtgttgggatcaggatcttgaagattcagaaatgatattatgtgtcaattatattgttttgtagtagactttactaggaaaaaaagttaagaacaaactttaactctgtattatgaatatgtctgaatatgtaaatcatgtttctgaatgtgtttatttggaactggaagcttgaaacttcactttttttttcttcttttataattaactcaaaattata

SEQ ID NO: 3893 - DNA, 586 bp, Gossypium hirsutum
  Clone ID: LIB3828-005-Q1-K6-E9
ctccctctctccttttttccactgtcagtagccgttttattgcttcccgctccgccgccacagccatatttttgggcgctaagattctcataaagctctgctcgtctttgggcaagagggattgaatttgtaacaaaaaaagaagaagaaatgtaaggtttgtactcagcacattacatatctgtgaaaatgaagaagaaaatgatagctattggtttcgaaggatcggccaacaagatcggtatcggtgttgtaacattagatggcaccattttatcgaacccacgtcacacctacattactccacctggccaaggtttccttccacgtgaaactgctcaacaccatctccaacatgtgctcccattggttaaatcggctttaaaaacagctgagattaccccagatgaaatcgactgtatttgttacactaagggtccgggtatgggtgcaccgttacaagtgtccgcaattgtcgttcgggttctttcactgctatggaagaagcccattgttgctgttaatcactgcgttgcacatattgagatgggaaggattgttactggggccgatgatcctgttgtgt

SEQ ID NO: 3894 - DNA, 967 bp, Gossypium hirsutum
  Clone ID: GOSHI-09MAY01-C2421_3
acccacgcggcggccacgcgccgactgccagaggcagagaaccaagctagcgatggggctcgggagaaacccaggagagcagctggcatagccagaaaggtgatcattaccaaggattcgactcaactaattgctgaggcagcctcaaaggatgagatacaaactagggtggcacaactaaaaaaagagctagttcagacagattctgtctatgattcagaaaaattggcagaaaggattgccaaactatctggtggtgttgcagtcattaaggtgggggctgcaacagagactgaacttgaggatcgtaagctacggattgaagatgcgaagaatgctacatttgctgccatagaggaaggaattgtgcctggtggtggtgctgcattagttcatctttcaagttgtgttcctgcaattaacgagaagcttgaagacgcagatgagcgcttgggagctgacattgtgcagaaggctctgggtgcaccagcttcgttgatagctcaaaatgcaggaatggaaggtgaggtggtggtggagaaggtgaagagtagtgaatggggggttggttccaatgctatgccagccaaatttgagaacttgctggaggctggagttatcgacccaccaaaggtaccaagatgtgctctgcagaatgcttcttcagttgcaggaatggtccttaccactcaggccattgttgttgagaagcccaagccaaaggcttccgccgccgctgctccatcaggtcttgctgtataatgagtaggatatatgcgctcattaggttttctgaagatgaagagcagtattcttgccgtgaatcacaagaaaatgccaaatgaatagagattgtccttgtaagaaaattttccttttatttttgtttttctcttgtatggactaataacgaaacagctttatcttgggatttgcgaaaatataaagcttacgattcatgcttccc

SEQ ID NO: 3895 - DNA, 633 bp, Gossypium hirsutum
  Clone ID: GOSHI-09MAY01-C2421_2
caaaaataacgccttttttttgggggggggcggggggggcttttttggtcttccaaaatggcctctgctaatgctctttcttctgcttctgttctttgcacctcaaaacaggggagtctgggtaggaggggaaatcagcgccagaaccaaagagtaaactataggcaaggaaggggccgggggggggtaagagcttgtgcaaaggaaattgcttttgaccagagctcgagggctgctatgcaagctggcattgataagcttgctgatgctgttggccttactcttggtcctagggggaggaatgttgtcttggatgaatatggaagtccaaaggtagtcaatgatggagtgactatagccagagcaattgagcttcctaatgccatggaaaatgctggtgcagctcttattagagaggttgctagtaaaactaatgactctgctggtgatgggacaactacggcatccatacttgcacgggaaataatcaaactaggacttctgagtgttacctctggtgctaatccagtctcagtaaagaggggtattgataaaactgtacaaaggttggtggaagaacttgaaaagaaagccaggcctgttaaaggtcgtgatgatatcaaagctgtggct

SEQ ID NO: 3896 - DNA, 2091 bp, Gossypium hirsutum
  Clone ID: GOSHI-09MAY01-C2421_1
cccacgcgtccgcgcctttgctttagttctttctacacacactctctgcctgcctccccttatccactctttcccaaaaacccagaaaccaaaacaaagcctttatcttctttattgttttacttatcctttttgttcatcaaactacaataaaaagaaatggcctctgcaaatgctctttcttcagcttctattctttgctctcccaacaaggggagtttaaggaggaagggaaatcagagacagaaccaaagggtaaattataggcaaggaaacaaccggtttggtgtgaaggcttgtgctaaagaaattgcttttgaccagagttcaagagctgcaatgcaggctggcattgataagttagctgatgctgttggccttacacttggtcctagggggaggaatgttgtgttggatgaattcggaagtccgaaagtagtcaatgatggggtgacaatagctagagctattgagcttcctaatgccatggaaaatgctggtgctgctcttatcagagaggttgcgagtaaaactaatgactctgcaggtgatgggacgactacggcatcggtacttgcacgggaaatcatcaaactaggacttttgactgttacttcgggtgcaaatccggtctcagtgaaaaggggtatcgataaaaccgtacaatggttaatagaagagttggaaaagaaggctaggcctgttaaaggtcgtgatgatatcaaagctggggcttccatttctgctggaaatgatgaccttattggaacaatggtagctgatgctattgacaaagtcggtcccgatggtgttttgtcaatcgagtcatcgtcttcatttgagaccaccgttgatgttgaggaaggaatggagattgacagaggttacatctcaccgcaattcgtaacaaatcccgagaaattaatttgtgaattcgagaatgcaagggtgctagtaactgatcaaaagattacagctattaaggacataattcccctcttggagaagactactcagttaagagctccattgcttataattgctgaggatgttaccggagaggctcttgctacacttgtagtgaacaaactccgaggtatccttaatgttgcagccattaaagctccgagtttcggcgaaagaagaaaagctgtccttcaagatattgccattcttactggtgccgagttccaagcaaatgatctgggtttgttaatcgagaacacctctgttgagcagcttggtatagccaggaaagttatcatcaccaaggattcaacccaaataattgctgatgccgcttcgaaggatgaaatacaagctagggtgcaacaattaaagaaagaactagccgagacagattctgtttacgacacagaaaaactggcagaaaggattgccaaactatctggtggtgttgcagtcattaaggttggggctgcaactgagactgaactcgaggatcgcaagctacgtattgaagatgccaagaatgctacctttgctgccatagaggaaggtattgtacctggtggtggtgctgcattagttcatctctcgacttgcgtccctgcaattaaggataagcttgaagactctgaagagcgcataggagccgacattgtgcagaaggctttggtagcaccggcctcgttgatagctcaaaatgcaggaatggaaggtgaggtagtggtggagaaagtaaagaacagcgattgggagatcggttacaatgcaatgacagacacgtatgagaacatgctggaagctggagttattgacccggcaaaggtgacaagatgtgcgttgcagaacgcggcttcggttgcgggaatggtgcttacgactcaagctattgtcgttgagaaagccaagccaaaggctcctgcagctgctgctcctgaaggtcttaccatttaatcactaggattttaagaaatttcagggattgaatgagcaattatgtaggtttggtgccctatttttgtattggatttaataaaagaatggtttgtggatgcaatgtaaggttagggatggtgaacaatgtttgattagacattgcagtaaaaaaaaaatgtcttccctccc

SEQ ID NO: 3897 - DNA, 494 bp, Gossypium hirsutum
  Clone ID: LIB3583-008-P1-K1-F12
ttgcaacttattagttccctacctgcctccctattcaccttctctcaaaactagcaagaaaaataacgcctttttttttgtgatcttagtttgcctttttggtcttcgaaaatggcttctgctaatgctctttcttctgcttctgttctttgcacctcaaaacaggggagtctgggtaggaggggaaatcagcgccagaaccaaagagtaaactataggcaaggaaatagccgatttggtgtgagagcttgtgcaaaggaaattgcttttgaccagagctcgagggctgctatgcaagctggcattgataagcttgctgatgctgttggccttactcttggtcctagggggaggaatgttgtcttggatgaatatggaagtccaaaggtagtcaatgatggagtgactatagccagagcaattgagcttcctaatgccatggaaaatgctggtgcagctcttattagagaggttgctagtaaaactaatgactc

SEQ ID NO: 3898 - DNA, 338 bp, Gossypium hirsutum
  Clone ID: uC-gsflmaxxa014d12b1
tcgttgcttctattctttgctctcccaacaaggggagtttaaggaggaagggaaatcagagacagaaccaaagggtaaattataggcaaggaaacaaccggtttggtgtgaaggcttgagctaaagaaattgcttttgaccagagttcaagagctgcaatgaatgctgtttttgtatagttagctgatgctttttgcctttcactttgtcctagagtgatttatttttcttttccttttcttactcttctcccattttattccattttcctttaattcttttctctattccttctcttaatctttttctccttctctttcttcatttttttctatttt

SEQ ID NO: 3899 - DNA, 852 bp, Gossypium hirsutum
  Clone ID: GOSHI-09MAY01-C2711_2
ggaaataaaagcgtagctcttaattaattattttattttttatttttacaaggctcaacggcaggagtaagcagaatcctgcaatcaaattccatccatagaatctggagtcgggactgtaaattatgagaacagttgacattcaattgtattggtgaagaccggaaggaacgtgtaattaattagagagtaaacaagacagagatgttctcactcttttatggactttataagtacctatttagcaagacagagtttcatgtactcattcttggaatcgacaaggctgggaaaacaactttgttggagaaattgaaatccgtatactcaaacttggaaggtctaccacctgatcgaattgttccaactgttgggcttaatattggtcgcgtcgaagttctaaatacaaaacttgtgttctgggacttgggaggccaggtaagtggatgctgaatcaaaagccttgggtctattcactcgttttgctgcaatgtgttcgatataacttctcagagcactctgcgcggtttttattgaaatgtagataagggagatagactggaaatatgtagttgcagtgtttgatggcaaaagcttggcatttttttataatatattttctgtcgtgcatggcgtaatgtccaaagcaagttcagtgtgtgacacttatttatcccctttgttacctttatcagcctggtcttcgctcaatttgggagaaatactatgaagaggcacatgctgtggtattcgtaattgatgctgcttgcccttcacgtttgaagattcaaaatctgcacttgagaaagttcttagacatgaggatctttaggggcccctctcttgatatta

SEQ ID NO: 3900 - DNA, 709 bp, Gossypium hirsutum
  Clone ID: GOSHI-09MAY01-C2711_1
cccacgcgtccgcccacgcgtccgcagaaaacaagatttctttggaaattaaaagcagtagctcttaattaattattttattttttatttttacaaggctcaacggcaggagtaagcagaatcctgcaatcaaattccatccatagaatctggagtcgggactgtaaattatgagaacagttgacattcaattgtattggtgaagaccggaaggaacgtgtaattaattagagagtaaacaagacagagatgttctcactcttttatggactttataagtacctatttagcaagacagagtttcatgtactcattcttggaatcgacaaggctgggaaaacaactttgttggagaaattgaaatccgtatactcaaacttggaaggtctaccacctgatcgaattgttccaactgttgggcttaatattggtcgcgtcgaagttctaaatacaaaacttgtgttctgggacttgggaggccagcctggtcttcgctcaatttgggagaaatactatgaagaggctcatgctgtggttttcgtaattgatgctgcttgcccttcacgttttgaagattcaaaatctgcacttgagaaagttcttagacatgaggatcttcagggggcccctctcttgtttttagcaaacaaacaggatctttctgaagctgttccgctgaagacttcgccgattctagaccttaaaaatt

SEQ ID NO: 3901 - DNA, 1052 bp, Gossypium hirsutum
  Clone ID: GOSHI-09MAY01-C2731_1
ccccgcgtccgcactctctgtctttcgctctcaaccctcgaccaagccccaatcttcttcttcttcctttgcttggctactgagcagaattaggaggttttgatttgttggtctgagtttgggtttgggttaattactacaattgttttcaaattataatttgtgaataattatgagggaagaggattcgaattggttctctagatgggaggaagagctgccatctccggatgagcttatgcctctttcccaatccctaattactcctgatcttgctatggccttcgacattcgtaaccccaatcatcaccatgctcaacagcaacagtcctcagtacagcctgctcctcctccaccttccgccgctgttcagccttcttctcaacctaccttagctgaattcgccgctgattctggggacttgggatccggggctgctggggatgagccggcacggactctcaagcggcctcgtctcgtgtggaccccacagcttcacaagagattcgttgatgccgtggctcatttggggatcaagaacgctgtccccaagactatcatgcagttgatgagtgttgatggtttgacaagagagaacgttgctagtcatttgcagaagtatcgcctttatttgaagagaatgcaaggtttatctggtggtagtgggggtggtgccaatggtggatctgggggtgccggattaggtgcctcggctgatccagccacagaccatttgtttgcaagctcacctgttccaccacactttcttcatccaggtaggggtaattcagagcatttcttaccattcgtgccagtgccagcactgcagcatcaccatcatcaccagcaacagctgattgtggcggctgcagtaggacatccccatttgcagtctcagtttcataggccacaaatggggcactatgggtcatctccgaatagccaattcgagcatcccttcttaggctggccgtcgctgcttccattgcttaggttcggagggacacccttgcattatcttgctccctgtggtttgtgggagatttggaatc

SEQ ID NO: 3902 - DNA, 1098 bp, Gossypium hirsutum
  Clone ID: GOSHI-09MAY01-C2721_1
gaaaatccaaaaacataaaaaatgaaaaaggggaaattcccaaattagttggactctctctgtctcatttgcttgctaccctctgcatcttagataagtaagagaaaagatcagatttttctattttaaatagggattttttttgcgtgtgtggtttttgagaggatccatggctgcaccaccggcaagagctcgggctgattatgattacctcattaagcttcttttgattggcgatagtggtgtggggaagagttgtctgcttttacgtttttctgatggttcctttactactagtttcataacaactatcggcattgattttaagataagaaccattgagcttgatggtaagcgggtcaaattgcaaatctgggatacagctggtcaagagcgatttcgaactattacaacagcttactaccgtggagccatggggattttgctggtttatgatgttactgatgagtcatctttcaacaatattcggaattggattcgcaatattgaacaacatgcttcagacaatgtcaacaagatactggttggaaacaaggctgacatggatgagagcaaaagggctgtgccgacctccaagggtcaagccctcgctgatgagtatggtatcaagttcttcgaaactagtgcaaagacgaatttgaatgtggaggaggttttcttttcaatagccaccgacattaagcaaaggcttacagagtctgataacaaggctgagcctactggactcaaaattaataagcaagactcagcagcagctagtcaagctgctcaaaagtcgggttgctgtggataaagcgaacaaaaaaaggcctgcagattcgaaatggaaggttcggcttcacagtcactctaaatgtaaaactaatcataacgacattatgggggtttgatgtatttatctcttattttctttccaactaccaggcttagcttgtgaaaggcagttccttctttctttcttttttttcagttaatttgtggaattttataagcatatctttgatcttattgaactcaagtgacccattttatgtacttgtcctgatatagatagataatatgaattctagtttcggt

SEQ ID NO: 3903 - DNA, 598 bp, Gossypium hirsutum
  unsure (1)..(598): unsure at all n locations
  Clone ID: LIB3543-059-Q6-K6-D12
gcgttcgcccagcgtccgcccacncgtgcggggcgttggtgtcttcagcgtctcanataagaggatatattattatatatttttgaattgtgttttttgtgcgtgatttttgaggatcaatggctgcaccaccagctagagctcgtgctgattatgattacctcattaagcttcttttagtggggggggggggtgtgggaaagagttgtcttcttctacgattttctgatggctcctttaccactagtttcataacgaccattggcattgattttaagataagaaccattgagcttgatggtaagaggatcaaactacaaatctgggacacagctggtcaagagcgattccgaactattacgacagcttactatcgtggagccatggggattttgctggtttatgatgttactgatgagtcatctttcaacaatattaggaattggattcgcaacattgaacaacatgcttccgacaatgtcaacaaggtactggttgggaacaaggctgacatggatgagagcaaaagggctgtgcctacatccaagggtcaagctcttgctgacgagtacggtatcaagttctttgaaactagtgc

SEQ ID NO: 3904 - DNA, 1470 bp, Gossypium hirsutum
  Clone ID: GOSHI-09MAY01-C2681_1
tcaacttttcaggtgttcttggtttctgagtattgaaggaattctctgtggttctttttaaagctaaagagttcagcttttggggttgatgccttgttggtttcttggcttatattgaagaatttttgtgttcaaagtccatttccttggtgctttatcatggattccccacagtcagttgtttcaccattcaagaactctgttgtagctgagcctgagaagcagaaaaccgagtttttcagtaggaactcgggtggtttgttgtcaaatgggtccgaggttaacaaaaaggaagagaattccattggtgttcttgaggtttatgttcatcaggcaagagatatccataacatctgcatttaccacaagcaggatgtgtatgctaagctttgtctcacctctgaccccgaaagcacggtttccaccaagatcatcaatggtggtgggaggaacccggtgttcaatgataatctacgcctcaatgttcgaactgttgattcctccctcaaaatcgagatattcatgatgagtagagtgaggaattatcttgaagaccagttgttgggatttgcattggtgccactgtctgaagtgctcctcaagaatgggaagttggagaaagaattctctctttcttcaactgatctgttccattcacctgctggttttgtccagttgtctcttgcatatgctggattatctcctgaagtaatggctattcctgctatgcctagagatgtggctgctgatgaaactgtgaaggattcggaaacaagtgagtgtgagttggaaaagattgagttcccggatcccataatcgcgaatgagaaccagatgatggtttccgagtatatcgggatccaatgttctaatttggactctgaaagttccgaaagtttgggcacctctgatgctgagagtcaaattagttcagacatgggcgctcgtttaatggagagcttctctactgctacagtcaattccatccaagcccccaagctcgattctcctccgagcagcgtgtcaaccaacggggtttcatctccttcagctggtgcaagctctgagtccttcgatggtctggctgcttcgaaaacttctactcaggaacacatttcagccccgaaagaaaaagctgtggatgttggagatgttgacagccattcctcaggggcacaaagcgattccatcgtgaaacctgttgtttccgttaacattgagcccgagcaaaagctggtgcagcaagacatagtagacatgtacatgaaaagcatgcagcaatttaccgagtcattggctaagatgaaactgcctctggacatcgacagtggaccgaccaaatcggagaattcaagtaccactgatcagaaaatacaggcatcgaaaaacaccggctcccgagtgttctacggaagcagggcttttttctaagcttcctgatcctctattcaaaggaagacacacaggtga

SEQ ID NO: 3905 - DNA, 418 bp, Gossypium hirsutum
  Clone ID: GOSHI-09MAY01-C2671_1
ccccgcgtccgggggggttccacctatgctacttcaaagcctgcagagcctgattttactgctgaagaacaataggcaggtttattttatgtaaaagtttgtgtgagtagattaggaactctcaaccctccacttaatatggaaatgtacgaatcttggcggaaagttgccaagtgttgagtatgaggtctgtatatgatgtatatatctctctcttcaaattttccttgttttgttccttggttttcagtaatgtccaatttgttttagcagttaaaaaaaaaaaaaaaatattatataacttttatatatttatatataaaaaaaaattataaaaataaaaatataattaatataaataaaaaatatatattattaattatttatttttattttaatttttatttattttatttta

SEQ ID NO: 3906 - DNA, 986 bp, Gossypium hirsutum
  Clone ID: GOSHI-09MAY01-C2661_1
tgaatatctcctgaagggaataaaaacggtatatgcgaatgttagaggtttagcaaatagaggaaaaatgaccaaggataaggcagaaaaagctctctcaatgcttaaaggagttctggattactctgaatttaaagacgtagacatggtcatagaggcagttgttgaaaatgttgctttaaagcaaaaaatattcagtgagatagagaaggcttgccctcctcactgcattttggcaacaaacacatccactattgacctcaatttaataggagaaaaaatgaactcgcaagatcgtcttataggagctcactttttcagtcctgcccatctgatgcctcttttggagattgtacgaacacagaaaacttccccacaaataattcttgatcttatgacggttggcaaagtaataaagaaagttcctgttgtggttggtaactgcactggctttgcagtcaatcgaacattcttcccctatacacaaggttcgcatttattggtcagtttaggtgtggacgcgtacagaattgaccgggtgatctgcaattttggctttcctctgggccctttccagcttcaagacttggctggctatggtgtggcctttgctgtcgggcaagaatatgctaaggcattctctgatcgaatattcgagtctccattgcttgaacttttggctaaagacggaagaaatgggaaaaacaacgggaaaggatactatatttatgagaagggaagcaaaccaaagcctgatccttctgtattgtctattatcgaggaatctagacggcttaccaatgttatgcccggtggaaagcctatttccgttactgatagagaagttctggagatgatactcttcccagtagttaacgaggcatgccgggttcttgaatgaagggttgtggttcgagcatcaaaccttgatgttgcatctgttcttgggatgagcttccatcttatcgtggtggtatatattttgc

SEQ ID NO: 3907 - DNA, 599 bp, Gossypium hirsutum
  Clone ID: GOSHI-09MAY01-C2611_1
tatgggaacaaccaccgtatacggggggtgacttaaacgcctccaccgcctcaccggaatccgccatgaaacacgacacgaaaggaggcggcggaactcggcatccagtataccgtggcgttcgtaaacgacggtggggcaaatgggtgtcggagattagagagccccgcaagaagtcacgcatttggttaggctcattcccggtgccggaaatggccgctaaagcttacgacgtagcggcgttttgtttgagaggacgtaaagctcaactgaacttccccgacgaagtagacgatttacccatacccttgacgtccactgctcgtgacatccaagccgccgccgcgaaagcggcacatttagtagtatcttcgtcgaagaaaattccagaatcatccgaagacggtagtgatgatttctggggtgaaatagaattgcctgaattaatgaataacggcggttgtcaatggaattcttgtggatggactttcgccggcgattcatcgtggcttgacggagaaacccaaacacaacaacacttcctagctgtctttgttgtgtagggatcccactttgtgttgtggataacaaaaatcacc

SEQ ID NO: 3908 - DNA, 880 bp, Gossypium hirsutum
  Clone ID: GOSHI-09MAY01-C2631_1
ctggatgttgtctatcaacttacctccaaatcatgccactctcttcattttggttttcttgatgtgcattctgctgatatcccaaaagaatttaataaaatcaggacccatggctcggttgggcagcacacaagaaacactgagaaagaatcaatgagtgatgatgagtatgtcaaagaaacacatttgctccttcgcgatgttcatcaatcaatcttcaatgatcaggtatttgatatgttgaattgcgaagcattcaaccaatctgttggagtcaatgtaactggaatgagagaaaattatctacaattgagcataggtcaaggaacctctctattcatatcacttgtgccatctagtgagggtgacaatcaggctgttgacactgccaatacgcagaatgtagattctgcaattgtacctttggactcgtttgatgaggtgaaattcggagaacgagaacatgatactcctacaatgaaaaagaaatggggtttccctcatcgtatcagttgtgaaatttatctgcagcaaattgttcatgaacatgcatttctaaaagcaaaggataaaccaaatttatctggtactccagtatctggccaatcaggaaaggatggacctggtcttctgggtcatttctgtctgtctctggctcatagaatcttttcgagcagagttcttatagagctggaaaatgtatgcagggttccatatctccatttaatgacccacccaacttggcattcacggaaatcatcttggacaatctttatgaaagttcctcagtccattcttcatgcagagtcccaatccccaagatcagacttccagaacattaaggatgttctaaaatcacaatttcataccaaggtggtgc

SEQ ID NO: 3909 - DNA, 435 bp, Gossypium hirsutum
  Clone ID: LIB3145-011-Q1-K1-F1
atctttgatgatcaggtgtttgagatgttgaatcgtgaagcattcaaccaatctattggtgtgaatgtaactggaatacgagaaaattatttacaattaagcataggtcaaggaaacactcttttcatatcacttgtgccatctagcaagggtgatgatcaggacgctgccaatacccaggattcagaatctgcaattgtgcctttagactcatttgataatgtgaaattagaagaaggaaaacatggtacttctaaaaggaaatggggtttccctaatcgtaccagttgcgaaatttatctgcagcaaattgttcatgaacatgcatttgttaaggcaaaggataaaccaaatttatctggtactcgtgtatctggtcaatcaggaaaggatggacctggtcttcttggtcatttctgtctgtctctggctcat

SEQ ID NO: 3910 - DNA, 721 bp, Gossypium hirsutum
  Clone ID: LIB3583-022-P1-K1-G10
cccacgcgtccgccagtttccatctatacagcaaaaaaaaaaaaaaaaaaccgaagccatttcgaaggaaaaccagagaagggaaaatcaaagatggcgccaccgggaacaatacggtggtgcgcgctcgtattgacgctctttttatctctctatatctcaccgtcgatcgccatttactgtgacgaagacgattgttatgatctcctaggggtttctcaatctgccaatgcctcggagatcaagaaagcttattataagctctccttgaaatatcatccggataagaatccagatccggaatctagaaagctgtttgtgaaaattgccaatgcgtatgagattctgaaagatgaagccacaagggagcagtatgattatgcaattgcacatccagaggaggtgttttacaatacagctcgttactaccgtgcatattatggtcacaaaacggatactcgtgctgtccttgttggtgttctgctgattctttcggtgtttcaatatttcaatcggttgacaaggtataatcaggctgtagatatggtgaagaagacaccagcttacaaaaacagactgcgggcgttggaacttgaacgcagtggaggaaccacaaataagaagaaagagtactaggcaattatcaagaaaaagggggaagatcttaacatgaacttgagctgacattaaggagctgaaagccatcatctggaataatggg

SEQ ID NO: 3911 - DNA, 667 bp, Gossypium hirsutum
  unsure (1)..(667): unsure at all n locations
  Clone ID: AI729373.1
cagtttccatctatacagcaaaaaaaaaaaaaaaaaaccgaagccatttcgaaggaaaaccaaaaaagggaaaatcaaagatggcgccaccgggaacaatacggtggtgcgcgctcgtattgacgctctttttatctctctatatctcaccgtcgatcgccatttactgtgacgaaaacaattgttatgatctcctaggggtttctcaatctgccaatgcctcggagatcaagaaagcttattataagctctccttgaaatatcatccggataagaatccagatccggaatctagaaagctgtttgtgaaaattgccaatgcgtatgagattctgaaagatgaagccacaagggagcagtatgattatgcaattgcacatccagaggaggtgtgttacaatacagctcgttactaccgtgcatattatggtcacaaaacggatactcgtgctgtccttgttggtgttctgctgattctttcggtgtttcaatatttcaatcggttgacnaggtataatcaggctgtaaatatggtgaaaaaaaaccccacttacaaaaacataactgcgggctttggaatttgaccgcattgaagaacccccaattagaagaaatatttacgggccntttttctgaaaaaggggggagaatttccccattgaactgt

SEQ ID NO: 3912 - DNA, 1704 bp, Gossypium hirsutum
  Clone ID: GOSHI-09MAY01-C2171_2
gcaagtttttcttttctttggatgtggtgatgctaaatagttttcatttggattgctaggacttgggtgttttggagatttggagatgttaagacctaaactaacatgagccaggctgaagtattgaggatgaagccacctcttgttccgcttgcgaccttgattggtcgtgagctgagaaacgagaaagttgagaagcctttcgtgaagcacggacaagctgctttggccaaaaaaggagaagattactttctggtcccacccgtccgcccgcgcgtccccgggaatccagcatcgtcattttcagtgttcgcgatttttgatgggcataatggtatatcagctgccatttttgcaaaggagaacttattgagtaacgtcttgagtgcaataccgcaaggcatcagtagggaggagtggcttcaagcccttcctcgggctctggttgctggctttgtgaaaacggacattgaatttcagcagagaggggaaacttccgggacaacagtcacatttgttgtgattgatggatggactgtcactgttgcatccgtgggtgattctcggtgtatattagacacccaagggggcatagtttctctcctgactgtagatcataggctagaagagaatgcagaagaaagggagcgtgtcactgccagcgggggtgaagtaggaaggcttaatgttttcgggggcaacgaggttggtccacttcgttgctggcctggtgggttatgcctctctaggtcaatcggtgacacagatgttggagagtttattgtccccataccgcacgttaagcaagtgaagttgtcaaatgctggagggcgacttattattgcttcagatggtatttgggatgctttgtcttcagacatggctgccaagtcttgtcgggggttaccggcagaccttgcagcaaagctggttgttaaggaagctttgaggtcgaggggcctgaaggatgatacaacctgcctggttgttgatattatcccgtctgaccagccggtcctaccttcaacacctatgaagaagcagaatgcgcttagttcttttctttttgggaagcgatctcaaacttctacaaataaaactacgaataaactctctgctgttggagttgttgaagagctatttgaggagggttctgccatgctcgctgaaaggttgggtaaggattttcccatgaatacaaactcaggactcttcaaatgcgcggtctgtcaagtcgatcaacctccagctgagggtttaacagtgaactccgggccatttttctcacctgcttcaaagccatgggaaggacctttcctctgcaccaactgtcggaaaaagaaagacgctatggaaggaaaaaggtcaggcagacccacagtgctcgcataatatcatgttatgtaacaaagtaaatatgcaattgttttttttccgtggcagtgcgaatatgctttgtttcccattacctgatgagtgccatagttgcgcgtcagaatcaaggtagagataacgagttaggtgtttttgcggttactgttttcgagtttatgtttgcgctccgctgttttactgaccaacttggaacaaagaatggtatgtgatagatatttggtgtcatagtttgattgctaacagcttgaatttgtaattagaagtgaagattgcaagtaatatatgcatttcagctttcctttctgcatc

SEQ ID NO: 3913 - DNA, 833 bp, Gossypium hirsutum
  Clone ID: GOSHI-09MAY01-C2171_1
cccacgcgtacgcgttaagcaagtgaagttgttatatgctggaggtcgacttattattgctgcagatggtatttgggatgctttatcttcagacatggctgccaagtcttgtcggggattaccagcagaccttggagcaaagatggttgttaaggaagctttgaggtcgaggggcctaaaggatgatacaacctgtctggttgttgatattatcccgtctgaccaaccggtcctaccttcaactccaaggaagaagcagaatatgctcagttcaattcttttcaggaagaaatctctaaatttcacaaacaagactacaaataaactttctgccattggagttgttgaggagctctttgaagagggttctgctgtgcttgccgaaaggttgggtaaggatttccccacgaatgcaaactccgggattttccgatgtgcagtctgtcaagtagatcaacctccagctgagggtttaacaatgagctctgggccatttttctcacacagttcgaaccgctgggaaggaccgtttctctgcactaactgtcggaaaaagaaagatgccatggaaggaaaaaggccaaccaggcccacggtggtcgcataacatctaatttggtaacaaaagtaaatatggtgtgatattttttttctcttgctatggttttgcattacctgctgattgcaataattgtggctaagaatcaaggtaaaaataaagttagtgttgtttgccaattattgtttgagtttacgttggctgttttaccaaccaaactccgggcaaagatttatgctatccgataaagttagtgttgttttgccaattatta

SEQ ID NO: 3914 - DNA, 846 bp, Gossypium hirsutum
  Clone ID: GOSHI-09MAY01-C2121_1
actgtacaggagccaggacgtccgatgcgcgcacgcgtacgcccacgcgtccgagagctgccgtccccatatcgaaaggttaaatacagaaaaaaaaaaacccatagagccccctttcctttctttctctctctttcattagaaagaaaaccaaagatcatcaaaggagaagaggaggagaggagaggggcaaccttaaataccgtacctcagcaactctctccatcgcaaacaaatctctctttttcaatctaccatggcggataagggtcgcccattgccaaaatttggtgaatgggatgtcaatgacccatcatcagctgagggctttacagttatcttcaacaaggctcgaaatgagaaaaagacgggtggaaagattgagtcgccaggggccaatgaccctgcatgcaagcaagaggctgtcgctgcaaagccacaaaaaaaatggttatgctgcgtacaagctactcatgcagactaaagagatggctcttacgttgttaagagctaccaagagagtatattattatatatctacataaagcccttaccccctttcaaaacaatccagaagaccggagcccgtatcggaagctatgatgggtcatgatggaatcgttgttgtttgctacaaactccggctcggggatgagaaaataatgttgtttttatgtttatgtgatgctggtagcttgttattgcagtttttgaagccttgtccatatatatatattatgtcatgtgttgaacacttttggttatgtcatctctttgctttatggtagctttatgttatatgatattcgagctttatattatattatatgaaaccctttcaatttt

SEQ ID NO: 3915 - DNA, 889 bp, Gossypium hirsutum
  Clone ID: GOSHI-09MAY01-C2091_1
cccacgcgtccgcccacgcgtccgcccacgcgtccgaagaaatttcatgtacatttctttatttttctcagatttttctcactctctgcctcctttttctctccaatgttagttgaatcgatccaggaggaaaaaccattcttatcagggatggtggatggaagcaccaatttgccagtcaacctttcttgctttgagctgattaaaccaagcttggatgagaccaaccagcattgttctcttgatgtcttgcctattctactagaggaaacttcattttcagcaagagaaaaatgcagcttaaacacttcacaaggccaggatgtctatagcatttctgtcttgcctgaggaaggaaacatgaatccaaaatgcacaccacagttaacttttttgagcctcttagaagttccttttttatcaaaaaaccagatgtgcttggatgagcaattgagttgccagaactgcatcgatttgaaagtggatagtgaagatgcttattcatcgtgcattctggatataaacattgagaaagagactcccgacctactgaaatctaatgatgaaactgttggtaattcaaaaagtgaaggcgtggttacacatttgcagaaggtgttacagagacaagcaagcttaaacgtagaaagcagctgataacaatctcagcaaccagtgtggagctggaaaagaagaaagaaaatttctttgtcacacaatctggatggtgccattacctacaaaaaggtcattgatgcaaaagtttgatacattgacaggagagaaatcatcgaacgagagggttcatgatgcaccaagcaacagatggagaagatacaaaagagctgcatcatttgattcgaagaaaattgtcctccttttctcaatc

SEQ ID NO: 3916 - DNA, 360 bp, Gossypium hirsutum
  Clone ID: LIB3196-022-P1-M1-B3
tcgcccacgcgtccgcccacgcgtgcgcggacgcgtgggttccttttttatcaaaaaaccagatgtgcttggatgagcaattgagttgccagaactgcatcgatttgaaagtggatagtgaagatgcttattcatcgtgcattctggatataaacattgagaaagagactcccgacctactgaaatctaatgatgaaactgttggttattcaaaaagtgaaggcgtggttacacatttgcagaaggtgttacagagacaagcaagcttaaacagaaatcatcgaacgagagggttcatgatgcaccaagcaacagatggagaagatacaaaagagctgcatcatttgattcgaggaaaat

SEQ ID NO: 3917 - DNA, 822 bp, Gossypium hirsutum
  Clone ID: GOSHI-09MAY01-C2051_1
gatggcgatagcagtttgggtactaaacaaaaatggtgctcttctgtggccaatgaagataaagtcatagatccatttgtagaagttgagaaaaaagaagttctaggatcttcatctgtaccttctgttgaagttgatgttgacaataagaaaaatgtctctgaaggttcagaaagaagttcacagactcatcagaagtcaccagttgttggacattcccccaaaggaactgagaaagaagctttgcctcctggatttggtaaagatacagttttcgaaaatgttgatgaagtgaaggctgagaaggatgtcgagactacggcacctgctcatactggtgaatgcgaaactgtcagtgcccagaaaggcgagcttgtggagcagaagctagaagataatgagggtattgaaccatgtgctggaccatctccttgtgtatcacctactgtaagggataaagaacaacctatgaggccaagggggcctaatttgactggtgaagaggcagatgaagctgaagaagggacatcagctactagagatgctcctgttacaggtggtacagattcagatgcaaaagtagaatttgacttgaatgaaggctttaatgcagatgaggggaaatttggagatcctaataacttgacagcatcaggatgttcagctcctgttcaattaattagctccttgcctttccctgtttcttctgtgtctagcggcgtcccttctacaattactgttgctgctgctgctaaagggccttttgttcccccagataaccttctgcggcctaaaagggcacttggttggaaagggatcagc

SEQ ID NO: 3918 - DNA, 715 bp, Gossypium hirsutum
  Clone ID: GOSHI-09MAY01-C2071_1
ggctggaccgacccgtgcgtatattgactcccgtttttagcccaatgcaaagcttgtgatccctcttttccggaggtttgtcctacgaatgatcggtctgggaacttcaagcagttcaactgtccggatggctactacaatgatctagctaccgcttctcttaacaacgaatgacgatgccgttcgaaacattttctcgagcaacactccttctgaattccaatatacctcaatcttgatctttttcgcactttattgtatcttgggactcattactttcggcattgcagttccttcgggtctcttcctccctatcatcctaatgggctcgggttacggtcgacttcttagtatgcttttaggatcatatacgaacttagatcaagggctttatgctgtcctcggtgcagcctctttgatggctggctcgatgagaatgaccgtatcggtttgtgtgatcttccttgagcttacaaataaccttcttttgttaccgataacaatgatagtccttctcattgcgaaaaccgtcggtgacaggtttaatcctagcatctacgaggttatacttgaacttaaaggtctttctttcttggatgcaaatcctgaaccgtggatgagaaatctcaccgttggtgaactcgcaaatgccaagtcacctgcggtcactctttccggggtcgaaaaagtctttcggatcgttgatgtactgaaa

SEQ ID NO: 3919 - DNA, 674 bp, Gossypium hirsutum
  Clone ID: GOSHI-09MAY01-C2061_1
tattaatacaacagaaaaaggagagttctgctagggtttcaaccttaacccctttgaacgccgccaacgaccaggccgatcttcgcccgatctccgattgcgacggagtgggcaaagccaggtatgctgctcctcctttaaccccttttcttatatatacatctatataccatagcataatagaagaacagagaaagtaaagcaaagaataattagacggaaaagaagaaggagtcaccttcgttcgatttttatttctttgtggactttcgatacagtatgcgttgtgtcataaaaagaggttcctttttacaaatcttagatcgcttttatagccggaaatacaaaagaaatccctctatttttttttttgttatcctctggcctttttctgcgttttgctgctgtttttttgtgcatggttgctgcttgcgctctttgtgtgttgcaggtgtacggaggtcgtacggtgacgtggcgcggctcgacgcagcgcatggagacgtggcacgtagcggtgatgcacgtgcgaaggcctggatcccattgctgcggtgcctgtgatttctgaatctgtttagggtttctgtaaaaatctgggctggttttggctattgggctggaatcgggtgtgttgggcttaggatcaggtttaggtttgggtttaaaaagag

SEQ ID NO: 3920 - DNA, 688 bp, Gossypium hirsutum
  Clone ID: GOSHI-09MAY01-C2001_5
agttagaaggggtggtcgaaagaggcctgttcccaaaggtattgtctatggtaagcccacaaaccagggtgttacccaattgaagttccagcgcagcaagcggtctgttgcagaggagcgagctggtcgaaaattaggaggtctcagagttgttaactcatactggatcaacgaggattctacttacaagtactttgaggttatccttgttgatgttgcacacaatgcgatccgcaacgacccgagaattaactggatctgcaatcccgttcacaagcacagggaacttcgaggactcacatctgcaggtaagaaaaacaggggtctgcatgggaagggtcacttgcaccacaagaatcggccgtctcgaagggctacctggaagagaaacaacaccctttcccttcgtcgttaccgttgagtttagtaggttactttcagacgtattaattgcttctatctttgtgggattttggcattccttttactgagtctgaaatttttgcaagtttatttctgtttgagtttttattcaatttcgatgaaaagaaatgtcgagtctatttcagtctgaaatatggttccagattctctaataacttgggggaaaaacggtttttatttttcaagtgaagctaacttgggggccttttacaaccaaaattaatacgtagtaggctaagtattt

SEQ ID NO: 3921 - DNA, 638 bp, Gossypium hirsutum
  Clone ID: GOSHI-09MAY01-C2001_4
aaaccagggtgtcactcagctgaaatttcagcgcagcaagcgatcagttgcagaggaacgagctggtcgaaagcttggaggccttagggttgtaaactcatattggatcaacgaggattcaacatacaaatacttcgaggtcatcttggttgatactgcccacaatgctatccgcaatgacccccgaatcaactggatctgtaatccagtgcacaagcacagggaactccgcggactcacctctgctggaaagaaatataggggtcttcgtggcaagggacacttgcaccacaaggctcgaccttcaagaagggcaaactggaagagaaacaacactctctctcttcgccgctaccgttaattcccatggattatatttgctgtttttgtttcatctacttaccatcatttcttttgtaagggtgagaattttgagacgattatatatttatatgtttagtagacctcttgaaatactctacgatgaggttattgaaaagttagtgtaatgctttgagactgacttgtcatattctgcgtttgctggtcaaacttgaacttgtaggcaacttagggtgtcgttttttgtgcctttgacagctatatgaataagatacttttcttttataccccttttc

SEQ ID NO: 3922 - DNA, 621 bp, Gossypium hirsutum
  Clone ID: GOSHI-09MAY01-C2001_3
gggtattgtatatggaaagcccacaaaccagggtgttacccagctgaaattccaacgtagcaaacgatcagttgcagaggaacgagctggccggaagcttggtggtcttagggtcgtgaactcttattggatcaatgaggattcaacttacaaatactttgaagtcatcttagtcgatcctgcccacaacgctatccgcaatgacccaagaatcaactggatctgcaatccggttcacaagcacagggaactccgaggactgacctctgctggcaagaaatacaggggtcttcgtggcaaggggcacttgcaccacaaggctcgaccttcaaggagggcaacctggaagagaaacaacacactctcccttcgccgctaccgttgatcccctggaccgtacttggtgattttgttcctgctatcttggcttcattactattgtagggtttataagaattttgagacagttatattgtgtgtgggacatcttgaaaatcttctatgttagaggctattgagatttatgtgctcactgaaaatgtccaatgctattgtcatattgaggttgtgttgtttgagtattttttattaaatactagaaatgggattttagattttacc

SEQ ID NO: 3923 - DNA, 749 bp, Gossypium hirsutum
  Clone ID: GOSHI-09MAY01-C2001_2
gcacgccgcttgggttataaggccaaacaaggttatgtggtttaccgtgtccgtgttaggaggggtggtcgcaagaggcctgttcccaagggtatcgtgtatggtaagcccacaaaccagggtgtcacccaattgaagttccagcgcagcaaacggtctgttgctgaggagcgtgctggccgaaagttgggaggtctcagagttgttaactcgtactggatcaatgaggattctacttacaagtactttgaggttatcctggtggatgttgcacacaatgctatccgcaatgacccaagaattaactggatctgcaatccggttcacaagcacagggaacttcgaggacttacatctgctggtaagaaaaacaggggtctccatggaaagggtcatttgcaccacaagaaccgtccttctcgcagggcaacctggaagagaaacaacactctctcccttcgccgctaccgctgagttactgtgttccttagactttttatcctagttgattttagaagtcattgttttgagtttgaaatttttggaagttttaaaaaactgactctttgaatttacatgcaatttatttttgttttggatgctatgaatttctgaagttattgctacgtgcttttcagaataactacttgcacatcatttgtctatcatgggctcgttgttatcctaaccaaccggagatcaaccggacaaagaaaaaaaaaaaaaataaaaaaaaatgtttaacaggg

SEQ ID NO: 3924 - DNA, 792 bp, Gossypium hirsutum
  Clone ID: GOSHI-09MAY01-C2001_1
gtttgactctttgccctcgcctcctcccggccgctccttgtaaaagcgaaaccctagccactctctgctcaactcgccatgggggcttacaagtacgtgtcggagctatggaggaagaagcaatcggatgtgatgaggtttttacagagggtgaggtgctgggaataccgccagcatccttccattgttagggtcaaccaccctactcgccctgacaaggctcgccgcttgggttacaaggccaagcagggttatgtggtttatcgtgtccgtgttaggaggggtggtcggaagaggcctgttcctaagggtattgtgtatggtaagcccacaaaccagggtgtcacccaactgaaattccagcgcagcaagcggtcagttgcagaggagcgagctggccgaaagcttggaggtctcagagttgttaactcgtactggatcaatgaggattctacttacaaatactttgaggtcatcttggtggatgctgcacacaatgctatccgcaatgacccaagaatcaactggatctgcaatccggttcacaagcacagggaacttcgaggactcacctctgctggtaagaaatacaggggtcttcgtggcaagggtcacttgcaccacaaggctcgaccttctcgcagggcaacctggaagagaaacaacacactctcccttcgccgctaccgctgaggtactgtgtgcaactttttatcccctggaccgtacttggtgtttttgtactgctatctttgcttcattactattgtagggtttataagaattttgaga

SEQ ID NO: 3925 - DNA, 500 bp, Gossypium hirsutum
  Clone ID: uC-gsronu33B012c12b1
accacgcgttcgattttagatcacagcaagtggggtgtggcaggagaatgagtcagaatacctttaggaggttttatagttgaaaagttattctggatcaacgaggatattgatgactgtactttgaggttatccttgttgatgttgcacacaatgggatccgcaacgacccgagaattaactggatctgcaatcccgttcacaagcacagggaacttggaggactcacatctgcaggtaagaaaaacaggggtctgcatggaaagggtcacttgcaccacaagaatcggccgtctcgaagggctacctggaagagaaacaacaccctttcccttcgtcgttaccgttgagtttagtaggatactttcagacgtattaattgcttctatctttgtgggattttggaattccttttactgagtctgaaatttttgcaagttatttgtgtttgagttttatttaatttcgatgaaaagaaaagtcgagtctatttcagtctg

SEQ ID NO: 3926 - DNA, 600 bp, Gossypium hirsutum
  unsure (1)..(600): unsure at all n locations
  Clone ID: LIB3828-003-Q1-K6-G10
cggncgcgtggggaggcctgttcccaaggtattgtctatggtaagcccacaaaccaaggtgttacccatnnnnnnnnnnnnnnnnnnnnnnnnnnnnnnnnnnnnnnnnnnnnnnnnnnnnnnnnnnnnnnnnnnnnnnnnnnnnnnnnnnnnnnnnnnnnnnnnnnnnnnnnnnnnnnnnnnnnnnnnnnnnnnnnnnnnnnnnnnnnnnnnnnnnnnggnnnnnnnnnnnnnaattggaaggttccagcgcagcaannncggtctgttgcagnnaggagcgagctggnntcgaaaattaggnagggtctcagnatgttgttaactttcatactggnnatcaacgaggnnattctacnnttacaagtactttgnaggggttatccnnttgttgatnngttgcacacannatgcaatccnngcaacgacccgnagnaattttaactggnnatctgcnannatcccgtnntcacaagnncacagggnnnaacttcgnagggactttcacattctgcnnnaggtaagnaaaaaacnnaggggtctnngcattgggaaagggggtcanncttgcnnnaccacaagnaatatcggccatttctc

SEQ ID NO: 3927 - DNA, 274 bp, Gossypium hirsutum
  unsure (1)..(274): unsure at all n locations
  Clone ID: LIB3829-030-Q6-K6-D4
aggtttataagnagtcccacacacaatataactgtctcaaaattcttataaaccctacaatagtaatgaagccaagatagcaggaacaaaatcaccaagtacggtccaggggatcaacggtagcggtgaagggagagtgtgttgtttgtatgttggcttgattactattgtagggtttatgggaattttgagacagttattttgtgtgtgggacattttatagatttttggacgcgtggttggtactgggatttttggaccggtacttgctggc

SEQ ID NO: 3928 - DNA, 224 bp, Gossypium hirsutum
  unsure (1)..(224): unsure at all n locations
  Clone ID: LIB3493-030-P1-M1-C8
ctccttctaaacccaaatcagacaccttcagatttcaatctgccatgggggcttacaagtacgtgtcagagctatggaggaagaagcaatccgatgtgatgaggttcttgcagagggtgaggtgctgggagtaccgttagcacccttncatcgtgcgagttaaccacccaactcgccccgacaaggctcgtcgattggggttcaaagccaagccaggttatgtc

SEQ ID NO: 3929 - DNA, 917 bp, Gossypium hirsutum
  Clone ID: GOSHI-09MAY01-C2031_1
tataattttttcattgagaaaggtcgacctgtcttgcaggggcttcacgctattgatttcttagcaaaagaggtgcttggttgggctcaagcaatgcctaaatttgcagctgaacttgtgaagtttgtgcaaactttccttgaacgaacctttgaaagatgtcgaacttcatacatggaggcagttcttgagaagcagagttatatggtcgttggaaggcatgatacggacgcgtgggtgcgacgtgatccagctagtgcatgcttaccgaatgcacttggtcagtcaaatatgggaaatattgtttctgatatggaaagtatggagattgaatcagaactaaatgaactcctcttaaatttgcgtcctattaggcaggataatctaatccgtgatgaccataaacttgttttgctggcatccctgagtgattcattggagtttgttgcagactccatcgaaagacttgtacagtcgaccccactagcagcactaaacaatgtggagactagcaataaacaaacaagcagttcaccagctagggatctggcatcatttgcagatgagtacagaaaactagctattgattgcttgaaagttttacgggtggagatgcagctggagacaattttccacttgcaggaaatgacatctagggaatacctggacaaccaggatgcggaagagcctgatgactttgttatttcacttactgcacagataacacgcagggatgaggaaatagctccttttgttgctggagtgaagcgtaattatatttttggtggaatatgtagcattgctgcaaatgcatcacttaaggctttggctgacatgaaatcgatcaatttgtttggagttcagcagatatgtcggaattcaattgctctgggacaagcccttgcagctatcccttc

SEQ ID NO: 3930 - DNA, 915 bp, Gossypium hirsutum
  Clone ID: GOSHI-09MAY01-C2351_2
ccaaattaaaagctttaaccaacaaaaaaaaaattgaagcgggcacactccaacaatggctaccgaaacagtagagtctttgcctcctacattggaagctaatgctgagcaacctccattgtttgatggaactaccaggttgtatacttcttatccttgcccttttgcacaacgtgtgtggatcaccaggaattataagggattgcaagatgagattaaacttgttcctttgaaccttcaaaatagacctgcttggtacaaggaaaaagtttaccctgtaaacaaggtgccatccttggaacataatggcaaaatcattggggagagtcttgatctgattaaatatgttgatagcaactttgaaggaccttctcttgtacctgatgatcctgtcaagaaaaggaccactttaagacgttgttatctcacatggactaatttccagggatggtgcatgcctcattttaaaggagccttatttaaggatgctgttgctttcttttgatcttttgtaaactgctcttgcctatttattgtttgtcctttttctttattcatcttgttatctctgttttgatattgcttttttcccttattctctgattcctgatattttttctttttctattttttttttctctatttttttctttatcttatttttttttttactttatctttttatttagtcttttttattttttttttaccattcttacccttttttctttattattttcatttttttttctttactccacatcctatttttttttttttctgtttttattcctcctcttcttatttctctttaattcctttttctatttatctttctcttcttttatcaacttttctttctcttattatttttatttcttccttttttatttttttcctttcctcttctttttt

SEQ ID NO: 3931 - DNA, 989 bp, Gossypium hirsutum
  Clone ID: GOSHI-09MAY01-C2351_1
cggacgcgtgggcggacgcgtgggttgttaagcaaaactaataaacatcaacaataaatcggaattccccagcagcaatggctactccaagtgtagagtatttgcctcctccattggatgctactgcacagcaacccgctatctttgatggaacaatcaggttgtatctggcttatccttgcccttacgcacagcgcgtgtggatcgccaggaattgtaagggtttgcaagacaagattaagttggttcctttgaaccttcaaaatagacctgcttggtacaaggaaaaagtttaccctgaaaacaaggtgccgtccttggaacataatggcaaagtcattggggagagtcttgatttgattaaatatgttgatagcaacttcgaagggccgtctcttctacctgatgatgctgacaaaaaggagtactttgagacgacgttatcacacatggacgaatttctagggctggtgtatgctacatttaaaggagactcaacaaaggatgctgatgctgcttttgatcacttggaaactgctcttgcaaaatatgatggtccattcctcctaggcaacgagtttactctggcggacattgccttcattccttttgtcgaaaggttccagatctacttatcagaggtgtttaattatgacctcacagcaggcaggcctaaagtggccgcatggattgaggcggcggacaagatcgatgcctataagcagacaaagaaaactgatccaaaagaattagtggaaatttataagaggatattctcaccccagaagtgaagatgaaattggcaccatgtatgtatgtgaaagagaataaggtctgcttggatcagtgattaccagctatttgagttaatttgaagaatctgatgtgatcgtgttgaatttagtaacagttgtactaactcaagtgcgttgctcatgagtcatgtataatataatttatatcaaaagaataatatacaatttgattat

SEQ ID NO: 3932 - DNA, 651 bp, Gossypium hirsutum
  Clone ID: AI054956.1
aggggagagtctgattgatttaaattggtggataccaactccgaaaggccgtctcttctacctgatgtaaagatctgtggaaatttttctactgatctctctctttatctgtattaactaagtagtaatcttctggaaatgtgttaggatgctgacaaaaaggagtactttgagacgacgttatcacacatggacgaatttctagggctggtgtatgctacatttaaaggagactcaacaaaggatgctggttagtctgaaacatgcttctgatttaccctgtatcctgtatttgtataaaatatgatttgaactaaaaacttcggacttgcatcagatgctgcttttgatcacttggaaactgctcttgcaaaatatgatggtccattccttctatgcaacgagtttactctggtaagttgtcttcgccgtgaaactaaagtttatagttcctttattcattaattactatggtggtttaatatatgtggtttgaggttttgtgctaatattttttattattttttcatttatatgcggacattgcctttattcctttagttataggtttccaatttactattaaattgttctttttgacctacgtcagtagtcttaagtgacttatgtttgtttattatttaattgttc

SEQ ID NO: 3933 - DNA, 449 bp, Gossypium hirsutum
  Clone ID: uC-gsflnu33B145a11b1
taaagtttgatgctcctgcgcgtgccggtcccgaatcgcaggatcgacccagacctacgcttacgcttacaagcgcaatatcccagaatgcatggctgctacaagtgtcaaggcttcagcctcctccattggatgctacagcagagcaacctgctatctttgatggaacaataaggatgtatctggctaattcttgaccttacgcacagcgcgtgtggatcgccagcaattgtaagggtatgcaagacaaggaaaaaaaggttcctttgaaccatgcaaatatcactgtattggtgcaaggaaaaagtcaaccctgaacacactgagccgcccttggaacataatggggacttatcatactgagtctagatcagattcaataagtatgccgataactaagggagtcagctcttctaactaatgattgtctcgaaaatgacaatatagca

SEQ ID NO: 3934 - DNA, 382 bp, Gossypium hirsutum
  Clone ID: AA659959.1
gcacgagcagcaggcaggcctaaagtggcacatggagttgaggcggaggacaagatcgatgcctatgaagcatacaaagaaaagtgatccaaaagaaatagtggaaatttataagaggatattctcagccagaagtgaagatgaaattgacagttggcaccatgtatgtgaaagagaataagggtctgcttggatcagtgattaccagctatttgagttaatttgaagagtctgatgtgatcgtgttgaatttagtataattaaacatgagtcatgtataatataatttggtataatttagtaccactcacctgcgttgcccatgactcatgtataatataatttatatcaaagaataatatacatttgattctaatgagag

SEQ ID NO: 3935 - DNA, 217 bp, Gossypium hirsutum
  Clone ID: uC-gsronu33B156f09b1
cccatgcgtccggtctgcttggatcagtgattaccagctatttgagttaatttgaagagtctgatgtgatcgtgttgaatttagtataattaatcatgtttaatgtcttataataattctttcttatttaattctaatctattttttctttacattgattcattttttttttttattttttctttatgttttattattttatcatttattcttatat

SEQ ID NO: 3936 - DNA, 664 bp, Gossypium hirsutum
  Clone ID: GOSHI-09MAY01-C2341_3
acgaccacgcgtccgctacgaccggtcctttgatcgaatcacaccgaagaacgaaaggagactcgaacggttcaagaaccgtaacttctttaaagtcaccaccaccgacgacccagtgatacgccgattggctaatgaggataaggcgacggttttcgcgacggacacgatcctttcaaccttaatgtgtgcacccaggtcagtatattcatgggatattgtgattcagcgtgttgggaacaaattattttgcgataatagagatgggtctcaattagatttgttatctgtccatgagacatctcaagaaccattgcctgaagctaaagatgatattaactctgcttattcattgagtgttgaagctgcatatataaatcagaatttttcacagcaagttttagttagggatgggaataaggttagtttcgatgagccgaatccgtttgccaatgaaggcgatgaagtggcttcagttgcttataggtatagaaggtggaaactcgataacgacatgcatttagttgctcggtgtgaggttcagagtgttgtcgatgttaataaccagaagtcgttccttactttgaatgcactcaacgagtttgatcctaaatactccggtgtcgattggagacagaagttggagacccaaaggggtgcttgt

SEQ ID NO: 3937 - DNA, 1140 bp, Gossypium hirsutum
  Clone ID: GOSHI-09MAY01-C2341_1
gatttatctagagatccgtcgacaatggtaggaggggtcgaagtaggcgccgttccgtttaatcctgacggctggggtccgcccgactccaccaccgccaccgcgccgtccaccaccaccactctccctcttcacgttcctttcgctcccttctcccgctctgaaaaactcggccgaatcgccgacttcacccgatcttttgcaaatgccaatccatctaaccgcccttcttcagggaagcctggcgcagcctcctcagagtcccccttcgatttctcgctcgacctcgatactttccctcttgcaaaccccgaagacgattcttcctttcgtttagtcgacgcaaagccgcctactcgacctaaatttggccccaagtggcgcttcaaccaacaccgacctcaacttcctcaacggcgagatgaagaagttgaggcccggaaaagagaagccgagaaagagcgagcccgtcgcgaccgtctttataatctcaaccggtccaaccagaaccagcaacgtcgtgaagctgccatcttcaaatcctccgttgatatccaaccggaatggaacatgctcgaacaaattcccttctcaacattcaccaaattatccttctccgtctccgaccccgaagatttacttctctgtggtgctttggagtattacgatcggtcctttgatcgaatcaccccgaagaacgaacggagactcgagaggttcaagaacagaaacttctttaaagtcaccacgaccgacgacccggtcatccgaagattggccaatgaggacaaagcaactgtttttgcgactgatacgattctggcaactttaatgtgtgcccccaggtccgtttattcctgggatatcgttggttctacgttgttgggaataaactgttcttcgacaaaagagatgggtcgcagttagatttgctgtccgtccacgagacctctcaggagccattgcctgaagctttagatgatattatccctgcttattcactgagtggtgaagcggcttacttaaatcagaatttttcacagcaggttctggtttaggatgtgatatgtgagttgatgacgcatatccgtcgcaatgaagggataagtagctctgtgcatataggttgaaggtgaagct

SEQ ID NO: 3938 - DNA, 667 bp, Gossypium hirsutum
  unsure (1)..(667): unsure at all n locations
  Clone ID: AI055695.1
cccgactccaccaccgccaccgcgccgtccaccaccaccactctccctcttcacgttcctttcgctcccttctcccgctctgaaaaactcggccgaatcgccgacttcacccgatcttttgcanatgccaatccatctaacccgcccttcttcagggagcccgggcggcagccttctcaaaagcccccttcgaattcttggttcgacttcatactcttccttttggcaaccccgaagaccaatcttcccttcggttaatcgacgccaagccggctacttgaactaaatttggccccaaatggggctttaaccaacaccgagctcaactttctcaacggcgagatgaagaagttgaggcccgtaaaagagaagctgaaaaagaacgagcccgacgtgaccgtctttataatctcaaccgatcgaaccagaaccagcaacgtcgtgaagctgcgattatcaaatccttcggcgatatccaaccagagtggaacatgctggatcaaaccctttttaacatcttcaaatatccttttcgtccagaactgagattactcttgcgtgcttataaatacaacggcctttgatcgataccccagaacgaacggactggaggtcagacagaactttaaggacccactagaccgcgatcacatggcagagcaacact

SEQ ID NO: 3939 - DNA, 888 bp, Gossypium hirsutum
  Clone ID: GOSHI-09MAY01-C2371_1
cccagcgtccgatcccgactactctgggccagcttaaaaactccgtttcttgcgtctcaacaacaactcattggcaggaacaattcctaggtccttaactactattgacacactgcaagtgctggatctttcaaacaatggcctagtaggagatgttccagttaatggttcctttggactattcactcctatcagttttgccaataataaactcaataatcctccacctgctccaccacctcctatcccacctacacctccagctcaatcaggtattagttccactggtgctattgctggaggggttgctgctggtgctgccctgctgtttgctgcccctgcaattgtgcttgctttgtggcgaaaaaggaaggcaccggatcatttctttgatgtacctgctgaggaggacccagaagttcatttggggcaacttaaaaggttttccttgcgtgaactgcaagtggcaacggataattttagcaacaaaaacatcctgggtagaggaggttttggtaaagtttataaaggtcgcttagctgatggttctctagtggcagtaaaaagactgaaagaggagcgtactcaaggtggagagctgcagttccaaacagaagtagaaatgataagcatggctgtccataggaatctactacgtcttcgtggattttgcatgacccctacagaacggctgctagtctacccctttatggttaatggtagtgttgcatcttgtttaagagagcgttcggagtctcaaccagcacttgattgggctataaggaaacggattgcactcggagctgcaagggggcttgcatatttgcatgatcattgtgaccctaagattatccaccgtgatgtgaaggctgcaaacatattgttgga

SEQ ID NO: 3940 - DNA, 803 bp, Gossypium hirsutum
  Clone ID: GOSHI-09MAY01-C2361_1
ttctgtctctactcgaatgctttatgctcttgcaaagcaaccttttacccccaaaagatatttctctatagatcgtgtgttcagaaatgaatctgtggaccgaactcatcttgcagagttccatcagattgaaggcttggtatgtgacaaggggcttactcttggtgatttgattggtgtcctgaatgacttcttctcacgactaggaatgtccaagttgcgtttcaagcctgcttacaacccatatactgaacctagcatggagatattcagttaccatgaaggcttgaagaaatgggtggaaatcggaaattctggcatgttcagacctgaaatgttgcttccgatgggattccctgaggatgttcgtgttattgcttggggactttctctcgaaagaccaactatgatactctacggagtcgataacatccgggatctattcggacacaaggtggatcttagcctcatgaaacgaaaccccatctgtcgtctcggaattgattagattattggtatgtgggataattcccttatcattccattcttctcttttgggaattgaaccaaggatacaccatcaattcacattgcacatggtagttttatagcatcatatacaacggagcaatggttgtatttaacatttttggtttcagtttttctgctttggaagtgactgatcataactttgcacattttgtattttatgtttttaaaaaacatgtccatgatttggtctaaatttaggcatttactgtaccattttgttaagatatatgttaattgaagctgtttgagat

SEQ ID NO: 3941 - DNA, 1339 bp, Gossypium hirsutum
  Clone ID: GOSHI-09MAY01-C2311_1
acgcggacgcgtgggttcaggtcggcggattcctcctaacgcgacctccctctctgcctgtctgttattcaaatctccgaccaagtgagatttcaaggaactgcagcttagcgagctgcggtctaaacccaattttgtaagaaaaagactttaaaaaaaaagatggcattggtggtaatttgtgggcagccgtgcagtgggaagtcgacagctgcgaaatgtctagctgaagctctgaatgaatcagagtgcaaacagactgtaaggatcatcgatgagacttcatttcatcttgatcgtaatcagagctatgctaatatgccatcagagaagaatttacggggagtgcttaggtccgaagttgataggtctgtctccaaagataatatcattatagttgattctttgaacagtatcaagggttatcgatacgagttgtggtgtttggctcgtgctgctgggataaggtactgtgtgttgtactgtgatgttagagaatcgcaatgtaggaaatggaatgaagagcgtcgggagaagggagaggctgcatataatgatgtgatatttgaggatttagttagaagatttgagaaaccggatagaagaaatcgttgggattcacctttgttcgagctatgggctcataatgatggagtggagagatcttctattgccattgtagatgtggtttcgtatttgacaaaaaaagcagactcgaaatctcgggatgttaagattttgcagccaaccattgccacacaaaatacccggttttcagaggcaaattcactgtatgagatggacagagccacgcaggaggtgattaatgctattgtggaagcacaatcccagtcaattggaggacctcttgccagtatctccattggtcaaggtttaccgaatatcgatatttctagatcggttgggttgccggagctacggagattgcggagaacattcatcaagttaacaggacaaacaagtttgagtggacgacctcccccttccgattccagcagtgcaaagaggatgtttgtagactatctgaatcgagaacttggaactattgcttgaaagagggtaatactactaatacttacctagttttataccttgaacagtgttgtcaaaggtcactactttattttttacttttactttctccaaagatccattttagattgtctcataattatctttagactccgcattgagagtcattaacagaacagtttacatttgccggacatgttatattgatgcgtatgatgcatgattaacggacagcatcaatcatatctaatcatcaatgtcatttgcatctgtgattgaagggttc

SEQ ID NO: 3942 - DNA, 998 bp, Gossypium hirsutum
  Clone ID: GOSHI-09MAY01-C2251_1
cccacgcgtccgaaaagggcaaatgtaaggttctctggacttgctgcctttttagtgtctgagccattgtcaagtgtttacgcttctaatggtcttcattgggcgcggggacttcctgcaaatagaagtggaatatgcaagttttatggggatagggggtccattccgctgttttatgtggatttttctgcagttccctatagttttatgtatatgcattgcggaatgctgctttgttcaaggcgtatgcaattagttcttgtaaatactgatgaaatatttagtgcatgtgaagaagacaagccatgtctaacctctgttgtagatttttccaagcgtttgagtggttctaatgtagttaaggttgataatttcgggagcaaaggcgtttcagatcgcgcttccaaactaaaagaaataggtcgaaatggtcactataaacatggtctttcttgcattatccagaggaggaggagtttgatgcggagaaggagagctagaagtccttggcttctcggcatacataagggtgcagattcatcacagtgctctgccaatatattagtcactgaaccggacagatgttacagggaagaaggagccattgtcgctttggagctctctgcttctcgagaatggcttcttgttgtaggaaaagatgggtcaactaagtatacatacaaggcagatagagctatcaggcccagttcttgcaaccggttcactcatgcaataatttggacaggtgatgataattggaagcttgagtttgtgaatcagcaggactgggtcattttcaaggatctttacaaggaatgttctgagcgaaatgcaccttcttcaactgccaagatgatccctgtgccaggggtttgtgaagtttcagggtacgaggatagagcctttgtaccatttaaaagaccagatttctatatcactttagatggggatgaggtatctagagcctggcaaagaggaccgcaattatgacatggaca

SEQ ID NO: 3943 - DNA, 352 bp, Gossypium hirsutum
  Clone ID: GOSHI-09MAY01-C2271_1
catgcttgccattactaatcccccagcccaaacctttcagaagtaatcccttggccgcccaaatactctgcaggtaaaggaaggggcattcgaacatcaagctgaacacgtatacgcatatagttcatattaccaattgccaggggtttcgtatcatactccagaaatcttccaataaagttaccatagccagccatggaatctctaaagagacctgggggcaaatcatgaatctgaatccaccagttagaatacaccaaaggaacagacattgtatcttcattttccccattcctatgtaaaatcaagagatgattattaaaggaccaaggagcaccattgataacccttg

SEQ ID NO: 3944 - DNA, 687 bp, Gossypium hirsutum
  Clone ID: GOSHI-09MAY01-C3961_1
cccacgcgtccgcccacgcgtccgctcggattaccagtctgggttgagagcactggtaaaaactggccccggagcgggggtgactccttatgtggatgactcaatcgttattgatttcaacccagccaaagaagcgttgtctccagaatttgtcaggtggttgagagaaaggaacctttccagtgatgaccgtgtgatgcgaatgaaagaagggtatatcaaggaaggaagcacggctagtgtaatgggagttgatcacagaaatgacaatgtgcttatgattgttgcttcgcctgagccaattacaactggatgccagtgggccaaatgtatcttaccagcaagtctcgagggtattgtattgagatgtgaagacacatcgaatactgatgccataactgtttagtagtatgtgcatcgtaagctcttttcataaacacaaatttattctattttttcccctttctattaaatatctggcgatgatggtggctgtggtaaggtcgactgatgagcatgagcccctctggtcgttattatcctttttaactgtgtatagcttttccgaggttttgttgtcaaccttttatcttgtaggtttgaagggtgtttttgctttagggtcgggttcatgcagcttacgtgttttgcgaaggattcgggatgatgttactaagaattaaaaac

SEQ ID NO: 3945 - DNA, 525 bp, Gossypium hirsutum
  Clone ID: GOSHI-09MAY01-C3901_2
cccacgcgtccgatccaaactcaccgctacaatcttaccactatcaccgctccaaacagaccggcccctttattttggataccggtggcaggtgaaagtggcgatttgcgagatttgcgaaggcaaaataatgaatctttattcttaattgaatcaagagattccaacttgaaatttaagaaatggaaaagtggtcaaaacggctcgttttcatgtttttttgcttatcagtttgtatccaaatcccatatgtttcttcgtctactgccccccttcaaggaaatcagggtaacaaagaatcttcagctgcaagaacctttaagctagaggatgctcatgtagtacgttgttcaagagaaaggagtagagcagcatggaaagtaattgaagagtatctaatgccgtttgtggagcaagagcgatacaagatttcaagtggatgtaggcttcaccctgacaatgatttgtatagagatcaggaacagcacaagcaccatgtagatataaacgaatggcgatgtgggt

SEQ ID NO: 3946 - DNA, 1066 bp, Gossypium hirsutum
  Clone ID: GOSHI-09MAY01-C3901_1
ccacgcgtgcgccacgcgtgcgccacgcgtccgccacgcgtccgaaactcaccgctacaatcgtacgatatcaccgctccaaacagaccggcccctttattttggataccggtggcaggtgaaagtggcgatttgcgagatttgcgaaggcaagtcgacccagcgtccgaattatgaatctttattcttaattgaatcaagagattccaacttgaaatttaagaaatggaaaagtggtcaaaacggctcgttttcttgtttttttgcttatcagtttgtatccgaatcccatatgtttcttcgtctactgccccccttcaaggaaatcagggtaacaaaaaatcttcagctgcaagaacctttaagctagaggaggatgttcatgtagtacgttgttcaagagaaaggagtagagcagcatggaaagtaattgaagagtatctaatgccgtttgtggagcaagagcgatacaagatttcaagtggatgtaggcttcaccctgacaatgatttgtatagagatcaggaacagcacaagcaccatctagatataaacgaatggcgatgtgggtactgtagaaagaacttctatgaagagaagtacctggataagcattttgacaacagacattttgatttgctgaatacgagtcatagtaggtgtctggctgacctgtgtggtgcattgcattgtgaccttgtcatggattcttcactccgcaagactaagtgcaatcctgctgctgctgcaaggaatgaacatctttgtgagagtcttgctgatagttggtttccggttagcaaaggtcctgtaacaggccgtcttcatgaattcttcttgccgcaattctgggatgcccacacttgcagcggaggtccaaaaccctttcctaaagggcaaaagaagcgaacaaggtttccttacatttctctatccattttgactttggtgcttctggccgttttctacttcttcatttacttggaccaaaaggggattaaaagtgggtcacaagaagctaaacgaatctcactaaatggtcgtaagaaaaaaatcgtttaaacat

SEQ ID NO: 3947 - DNA, 513 bp, Gossypium hirsutum
  Clone ID: LIB3585-029-P1-K1-D12
cccacgcgtccgcccacgcgtccgcggacgcgtgggttgaaatttaagaaatggaaaagtggtcaaaatgggtcgttttcttgtttttttgcttatcagtttgtatccgaatcccatatgtttcttcgtctactgcccctcttcaaggaaatcagggtaacaaaaaatcttcagctgcaagaacctttaagctagaggaggatgttcatgtagtacgttgttcaagagaaaggagtagagcagcatggaaagtaattgaagagtatctaatgccgtttgtggagcaagagcgatacaagatttcaagtggatgtaggcttcaccctgacaatgatttgtatagagatcaggaacagcacaagcatcatctagatataaacgaatggcgatgtgggtactgtagaaagaacttctatgaagagaagtacctggataagcattttgacaacagacattttgatttgctgaatacgagtcatagtaggtgtctggctgacctgtgtggtgcattgc

SEQ ID NO: 3948 - DNA, 793 bp, Gossypium hirsutum
  Clone ID: GOSHI-09MAY01-C3931_1
acccactcgtcccaagaaaaaacaaaaaaaaaaaacgaaaaagaaaaaaagaaaaggaggagacacgaacccagaattaaagaaaaactacagcaaagaaaggttctgtgtctcctgttattgcggttcgaagagaggatagcaatggaatacgagagtaacaattggatttgggacggggtgtattactgcccacgtctctttggtggcctaatgctaacggctgccttgcttggtttgtctaccacttatttcggtggaattggactgttcccattgtcatatgtttggtcagattcagggatcttccacaagaagaagtgtgagaagaagcgcattcgagtttacatggatgggtgctttgatctcatgcattatggccatgccaatgcgttgaggcaagctaaggctttgggagatgaattggtggttggggttgtaagtgatgaggagattattgccaataaaggtcctcctgttctgcctatggaagagaggctggcacttgttagtggattaaagtgggtggatcaagtaatagcaaatgccccctatgcaattactgagcaattcatgaacagtctgttcaatgagcataagattgactatataatacacggtgatgatccttgccttctccctgatggatctgatgcttatgccttggcaaagaaagccggccgctacaagcagattaaacgcactgaaggtgtctccagcacggatattgttggaagatactttgttttgtaaggatactgagggtggagatcatactagcacactttgaatg

(The sequence listing continues in the following parts.)

What is claimed is:

1) A recombinant polynucleotide selected from the group consisting of SEQ ID NO: 1 through SEQ ID NO: 58,798.

2) A recombinant polypeptide selected from the group consisting of SEQ ID NO: 58,799 through SEQ ID NO: 117,596.

3) A method of producing a plant having an improved property, wherein said method comprises transforming a plant with a recombinant construct comprising a promoter region functional in a plant cell operably joined to a polynucleotide comprising a coding sequence for a polypeptide associated with said property, and growing said transformed plant, wherein said polypeptide is selected from the group consisting of:
a) a polypeptide useful for improving plant cold tolerance, wherein said polypeptide comprises a sequence identified as such in Table 1;
b) a polypeptide useful for manipulating growth rate in plant cells by modification of the cell cycle pathway, wherein said polypeptide comprises a sequence identified as such in Table 1;
c) a polypeptide useful for improving plant drought tolerance, wherein said polypeptide comprises a sequence identified as such in Table 1;
d) a polypeptide useful for providing increased resistance to plant disease, wherein said polypeptide comprises a sequence identified as such in Table 1;
e) a polypeptide useful for galactomannan production, wherein said polynucleotide comprises a sequence identified as such in Table 1;
f) a polypeptide useful for production of plant growth regulators, wherein said polypeptide comprises a sequence identified as such in Table 1;
g) a polypeptide useful for improving plant heat tolerance, wherein said polypeptide comprises a sequence identified as such in Table 1;
h) a polypeptide useful for improving plant tolerance to herbicides, wherein said polypeptide comprises a sequence identified as such in Table 1;
i) a polypeptide useful for increasing the rate of homologous recombination in plants, wherein said polypeptide comprises a sequence identified as such in Table 1;
j) a polypeptide useful for lignin production, wherein said polypeptide comprises a sequence identified as such in Table 1;
k) a polypeptide useful for improving plant tolerance to extreme osmotic conditions, wherein said polypeptide comprises a sequence identified as such in Table 1;
l) a polypeptide useful for improving plant tolerance to pathogens or pests, wherein said polypeptide comprises a sequence identified as such in Table 1;
m) a polypeptide useful for yield improvement by modification of photosynthesis, wherein said polynucleotide comprises a sequence identified as such in Table 1;
n) a polypeptide useful for modifying seed oil yield and/or content, wherein said polypeptide comprises a sequence identified as such in Table 1;
o) a polypeptide useful for modifying seed protein yield and/or content, wherein said polypeptide comprises a sequence identified as such in Table 1;
p) a polypeptide encoding a plant transcription factor, wherein said polypeptide comprises a sequence identified as such in Table 1;
q) a polypeptide useful for yield improvement by modification of carbohydrate use and/or uptake, wherein said polypeptide comprises a sequence identified as such in Table 1;
r) a polypeptide useful for yield improvement by modification of nitrogen use and/or uptake, wherein said polypeptide comprises a sequence identified as such in Table 1;
s) a polypeptide useful for yield improvement by modification of phosphorus use and/or uptake, wherein said polypeptide comprises a sequence identified as such in Table 1; and
t) a polypeptide useful for yield improvement by providing improved plant growth and development under at least one stress condition, wherein said polypeptide comprises a sequence identified as such in Table 1.
